United States Patent Application Publication US 2007/0214517 A1 - sequence listing, part 21

SEQ ID NO: 25960 - DNA, 1265 bp, Arabidopsis thaliana
  misc_feature (1)..(1265): Ceres Seq. ID no. 12421994
  misc_feature: MA Experiment ID: 108434 Result: Down-regulated in Transcription
  misc_feature: MA Experiment 108434 PARAMETER Experiment Name: At_Root_Tips_cDNA_P Parameter: Tissue Value: Root Tips
  misc_feature: MA Experiment ID: 108577 Result: Down-regulated in Transcription
  misc_feature: MA Experiment 108577 PARAMETER Experiment Name: At_42deg_Heat_cDNA_P Parameter: Temperature (deg C) Value: 42 vs. 22
  misc_feature: MA Experiment 108577 PARAMETER Experiment Name: At_42deg_Heat_cDNA_P Parameter: Timepoint (hr) Value: 6
  misc_feature: MA Experiment 108577 PARAMETER Experiment Name: At_42deg_Heat_cDNA_P Parameter: Tissue Value: Aerial
  misc_feature: MA Experiment ID: 108595 Result: Down-regulated in Transcription
  misc_feature: MA Experiment 108595 PARAMETER Experiment Name: At_Ler-pi_Ovule_cDNA_P Parameter: Plant Line Value: null
  misc_feature: MA Experiment ID: 20000069 Result: Down-regulated in Transcription
  misc_feature: MA Experiment 20000069 PARAMETER Experiment Name: At_100uM_ABA_Mutants_cDNA_P Parameter: Plant Line Value: CS23
  misc_feature: MA Experiment 20000069 PARAMETER Experiment Name: At_100uM_ABA_Mutants_cDNA_P Parameter: Timepoint (hr) Value: 6
  misc_feature: MA Experiment 20000069 PARAMETER Experiment Name: At_100uM_ABA_Mutants_cDNA_P Parameter: Tissue Value: Aerial
  misc_feature: MA Experiment 20000069 PARAMETER Experiment Name: At_100uM_ABA_Mutants_cDNA_P Parameter: Treatment Value: 100uM ABA vs. No Treatment
  misc_feature: MA Experiment ID: 20000070 Result: Down-regulated in Transcription
  misc_feature: MA Experiment 20000070 PARAMETER Experiment Name: At_100uM_ABA_Mutants_cDNA_P Parameter: Plant Line Value: CS24
  misc_feature: MA Experiment 20000070 PARAMETER Experiment Name: At_100uM_ABA_Mutants_cDNA_P Parameter: Timepoint (hr) Value: 6
  misc_feature: MA Experiment 20000070 PARAMETER Experiment Name: At_100uM_ABA_Mutants_cDNA_P Parameter: Tissue Value: Aerial
  misc_feature: MA Experiment 20000070 PARAMETER Experiment Name: At_100uM_ABA_Mutants_cDNA_P Parameter: Treatment Value: 100uM ABA vs. No Treatment
  misc_feature: MA Experiment ID: 20000071 Result: Down-regulated in Transcription
  misc_feature: MA Experiment 20000071 PARAMETER Experiment Name: At_100uM_ABA_Mutants_cDNA_P Parameter: Plant Line Value: CS8104
  misc_feature: MA Experiment 20000071 PARAMETER Experiment Name: At_100uM_ABA_Mutants_cDNA_P Parameter: Timepoint (hr) Value: 6
  misc_feature: MA Experiment 20000071 PARAMETER Experiment Name: At_100uM_ABA_Mutants_cDNA_P Parameter: Tissue Value: Aerial
  misc_feature: MA Experiment 20000071 PARAMETER Experiment Name: At_100uM_ABA_Mutants_cDNA_P Parameter: Treatment Value: 100uM ABA vs. No Treatment
  misc_feature: MA Experiment ID: 20000072 Result: Down-regulated in Transcription
  misc_feature: MA Experiment 20000072 PARAMETER Experiment Name: At_100uM_ABA_Mutants_cDNA_P Parameter: Plant Line Value: CS8105
  misc_feature: MA Experiment 20000072 PARAMETER Experiment Name: At_100uM_ABA_Mutants_cDNA_P Parameter: Timepoint (hr) Value: 6
  misc_feature: MA Experiment 20000072 PARAMETER Experiment Name: At_100uM_ABA_Mutants_cDNA_P Parameter: Tissue Value: Aerial
  misc_feature: MA Experiment 20000072 PARAMETER Experiment Name: At_100uM_ABA_Mutants_cDNA_P Parameter: Treatment Value: 100uM ABA vs. No Treatment
  misc_feature: MA Experiment ID: 20000086 Result: Down-regulated in Transcription
  misc_feature: MA Experiment 20000086 PARAMETER Experiment Name: At_100uM_ABA_Mutants_cDNA_P Parameter: Plant Line Value: CS22
  misc_feature: MA Experiment 20000086 PARAMETER Experiment Name: At_100uM_ABA_Mutants_cDNA_P Parameter: Timepoint (hr) Value: 6
  misc_feature: MA Experiment 20000086 PARAMETER Experiment Name: At_100uM_ABA_Mutants_cDNA_P Parameter: Tissue Value: Aerial
  misc_feature: MA Experiment 20000086 PARAMETER Experiment Name: At_100uM_ABA_Mutants_cDNA_P Parameter: Treatment Value: 100uM ABA vs. No Treatment
  misc_feature: MA Experiment ID: 20000093 Result: Down-regulated in Transcription
  misc_feature: MA Experiment 20000093 PARAMETER Experiment Name: At_42deg_Heat_cDNA_P Parameter: Temperature (deg C) Value: 42 vs. 22
  misc_feature: MA Experiment 20000093 PARAMETER Experiment Name: At_42deg_Heat_cDNA_P Parameter: Timepoint (hr) Value: 0.5
  misc_feature: MA Experiment 20000093 PARAMETER Experiment Name: At_42deg_Heat_cDNA_P Parameter: Tissue Value: Aerial
  misc_feature: MA Experiment ID: 20000111 Result: Down-regulated in Transcription
  misc_feature: MA Experiment 20000111 PARAMETER Experiment Name: At_42deg_Heat_cDNA_P Parameter: Temperature (deg C) Value: 42 vs. 22
  misc_feature: MA Experiment 20000111 PARAMETER Experiment Name: At_42deg_Heat_cDNA_P Parameter: Timepoint (hr) Value: 6
  misc_feature: MA Experiment 20000111 PARAMETER Experiment Name: At_42deg_Heat_cDNA_P Parameter: Tissue Value: Aerial
  misc_feature: MA Experiment ID: 20000117 Result: Down-regulated in Transcription
  misc_feature: MA Experiment 20000117 PARAMETER Experiment Name: At_100uM_ABA_Mutants_cDNA_P Parameter: Plant Line Value: Columbia
  misc_feature: MA Experiment 20000117 PARAMETER Experiment Name: At_100uM_ABA_Mutants_cDNA_P Parameter: Timepoint (hr) Value: 6
  misc_feature: MA Experiment 20000117 PARAMETER Experiment Name: At_100uM_ABA_Mutants_cDNA_P Parameter: Tissue Value: Aerial
  misc_feature: MA Experiment 20000117 PARAMETER Experiment Name: At_100uM_ABA_Mutants_cDNA_P Parameter: Treatment Value: 100uM ABA vs. No Treatment
  misc_feature: MA Experiment ID: 20000144 Result: Down-regulated in Transcription
  misc_feature: MA Experiment 20000144 PARAMETER Experiment Name: At_42deg_Heat_cDNA_P Parameter: Temperature (deg C) Value: 42 vs. 22
  misc_feature: MA Experiment 20000144 PARAMETER Experiment Name: At_42deg_Heat_cDNA_P Parameter: Timepoint (hr) Value: 1
  misc_feature: MA Experiment 20000144 PARAMETER Experiment Name: At_42deg_Heat_cDNA_P Parameter: Tissue Value: Aerial
  misc_feature: MA Experiment ID: 20000166 Result: Down-regulated in Transcription
  misc_feature: MA Experiment 20000166 PARAMETER Experiment Name: At_100uM_ABA_P Parameter: Age (day) Value: 14
  misc_feature: MA Experiment 20000166 PARAMETER Experiment Name: At_100uM_ABA_P Parameter: Organism Value: A. thaliana
  misc_feature: MA Experiment 20000166 PARAMETER Experiment Name: At_100uM_ABA_P Parameter: Plant Line Value: WS
  misc_feature: MA Experiment 20000166 PARAMETER Experiment Name: At_100uM_ABA_P Parameter: Timepoint (hr) Value: 1
  misc_feature: MA Experiment 20000166 PARAMETER Experiment Name: At_100uM_ABA_P Parameter: Tissue Value: Aerial
  misc_feature: MA Experiment 20000166 PARAMETER Experiment Name: At_100uM_ABA_P Parameter: Treatment Value: 100uM ABA vs. No Treatment
  misc_feature: MA Experiment ID: 20000171 Result: Down-regulated in Transcription
  misc_feature: MA Experiment 20000171 PARAMETER Experiment Name: At_42deg_Heat_P Parameter: Age (day) Value: 14
  misc_feature: MA Experiment 20000171 PARAMETER Experiment Name: At_42deg_Heat_P Parameter: Organism Value: A. thaliana
  misc_feature: MA Experiment 20000171 PARAMETER Experiment Name: At_42deg_Heat_P Parameter: Plant Line Value: WS
  misc_feature: MA Experiment 20000171 PARAMETER Experiment Name: At_42deg_Heat_P Parameter: Temperature (deg C) Value: 42 vs. 22
  misc_feature: MA Experiment 20000171 PARAMETER Experiment Name: At_42deg_Heat_P Parameter: Timepoint (hr) Value: 1
  misc_feature: MA Experiment 20000171 PARAMETER Experiment Name: At_42deg_Heat_P Parameter: Tissue Value: Aerial
  misc_feature: MA Experiment ID: 20000173 Result: Down-regulated in Transcription
  misc_feature: MA Experiment 20000173 PARAMETER Experiment Name: At_42deg_Heat_P Parameter: Age (day) Value: 14
  misc_feature: MA Experiment 20000173 PARAMETER Experiment Name: At_42deg_Heat_P Parameter: Organism Value: A. thaliana
  misc_feature: MA Experiment 20000173 PARAMETER Experiment Name: At_42deg_Heat_P Parameter: Plant Line Value: WS
  misc_feature: MA Experiment 20000173 PARAMETER Experiment Name: At_42deg_Heat_P Parameter: Temperature (deg C) Value: 42 vs. 22
  misc_feature: MA Experiment 20000173 PARAMETER Experiment Name: At_42deg_Heat_P Parameter: Timepoint (hr) Value: 6
  misc_feature: MA Experiment 20000173 PARAMETER Experiment Name: At_42deg_Heat_P Parameter: Tissue Value: Aerial
  misc_feature: MA Experiment ID: 20000184 Result: Up-regulated in Transcription
  misc_feature: MA Experiment 20000184 PARAMETER Experiment Name: At_Shoots__P Parameter: Age (day) Value: 7
  misc_feature: MA Experiment 20000184 PARAMETER Experiment Name: At_Shoots__P Parameter: Tissue Value: Shoots vs. Whole Plant
  misc_feature: MA Experiment ID: 20000185 Result: Down-regulated in Transcription
  misc_feature: MA Experiment 20000185 PARAMETER Experiment Name: At_Roots__P Parameter: Age (day) Value: 7 vs. 21
  misc_feature: MA Experiment 20000185 PARAMETER Experiment Name: At_Roots__P Parameter: Organism Value: A. thaliana
  misc_feature: MA Experiment 20000185 PARAMETER Experiment Name: At_Roots__P Parameter: Tissue Value: Roots vs. Whole Plant
  misc_feature: MA Experiment ID: 20000234 Result: Up-regulated in Transcription
  misc_feature: MA Experiment 20000234 PARAMETER Experiment Name: At_Siliques_P Parameter: Age (day) Value: 21
  misc_feature: MA Experiment 20000234 PARAMETER Experiment Name: At_Siliques_P Parameter: Organism Value: A. thaliana
  misc_feature: MA Experiment 20000234 PARAMETER Experiment Name: At_Siliques_P Parameter: Plant Line Value: WS
  misc_feature: MA Experiment 20000234 PARAMETER Experiment Name: At_Siliques_P Parameter: Tissue Value: Less Than 5mm Siliques vs. Whole Plant
  misc_feature: MA Experiment ID: 20000265 Result: Up-regulated in Transcription
  misc_feature: MA Experiment 20000265 PARAMETER Experiment Name: At_Open_Flower_P Parameter: Age (day) Value: 21
  misc_feature: MA Experiment 20000265 PARAMETER Experiment Name: At_Open_Flower_P Parameter: Plant Line Value: WS
  misc_feature: MA Experiment 20000265 PARAMETER Experiment Name: At_Open_Flower_P Parameter: Tissue Value: Closed Flower vs. Whole Plant
  misc_feature: MA Experiment ID: 20000437 Result: Down-regulated in Transcription
  misc_feature: MA Experiment 20000437 PARAMETER Experiment Name: At_Drought_P Parameter: Age (day) Value: 8
  misc_feature: MA Experiment 20000437 PARAMETER Experiment Name: At_Drought_P Parameter: Organism Value: A. thaliana
  misc_feature: MA Experiment 20000437 PARAMETER Experiment Name: At_Drought_P Parameter: Plant Line Value: WS
  misc_feature: MA Experiment 20000437 PARAMETER Experiment Name: At_Drought_P Parameter: Timepoint (hr) Value: 24
  misc_feature: MA Experiment 20000437 PARAMETER Experiment Name: At_Drought_P Parameter: Tissue Value: Whole Plant
  misc_feature: MA Experiment 20000437 PARAMETER Experiment Name: At_Drought_P Parameter: Treatment Value: Drought vs. No Drought
  misc_feature: MA Experiment ID: 20000438 Result: Up-regulated in Transcription
  misc_feature: MA Experiment 20000438 PARAMETER Experiment Name: At_Shoots__P Parameter: Age (day) Value: 14
  misc_feature: MA Experiment 20000438 PARAMETER Experiment Name: At_Shoots__P Parameter: Tissue Value: Shoots vs. Whole Plant
  misc_feature: MA Experiment ID: 20000439 Result: Down-regulated in Transcription
  misc_feature: MA Experiment 20000439 PARAMETER Experiment Name: At_Roots__P Parameter: Age (day) Value: 14 vs. 21
  misc_feature: MA Experiment 20000439 PARAMETER Experiment Name: At_Roots__P Parameter: Organism Value: A. thaliana
  misc_feature: MA Experiment 20000439 PARAMETER Experiment Name: At_Roots__P Parameter: Tissue Value: Roots vs. Whole Plant
  misc_feature: MA Experiment ID: 20000452 Result: Down-regulated in Transcription
  misc_feature: MA Experiment 20000452 PARAMETER Experiment Name: At_CS6879_Shoots-Roots_P Parameter: Age (day) Value: 14
  misc_feature: MA Experiment 20000452 PARAMETER Experiment Name: At_CS6879_Shoots-Roots_P Parameter: Organism Value: A. thaliana
  misc_feature: MA Experiment 20000452 PARAMETER Experiment Name: At_CS6879_Shoots-Roots_P Parameter: Plant Line Value: CS6879 vs. WS
  misc_feature: MA Experiment 20000452 PARAMETER Experiment Name: At_CS6879_Shoots-Roots_P Parameter: Tissue Value: Shoots
  misc_feature: MA Experiment ID: 20001248 Result: Down-regulated in Transcription
  misc_feature: MA Experiment 20001248 PARAMETER Experiment Name: At_Far-red-induction_P Parameter: Age (day) Value: 7
  misc_feature: MA Experiment 20001248 PARAMETER Experiment Name: At_Far-red-induction_P Parameter: Light Value: Far-red vs. White
  misc_feature: MA Experiment 20001248 PARAMETER Experiment Name: At_Far-red-induction_P Parameter: Organism Value: A. thaliana
  misc_feature: MA Experiment 20001248 PARAMETER Experiment Name: At_Far-red-induction_P Parameter: Plant Line Value: Columbia
  misc_feature: MA Experiment 20001248 PARAMETER Experiment Name: At_Far-red-induction_P Parameter: Timepoint (hr) Value: 4
  misc_feature: MA Experiment 20001248 PARAMETER Experiment Name: At_Far-red-induction_P Parameter: Tissue Value: Whole Plant
  misc_feature: MA Experiment ID: 20001557 Result: Up-regulated in Transcription
  misc_feature: MA Experiment 20001557 PARAMETER Experiment Name: At_Drought_Soil_Dry_P Parameter: Age (day) Value: 27
  misc_feature: MA Experiment 20001557 PARAMETER Experiment Name: At_Drought_Soil_Dry_P Parameter: Organism Value: A. thaliana
  misc_feature: MA Experiment 20001557 PARAMETER Experiment Name: At_Drought_Soil_Dry_P Parameter: Plant Line Value: WS
  misc_feature: MA Experiment 20001557 PARAMETER Experiment Name: At_Drought_Soil_Dry_P Parameter: Post Timepoint (hr) Value: 3
  misc_feature: MA Experiment 20001557 PARAMETER Experiment Name: At_Drought_Soil_Dry_P Parameter: Post-Treatment Value: Re-Water vs. No Drought
  misc_feature: MA Experiment 20001557 PARAMETER Experiment Name: At_Drought_Soil_Dry_P Parameter: Timepoint (day) Value: 13
  misc_feature: MA Experiment 20001557 PARAMETER Experiment Name: At_Drought_Soil_Dry_P Parameter: Treatment Value: Drought vs. No Drought
  misc_feature: MA Experiment ID: 20001558 Result: Up-regulated in Transcription
  misc_feature: MA Experiment 20001558 PARAMETER Experiment Name: At_Drought_Soil_Dry_P Parameter: Age (day) Value: 27
  misc_feature: MA Experiment 20001558 PARAMETER Experiment Name: At_Drought_Soil_Dry_P Parameter: Organism Value: A. thaliana
  misc_feature: MA Experiment 20001558 PARAMETER Experiment Name: At_Drought_Soil_Dry_P Parameter: Plant Line Value: WS
  misc_feature: MA Experiment 20001558 PARAMETER Experiment Name: At_Drought_Soil_Dry_P Parameter: Post Timepoint (hr) Value: 6
  misc_feature: MA Experiment 20001558 PARAMETER Experiment Name: At_Drought_Soil_Dry_P Parameter: Post-Treatment Value: Re-Water vs. No Drought
  misc_feature: MA Experiment 20001558 PARAMETER Experiment Name: At_Drought_Soil_Dry_P Parameter: Timepoint (day) Value: 13
  misc_feature: MA Experiment 20001558 PARAMETER Experiment Name: At_Drought_Soil_Dry_P Parameter: Treatment Value: Drought vs. No Drought
  misc_feature: MA Experiment ID: 20001757 Result: Up-regulated in Transcription
  misc_feature: MA Experiment 20001757 PARAMETER Experiment Name: At_50mM_NH4NO3_L-to-H_P Parameter: Timepoint (hr) Value: 6
  misc_feature: MA Experiment 20001757 PARAMETER Experiment Name: At_50mM_NH4NO3_L-to-H_P Parameter: Tissue Value: Leaf
  misc_feature: MA Experiment 20001757 PARAMETER Experiment Name: At_50mM_NH4NO3_L-to-H_P Parameter: Treatment Value: 50mM NH4NO3 vs 100mM Mannitol
accttatctttacttctatcatctattcttcttcttcctccatctctagaaaattataatacttcttgtttcttaaatcttatttgtattacaataaccaaaacccaagtttacaaaacatttcttcttcttgtttttcgaaaccctaaatgttttgagttgtcatggatgtaatagctactacaactactatagtatccgacttggattcacgacaacccgaaatcgaagctccgatccggatccagcccgcgaagcctatttctttctcaaacggcaaacgctgccaccaccatcatcttgcatctgaagcggttgcggttgcgacttataaagaatgtctaaagaatcacgcagcaggtatcggcggtcacgctttagacggatgcggcgagtttatgccgtcaccgtcgtttaactccaatgaccccgcttcactaacgtgcgctgcttgtggttgccaccgtaacttccaccgccgtgaggaggatccatcttctctctctgccatcgtccctgcgatcgaatttcgacctcacaaccgtcaccagcttcctccaccgcctcctcctcatctggcggggattcgtagtccagacgacgatgattcagcttctccaccgccgatctcgtcttcttacatgcttctcgcactctctggaggaagaggaggagctaacacggcggttccaatgtctaggaaacgttttaggacgaagtttagtcagtatcagaaggagaagatgttcgagttctcggagagagttgggtggaggatgccgaaagctgatgacgtggtggttaaggagttttgtcgggagattggagttgataaaagcgttttcaaagtgtggatgcataacaacaagatttcaggacgcagcggcgctagaagagctaacggcggagtagtagtaggaggagtaggagatagtcgtcagagtgttgttccgacaaatgggtcgttttcttcgacgtgaggaaaagaatggaaagcgttgaaaaagcgtcgtcgttttagaggctaattcttttttggtttttcttctctgtgttttgaagattttttatttttagtcaacgggtcaaaatcttttttctattccactttgttttgttatgtcttgtagtttgtactcttgttagtagtttatctttgttagagaggtgatttgagttgtatctttcgaccaaatgtgagaagaaagataaatgagtaacctcctaaaaccgaataacaaagtcaattaatccaattgttttct

SEQ ID NO: 25961 - protein, 271 aa, Arabidopsis thaliana
  peptide (1)..(271): Ceres Seq. ID no. 12421995
  misc_feature (51)..(112): Pfam Name: ZF-HD protein dimerisation region Pfam Description: ZF-HD protein dimerisation region
  misc_feature (37)..(265): Homolog of NCBI NO: 15226993 NR Description: hypothetical protein
  misc_feature (56)..(237): Homolog of NCBI NO: 15233925 NR Description: putative protein
  misc_feature (56)..(244): Homolog of NCBI NO: 15222382 NR Description: hypothetical protein; protein id: At1g69600.1
  misc_feature (6)..(167): Homolog of NCBI NO: 13277220 NR Description: ZF-HD homeobox protein [Flaveria bidentis]
  misc_feature (37)..(235): Homolog of NCBI NO: 13277218 NR Description: ZF-HD homeobox protein [Flaveria bidentis]
  misc_feature (14)..(235): Homolog of NCBI NO: 13277216 NR Description: ZF-HD homeobox protein [Flaveria trinervia]
  misc_feature (16)..(182): Homolog of NCBI NO: 15228530 NR Description: unknown protein
  misc_feature (1)..(182): Homolog of NCBI NO: 21592512 NR Description: unknown [Arabidopsis thaliana]
  misc_feature (1)..(182): Homolog of NCBI NO: 18421904 NR Description: putative protein
  misc_feature (1)..(271): Homolog of NCBI NO: 15242243 NR Description: putative protein; protein id: At5g15210.1
MDVIATTTTIVSDLDSRQPEIEAPIRIQPAKPISFSNGKRCHHHHLASEAVAVATYKECLKNHAAGIGGHALDGCGEFMPSPSFNSNDPASLTCAACGCHRNFHRREEDPSSLSAIVPAIEFRPHNRHQLPPPPPPHLAGIRSPDDDDSASPPPISSSYMLLALSGGRGGANTAVPMSRKRFRTKFSQYQKEKMFEFSERVGWRMPKADDVVVKEFCREIGVDKSVFKVWMHNNKISGRSGARRANGGVVVGGVGDSRQSVVPTNGSFSST

SEQ ID NO: 25962 - protein, 193 aa, Arabidopsis thaliana
  peptide (1)..(193): Ceres Seq. ID no. 12421996
  misc_feature (1)..(193): Homolog of NCBI NO: 15242243 NR Description: putative protein; protein id: At5g15210.1
  misc_feature (1)..(187): Homolog of NCBI NO: 15226993 NR Description: hypothetical protein
  misc_feature (1)..(159): Homolog of NCBI NO: 15233925 NR Description: putative protein
  misc_feature (1)..(166): Homolog of NCBI NO: 15222382 NR Description: hypothetical protein; protein id: At1g69600.1
  misc_feature (1)..(89): Homolog of NCBI NO: 13277220 NR Description: ZF-HD homeobox protein [Flaveria bidentis]
  misc_feature (1)..(157): Homolog of NCBI NO: 13277218 NR Description: ZF-HD homeobox protein [Flaveria bidentis]
  misc_feature (1)..(157): Homolog of NCBI NO: 13277216 NR Description: ZF-HD homeobox protein [Flaveria trinervia]
  misc_feature (1)..(104): Homolog of NCBI NO: 15228530 NR Description: unknown protein
  misc_feature (1)..(104): Homolog of NCBI NO: 21592512 NR Description: unknown [Arabidopsis thaliana]
  misc_feature (1)..(104): Homolog of NCBI NO: 18421904 NR Description: putative protein
MPSPSFNSNDPASLTCAACGCHRNFHRREEDPSSLSAIVPAIEFRPHNRHQLPPPPPPHLAGIRSPDDDDSASPPPISSSYMLLALSGGRGGANTAVPMSRKRFRTKFSQYQKEKMFEFSERVGWRMPKADDVVVKEFCREIGVDKSVFKVWMHNNKISGRSGARRANGGVVVGGVGDSRQSVVPTNGSFSST

SEQ ID NO: 25963 - DNA, 970 bp, Arabidopsis thaliana
  misc_feature (1)..(970): Ceres Seq. ID no. 12332453
  misc_feature: MA Experiment ID: 108463 Result: Down-regulated in Transcription
  misc_feature: MA Experiment 108463 PARAMETER Experiment Name: At_Germinating_Seeds_cDNA_P Parameter: Age (day) Value: 3 vs. 0
  misc_feature: MA Experiment 108463 PARAMETER Experiment Name: At_Germinating_Seeds_cDNA_P Parameter: Tissue Value: Germinating Seeds
  misc_feature: MA Experiment ID: 20000794 Result: Down-regulated in Transcription
  misc_feature: MA Experiment 20000794 PARAMETER Experiment Name: At_Petals_P Parameter: Age (day) Value: 23-25 days
  misc_feature: MA Experiment 20000794 PARAMETER Experiment Name: At_Petals_P Parameter: Plant Line Value: WS
  misc_feature: MA Experiment 20000794 PARAMETER Experiment Name: At_Petals_P Parameter: Tissue Value: Petals vs. Whole plant
  misc_feature: MA Experiment ID: 20001248 Result: Up-regulated in Transcription
  misc_feature: MA Experiment 20001248 PARAMETER Experiment Name: At_Far-red-induction_P Parameter: Age (day) Value: 7
  misc_feature: MA Experiment 20001248 PARAMETER Experiment Name: At_Far-red-induction_P Parameter: Light Value: Far-red vs. White
  misc_feature: MA Experiment 20001248 PARAMETER Experiment Name: At_Far-red-induction_P Parameter: Organism Value: A. thaliana
  misc_feature: MA Experiment 20001248 PARAMETER Experiment Name: At_Far-red-induction_P Parameter: Plant Line Value: Columbia
  misc_feature: MA Experiment 20001248 PARAMETER Experiment Name: At_Far-red-induction_P Parameter: Timepoint (hr) Value: 4
  misc_feature: MA Experiment 20001248 PARAMETER Experiment Name: At_Far-red-induction_P Parameter: Tissue Value: Whole Plant
aaaacattttgatattctcttcgaccagatcaatttttcggttagggttcttcgccgaaccattggctactttgctagatctctgaaggtgtaaaagagctatggagaatgggaaaagagacagacaagacatggaagtgaataccacaccgaggaagcctcgtgtactactcgctgcaagtggaagcgtcgctgctatcaaattcggcaatctctgccattgcttcaccgaatgggcagaagtcagagccgtcgttacgaaatcatctctacatttcctcgataaactctctctcccacaagaagtgactctgtatactgatgaagatgaatggtctagctggaacaagatcggtgatcctgtccttcacatcgagcttagacgttgggctgatgttttagtcattgctcctttgtctgctaacaccttaggcaagattgctggtgggctttgtgataatcttctgacttgcattatacgagcttgggactataccaaaccactgtttgttgctccagctatgaatactttgatgtggaacaatcctttcactgaaaggcatcttttgtctcttgatgaactgggaatcacacttattcctcctatcaagaagagacttgcctgtggagactacggtaatggagctatggctgagccctctcttatctattccactgtcagactcttctgggagtctcaggctcatcagcaaaccggtggaactagttaaaaccatgatttccacaacatgcattttgtggaaaatcatctgttttcactatcttagataatagtagattttatcagtctgtttgcttttcttgtacatctcaaaatagctgtctggattgatgtatctggaggaccatttgcactactagctccactctgtttctgtagaaatgtctatgtttcttttcctcgctcttaaatgttgtcttcaattctgctaatagctcactgaacttt

SEQ ID NO: 25964 - protein, 209 aa, Arabidopsis thaliana
  peptide (1)..(209): Ceres Seq. ID no. 12332454
  misc_feature (20)..(140): Pfam Name: Flavoprotein Pfam Description: Flavoprotein
  misc_feature (13)..(194): Homolog of NCBI NO: 34863489 NR Description: similar to RIKEN cDNA 8430432M10 [Rattus
  misc_feature (13)..(194): Homolog of NCBI NO: 28849879 NR Description: RIKEN cDNA 8430432M10 [Mus musculus]
  misc_feature (83)..(194): Homolog of NCBI NO: 12583571 NR Description: putative halotolerance protein HAL3 homolog
  misc_feature (2)..(199): Homolog of NCBI NO: 37590890 NR Description: Unknown (protein for MGC:73297) [Danio rerio]
  misc_feature (21)..(194): Homolog of NCBI NO: 40556079 NR Description: CNPV141 HAL3-like domain protein [Canarypox
  misc_feature (21)..(194): Homolog of NCBI NO: 9634784 NR Description: ORF FPV114 HAL3 domain [Fowlpox virus]
  misc_feature (10)..(209): Homolog of NCBI NO: 13124308 NR Description: Halotolerance protein Hal3b
  misc_feature (1)..(209): Homolog of NCBI NO: 8778701 NR Description: T1N15.24 [Arabidopsis thaliana]
  misc_feature (1)..(209): Homolog of NCBI NO: 28948673 NR Description: Chain A, Ppc Decarboxylase Mutant C175s
  misc_feature (1)..(209): Homolog of NCBI NO: 15229569 NR Description: HAL3A protein; protein id: At3g18030.1
MENGKRDRQDMEVNTTPRKPRVLLAASGSVAAIKFGNLCHCFTEWAEVRAVVTKSSLHFLDKLSLPQEVTLYTDEDEWSSWNKIGDPVLHIELRRWADVLVIAPLSANTLGKIAGGLCDNLLTCIIRAWDYTKPLFVAPAMNTLMWNNPFTERHLLSLDELGITLIPPIKKRLACGDYGNGAMAEPSLIYSTVRLFWESQAHQQTGGTS

SEQ ID NO: 25965 - protein, 199 aa, Arabidopsis thaliana
  peptide (1)..(199): Ceres Seq. ID no. 12332455
  misc_feature (10)..(130): Pfam Name: Flavoprotein Pfam Description: Flavoprotein
  misc_feature (3)..(184): Homolog of NCBI NO: 34863489 NR Description: similar to RIKEN cDNA 8430432M10 [Rattus
  misc_feature (3)..(184): Homolog of NCBI NO: 28849879 NR Description: RIKEN cDNA 8430432M10 [Mus musculus]
  misc_feature (73)..(184): Homolog of NCBI NO: 12583571 NR Description: putative halotolerance protein HAL3 homolog
  misc_feature (1)..(189): Homolog of NCBI NO: 37590890 NR Description: Unknown (protein for MGC:73297) [Danio rerio]
  misc_feature (11)..(184): Homolog of NCBI NO: 40556079 NR Description: CNPV141 HAL3-like domain protein [Canarypox
  misc_feature (11)..(184): Homolog of NCBI NO: 9634784 NR Description: ORF FPV114 HAL3 domain [Fowlpox virus]
  misc_feature (1)..(199): Homolog of NCBI NO: 13124308 NR Description: Halotolerance protein Hal3b
  misc_feature (1)..(199): Homolog of NCBI NO: 8778701 NR Description: T1N15.24 [Arabidopsis thaliana]
  misc_feature (1)..(199): Homolog of NCBI NO: 28948673 NR Description: Chain A, Ppc Decarboxylase Mutant C175s
  misc_feature (1)..(199): Homolog of NCBI NO: 15229569 NR Description: HAL3A protein; protein id: At3g18030.1
MEVNTTPRKPRVLLAASGSVAAIKFGNLCHCFTEWAEVRAVVTKSSLHFLDKLSLPQEVTLYTDEDEWSSWNKIGDPVLHIELRRWADVLVIAPLSANTLGKIAGGLCDNLLTCIIRAWDYTKPLFVAPAMNTLMWNNPFTERHLLSLDELGITLIPPIKKRLACGDYGNGAMAEPSLIYSTVRLFWESQAHQQTGGTS

SEQ ID NO: 25966 - DNA, 1684 bp, Arabidopsis thaliana
  misc_feature (1)..(1684): Ceres Seq. ID no. 12325998
  misc_feature: MA Experiment ID: 108474 Result: Down-regulated in Transcription
  misc_feature: MA Experiment 108474 PARAMETER Experiment Name: At_Drought_Flowers_cDNA_P Parameter: Timepoint (hr) Value: null
  misc_feature: MA Experiment 108474 PARAMETER Experiment Name: At_Drought_Flowers_cDNA_P Parameter: Treatment Value: Drought vs. No Drought
  misc_feature: MA Experiment ID: 20000264 Result: Up-regulated in Transcription
  misc_feature: MA Experiment 20000264 PARAMETER Experiment Name: At_Open_Flower_P Parameter: Age (day) Value: 21
  misc_feature: MA Experiment 20000264 PARAMETER Experiment Name: At_Open_Flower_P Parameter: Plant Line Value: WS
  misc_feature: MA Experiment 20000264 PARAMETER Experiment Name: At_Open_Flower_P Parameter: Tissue Value: Open Flower vs. Whole Plant
  misc_feature: MA Experiment ID: 20000265 Result: Up-regulated in Transcription
  misc_feature: MA Experiment 20000265 PARAMETER Experiment Name: At_Open_Flower_P Parameter: Age (day) Value: 21
  misc_feature: MA Experiment 20000265 PARAMETER Experiment Name: At_Open_Flower_P Parameter: Plant Line Value: WS
  misc_feature: MA Experiment 20000265 PARAMETER Experiment Name: At_Open_Flower_P Parameter: Tissue Value: Closed Flower vs. Whole Plant
  misc_feature: MA Experiment ID: 20000286 Result: Up-regulated in Transcription
  misc_feature: MA Experiment 20000286 PARAMETER Experiment Name: At_Open_Flower_P Parameter: Age (day) Value: 21
  misc_feature: MA Experiment 20000286 PARAMETER Experiment Name: At_Open_Flower_P Parameter: Plant Line Value: WS
  misc_feature: MA Experiment 20000286 PARAMETER Experiment Name: At_Open_Flower_P Parameter: Tissue Value: Half Open vs. Whole Plant
  misc_feature: MA Experiment ID: 20000441 Result: Down-regulated in Transcription
  misc_feature: MA Experiment 20000441 PARAMETER Experiment Name: At_1uM_BR-BRZ__P Parameter: Tissue Value: Shoot Apices
  misc_feature: MA Experiment 20000441 PARAMETER Experiment Name: At_1uM_BR-BRZ__P Parameter: Treatment Value: 1uM BR vs. No Treatment
  misc_feature: MA Experiment ID: 20001911 Result: Down-regulated in Transcription
  misc_feature: MA Experiment 20001911 PARAMETER Experiment Name: At_Drought_Reproduction_P Parameter: Age (day) Value: 40
  misc_feature: MA Experiment 20001911 PARAMETER Experiment Name: At_Drought_Reproduction_P Parameter: Organism Value: A. thaliana
  misc_feature: MA Experiment 20001911 PARAMETER Experiment Name: At_Drought_Reproduction_P Parameter: Plant Line Value: WS
  misc_feature: MA Experiment 20001911 PARAMETER Experiment Name: At_Drought_Reproduction_P Parameter: Timepoint (day) Value: 10
  misc_feature: MA Experiment 20001911 PARAMETER Experiment Name: At_Drought_Reproduction_P Parameter: Tissue Value: Flowers
  misc_feature: MA Experiment 20001911 PARAMETER Experiment Name: At_Drought_Reproduction_P Parameter: Treatment Value: Drought vs. No Drought
atctcaataaacaaacactaacaatggtggtcgaagaagattcacgtctcataaatctccaacacaagtacaacccgacaatgcccgaggtggtggaggagctgaagagaatttgggacataagttttccggtggccgccatgagcatattaaactacctaaagaacatgacatccgtcgtgtgtatgggacgactcggtagccttgagctcgcaggaggagccttagccatcggtttcaccaacatcacaggttactccgtcctctctggtttagccaccggtatggaaccattatgtggtcaagccatcggttctaaaaacccttctctcgcttccttaaccctcaagcgaaccatcttcctccttctcttagcttctcttcccatatcactcctctggctaaacctcgcgcctctaatgctgatgctccgccaacaacatgatatcactcgtgtcgcatctctctattgttccttctctttgcctgatcttctcgctaatagtttccttcatcctttacgtatttacttacgttgtaaaggcaccacttggcctttgatgtggtgcacgttagtctccgtccttcttcatcttcccattactgctttcttcacgttttacatctctctcggagttcccggagtcgccgtctcttcttttcttaccaacttcatctctttgtcgcttctcctttgctacatctacttggaaaacaacaacaacgacaaaaccacttccaagtctctttgtcttgatacgccgttgatgctgtatggttcgagagactccggtgaaaatgatgtgtggtcaacgctggttaaattcgctgttccaagctgtatagcggtttgcttggagtggtggtggtacgagttcatgacggtcctcgctggatatctccccgagccgaaggtggcgctagcagcagccgccatcgtgatacaaacaacctcattgatgtatacaatcccaacggccctctcggccgcggtatccacgagggtaagcaacgagttaggagcaggacggccagagaaagcaaaaacagcggcgactgtggctgtcggagccgccgtggcagtgtcagtgtttggacttgtggggaccaccgtggggagagaagcttggggaaaagttttcaccgccgacaaagttgtcctcgagctgacggcggcggttcttccggtgattggagcttgtgagcttgccaactgtcctcagaccattagctgttgaatcttacgtggcagtgcgaggccaggtataggggccaagattaatttctacgccttctatgtagttggagcaccagtggcggttgttttagcgtttgtgtggggtttaggcttcatgggcctatgctatggcttgcttgggcacagctagcttgtgcaatctccattttgaccgttgtttataacacagattggaacaaagagtccttgaaggctcatgacttggtgggcaagaacgtcatttcacctaatgtcgatcaaattattgtcaaatgcgaagaaggcctacactaacagtttttccttctcttttctttttgttcttcatatatactatctccatttatgtctcaatgatttgcttttgttttaaaacttatacatttatgtaagtgtcttcattggacaaggacagaatgtaaaactttatgaaacacaaaactgttg

SEQ ID NO: 25967 - protein, 411 aa, Arabidopsis thaliana
  peptide (1)..(411): Ceres Seq. ID no. 12325999
  misc_feature (31)..(411): Homolog of NCBI NO: 39104576 NR Description: putative integral membrane protein [Arabidopsis
  misc_feature (31)..(411): Homolog of NCBI NO: 15242265 NR Description: integral membrane protein-like; protein id:
  misc_feature (33)..(411): Homolog of NCBI NO: 38567909 NR Description: OSJNBa0088I22.5 [Oryza sativa (japonica
  misc_feature (24)..(411): Homolog of NCBI NO: 15235905 NR Description: putative protein; protein id: At4g23030.1
  misc_feature (18)..(411): Homolog of NCBI NO: 18406257 NR Description: expressed protein
  misc_feature (25)..(411): Homolog of NCBI NO: 15241158 NR Description: putative protein; protein id: At5g19700.1
  misc_feature (28)..(411): Homolog of NCBI NO: 28376699 NR Description: putative MATE efflux membrane protein
  misc_feature (18)..(411): Homolog of NCBI NO: 15233459 NR Description: putative protein; protein id: At4g29140.1
  misc_feature (21)..(411): Homolog of NCBI NO: 15217599 NR Description: hypothetical protein; protein id: At1g71870.1
  misc_feature (8)..(411): Homolog of NCBI NO: 15239797 NR Description: putative protein; protein id: At5g49130.1
LNKQTLTMVVEEDSRLINLQHKYNPTMPEVVEELKRIWDISFPVAAMSILNYLKNMTSVVCMGRLGSLELAGGALAIGFTNITGYSVLSGLATGMEPLCGQAIGSKNPSLASLTLKRTIFLLLLASLPISLLWLNLAPLMLMLRQQHDITRVASLYCSFSLPDLLANSFLHPLRIYLRCKGTTWPLMWCTLVSVLLHLPITAFFTFYISLGVPGVAVSSFLTNFISLSLLLCYIYLENNNNDKTTSKSLCLDTPLMLYGSRDSGENDVWSTLVKFAVPSCIAVCLEWWWYEFMTVLAGYLPEPKVALAAAAIVIQTTSLMYTIPTALSAAVSTRVSNELGAGRPEKAKTAATVAVGAAVAVSVFGLVGTTVGREAWGKVFTADKVVLELTAAVLPVIGACELANCPQTISC

SEQ ID NO: 25968 - protein, 404 aa, Arabidopsis thaliana
  peptide (1)..(404): Ceres Seq. ID no. 12326000
  misc_feature (24)..(404): Homolog of NCBI NO: 39104576 NR Description: putative integral membrane protein [Arabidopsis
  misc_feature (24)..(404): Homolog of NCBI NO: 15242265 NR Description: integral membrane protein-like; protein id:
  misc_feature (26)..(404): Homolog of NCBI NO: 38567909 NR Description: OSJNBa0088I22.5 [Oryza sativa (japonica
  misc_feature (17)..(404): Homolog of NCBI NO: 15235905 NR Description: putative protein; protein id: At4g23030.1
  misc_feature (11)..(404): Homolog of NCBI NO: 18406257 NR Description: expressed protein
  misc_feature (18)..(404): Homolog of NCBI NO: 15241158 NR Description: putative protein; protein id: At5g19700.1
  misc_feature (21)..(404): Homolog of NCBI NO: 28376699 NR Description: putative MATE efflux membrane protein
  misc_feature (11)..(404): Homolog of NCBI NO: 15233459 NR Description: putative protein; protein id: At4g29140.1
  misc_feature (14)..(404): Homolog of NCBI NO: 15217599 NR Description: hypothetical protein; protein id: At1g71870.1
  misc_feature (1)..(404): Homolog of NCBI NO: 15239797 NR Description: putative protein; protein id: At5g49130.1
MVVEEDSRLINLQHKYNPTMPEVVEELKRIWDISFPVAAMSILNYLKNMTSVVCMGRLGSLELAGGALAIGFTNITGYSVLSGLATGMEPLCGQAIGSKNPSLASLTLKRTIFLLLLASLPISLLWLNLAPLMLMLRQQHDITRVASLYCSFSLPDLLANSFLHPLRIYLRCKGTTWPLMWCTLVSVLLHLPITAFFTFYISLGVPGVAVSSFLTNFISLSLLLCYIYLENNNNDKTTSKSLCLDTPLMLYGSRDSGENDVWSTLVKFAVPSCIAVCLEWWWYEFMTVLAGYLPEPKVALAAAAIVIQTTSLMYTIPTALSAAVSTRVSNELGAGRPEKAKTAATVAVGAAVAVSVFGLVGTTVGREAWGKVFTADKVVLELTAAVLPVIGACELANCPQTISC

SEQ ID NO: 25969 - protein, 385 aa, Arabidopsis thaliana
  peptide (1)..(385): Ceres Seq. ID no. 12326001
  misc_feature (5)..(385): Homolog of NCBI NO: 39104576 NR Description: putative integral membrane protein [Arabidopsis
  misc_feature (5)..(385): Homolog of NCBI NO: 15242265 NR Description: integral membrane protein-like; protein id:
  misc_feature (7)..(385): Homolog of NCBI NO: 38567909 NR Description: OSJNBa0088I22.5 [Oryza sativa (japonica
  misc_feature (1)..(385): Homolog of NCBI NO: 15235905 NR Description: putative protein; protein id: At4g23030.1
  misc_feature (1)..(385): Homolog of NCBI NO: 18406257 NR Description: expressed protein
  misc_feature (1)..(385): Homolog of NCBI NO: 15241158 NR Description: putative protein; protein id: At5g19700.1
  misc_feature (2)..(385): Homolog of NCBI NO: 28376699 NR Description: putative MATE efflux membrane protein
  misc_feature (1)..(385): Homolog of NCBI NO: 15233459 NR Description: putative protein; protein id: At4g29140.1
  misc_feature (1)..(385): Homolog of NCBI NO: 15217599 NR Description: hypothetical protein; protein id: At1g71870.1
  misc_feature (1)..(385): Homolog of NCBI NO: 15239797 NR Description: putative protein; protein id: At5g49130.1
MPEVVEELKRIWDISFPVAAMSILNYLKNMTSVVCMGRLGSLELAGGALAIGFTNITGYSVLSGLATGMEPLCGQAIGSKNPSLASLTLKRTIFLLLLASLPISLLWLNLAPLMLMLRQQHDITRVASLYCSFSLPDLLANSFLHPLRIYLRCKGTTWPLMWCTLVSVLLHLPITAFFTFYISLGVPGVAVSSFLTNFISLSLLLCYIYLENNNNDKTTSKSLCLDTPLMLYGSRDSGENDVWSTLVKFAVPSCIAVCLEWWWYEFMTVLAGYLPEPKVALAAAAIVIQTTSLMYTIPTALSAAVSTRVSNELGAGRPEKAKTAATVAVGAAVAVSVFGLVGTTVGREAWGKVFTADKVVLELTAAVLPVIGACELANCPQTISC

SEQ ID NO: 25970 - DNA, 1683 bp, Arabidopsis thaliana
  misc_feature (1)..(1683): Ceres Seq. ID no. 13576655
  misc_feature: MA Experiment ID: 20000179 Result: Up-regulated in Transcription
  misc_feature: MA Experiment 20000179 PARAMETER Experiment Name: At_Germinating_Seeds_P Parameter: Age (hr) Value: 6 vs. 0
  misc_feature: MA Experiment 20000179 PARAMETER Experiment Name: At_Germinating_Seeds_P Parameter: Tissue Value: Germinating Seeds
  misc_feature: MA Experiment ID: 20000180 Result: Up-regulated in Transcription
  misc_feature: MA Experiment 20000180 PARAMETER Experiment Name: At_Germinating_Seeds_P Parameter: Age (hr) Value: 24 vs. 0
  misc_feature: MA Experiment 20000180 PARAMETER Experiment Name: At_Germinating_Seeds_P Parameter: Tissue Value: Germinating Seeds
  misc_feature: MA Experiment ID: 20000184 Result: Down-regulated in Transcription
  misc_feature: MA Experiment 20000184 PARAMETER Experiment Name: At_Shoots__P Parameter: Age (day) Value: 7
  misc_feature: MA Experiment 20000184 PARAMETER Experiment Name: At_Shoots__P Parameter: Tissue Value: Shoots vs. Whole Plant
  misc_feature: MA Experiment ID: 20001451 Result: Down-regulated in Transcription
  misc_feature: MA Experiment 20001451 PARAMETER Experiment Name: At_Far-red-induction_P Parameter: Age (day) Value: 7
  misc_feature: MA Experiment 20001451 PARAMETER Experiment Name: At_Far-red-induction_P Parameter: Light Value: Far-red vs. White
  misc_feature: MA Experiment 20001451 PARAMETER Experiment Name: At_Far-red-induction_P Parameter: Organism Value: A. thaliana
  misc_feature: MA Experiment 20001451 PARAMETER Experiment Name: At_Far-red-induction_P Parameter: Plant Line Value: Columbia
  misc_feature: MA Experiment 20001451 PARAMETER Experiment Name: At_Far-red-induction_P Parameter: Timepoint (hr) Value: 24
  misc_feature: MA Experiment 20001451 PARAMETER Experiment Name: At_Far-red-induction_P Parameter: Tissue Value: Whole Plant
  misc_feature: MA Experiment ID: 20001911 Result: Down-regulated in Transcription
  misc_feature: MA Experiment 20001911 PARAMETER Experiment Name: At_Drought_Reproduction_P Parameter: Age (day) Value: 40
  misc_feature: MA Experiment 20001911 PARAMETER Experiment Name: At_Drought_Reproduction_P Parameter: Organism Value: A. thaliana
  misc_feature: MA Experiment 20001911 PARAMETER Experiment Name: At_Drought_Reproduction_P Parameter: Plant Line Value: WS
  misc_feature: MA Experiment 20001911 PARAMETER Experiment Name: At_Drought_Reproduction_P Parameter: Timepoint (day) Value: 10
  misc_feature: MA Experiment 20001911 PARAMETER Experiment Name: At_Drought_Reproduction_P Parameter: Tissue Value: Flowers
  misc_feature: MA Experiment 20001911 PARAMETER Experiment Name: At_Drought_Reproduction_P Parameter: Treatment Value: Drought vs. No Drought
acacactacgtgtcgtttctacgtaatgccattttcgtaatttctagagtttattcagggtgttttcgtcagtctagtcagatcaaatgtttccatcaaacgttagtactgtttcctttagatttacagattttgaagaagaaagatttcaaattaaaaaatctttcaaatttcttcaaggaggtgatcaaattgaacaatttgatctacaatggcttcttcttctgctgacaatcttaccgacaaaaacattgttttcagaaaactcaaatcaaaatctgagaacaaggtctgcttcgattgtagtgcgaagaatccaacttgggcatcggttacatatgggattttcctctgcatcgattgttcagctactcaccggaatcttggtgttcatatcagcttcgtcagatcaacgaatttagactcttggagcccggagcagctcaggacaatgatgtttggtggtaacaaccgtgctcaggttttcttcaagcaacatggatggactgatggtggcaaaattgaagctaagtatacttcaagagctgctgatttgtatcggcagattcttgctaaagaagttgcgaaagcgattgcggaagaaactaattctggtcttctgtcatctcccgttgctacttctcagttaccggaagtatctaatggggtttcttcttattctgtcaaggaagagttacctctttcgaaacatgaagctaccagtgctacttcttcgcctaaagcttctaatacagttgtgcctagtacgtttaagaaacctattggtgctaaaaggacaggaaaaactggtggtcttggtgcaaggaagcttactactaagccaaaagacaatctctatgagcagaaaccggaagaagttgcaccggttattcccgctgtatcatcaacaaataacggggaaagcaaatcatcagctggttcatcatttgcctctcggtttgagtacaatgacgacctgcaatctggaggacaaagcgttggtggtacacaagtgcttaaccatgttgctccaccaaagtcgtcaagcttcttttcggattttggaatggacagttcttttcccaagaaatcaagctccaactcttcaaaatctcaagttgaagaatcagatgaagcaagaaagaagttcacaaacgcaaagtccatatcttcagctcagtactttggggatcagaacaaaaacgctgatctggaatcaaaagctactcttcagaagtttgcaggctcagcatctatctcaagcgctgatttttacggtcacgaccaagatgattccaatattgatataacagctagtgatctcattaaccgactttctttccaggcgcaacaagatctatcgtcgctggtgaacatagcaggagaaacaaagaagaagcttggaactttggcttctggtatcttcagtgatattcaagacagaatgctgtaagaagaccacgagtctctcacatgtttttgatattgacagagaaaaaaaagtaagaaagaagctttgtcggaaaacttccaatgaggttcacgtttctctgtttttattttatagaacttttttttgaaaactattgagacgtggctattgttgttatcatcaaaatctatattgatactattatactcgatatgttatagactttattaaaaaaaactttgtttgtttgc

SEQ ID NO: 25971 - protein, 413 aa, Arabidopsis thaliana
  peptide (1)..(413): Ceres Seq. ID no. 13576656
  misc_feature (13)..(129): Pfam Name: Putative GTPase activating protein for Arf Pfam Description: Putative GTPase activating protein for Arf
  misc_feature (15)..(215): Homolog of NCBI NO: 27695479 NR Description: Similar to ADP-ribosylation factor GTPase
  misc_feature (303)..(411): Homolog of NCBI NO: 20070255 NR Description: ADP-ribosylation factor GTPase activating protein
  misc_feature (15)..(327): Homolog of NCBI NO: 20070255 NR Description: ADP-ribosylation factor GTPase activating protein
  misc_feature (5)..(405): Homolog of NCBI NO: 18403775 NR Description: ARF GTPase-activating domain-containing protein
  misc_feature (7)..(413): Homolog of NCBI NO: 29126345 NR Description: putative zinc finger protein
  misc_feature (1)..(413): Homolog of NCBI NO: 37537094 NR Description: unknown protein [Oryza sativa (japonica
  misc_feature (5)..(413): Homolog of NCBI NO: 15237500 NR Description: ARF GTPase-activating domain-containing protein
  misc_feature (1)..(413): Homolog of NCBI NO: 13430530 NR Description: unknown protein [Arabidopsis thaliana]
  misc_feature (1)..(413): Homolog of NCBI NO: 18414983 NR Description: ARF GTPase-activating domain-containing protein
  misc_feature (1)..(413): Homolog of NCBI NO: 7487780 NR Description: hypothetical protein T6K21.70 - Arabidopsis
MASSSADNLTDKNIVFRKLKSKSENKVCFDCSAKNPTWASVTYGIFLCIDCSATHRNLGVHISFVRSTNLDSWSPEQLRTMMFGGNNRAQVFFKQHGWTDGGKIEAKYTSRAADLYRQILAKEVAKAIAEETNSGLLSSPVATSQLPEVSNGVSSYSVKEELPLSKHEATSATSSPKASNTVVPSTFKKPIGAKRTGKTGGLGARKLTTKPKDNLYEQKPEEVAPVIPAVSSTNNGESKSSAGSSFASRFEYNDDLQSGGQSVGGTQVLNHVAPPKSSSFFSDFGMDSSFPKKSSSNSSKSQVEESDEARKKFTNAKSISSAQYFGDQNKNADLESKATLQKFAGSASISSADFYGHDQDDSNIDITASDLINRLSFQAQQDLSSLVNIAGETKKKLGTLASGIFSDIQDRML

SEQ ID NO: 25972 - protein, 333 aa, Arabidopsis thaliana
  peptide (1)..(333): Ceres Seq. ID no. 13576657
  misc_feature (1)..(135): Homolog of NCBI NO: 27695479 NR Description: Similar to ADP-ribosylation factor GTPase
  misc_feature (223)..(331): Homolog of NCBI NO: 20070255 NR Description: ADP-ribosylation factor GTPase activating protein
  misc_feature (1)..(247): Homolog of NCBI NO: 20070255 NR Description: ADP-ribosylation factor GTPase activating protein
  misc_feature (1)..(325): Homolog of NCBI NO: 18403775 NR Description: ARF GTPase-activating domain-containing protein
  misc_feature (1)..(333): Homolog of NCBI NO: 29126345 NR Description: putative zinc finger protein
  misc_feature (1)..(333): Homolog of NCBI NO: 37537094 NR Description: unknown protein [Oryza sativa (japonica
  misc_feature (1)..(333): Homolog of NCBI NO: 15237500 NR Description: ARF GTPase-activating domain-containing protein
  misc_feature (1)..(333): Homolog of NCBI NO: 13430530 NR Description: unknown protein [Arabidopsis thaliana]
  misc_feature (1)..(333): Homolog of NCBI NO: 18414983 NR Description: ARF GTPase-activating domain-containing protein
  misc_feature (1)..(333): Homolog of NCBI NO: 7487780 NR Description: hypothetical protein T6K21.70 - Arabidopsis
MMFGGNNRAQVFFKQHGWTDGGKIEAKYTSRAADLYRQILAKEVAKAIAEETNSGLLSSPVATSQLPEVSNGVSSYSVKEELPLSKHEATSATSSPKASNTVVPSTFKKPIGAKRTGKTGGLGARKLTTKPKDNLYEQKPEEVAPVIPAVSSTNNGESKSSAGSSFASRFEYNDDLQSGGQSVGGTQVLNHVAPPKSSSFFSDFGMDSSFPKKSSSNSSKSQVEESDEARKKFTNAKSISSAQYFGDQNKNADLESKATLQKFAGSASISSADFYGHDQDDSNIDITASDLINRLSFQAQQDLSSLVNIAGETKKKLGTLASGIFSDIQDRML

SEQ ID NO: 25973 - protein, 332 aa, Arabidopsis thaliana
  peptide (1)..(332): Ceres Seq. ID no. 13576658
  misc_feature (1)..(134): Homolog of NCBI NO: 27695479 NR Description: Similar to ADP-ribosylation factor GTPase
  misc_feature (222)..(330): Homolog of NCBI NO: 20070255 NR Description: ADP-ribosylation factor GTPase activating protein
  misc_feature (1)..(246): Homolog of NCBI NO: 20070255 NR Description: ADP-ribosylation factor GTPase activating protein
  misc_feature (1)..(324): Homolog of NCBI NO: 18403775 NR Description: ARF GTPase-activating domain-containing protein
  misc_feature (1)..(332): Homolog of NCBI NO: 29126345 NR Description: putative zinc finger protein
  misc_feature (1)..(332): Homolog of NCBI NO: 37537094 NR Description: unknown protein [Oryza sativa (japonica
  misc_feature (1)..(332): Homolog of NCBI NO: 15237500 NR Description: ARF GTPase-activating domain-containing protein
  misc_feature (1)..(332): Homolog of NCBI NO: 13430530 NR Description: unknown protein [Arabidopsis thaliana]
  misc_feature (1)..(332): Homolog of NCBI NO: 18414983 NR Description: ARF GTPase-activating domain-containing protein
  misc_feature (1)..(332): Homolog of NCBI NO: 7487780 NR Description: hypothetical protein T6K21.70 - Arabidopsis
MFGGNNRAQVFFKQHGWTDGGKIEAKYTSRAADLYRQILAKEVAKAIAEETNSGLLSSPVATSQLPEVSNGVSSYSVKEELPLSKHEATSATSSPKASNTVVPSTFKKPIGAKRTGKTGGLGARKLTTKPKDNLYEQKPEEVAPVIPAVSSTNNGESKSSAGSSFASRFEYNDDLQSGGQSVGGTQVLNHVAPPKSSSFFSDFGMDSSFPKKSSSNSSKSQVEESDEARKKFTNAKSISSAQYFGDQNKNADLESKATLQKFAGSASISSADFYGHDQDDSNIDITASDLINRLSFQAQQDLSSLVNIAGETKKKLGTLASGIFSDIQDRML

SEQ ID NO: 25974 - DNA, 586 bp, Arabidopsis thaliana
  misc_feature (1)..(586): Ceres Seq. ID no. 12393532
  misc_feature: MA Experiment ID: 108434 Result: Down-regulated in Transcription
  misc_feature: MA Experiment 108434 PARAMETER Experiment Name: At_Root_Tips_cDNA_P Parameter: Tissue Value: Root Tips
  misc_feature: MA Experiment ID: 108461 Result: Down-regulated in Transcription
  misc_feature: MA Experiment 108461 PARAMETER Experiment Name: At_Germinating_Seeds_cDNA_P Parameter: Age (day) Value: 1 vs. 0
  misc_feature: MA Experiment 108461 PARAMETER Experiment Name: At_Germinating_Seeds_cDNA_P Parameter: Tissue Value: Germinating Seeds
  misc_feature: MA Experiment ID: 108462 Result: Down-regulated in Transcription
  misc_feature: MA Experiment 108462 PARAMETER Experiment Name: At_Germinating_Seeds_cDNA_P Parameter: Age (day) Value: 2 vs. 0
  misc_feature: MA Experiment 108462 PARAMETER Experiment Name: At_Germinating_Seeds_cDNA_P Parameter: Tissue Value: Germinating Seeds
  misc_feature: MA Experiment ID: 108463 Result: Down-regulated in Transcription
  misc_feature: MA Experiment 108463 PARAMETER Experiment Name: At_Germinating_Seeds_cDNA_P Parameter: Age (day) Value: 3 vs. 0
  misc_feature: MA Experiment 108463 PARAMETER Experiment Name: At_Germinating_Seeds_cDNA_P Parameter: Tissue Value: Germinating Seeds
  misc_feature: MA Experiment ID: 108464 Result: Down-regulated in Transcription
  misc_feature: MA Experiment 108464 PARAMETER Experiment Name: At_Germinating_Seeds_cDNA_P Parameter: Age (day) Value: 4 vs. 0
  misc_feature: MA Experiment 108464 PARAMETER Experiment Name: At_Germinating_Seeds_cDNA_P Parameter: Tissue Value: Germinating Seeds
  misc_feature: MA Experiment ID: 108488 Result: Down-regulated in Transcription
  misc_feature: MA Experiment ID: 108501 Result: Down-regulated in Transcription
  misc_feature: MA Experiment 108501 PARAMETER Experiment Name: At_ap2_floral_buds_cDNA_P Parameter: Plant Line Value: ap2 (Ler.)
  misc_feature: MA Experiment 108501 PARAMETER Experiment Name: At_ap2_floral_buds_cDNA_P Parameter: Tissue Value: Closed Flower
  misc_feature: MA Experiment ID: 108561 Result: Up-regulated in Transcription
  misc_feature: MA Experiment 108561 PARAMETER Experiment Name: At_100uM_ABA_cDNA_P Parameter: Timepoint (hr) Value: 6
  misc_feature: MA Experiment 108561 PARAMETER Experiment Name: At_100uM_ABA_cDNA_P Parameter: Tissue Value: Aerial
  misc_feature: MA Experiment 108561 PARAMETER Experiment Name: At_100uM_ABA_cDNA_P Parameter: Treatment Value: 100uM ABA vs. No Treatment
  misc_feature: MA Experiment ID: 108572 Result: Up-regulated in Transcription
  misc_feature: MA Experiment 108572 PARAMETER Experiment Name: At_Drought_cDNA_P Parameter: Timepoint (hr) Value: 1
  misc_feature: MA Experiment 108572 PARAMETER Experiment Name: At_Drought_cDNA_P Parameter: Tissue Value: Aerial
  misc_feature: MA Experiment 108572 PARAMETER Experiment Name: At_Drought_cDNA_P Parameter: Treatment Value: Drought vs. No Drought
  misc_feature: MA Experiment ID: 108573 Result: Up-regulated in Transcription
  misc_feature: MA Experiment 108573 PARAMETER Experiment Name: At_Drought_cDNA_P Parameter: Timepoint (hr) Value: 6
  misc_feature: MA Experiment 108573 PARAMETER Experiment Name: At_Drought_cDNA_P Parameter: Tissue Value: Aerial
  misc_feature: MA Experiment 108573 PARAMETER Experiment Name: At_Drought_cDNA_P Parameter: Treatment Value: Drought vs. No Drought
  misc_feature: MA Experiment ID: 108576 Result: Up-regulated in Transcription
  misc_feature: MA Experiment 108576 PARAMETER Experiment Name: At_42deg_Heat_cDNA_P Parameter: Temperature (deg C) Value: 42 vs. 22
  misc_feature: MA Experiment 108576 PARAMETER Experiment Name: At_42deg_Heat_cDNA_P Parameter: Timepoint (hr) Value: 1
  misc_feature: MA Experiment 108576 PARAMETER Experiment Name: At_42deg_Heat_cDNA_P Parameter: Tissue Value: Aerial
  misc_feature: MA Experiment ID: 108577 Result: Down-regulated in Transcription
  misc_feature: MA Experiment 108577 PARAMETER Experiment Name: At_42deg_Heat_cDNA_P Parameter: Temperature (deg C) Value: 42 vs. 22
  misc_feature: MA Experiment 108577 PARAMETER Experiment Name: At_42deg_Heat_cDNA_P Parameter: Timepoint (hr) Value: 6
  misc_feature: MA Experiment 108577 PARAMETER Experiment Name: At_42deg_Heat_cDNA_P Parameter: Tissue Value: Aerial
  misc_feature: MA Experiment ID: 108605 Result: Up-regulated in Transcription
  misc_feature: MA Experiment 108605 PARAMETER Experiment Name: At_100uM_ABA_cDNA_P Parameter: Timepoint (hr) Value: 6
  misc_feature: MA Experiment 108605 PARAMETER Experiment Name: At_100uM_ABA_cDNA_P Parameter: Tissue Value: Aerial
  misc_feature: MA Experiment 108605 PARAMETER Experiment Name: At_100uM_ABA_cDNA_P Parameter: Treatment Value: 100uM ABA vs. No Treatment
  misc_feature: MA Experiment ID: 108607 Result: Up-regulated in Transcription
  misc_feature: MA Experiment 108607 PARAMETER Experiment Name: At_100uM_ABA_cDNA_P Parameter: Timepoint (hr) Value: 4
  misc_feature: MA Experiment 108607 PARAMETER Experiment Name: At_100uM_ABA_cDNA_P Parameter: Tissue Value: Aerial
  misc_feature: MA Experiment 108607 PARAMETER Experiment Name: At_100uM_ABA_cDNA_P Parameter: Treatment Value: 100uM ABA vs. No Treatment
  misc_feature: MA Experiment ID: 108608 Result: Up-regulated in Transcription
  misc_feature: MA Experiment 108608 PARAMETER Experiment Name: At_100uM_ABA_cDNA_P Parameter: Timepoint (hr) Value: 1
  misc_feature: MA Experiment 108608 PARAMETER Experiment Name: At_100uM_ABA_cDNA_P Parameter: Tissue Value: Aerial
  misc_feature: MA Experiment 108608 PARAMETER Experiment Name: At_100uM_ABA_cDNA_P Parameter: Treatment Value: 100uM ABA vs. No Treatment
  misc_feature: MA Experiment ID: 108609 Result: Up-regulated in Transcription
  misc_feature: MA Experiment 108609 PARAMETER Experiment Name: At_100uM_ABA_cDNA_P Parameter: Timepoint (hr) Value: 24
  misc_feature: MA Experiment 108609 PARAMETER Experiment Name: At_100uM_ABA_cDNA_P Parameter: Tissue Value: Aerial
  misc_feature: MA Experiment 108609 PARAMETER Experiment Name: At_100uM_ABA_cDNA_P Parameter: Treatment Value: 100uM ABA vs. No Treatment
  misc_feature: MA Experiment ID: 20000069 Result: Up-regulated in Transcription
  misc_feature: MA Experiment 20000069 PARAMETER Experiment Name: At_100uM_ABA_Mutants_cDNA_P Parameter: Plant Line Value: CS23
  misc_feature: MA Experiment 20000069 PARAMETER Experiment Name: At_100uM_ABA_Mutants_cDNA_P Parameter: Timepoint (hr) Value: 6
  misc_feature: MA Experiment 20000069 PARAMETER Experiment Name: At_100uM_ABA_Mutants_cDNA_P Parameter: Tissue Value: Aerial
  misc_feature: MA Experiment 20000069 PARAMETER Experiment Name: At_100uM_ABA_Mutants_cDNA_P Parameter: Treatment Value: 100uM ABA vs. No Treatment
  misc_feature: MA Experiment ID: 20000070 Result: Up-regulated in Transcription
  misc_feature: MA Experiment 20000070 PARAMETER Experiment Name: At_100uM_ABA_Mutants_cDNA_P Parameter: Plant Line Value: CS24
  misc_feature: MA Experiment 20000070 PARAMETER Experiment Name: At_100uM_ABA_Mutants_cDNA_P Parameter: Timepoint (hr) Value: 6
  misc_feature: MA Experiment 20000070 PARAMETER Experiment Name: At_100uM_ABA_Mutants_cDNA_P Parameter: Tissue Value: Aerial
  misc_feature: MA Experiment 20000070 PARAMETER Experiment Name: At_100uM_ABA_Mutants_cDNA_P Parameter: Treatment Value: 100uM ABA vs. No Treatment
  misc_feature: MA Experiment ID: 20000071 Result: Up-regulated in Transcription
  misc_feature: MA Experiment 20000071 PARAMETER Experiment Name: At_100uM_ABA_Mutants_cDNA_P Parameter: Plant Line Value: CS8104
  misc_feature: MA Experiment 20000071 PARAMETER Experiment Name: At_100uM_ABA_Mutants_cDNA_P Parameter: Timepoint (hr) Value: 6
  misc_feature: MA Experiment 20000071 PARAMETER Experiment Name: At_100uM_ABA_Mutants_cDNA_P Parameter: Tissue Value: Aerial
  misc_feature: MA Experiment 20000071 PARAMETER Experiment Name: At_100uM_ABA_Mutants_cDNA_P Parameter: Treatment Value: 100uM ABA vs. No Treatment
  misc_feature: MA Experiment ID: 20000072 Result: Up-regulated in Transcription
  misc_feature: MA Experiment 20000072 PARAMETER Experiment Name: At_100uM_ABA_Mutants_cDNA_P Parameter: Plant Line Value: CS8105
  misc_feature: MA Experiment 20000072 PARAMETER Experiment Name: At_100uM_ABA_Mutants_cDNA_P Parameter: Timepoint (hr) Value: 6
  misc_feature: MA Experiment 20000072 PARAMETER Experiment Name: At_100uM_ABA_Mutants_cDNA_P Parameter: Tissue Value: Aerial
  misc_feature: MA Experiment 20000072 PARAMETER Experiment Name: At_100uM_ABA_Mutants_cDNA_P Parameter: Treatment Value: 100uM ABA vs. No Treatment
  misc_feature: MA Experiment ID: 20000086 Result: Up-regulated in Transcription
  misc_feature: MA Experiment 20000086 PARAMETER Experiment Name: At_100uM_ABA_Mutants_cDNA_P Parameter: Plant Line Value: CS22
  misc_feature: MA Experiment 20000086 PARAMETER Experiment Name: At_100uM_ABA_Mutants_cDNA_P Parameter: Timepoint (hr) Value: 6
  misc_feature: MA Experiment 20000086 PARAMETER Experiment Name: At_100uM_ABA_Mutants_cDNA_P Parameter: Tissue Value: Aerial
  misc_feature: MA Experiment 20000086 PARAMETER Experiment Name: At_100uM_ABA_Mutants_cDNA_P Parameter: Treatment Value: 100uM ABA vs. No Treatment
  misc_feature: MA Experiment ID: 20000087 Result: Up-regulated in Transcription
  misc_feature: MA Experiment 20000087 PARAMETER Experiment Name: At_100uM_ABA_Mutants_cDNA_P Parameter: Plant Line Value: WS
  misc_feature: MA Experiment 20000087 PARAMETER Experiment Name: At_100uM_ABA_Mutants_cDNA_P Parameter: Timepoint (hr) Value: 6
  misc_feature: MA Experiment 20000087 PARAMETER Experiment Name: At_100uM_ABA_Mutants_cDNA_P Parameter: Tissue Value: Aerial
  misc_feature: MA Experiment 20000087 PARAMETER Experiment Name: At_100uM_ABA_Mutants_cDNA_P Parameter: Treatment Value: 100uM ABA vs. No Treatment
  misc_feature: MA Experiment ID: 20000089 Result: Up-regulated in Transcription
  misc_feature: MA Experiment ID: 20000090 Result: Up-regulated in Transcription
  misc_feature: MA Experiment ID: 20000112 Result: Up-regulated in Transcription
  misc_feature: MA Experiment 20000112 PARAMETER Experiment Name: At_42deg_Heat_cDNA_P Parameter: Temperature (deg C) Value: 42 vs. 22
  misc_feature: MA Experiment 20000112 PARAMETER Experiment Name: At_42deg_Heat_cDNA_P Parameter: Timepoint (hr) Value: 2
  misc_feature: MA Experiment 20000112 PARAMETER Experiment Name: At_42deg_Heat_cDNA_P Parameter: Tissue Value: Aerial
  misc_feature: MA Experiment ID: 20000117 Result: Up-regulated in Transcription
  misc_feature: MA Experiment 20000117 PARAMETER Experiment Name: At_100uM_ABA_Mutants_cDNA_P Parameter: Plant Line Value: Columbia
  misc_feature: MA Experiment 20000117 PARAMETER Experiment Name: At_100uM_ABA_Mutants_cDNA_P Parameter: Timepoint (hr) Value: 6
  misc_feature: MA Experiment 20000117 PARAMETER Experiment Name: At_100uM_ABA_Mutants_cDNA_P Parameter: Tissue Value: Aerial
  misc_feature: MA Experiment 20000117 PARAMETER Experiment Name: At_100uM_ABA_Mutants_cDNA_P Parameter: Treatment Value: 100uM ABA vs. No Treatment
  misc_feature: MA Experiment ID: 20000144 Result: Up-regulated in Transcription
  misc_feature: MA Experiment 20000144 PARAMETER Experiment Name: At_42deg_Heat_cDNA_P Parameter: Temperature (deg C) Value: 42 vs. 22
  misc_feature: MA Experiment 20000144 PARAMETER Experiment Name: At_42deg_Heat_cDNA_P Parameter: Timepoint (hr) Value: 1
  misc_feature: MA Experiment 20000144 PARAMETER Experiment Name: At_42deg_Heat_cDNA_P Parameter: Tissue Value: Aerial
  misc_feature: MA Experiment ID: 20000166 Result: Up-regulated in Transcription
  misc_feature: MA Experiment 20000166 PARAMETER Experiment Name: At_100uM_ABA_P Parameter: Age (day) Value: 14
  misc_feature: MA Experiment 20000166 PARAMETER Experiment Name: At_100uM_ABA_P Parameter: Organism Value: A. thaliana
  misc_feature: MA Experiment 20000166 PARAMETER Experiment Name: At_100uM_ABA_P Parameter: Plant Line Value: WS
  misc_feature: MA Experiment 20000166 PARAMETER Experiment Name: At_100uM_ABA_P Parameter: Timepoint (hr) Value: 1
  misc_feature: MA Experiment 20000166 PARAMETER Experiment Name: At_100uM_ABA_P Parameter: Tissue Value: Aerial
  misc_feature: MA Experiment 20000166 PARAMETER Experiment Name: At_100uM_ABA_P Parameter: Treatment Value: 100uM ABA vs. No Treatment
  misc_feature: MA Experiment ID: 20000169 Result: Up-regulated in Transcription
  misc_feature: MA Experiment 20000169 PARAMETER Experiment Name: At_100uM_ABA_P Parameter: Age (day) Value: 14
  misc_feature: MA Experiment 20000169 PARAMETER Experiment Name: At_100uM_ABA_P Parameter: Organism Value: A. thaliana
  misc_feature: MA Experiment 20000169 PARAMETER Experiment Name: At_100uM_ABA_P Parameter: Plant Line Value: WS
  misc_feature: MA Experiment 20000169 PARAMETER Experiment Name: At_100uM_ABA_P Parameter: Timepoint (hr) Value: 6
  misc_feature: MA Experiment 20000169 PARAMETER Experiment Name: At_100uM_ABA_P Parameter: Tissue Value: Aerial
  misc_feature: MA Experiment 20000169 PARAMETER Experiment Name: At_100uM_ABA_P Parameter: Treatment Value: 100uM ABA vs. No Treatment
  misc_feature: MA Experiment ID: 20000171 Result: Up-regulated in Transcription
  misc_feature: MA Experiment 20000171 PARAMETER Experiment Name: At_42deg_Heat_P Parameter: Age (day) Value: 14
  misc_feature: MA Experiment 20000171 PARAMETER Experiment Name: At_42deg_Heat_P Parameter: Organism Value: A. thaliana
  misc_feature: MA Experiment 20000171 PARAMETER Experiment Name: At_42deg_Heat_P Parameter: Plant Line Value: WS
  misc_feature: MA Experiment 20000171 PARAMETER Experiment Name: At_42deg_Heat_P Parameter: Temperature (deg C) Value: 42 vs. 22
  misc_feature: MA Experiment 20000171 PARAMETER Experiment Name: At_42deg_Heat_P Parameter: Timepoint (hr) Value: 1
  misc_feature: MA Experiment 20000171 PARAMETER Experiment Name: At_42deg_Heat_P Parameter: Tissue Value: Aerial
  misc_feature: MA Experiment ID: 20000180 Result: Down-regulated in Transcription
  misc_feature: MA Experiment 20000180 PARAMETER Experiment Name: At_Germinating_Seeds_P Parameter: Age (hr) Value: 24 vs. 0
  misc_feature: MA Experiment 20000180 PARAMETER Experiment Name: At_Germinating_Seeds_P Parameter: Tissue Value: Germinating Seeds
  misc_feature: MA Experiment ID: 20000184 Result: Down-regulated in Transcription
  misc_feature: MA Experiment 20000184 PARAMETER Experiment Name: At_Shoots__P Parameter: Age (day) Value: 7
  misc_feature: MA Experiment 20000184 PARAMETER Experiment Name: At_Shoots__P Parameter: Tissue Value: Shoots vs. Whole Plant
  misc_feature: MA Experiment ID: 20000185 Result: Down-regulated in Transcription
  misc_feature: MA Experiment 20000185 PARAMETER Experiment Name: At_Roots__P Parameter: Age (day) Value: 7 vs. 21
  misc_feature: MA Experiment 20000185 PARAMETER Experiment Name: At_Roots__P Parameter: Organism Value: A. thaliana
  misc_feature: MA Experiment 20000185 PARAMETER Experiment Name: At_Roots__P Parameter: Tissue Value: Roots vs. Whole Plant
  misc_feature: MA Experiment ID: 20000213 Result: Up-regulated in Transcription
  misc_feature: MA Experiment 20000213 PARAMETER Experiment Name: At_4deg_Cold_P Parameter: Timepoint (hr) Value: 2
  misc_feature: MA Experiment ID: 20000214 Result: Down-regulated in Transcription
  misc_feature: MA Experiment 20000214 PARAMETER Experiment Name: At_4deg_Cold_P Parameter: Timepoint (hr) Value: 6
  misc_feature: MA Experiment ID: 20000227 Result: Up-regulated in Transcription
  misc_feature: MA Experiment 20000227 PARAMETER Experiment Name: At_Root-Tips-vs-Tops_P Parameter: Tissue Value: Root Tips vs. Root Tops
  misc_feature: MA Experiment ID: 20000234 Result: Down-regulated in Transcription
  misc_feature: MA Experiment 20000234 PARAMETER Experiment Name: At_Siliques_P Parameter: Age (day) Value: 21
  misc_feature: MA Experiment 20000234 PARAMETER Experiment Name: At_Siliques_P Parameter: Organism Value: A. thaliana
  misc_feature: MA Experiment 20000234 PARAMETER Experiment Name: At_Siliques_P Parameter: Plant Line Value: WS
  misc_feature: MA Experiment 20000234 PARAMETER Experiment Name: At_Siliques_P Parameter: Tissue Value: Less Than 5mm Siliques vs. Whole Plant
  misc_feature: MA Experiment ID: 20000286 Result: Down-regulated in Transcription
  misc_feature: MA Experiment 20000286 PARAMETER Experiment Name: At_Open_Flower_P Parameter: Age (day) Value: 21
  misc_feature: MA Experiment 20000286 PARAMETER Experiment Name: At_Open_Flower_P Parameter: Plant Line Value: WS
  misc_feature: MA Experiment 20000286 PARAMETER Experiment Name: At_Open_Flower_P Parameter: Tissue Value: Half Open vs. Whole Plant
  misc_feature: MA Experiment ID: 20000308 Result: Up-regulated in Transcription
  misc_feature: MA Experiment 20000308 PARAMETER Experiment Name: At_100mM_NaCl__P Parameter: Age (day) Value: 17
  misc_feature: MA Experiment 20000308 PARAMETER Experiment Name: At_100mM_NaCl__P Parameter: Organism Value: A. thaliana
  misc_feature: MA Experiment 20000308 PARAMETER Experiment Name: At_100mM_NaCl__P Parameter: Plant Line Value: WS
  misc_feature: MA Experiment 20000308 PARAMETER Experiment Name: At_100mM_NaCl__P Parameter: Timepoint (hr) Value: 72
  misc_feature: MA Experiment 20000308 PARAMETER Experiment Name: At_100mM_NaCl__P Parameter: Tissue Value: Whole Plant
  misc_feature: MA Experiment 20000308 PARAMETER Experiment Name: At_100mM_NaCl__P Parameter: Treatment Value: 100mM NaCl vs. No Treatment
  misc_feature: MA Experiment ID: 20000437 Result: Up-regulated in Transcription
  misc_feature: MA Experiment 20000437 PARAMETER Experiment Name: At_Drought_P Parameter: Age (day) Value: 8
  misc_feature: MA Experiment 20000437 PARAMETER Experiment Name: At_Drought_P Parameter: Organism Value: A. thaliana
  misc_feature: MA Experiment 20000437 PARAMETER Experiment Name: At_Drought_P Parameter: Plant Line Value: WS
  misc_feature: MA Experiment 20000437 PARAMETER Experiment Name: At_Drought_P Parameter: Timepoint (hr) Value: 24
  misc_feature: MA Experiment 20000437 PARAMETER Experiment Name: At_Drought_P Parameter: Tissue Value: Whole Plant
  misc_feature: MA Experiment 20000437 PARAMETER Experiment Name: At_Drought_P Parameter: Treatment Value: Drought vs. No Drought
  misc_feature: MA Experiment ID: 20000438 Result: Down-regulated in Transcription
  misc_feature: MA Experiment 20000438 PARAMETER Experiment Name: At_Shoots__P Parameter: Age (day) Value: 14
  misc_feature: MA Experiment 20000438 PARAMETER Experiment Name: At_Shoots__P Parameter: Tissue Value: Shoots vs. Whole Plant
  misc_feature: MA Experiment ID: 20000439 Result: Down-regulated in Transcription
  misc_feature: MA Experiment 20000439 PARAMETER Experiment Name: At_Roots__P Parameter: Age (day) Value: 14 vs. 21
  misc_feature: MA Experiment 20000439 PARAMETER Experiment Name: At_Roots__P Parameter: Organism Value: A. thaliana
  misc_feature: MA Experiment 20000439 PARAMETER Experiment Name: At_Roots__P Parameter: Tissue Value: Roots vs. Whole Plant
  misc_feature: MA Experiment ID: 20000453 Result: Up-regulated in Transcription
  misc_feature: MA Experiment 20000453 PARAMETER Experiment Name: At_100uM_ABA_P Parameter: Age (day) Value: 15
  misc_feature: MA Experiment 20000453 PARAMETER Experiment Name: At_100uM_ABA_P Parameter: Organism Value: A. thaliana
  misc_feature: MA Experiment 20000453 PARAMETER Experiment Name: At_100uM_ABA_P Parameter: Plant Line Value: WS
  misc_feature: MA Experiment 20000453 PARAMETER Experiment Name: At_100uM_ABA_P Parameter: Timepoint (hr) Value: 24
  misc_feature: MA Experiment 20000453 PARAMETER Experiment Name: At_100uM_ABA_P Parameter: Tissue Value: Aerial
  misc_feature: MA Experiment 20000453 PARAMETER Experiment Name: At_100uM_ABA_P Parameter: Treatment Value: 100uM ABA vs. No Treatment
  misc_feature: MA Experiment ID: 20000460 Result: Up-regulated in Transcription
  misc_feature: MA Experiment 20000460 PARAMETER Experiment Name: At_10percent_PEG_P Parameter: Age (day) Value: 12
  misc_feature: MA Experiment 20000460 PARAMETER Experiment Name: At_10percent_PEG_P Parameter: Organism Value: A. thaliana
  misc_feature: MA Experiment 20000460 PARAMETER Experiment Name: At_10percent_PEG_P Parameter: Plant Line Value: WS
  misc_feature: MA Experiment 20000460 PARAMETER Experiment Name: At_10percent_PEG_P Parameter: Timepoint (day) Value: 12
  misc_feature: MA Experiment 20000460 PARAMETER Experiment Name: At_10percent_PEG_P Parameter: Tissue Value: Whole Plant
  misc_feature: MA Experiment 20000460 PARAMETER Experiment Name: At_10percent_PEG_P Parameter: Treatment Value: 10percent PEG vs. No Treatment
  misc_feature: MA Experiment ID: 20001450 Result: Up-regulated in Transcription
  misc_feature: MA Experiment 20001450 PARAMETER Experiment Name: At_Far-red-induction_P Parameter: Age (day) Value: 7
  misc_feature: MA Experiment 20001450 PARAMETER Experiment Name: At_Far-red-induction_P Parameter: Light Value: Far-red vs. White
  misc_feature: MA Experiment 20001450 PARAMETER Experiment Name: At_Far-red-induction_P Parameter: Organism Value: A. thaliana
  misc_feature: MA Experiment 20001450 PARAMETER Experiment Name: At_Far-red-induction_P Parameter: Plant Line Value: Columbia
  misc_feature: MA Experiment 20001450 PARAMETER Experiment Name: At_Far-red-induction_P Parameter: Timepoint (hr) Value: 8
  misc_feature: MA Experiment 20001450 PARAMETER Experiment Name: At_Far-red-induction_P Parameter: Tissue Value: Whole Plant
  misc_feature: MA Experiment ID: 20001557 Result: Up-regulated in Transcription
  misc_feature: MA Experiment 20001557 PARAMETER Experiment Name: At_Drought_Soil_Dry_P Parameter: Age (day) Value: 27
  misc_feature: MA Experiment 20001557 PARAMETER Experiment Name: At_Drought_Soil_Dry_P Parameter: Organism Value: A. thaliana
  misc_feature: MA Experiment 20001557 PARAMETER Experiment Name: At_Drought_Soil_Dry_P Parameter: Plant Line Value: WS
  misc_feature: MA Experiment 20001557 PARAMETER Experiment Name: At_Drought_Soil_Dry_P Parameter: Post Timepoint (hr) Value: 3
  misc_feature: MA Experiment 20001557 PARAMETER Experiment Name: At_Drought_Soil_Dry_P Parameter: Post-Treatment Value: Re-Water vs. No Drought
  misc_feature: MA Experiment 20001557 PARAMETER Experiment Name: At_Drought_Soil_Dry_P Parameter: Timepoint (day) Value: 13
  misc_feature: MA Experiment 20001557 PARAMETER Experiment Name: At_Drought_Soil_Dry_P Parameter: Treatment Value: Drought vs. No Drought
  misc_feature: MA Experiment ID: 20001558 Result: Up-regulated in Transcription
  misc_feature: MA Experiment 20001558 PARAMETER Experiment Name: At_Drought_Soil_Dry_P Parameter: Age (day) Value: 27
  misc_feature: MA Experiment 20001558 PARAMETER Experiment Name: At_Drought_Soil_Dry_P Parameter: Organism Value: A. thaliana
  misc_feature: MA Experiment 20001558 PARAMETER Experiment Name: At_Drought_Soil_Dry_P Parameter: Plant Line Value: WS
  misc_feature: MA Experiment 20001558 PARAMETER Experiment Name: At_Drought_Soil_Dry_P Parameter: Post Timepoint (hr) Value: 6
  misc_feature: MA Experiment 20001558 PARAMETER Experiment Name: At_Drought_Soil_Dry_P Parameter: Post-Treatment Value: Re-Water vs. No Drought
  misc_feature: MA Experiment 20001558 PARAMETER Experiment Name: At_Drought_Soil_Dry_P Parameter: Timepoint (day) Value: 13
  misc_feature: MA Experiment 20001558 PARAMETER Experiment Name: At_Drought_Soil_Dry_P Parameter: Treatment Value: Drought vs. No Drought
  misc_feature: MA Experiment ID: 20001559 Result: Up-regulated in Transcription
  misc_feature: MA Experiment 20001559 PARAMETER Experiment Name: At_Drought_Soil_Dry_P Parameter: Age (day) Value: 28
  misc_feature: MA Experiment 20001559 PARAMETER Experiment Name: At_Drought_Soil_Dry_P Parameter: Organism Value: A. thaliana
  misc_feature: MA Experiment 20001559 PARAMETER Experiment Name: At_Drought_Soil_Dry_P Parameter: Plant Line Value: WS
  misc_feature: MA Experiment 20001559 PARAMETER Experiment Name: At_Drought_Soil_Dry_P Parameter: Post Timepoint (hr) Value: 29
  misc_feature: MA Experiment 20001559 PARAMETER Experiment Name: At_Drought_Soil_Dry_P Parameter: Post-Treatment Value: Re-Water vs. No Drought
  misc_feature: MA Experiment 20001559 PARAMETER Experiment Name: At_Drought_Soil_Dry_P Parameter: Timepoint (day) Value: 14
  misc_feature: MA Experiment 20001559 PARAMETER Experiment Name: At_Drought_Soil_Dry_P Parameter: Treatment Value: Drought vs. No Drought
  misc_feature: MA Experiment ID: 20001560 Result: Up-regulated in Transcription
  misc_feature: MA Experiment 20001560 PARAMETER Experiment Name: At_Drought_Soil_Dry_P Parameter: Age (day) Value: 28
  misc_feature: MA Experiment 20001560 PARAMETER Experiment Name: At_Drought_Soil_Dry_P Parameter: Organism Value: A. thaliana
  misc_feature: MA Experiment 20001560 PARAMETER Experiment Name: At_Drought_Soil_Dry_P Parameter: Plant Line Value: WS
  misc_feature: MA Experiment 20001560 PARAMETER Experiment Name: At_Drought_Soil_Dry_P Parameter: Post Timepoint (hr) Value: None
  misc_feature: MA Experiment 20001560 PARAMETER Experiment Name: At_Drought_Soil_Dry_P Parameter: Post-Treatment Value: None
  misc_feature: MA Experiment 20001560 PARAMETER Experiment Name: At_Drought_Soil_Dry_P Parameter: Timepoint (day) Value: 14
  misc_feature: MA Experiment 20001560 PARAMETER Experiment Name: At_Drought_Soil_Dry_P Parameter: Treatment Value: Drought vs. No Drought
  misc_feature: MA Experiment ID: 20001757 Result: Down-regulated in Transcription
  misc_feature: MA Experiment 20001757 PARAMETER Experiment Name: At_50mM_NH4NO3_L-to-H_P Parameter: Timepoint (hr) Value: 6
  misc_feature: MA Experiment 20001757 PARAMETER Experiment Name: At_50mM_NH4NO3_L-to-H_P Parameter: Tissue Value: Leaf
  misc_feature: MA Experiment 20001757 PARAMETER Experiment Name: At_50mM_NH4NO3_L-to-H_P Parameter: Treatment Value: 50mM NH4NO3 vs 100mM Mannitol
aagttagagactcagtgatcatcgaagcaaatacgcggaaagagaggatgagaaaacgcaatgatcagaggatatattcgcagctatacgaagcaatggaagcacttgttcatatatgcagagatggatgtaaaacaatagggccacacgataaagatttcaaaccgaaccatgcaacgtgtaactatgaagcttgcaagggattagaatcactgatccggcatttcgcaggctgtaagctaagagttccaggaggttgcgtgcattgcaagagaatgtggcaactccttgaactgcattcacgtgtttgcgcaggttctgatcaatgtcgagtccctctatgcagaaaccttaaggagaagatggagaaacagagcaagaaagatgagtcgagatggaaacttctggtgaagaatgtattggggagtaagaaaatcggaggctctcctttctttttaccggtgacaaactgttaaaaaacattttgtcaatctcaagaagggcgagttttaagcgtttcttgtgatcctatctttaaaacaagtgtaacataatgagtttgaataaatgacacatattttggtcg

SEQ ID NO: 25975 - protein, 157 aa, Arabidopsis thaliana
  peptide (1)..(157): Ceres Seq. ID no. 12393533
  misc_feature (20)..(114): Pfam Name: TAZ zinc finger Pfam Description: TAZ zinc finger
  misc_feature (8)..(139): Homolog of NCBI NO: 20804890 NR Description: P0497A05.15 [Oryza sativa (japonica
  misc_feature (6)..(143): Homolog of NCBI NO: 18408618 NR Description: putative protein
  misc_feature (6)..(143): Homolog of NCBI NO: 7487530 NR Description: hypothetical protein T29H11.120 - Arabidopsis
  misc_feature (6)..(143): Homolog of NCBI NO: 15242656 NR Description: putative protein; protein id: At5g63160.1
  misc_feature (6)..(114): Homolog of NCBI NO: 15221235 NR Description: hypothetical protein; protein id: At1g05690.1
  misc_feature (4)..(152): Homolog of NCBI NO: 21537174 NR Description: unknown [Arabidopsis thaliana]
  misc_feature (4)..(152): Homolog of NCBI NO: 26453150 NR Description: unknown protein [Arabidopsis thaliana]
  misc_feature (4)..(152): Homolog of NCBI NO: 18420081 NR Description: putative protein
  misc_feature (4)..(152): Homolog of NCBI NO: 7485765 NR Description: hypothetical protein F19F18.100 - Arabidopsis
  misc_feature (1)..(157): Homolog of NCBI NO: 15240763 NR Description: putative protein
VRDSVIIEANTRKERMRKRNDQRIYSQLYEAMEALVHICRDGCKTIGPHDKDFKPNHATCNYEACKGLESLIRHFAGCKLRVPGGCVHCKRMWQLLELHSRVCAGSDQCRVPLCRNLKEKMEKQSKKDESRWKLLVKNVLGSKKIGGSPFFLPVTNC

SEQ ID NO: 25976 - protein, 142 aa, Arabidopsis thaliana
  peptide (1)..(142): Ceres Seq. ID no. 12393534
  misc_feature (5)..(99): Pfam Name: TAZ zinc finger Pfam Description: TAZ zinc finger
  misc_feature (1)..(124): Homolog of NCBI NO: 20804890 NR Description: P0497A05.15 [Oryza sativa (japonica
  misc_feature (1)..(128): Homolog of NCBI NO: 18408618 NR Description: putative protein
  misc_feature (1)..(128): Homolog of NCBI NO: 7487530 NR Description: hypothetical protein T29H11.120 - Arabidopsis
  misc_feature (1)..(128): Homolog of NCBI NO: 15242656 NR Description: putative protein; protein id: At5g63160.1
  misc_feature (1)..(99): Homolog of NCBI NO: 15221235 NR Description: hypothetical protein; protein id: At1g05690.1
  misc_feature (1)..(137): Homolog of NCBI NO: 26453150 NR Description: unknown protein [Arabidopsis thaliana]
  misc_feature (1)..(137): Homolog of NCBI NO: 18420081 NR Description: putative protein
  misc_feature (1)..(137): Homolog of NCBI NO: 21537174 NR Description: unknown [Arabidopsis thaliana]
  misc_feature (1)..(137): Homolog of NCBI NO: 7485765 NR Description: hypothetical protein F19F18.100 - Arabidopsis
  misc_feature (1)..(142): Homolog of NCBI NO: 15240763 NR Description: putative protein
MRKRNDQRIYSQLYEAMEALVHICRDGCKTIGPHDKDFKPNHATCNYEACKGLESLIRHFAGCKLRVPGGCVHCKRMWQLLELHSRVCAGSDQCRVPLCRNLKEKMEKQSKKDESRWKLLVKNVLGSKKIGGSPFFLPVTNC

SEQ ID NO: 25977 - protein, 126 aa, Arabidopsis thaliana
  peptide (1)..(126): Ceres Seq. ID no. 12393535
  misc_feature (1)..(83): Pfam Name: TAZ zinc finger Pfam Description: TAZ zinc finger
  misc_feature (1)..(108): Homolog of NCBI NO: 20804890 NR Description: P0497A05.15 [Oryza sativa (japonica
  misc_feature (1)..(112): Homolog of NCBI NO: 18408618 NR Description: putative protein
  misc_feature (1)..(112): Homolog of NCBI NO: 7487530 NR Description: hypothetical protein T29H11.120 - Arabidopsis
  misc_feature (1)..(112): Homolog of NCBI NO: 15242656 NR Description: putative protein; protein id: At5g63160.1
  misc_feature (1)..(83): Homolog of NCBI NO: 15221235 NR Description: hypothetical protein; protein id: At1g05690.1
  misc_feature (1)..(121): Homolog of NCBI NO: 21537174 NR Description: unknown [Arabidopsis thaliana]
  misc_feature (1)..(121): Homolog of NCBI NO: 18420081 NR Description: putative protein
  misc_feature (1)..(121): Homolog of NCBI NO: 26453150 NR Description: unknown protein [Arabidopsis thaliana]
  misc_feature (1)..(121): Homolog of NCBI NO: 7485765 NR Description: hypothetical protein F19F18.100 - Arabidopsis
  misc_feature (1)..(126): Homolog of NCBI NO: 15240763 NR Description: putative protein
MEALVHICRDGCKTIGPHDKDFKPNHATCNYEACKGLESLIRHFAGCKLRVPGGCVHCKRMWQLLELHSRVCAGSDQCRVPLCRNLKEKMEKQSKKDESRWKLLVKNVLGSKKIGGSPFFLPVTNC

SEQ ID NO: 25978 - DNA, 1460 bp, Arabidopsis thaliana
  misc_feature (1)..(1460): Ceres Seq. ID no. 13490070
  misc_feature: MA Experiment ID: 108461 Result: Up-regulated in Transcription
  misc_feature: MA Experiment 108461 PARAMETER Experiment Name: At_Germinating_Seeds_cDNA_P Parameter: Age (day) Value: 1 vs. 0
  misc_feature: MA Experiment 108461 PARAMETER Experiment Name: At_Germinating_Seeds_cDNA_P Parameter: Tissue Value: Germinating Seeds
  misc_feature: MA Experiment ID: 108462 Result: Up-regulated in Transcription
  misc_feature: MA Experiment 108462 PARAMETER Experiment Name: At_Germinating_Seeds_cDNA_P Parameter: Age (day) Value: 2 vs. 0
  misc_feature: MA Experiment 108462 PARAMETER Experiment Name: At_Germinating_Seeds_cDNA_P Parameter: Tissue Value: Germinating Seeds
  misc_feature: MA Experiment ID: 108463 Result: Up-regulated in Transcription
  misc_feature: MA Experiment 108463 PARAMETER Experiment Name: At_Germinating_Seeds_cDNA_P Parameter: Age (day) Value: 3 vs. 0
  misc_feature: MA Experiment 108463 PARAMETER Experiment Name: At_Germinating_Seeds_cDNA_P Parameter: Tissue Value: Germinating Seeds
  misc_feature: MA Experiment ID: 108464 Result: Up-regulated in Transcription
  misc_feature: MA Experiment 108464 PARAMETER Experiment Name: At_Germinating_Seeds_cDNA_P Parameter: Age (day) Value: 4 vs. 0
  misc_feature: MA Experiment 108464 PARAMETER Experiment Name: At_Germinating_Seeds_cDNA_P Parameter: Tissue Value: Germinating Seeds
  misc_feature: MA Experiment ID: 108473 Result: Down-regulated in Transcription
  misc_feature: MA Experiment 108473 PARAMETER Experiment Name: At_Drought_Flowers_cDNA_P Parameter: Timepoint (hr) Value: 7 d
  misc_feature: MA Experiment 108473 PARAMETER Experiment Name: At_Drought_Flowers_cDNA_P Parameter: Tissue Value: Flower
  misc_feature: MA Experiment 108473 PARAMETER Experiment Name: At_Drought_Flowers_cDNA_P Parameter: Treatment Value: Drought vs. No Drought
  misc_feature: MA Experiment ID: 108561 Result: Down-regulated in Transcription
  misc_feature: MA Experiment 108561 PARAMETER Experiment Name: At_100uM_ABA_cDNA_P Parameter: Timepoint (hr) Value: 6
  misc_feature: MA Experiment 108561 PARAMETER Experiment Name: At_100uM_ABA_cDNA_P Parameter: Tissue Value: Aerial
  misc_feature: MA Experiment 108561 PARAMETER Experiment Name: At_100uM_ABA_cDNA_P Parameter: Treatment Value: 100uM ABA vs. No Treatment
  misc_feature: MA Experiment ID: 108573 Result: Down-regulated in Transcription
  misc_feature: MA Experiment 108573 PARAMETER Experiment Name: At_Drought_cDNA_P Parameter: Timepoint (hr) Value: 6
  misc_feature: MA Experiment 108573 PARAMETER Experiment Name: At_Drought_cDNA_P Parameter: Tissue Value: Aerial
  misc_feature: MA Experiment 108573 PARAMETER Experiment Name: At_Drought_cDNA_P Parameter: Treatment Value: Drought vs. No Drought
  misc_feature: MA Experiment ID: 108576 Result: Down-regulated in Transcription
  misc_feature: MA Experiment 108576 PARAMETER Experiment Name: At_42deg_Heat_cDNA_P Parameter: Temperature (deg C) Value: 42 vs. 22
  misc_feature: MA Experiment 108576 PARAMETER Experiment Name: At_42deg_Heat_cDNA_P Parameter: Timepoint (hr) Value: 1
  misc_feature: MA Experiment 108576 PARAMETER Experiment Name: At_42deg_Heat_cDNA_P Parameter: Tissue Value: Aerial
  misc_feature: MA Experiment ID: 108585 Result: Down-regulated in Transcription
  misc_feature: MA Experiment 108585 PARAMETER Experiment Name: At_5mM_NaNP_cDNA_P Parameter: Timepoint (hr) Value: 6
  misc_feature: MA Experiment 108585 PARAMETER Experiment Name: At_5mM_NaNP_cDNA_P Parameter: Tissue Value: Aerial
  misc_feature: MA Experiment 108585 PARAMETER Experiment Name: At_5mM_NaNP_cDNA_P Parameter: Treatment Value: null
  misc_feature: MA Experiment ID: 108595 Result: Down-regulated in Transcription
  misc_feature: MA Experiment 108595 PARAMETER Experiment Name: At_Ler-pi_Ovule_cDNA_P Parameter: Plant Line Value: null
  misc_feature: MA Experiment ID: 108607 Result: Down-regulated in Transcription
  misc_feature: MA Experiment 108607 PARAMETER Experiment Name: At_100uM_ABA_cDNA_P Parameter: Timepoint (hr) Value: 4
  misc_feature: MA Experiment 108607 PARAMETER Experiment Name: At_100uM_ABA_cDNA_P Parameter: Tissue Value: Aerial
  misc_feature: MA Experiment 108607 PARAMETER Experiment Name: At_100uM_ABA_cDNA_P Parameter: Treatment Value: 100uM ABA vs. No Treatment
  misc_feature: MA Experiment ID: 20000069 Result: Down-regulated in Transcription
  misc_feature: MA Experiment 20000069 PARAMETER Experiment Name: At_100uM_ABA_Mutants_cDNA_P Parameter: Plant Line Value: CS23
  misc_feature: MA Experiment 20000069 PARAMETER Experiment Name: At_100uM_ABA_Mutants_cDNA_P Parameter: Timepoint (hr) Value: 6
  misc_feature: MA Experiment 20000069 PARAMETER Experiment Name: At_100uM_ABA_Mutants_cDNA_P Parameter: Tissue Value: Aerial
  misc_feature: MA Experiment 20000069 PARAMETER Experiment Name: At_100uM_ABA_Mutants_cDNA_P Parameter: Treatment Value: 100uM ABA vs. No Treatment
  misc_feature: MA Experiment ID: 20000093 Result: Down-regulated in Transcription
  misc_feature: MA Experiment 20000093 PARAMETER Experiment Name: At_42deg_Heat_cDNA_P Parameter: Temperature (deg C) Value: 42 vs. 22
  misc_feature: MA Experiment 20000093 PARAMETER Experiment Name: At_42deg_Heat_cDNA_P Parameter: Timepoint (hr) Value: 0.5
  misc_feature: MA Experiment 20000093 PARAMETER Experiment Name: At_42deg_Heat_cDNA_P Parameter: Tissue Value: Aerial
  misc_feature: MA Experiment ID: 20000112 Result: Down-regulated in Transcription
  misc_feature: MA Experiment 20000112 PARAMETER Experiment Name: At_42deg_Heat_cDNA_P Parameter: Temperature (deg C) Value: 42 vs. 22
  misc_feature: MA Experiment 20000112 PARAMETER Experiment Name: At_42deg_Heat_cDNA_P Parameter: Timepoint (hr) Value: 2
  misc_feature: MA Experiment 20000112 PARAMETER Experiment Name: At_42deg_Heat_cDNA_P Parameter: Tissue Value: Aerial
  misc_feature: MA Experiment ID: 20000113 Result: Down-regulated in Transcription
  misc_feature: MA Experiment 20000113 PARAMETER Experiment Name: At_42deg_Heat_cDNA_P Parameter: Temperature (deg C) Value: 42 vs. 22
  misc_feature: MA Experiment 20000113 PARAMETER Experiment Name: At_42deg_Heat_cDNA_P Parameter: Timepoint (hr) Value: 8
  misc_feature: MA Experiment 20000113 PARAMETER Experiment Name: At_42deg_Heat_cDNA_P Parameter: Tissue Value: Aerial
  misc_feature: MA Experiment ID: 20000117 Result: Down-regulated in Transcription
  misc_feature: MA Experiment 20000117 PARAMETER Experiment Name: At_100uM_ABA_Mutants_cDNA_P Parameter: Plant Line Value: Columbia
  misc_feature: MA Experiment 20000117 PARAMETER Experiment Name: At_100uM_ABA_Mutants_cDNA_P Parameter: Timepoint (hr) Value: 6
  misc_feature: MA Experiment 20000117 PARAMETER Experiment Name: At_100uM_ABA_Mutants_cDNA_P Parameter: Tissue Value: Aerial
  misc_feature: MA Experiment 20000117 PARAMETER Experiment Name: At_100uM_ABA_Mutants_cDNA_P Parameter: Treatment Value: 100uM ABA vs. No Treatment
  misc_feature: MA Experiment ID: 20000144 Result: Down-regulated in Transcription
  misc_feature: MA Experiment 20000144 PARAMETER Experiment Name: At_42deg_Heat_cDNA_P Parameter: Temperature (deg C) Value: 42 vs. 22
  misc_feature: MA Experiment 20000144 PARAMETER Experiment Name: At_42deg_Heat_cDNA_P Parameter: Timepoint (hr) Value: 1
  misc_feature: MA Experiment 20000144 PARAMETER Experiment Name: At_42deg_Heat_cDNA_P Parameter: Tissue Value: Aerial
  misc_feature: MA Experiment ID: 20000171 Result: Down-regulated in Transcription
  misc_feature: MA Experiment 20000171 PARAMETER Experiment Name: At_42deg_Heat_P Parameter: Age (day) Value: 14
  misc_feature: MA Experiment 20000171 PARAMETER Experiment Name: At_42deg_Heat_P Parameter: Organism Value: A. thaliana
  misc_feature: MA Experiment 20000171 PARAMETER Experiment Name: At_42deg_Heat_P Parameter: Plant Line Value: WS
  misc_feature: MA Experiment 20000171 PARAMETER Experiment Name: At_42deg_Heat_P Parameter: Temperature (deg C) Value: 42 vs. 22
  misc_feature: MA Experiment 20000171 PARAMETER Experiment Name: At_42deg_Heat_P Parameter: Timepoint (hr) Value: 1
  misc_feature: MA Experiment 20000171 PARAMETER Experiment Name: At_42deg_Heat_P Parameter: Tissue Value: Aerial
  misc_feature: MA Experiment ID: 20000179 Result: Up-regulated in Transcription
  misc_feature: MA Experiment 20000179 PARAMETER Experiment Name: At_Germinating_Seeds_P Parameter: Age (hr) Value: 6 vs. 0
  misc_feature: MA Experiment 20000179 PARAMETER Experiment Name: At_Germinating_Seeds_P Parameter: Tissue Value: Germinating Seeds
  misc_feature: MA Experiment ID: 20000180 Result: Up-regulated in Transcription
  misc_feature: MA Experiment 20000180 PARAMETER Experiment Name: At_Germinating_Seeds_P Parameter: Age (hr) Value: 24 vs. 0
  misc_feature: MA Experiment 20000180 PARAMETER Experiment Name: At_Germinating_Seeds_P Parameter: Tissue Value: Germinating Seeds
  misc_feature: MA Experiment ID: 20000182 Result: Down-regulated in Transcription
  misc_feature: MA Experiment 20000182 PARAMETER Experiment Name: At_2mM_SA_P Parameter: Age (day) Value: 14
  misc_feature: MA Experiment 20000182 PARAMETER Experiment Name: At_2mM_SA_P Parameter: Organism Value: A. thaliana
  misc_feature: MA Experiment 20000182 PARAMETER Experiment Name: At_2mM_SA_P Parameter: Plant Line Value: WS
  misc_feature: MA Experiment 20000182 PARAMETER Experiment Name: At_2mM_SA_P Parameter: Timepoint (hr) Value: 6
  misc_feature: MA Experiment 20000182 PARAMETER Experiment Name: At_2mM_SA_P Parameter: Tissue Value: Aerial
  misc_feature: MA Experiment 20000182 PARAMETER Experiment Name: At_2mM_SA_P Parameter: Treatment Value: 2mM SA vs. No Treatment
  misc_feature: MA Experiment ID: 20000184 Result: Up-regulated in Transcription
  misc_feature: MA Experiment 20000184 PARAMETER Experiment Name: At_Shoots__P Parameter: Age (day) Value: 7
  misc_feature: MA Experiment 20000184 PARAMETER Experiment Name: At_Shoots__P Parameter: Tissue Value: Shoots vs. Whole Plant
  misc_feature: MA Experiment ID: 20000185 Result: Down-regulated in Transcription
  misc_feature: MA Experiment 20000185 PARAMETER Experiment Name: At_Roots__P Parameter: Age (day) Value: 7 vs. 21
  misc_feature: MA Experiment 20000185 PARAMETER Experiment Name: At_Roots__P Parameter: Organism Value: A. thaliana
  misc_feature: MA Experiment 20000185 PARAMETER Experiment Name: At_Roots__P Parameter: Tissue Value: Roots vs. Whole Plant
  misc_feature: MA Experiment ID: 20000234 Result: Up-regulated in Transcription
  misc_feature: MA Experiment 20000234 PARAMETER Experiment Name: At_Siliques_P Parameter: Age (day) Value: 21
  misc_feature: MA Experiment 20000234 PARAMETER Experiment Name: At_Siliques_P Parameter: Organism Value: A. thaliana
  misc_feature: MA Experiment 20000234 PARAMETER Experiment Name: At_Siliques_P Parameter: Plant Line Value: WS
  misc_feature: MA Experiment 20000234 PARAMETER Experiment Name: At_Siliques_P Parameter: Tissue Value: Less Than 5mm Siliques vs. Whole Plant
  misc_feature: MA Experiment ID: 20000264 Result: Up-regulated in Transcription
  misc_feature: MA Experiment 20000264 PARAMETER Experiment Name: At_Open_Flower_P Parameter: Age (day) Value: 21
  misc_feature: MA Experiment 20000264 PARAMETER Experiment Name: At_Open_Flower_P Parameter: Plant Line Value: WS
  misc_feature: MA Experiment 20000264 PARAMETER Experiment Name: At_Open_Flower_P Parameter: Tissue Value: Open Flower vs. Whole Plant
  misc_feature: MA Experiment ID: 20000265 Result: Up-regulated in Transcription
  misc_feature: MA Experiment 20000265 PARAMETER Experiment Name: At_Open_Flower_P Parameter: Age (day) Value: 21
  misc_feature: MA Experiment 20000265 PARAMETER Experiment Name: At_Open_Flower_P Parameter: Plant Line Value: WS
  misc_feature: MA Experiment 20000265 PARAMETER Experiment Name: At_Open_Flower_P Parameter: Tissue Value: Closed Flower vs. Whole Plant
  misc_feature: MA Experiment ID: 20000286 Result: Up-regulated in Transcription
  misc_feature: MA Experiment 20000286 PARAMETER Experiment Name: At_Open_Flower_P Parameter: Age (day) Value: 21
  misc_feature: MA Experiment 20000286 PARAMETER Experiment Name: At_Open_Flower_P Parameter: Plant Line Value: WS
  misc_feature: MA Experiment 20000286 PARAMETER Experiment Name: At_Open_Flower_P Parameter: Tissue Value: Half Open vs. Whole Plant
  misc_feature: MA Experiment ID: 20000436 Result: Down-regulated in Transcription
  misc_feature: MA Experiment 20000436 PARAMETER Experiment Name: At_Drought_P Parameter: Age (day) Value: 7
  misc_feature: MA Experiment 20000436 PARAMETER Experiment Name: At_Drought_P Parameter: Organism Value: A. thaliana
  misc_feature: MA Experiment 20000436 PARAMETER Experiment Name: At_Drought_P Parameter: Plant Line Value: WS
  misc_feature: MA Experiment 20000436 PARAMETER Experiment Name: At_Drought_P Parameter: Timepoint (hr) Value: 12
  misc_feature: MA Experiment 20000436 PARAMETER Experiment Name: At_Drought_P Parameter: Tissue Value: Whole Plant
  misc_feature: MA Experiment 20000436 PARAMETER Experiment Name: At_Drought_P Parameter: Treatment Value: Drought vs. No Drought
  misc_feature: MA Experiment ID: 20000437 Result: Down-regulated in Transcription
  misc_feature: MA Experiment 20000437 PARAMETER Experiment Name: At_Drought_P Parameter: Age (day) Value: 8
  misc_feature: MA Experiment 20000437 PARAMETER Experiment Name: At_Drought_P Parameter: Organism Value: A. thaliana
  misc_feature: MA Experiment 20000437 PARAMETER Experiment Name: At_Drought_P Parameter: Plant Line Value: WS
  misc_feature: MA Experiment 20000437 PARAMETER Experiment Name: At_Drought_P Parameter: Timepoint (hr) Value: 24
  misc_feature: MA Experiment 20000437 PARAMETER Experiment Name: At_Drought_P Parameter: Tissue Value: Whole Plant
  misc_feature: MA Experiment 20000437 PARAMETER Experiment Name: At_Drought_P Parameter: Treatment Value: Drought vs. No Drought
  misc_feature: MA Experiment ID: 20000438 Result: Up-regulated in Transcription
  misc_feature: MA Experiment 20000438 PARAMETER Experiment Name: At_Shoots__P Parameter: Age (day) Value: 14
  misc_feature: MA Experiment 20000438 PARAMETER Experiment Name: At_Shoots__P Parameter: Tissue Value: Shoots vs. Whole Plant
  misc_feature: MA Experiment ID: 20000439 Result: Down-regulated in Transcription
  misc_feature: MA Experiment 20000439 PARAMETER Experiment Name: At_Roots__P Parameter: Age (day) Value: 14 vs. 21
  misc_feature: MA Experiment 20000439 PARAMETER Experiment Name: At_Roots__P Parameter: Organism Value: A. thaliana
  misc_feature: MA Experiment 20000439 PARAMETER Experiment Name: At_Roots__P Parameter: Tissue Value: Roots vs. Whole Plant
  misc_feature: MA Experiment ID: 20000527 Result: Down-regulated in Transcription
  misc_feature: MA Experiment 20000527 PARAMETER Experiment Name: At_10percent_PEG_P Parameter: Age (day) Value: 20
  misc_feature: MA Experiment 20000527 PARAMETER Experiment Name: At_10percent_PEG_P Parameter: Organism Value: A. thaliana
  misc_feature: MA Experiment 20000527 PARAMETER Experiment Name: At_10percent_PEG_P Parameter: Plant Line Value: WS
  misc_feature: MA Experiment 20000527 PARAMETER Experiment Name: At_10percent_PEG_P Parameter: Timepoint (day) Value: 20
  misc_feature: MA Experiment 20000527 PARAMETER Experiment Name: At_10percent_PEG_P Parameter: Tissue Value: Whole Plant
  misc_feature: MA Experiment 20000527 PARAMETER Experiment Name: At_10percent_PEG_P Parameter: Treatment Value: 10percent PEG vs. No Treatment
  misc_feature: MA Experiment ID: 20000794 Result: Down-regulated in Transcription
  misc_feature: MA Experiment 20000794 PARAMETER Experiment Name: At_Petals_P Parameter: Age (day) Value: 23-25 days
  misc_feature: MA Experiment 20000794 PARAMETER Experiment Name: At_Petals_P Parameter: Plant Line Value: WS
  misc_feature: MA Experiment 20000794 PARAMETER Experiment Name: At_Petals_P Parameter: Tissue Value: Petals vs. Whole plant
  misc_feature: MA Experiment ID: 20001248 Result: Down-regulated in Transcription
  misc_feature: MA Experiment 20001248 PARAMETER Experiment Name: At_Far-red-induction_P Parameter: Age (day) Value: 7
  misc_feature: MA Experiment 20001248 PARAMETER Experiment Name: At_Far-red-induction_P Parameter: Light Value: Far-red vs. White
  misc_feature: MA Experiment 20001248 PARAMETER Experiment Name: At_Far-red-induction_P Parameter: Organism Value: A. thaliana
  misc_feature: MA Experiment 20001248 PARAMETER Experiment Name: At_Far-red-induction_P Parameter: Plant Line Value: Columbia
  misc_feature: MA Experiment 20001248 PARAMETER Experiment Name: At_Far-red-induction_P Parameter: Timepoint (hr) Value: 4
  misc_feature: MA Experiment 20001248 PARAMETER Experiment Name: At_Far-red-induction_P Parameter: Tissue Value: Whole Plant
  misc_feature: MA Experiment ID: 20001450 Result: Down-regulated in Transcription
  misc_feature: MA Experiment 20001450 PARAMETER Experiment Name: At_Far-red-induction_P Parameter: Age (day) Value: 7
  misc_feature: MA Experiment 20001450 PARAMETER Experiment Name: At_Far-red-induction_P Parameter: Light Value: Far-red vs. White
  misc_feature: MA Experiment 20001450 PARAMETER Experiment Name: At_Far-red-induction_P Parameter: Organism Value: A. thaliana
  misc_feature: MA Experiment 20001450 PARAMETER Experiment Name: At_Far-red-induction_P Parameter: Plant Line Value: Columbia
  misc_feature: MA Experiment 20001450 PARAMETER Experiment Name: At_Far-red-induction_P Parameter: Timepoint (hr) Value: 8
  misc_feature: MA Experiment 20001450 PARAMETER Experiment Name: At_Far-red-induction_P Parameter: Tissue Value: Whole Plant
  misc_feature: MA Experiment ID: 20001451 Result: Down-regulated in Transcription
  misc_feature: MA Experiment 20001451 PARAMETER Experiment Name: At_Far-red-induction_P Parameter: Age (day) Value: 7
  misc_feature: MA Experiment 20001451 PARAMETER Experiment Name: At_Far-red-induction_P Parameter: Light Value: Far-red vs. White
  misc_feature: MA Experiment 20001451 PARAMETER Experiment Name: At_Far-red-induction_P Parameter: Organism Value: A. thaliana
  misc_feature: MA Experiment 20001451 PARAMETER Experiment Name: At_Far-red-induction_P Parameter: Plant Line Value: Columbia
  misc_feature: MA Experiment 20001451 PARAMETER Experiment Name: At_Far-red-induction_P Parameter: Timepoint (hr) Value: 24
  misc_feature: MA Experiment 20001451 PARAMETER Experiment Name: At_Far-red-induction_P Parameter: Tissue Value: Whole Plant
  misc_feature: MA Experiment ID: 20001555 Result: Down-regulated in Transcription
  misc_feature: MA Experiment 20001555 PARAMETER Experiment Name: At_Drought_Soil_Dry_P Parameter: Age (day) Value: 24
  misc_feature: MA Experiment 20001555 PARAMETER Experiment Name: At_Drought_Soil_Dry_P Parameter: Organism Value: A. thaliana
  misc_feature: MA Experiment 20001555 PARAMETER Experiment Name: At_Drought_Soil_Dry_P Parameter: Plant Line Value: WS
  misc_feature: MA Experiment 20001555 PARAMETER Experiment Name: At_Drought_Soil_Dry_P Parameter: Post Timepoint (hr) Value: None
  misc_feature: MA Experiment 20001555 PARAMETER Experiment Name: At_Drought_Soil_Dry_P Parameter: Post-Treatment Value: None
  misc_feature: MA Experiment 20001555 PARAMETER Experiment Name: At_Drought_Soil_Dry_P Parameter: Timepoint (day) Value: 10
  misc_feature: MA Experiment 20001555 PARAMETER Experiment Name: At_Drought_Soil_Dry_P Parameter: Treatment Value: Drought vs. No Drought
  misc_feature: MA Experiment ID: 20001556 Result: Down-regulated in Transcription
  misc_feature: MA Experiment 20001556 PARAMETER Experiment Name: At_Drought_Soil_Dry_P Parameter: Age (day) Value: 26
  misc_feature: MA Experiment 20001556 PARAMETER Experiment Name: At_Drought_Soil_Dry_P Parameter: Organism Value: A. thaliana
  misc_feature: MA Experiment 20001556 PARAMETER Experiment Name: At_Drought_Soil_Dry_P Parameter: Plant Line Value: WS
  misc_feature: MA Experiment 20001556 PARAMETER Experiment Name: At_Drought_Soil_Dry_P Parameter: Post Timepoint (hr) Value: None
  misc_feature: MA Experiment 20001556 PARAMETER Experiment Name: At_Drought_Soil_Dry_P Parameter: Post-Treatment Value: None
  misc_feature: MA Experiment 20001556 PARAMETER Experiment Name: At_Drought_Soil_Dry_P Parameter: Timepoint (day) Value: 12
  misc_feature: MA Experiment 20001556 PARAMETER Experiment Name: At_Drought_Soil_Dry_P Parameter: Treatment Value: Drought vs. No Drought
  misc_feature: MA Experiment ID: 20001559 Result: Down-regulated in Transcription
  misc_feature: MA Experiment 20001559 PARAMETER Experiment Name: At_Drought_Soil_Dry_P Parameter: Age (day) Value: 28
  misc_feature: MA Experiment 20001559 PARAMETER Experiment Name: At_Drought_Soil_Dry_P Parameter: Organism Value: A. thaliana
  misc_feature: MA Experiment 20001559 PARAMETER Experiment Name: At_Drought_Soil_Dry_P Parameter: Plant Line Value: WS
  misc_feature: MA Experiment 20001559 PARAMETER Experiment Name: At_Drought_Soil_Dry_P Parameter: Post Timepoint (hr) Value: 29
  misc_feature: MA Experiment 20001559 PARAMETER Experiment Name: At_Drought_Soil_Dry_P Parameter: Post-Treatment Value: Re-Water vs. No Drought
  misc_feature: MA Experiment 20001559 PARAMETER Experiment Name: At_Drought_Soil_Dry_P Parameter: Timepoint (day) Value: 14
  misc_feature: MA Experiment 20001559 PARAMETER Experiment Name: At_Drought_Soil_Dry_P Parameter: Treatment Value: Drought vs. No Drought
  misc_feature: MA Experiment ID: 20001906 Result: Down-regulated in Transcription
  misc_feature: MA Experiment 20001906 PARAMETER Experiment Name: At_Drought_Reproduction_P Parameter: Age (day) Value: 35
  misc_feature: MA Experiment 20001906 PARAMETER Experiment Name: At_Drought_Reproduction_P Parameter: Organism Value: A. thaliana
  misc_feature: MA Experiment 20001906 PARAMETER Experiment Name: At_Drought_Reproduction_P Parameter: Plant Line Value: WS
  misc_feature: MA Experiment 20001906 PARAMETER Experiment Name: At_Drought_Reproduction_P Parameter: Timepoint (day) Value: 5
  misc_feature: MA Experiment 20001906 PARAMETER Experiment Name: At_Drought_Reproduction_P Parameter: Tissue Value: Siliques
  misc_feature: MA Experiment 20001906 PARAMETER Experiment Name: At_Drought_Reproduction_P Parameter: Treatment Value: Drought vs. No Drought
  misc_feature: MA Experiment ID: 20001911 Result: Down-regulated in Transcription
  misc_feature: MA Experiment 20001911 PARAMETER Experiment Name: At_Drought_Reproduction_P Parameter: Age (day) Value: 40
  misc_feature: MA Experiment 20001911 PARAMETER Experiment Name: At_Drought_Reproduction_P Parameter: Organism Value: A. thaliana
  misc_feature: MA Experiment 20001911 PARAMETER Experiment Name: At_Drought_Reproduction_P Parameter: Plant Line Value: WS
  misc_feature: MA Experiment 20001911 PARAMETER Experiment Name: At_Drought_Reproduction_P Parameter: Timepoint (day) Value: 10
  misc_feature: MA Experiment 20001911 PARAMETER Experiment Name: At_Drought_Reproduction_P Parameter: Tissue Value: Flowers
  misc_feature: MA Experiment 20001911 PARAMETER Experiment Name: At_Drought_Reproduction_P Parameter: Treatment Value: Drought vs. No Drought
atatcatacgtcaatttataaacgtttcttctcattcgtcatctagtcccattctctgtccataacaatgaatatcaattgttctccattagggtttctaatttcactcttcttcattgttacttttcttgcaccacaagtcaaatctagggctttctttgtctttggtgactctctcgtcgacaatggaaacaacgactacctcgtcaccactgcccgtgccgacaattacccgtatggtatcgactacccgacccgtagacccaccggacgtttctctaacggccttaacattcccgacattatcagtgaggctataggcatgccgtcgactttgccgtaccttagcccgcatctcaccggagaaaatcttctagtcggtgctaattttgcctccgcaggaattggaatcctcaacgacactggaattcaattcgtaaacataattagaatttctaaacagatggaatacttcgaacagtaccagctacgagtgagtgcattgatcggaccagaagctacacaacagctagttaaccaagctcttgtcctaattacactcggtggtaatgatttcgtcaacaattattatctaattccgttttcagctcgttctcgccaatacgcgttaccagactacgttgtgtatctcatttccgaatacggaaagattctcagaaaactctacgaactgggtgcaagacgagttttggtaactggaactggtgcaatgggatgtgctcccgcggagctggctcagcatagccgcaatggcgagtgctatggcgccctccaaacagcagccgctttgttcaatccgcaattagttgatttgatcgcatcagtcaatgctgaaattggtcaagacgtgtttgtagcagccaatgcctatcaaatgaacatggattatctatctaatcctgaacaatttgggtttgtgacatcgaaggtggcatgttgtggacaaggaccgtacaatggcataggactatgcacaccagtctcgaatttgtgtccgaatagagacttatatgcgttttgggatgcgtttcatccgacagagaaagccaataggatcatcgttaatcagatcctgactggttcctccaagtatatgcaccctatgaatcttagcacggccatgctattggattcttctaaaatctagtttaagtgatttctgtcaactaaatgtcaggtcattccttctgtactttgcattgttgttaatgtgttgattaataagttcaatggctacaattagtttaagcatgcaagagagtttttattgtcggtcgtctagtttgatgtctttgcttgttgtatcttgttattttttttattttataaaagaaccgttgtatcttggttagcttagtttagtcttttttggtttgtatgccaattatatcatgtaatatttgaaaacttgtagtgattgatatatgattttcttttct

SEQ ID NO: 25979 - protein, 366 aa, Arabidopsis thaliana
  peptide (1)..(366): Ceres Seq. ID no. 13490071
  misc_feature (30)..(342): Pfam Name: GDSL-like Lipase/Acylhydrolase Pfam Description: GDSL-like Lipase/Acylhydrolase
  misc_feature (3)..(357): Homolog of NCBI NO: 34909504 NR Description: putative GDSL-motif lipase/hydrolase-like protein
  misc_feature (29)..(355): Homolog of NCBI NO: 11280578 NR Description: hypothetical protein F14F8_100 - Arabidopsis
  misc_feature (21)..(189): Homolog of NCBI NO: 37789825 NR Description: putative GDSL-motif lipase [Vitis vinifera]
  misc_feature (12)..(361): Homolog of NCBI NO: 15238814 NR Description: GDSL-motif lipase/hydrolase protein [Arabidopsis
  misc_feature (22)..(365): Homolog of NCBI NO: 22758315 NR Description: putative early nodulin gene (Enod) related
  misc_feature (3)..(365): Homolog of NCBI NO: 37535146 NR Description: putative early nodulin gene (Enod) related
  misc_feature (17)..(363): Homolog of NCBI NO: 15235421 NR Description: GDSL-motif lipase/hydrolase protein [Arabidopsis
  misc_feature (24)..(364): Homolog of NCBI NO: 28071322 NR Description: P0705A05.30 [Oryza sativa (japonica
  misc_feature (8)..(363): Homolog of NCBI NO: 15242808 NR Description: GDSL-motif lipase/hydrolase protein [Arabidopsis
  misc_feature (1)..(366): Homolog of NCBI NO: 15229265 NR Description: GDSL-motif lipase/hydrolase protein [Arabidopsis
MNINCSPLGFLISLFFIVTFLAPQVKSRAFFVFGDSLVDNGNNDYLVTTARADNYPYGIDYPTRRPTGRFSNGLNIPDIISEAIGMPSTLPYLSPHLTGENLLVGANFASAGIGILNDTGIQFVNIIRISKQMEYFEQYQLRVSALIGPEATQQLVNQALVLITLGGNDFVNNYYLIPFSARSRQYALPDYVVYLISEYGKILRKLYELGARRVLVTGTGAMGCAPAELAQHSRNGECYGALQTAAALFNPQLVDLIASVNAEIGQDVFVAANAYQMNMDYLSNPEQFGFVTSKVACCGQGPYNGIGLCTPVSNLCPNRDLYAFWDAFHPTEKANRIIVNQILTGSSKYMHPMNLSTAMLLDSSKI

SEQ ID NO: 25980 - protein, 281 aa, Arabidopsis thaliana
  peptide (1)..(281): Ceres Seq. ID no. 13490072
  misc_feature (1)..(257): Pfam Name: GDSL-like Lipase/Acylhydrolase Pfam Description: GDSL-like Lipase/Acylhydrolase
  misc_feature (1)..(272): Homolog of NCBI NO: 34909504 NR Description: putative GDSL-motif lipase/hydrolase-like protein
  misc_feature (1)..(270): Homolog of NCBI NO: 11280578 NR Description: hypothetical protein F14F8_100 - Arabidopsis
  misc_feature (1)..(104): Homolog of NCBI NO: 37789825 NR Description: putative GDSL-motif lipase [Vitis vinifera]
  misc_feature (1)..(276): Homolog of NCBI NO: 15238814 NR Description: GDSL-motif lipase/hydrolase protein [Arabidopsis
  misc_feature (1)..(280): Homolog of NCBI NO: 22758315 NR Description: putative early nodulin gene (Enod) related
  misc_feature (1)..(280): Homolog of NCBI NO: 37535146 NR Description: putative early nodulin gene (Enod) related
  misc_feature (1)..(278): Homolog of NCBI NO: 15235421 NR Description: GDSL-motif lipase/hydrolase protein [Arabidopsis
  misc_feature (1)..(279): Homolog of NCBI NO: 28071322 NR Description: P0705A05.30 [Oryza sativa (japonica
  misc_feature (1)..(278): Homolog of NCBI NO: 15242808 NR Description: GDSL-motif lipase/hydrolase protein [Arabidopsis
  misc_feature (1)..(281): Homolog of NCBI NO: 15229265 NR Description: GDSL-motif lipase/hydrolase protein [Arabidopsis
MPSTLPYLSPHLTGENLLVGANFASAGIGILNDTGIQFVNIIRISKQMEYFEQYQLRVSALIGPEATQQLVNQALVLITLGGNDFVNNYYLIPFSARSRQYALPDYVVYLISEYGKILRKLYELGARRVLVTGTGAMGCAPAELAQHSRNGECYGALQTAAALFNPQLVDLIASVNAEIGQDVFVAANAYQMNMDYLSNPEQFGFVTSKVACCGQGPYNGIGLCTPVSNLCPNRDLYAFWDAFHPTEKANRIIVNQILTGSSKYMHPMNLSTAMLLDSSKI

SEQ ID NO: 25981 - protein, 234 aa, Arabidopsis thaliana
  peptide (1)..(234): Ceres Seq. ID no. 13490073
  misc_feature (1)..(210): Pfam Name: GDSL-like Lipase/Acylhydrolase Pfam Description: GDSL-like Lipase/Acylhydrolase
  misc_feature (1)..(225): Homolog of NCBI NO: 34909504 NR Description: putative GDSL-motif lipase/hydrolase-like protein
  misc_feature (1)..(223): Homolog of NCBI NO: 11280578 NR Description: hypothetical protein F14F8_100 - Arabidopsis
  misc_feature (1)..(57): Homolog of NCBI NO: 37789825 NR Description: putative GDSL-motif lipase [Vitis vinifera]
  misc_feature (1)..(229): Homolog of NCBI NO: 15238814 NR Description: GDSL-motif lipase/hydrolase protein [Arabidopsis
  misc_feature (1)..(233): Homolog of NCBI NO: 22758315 NR Description: putative early nodulin gene (Enod) related
  misc_feature (1)..(233): Homolog of NCBI NO: 37535146 NR Description: putative early nodulin gene (Enod) related
  misc_feature (1)..(231): Homolog of NCBI NO: 15235421 NR Description: GDSL-motif lipase/hydrolase protein [Arabidopsis
  misc_feature (1)..(232): Homolog of NCBI NO: 28071322 NR Description: P0705A05.30 [Oryza sativa (japonica
  misc_feature (1)..(231): Homolog of NCBI NO: 15242808 NR Description: GDSL-motif lipase/hydrolase protein [Arabidopsis
  misc_feature (1)..(234): Homolog of NCBI NO: 15229265 NR Description: GDSL-motif lipase/hydrolase protein [Arabidopsis
MEYFEQYQLRVSALIGPEATQQLVNQALVLITLGGNDFVNNYYLIPFSARSRQYALPDYVVYLISEYGKILRKLYELGARRVLVTGTGAMGCAPAELAQHSRNGECYGALQTAAALFNPQLVDLIASVNAEIGQDVFVAANAYQMNMDYLSNPEQFGFVTSKVACCGQGPYNGIGLCTPVSNLCPNRDLYAFWDAFHPTEKANRIIVNQILTGSSKYMHPMNLSTAMLLDSSKI

SEQ ID NO: 25982 - DNA, 1638 bp, Arabidopsis thaliana
  misc_feature (1)..(1638): Ceres Seq. ID no. 12332929
  misc_feature: MA Experiment ID: 20000235 Result: Up-regulated in Transcription
  misc_feature: MA Experiment 20000235 PARAMETER Experiment Name: At_Siliques_P Parameter: Age (day) Value: 21
  misc_feature: MA Experiment 20000235 PARAMETER Experiment Name: At_Siliques_P Parameter: Organism Value: A. thaliana
  misc_feature: MA Experiment 20000235 PARAMETER Experiment Name: At_Siliques_P Parameter: Plant Line Value: WS
  misc_feature: MA Experiment 20000235 PARAMETER Experiment Name: At_Siliques_P Parameter: Tissue Value: 5-10mm Siliques vs. Whole Plant
  misc_feature: MA Experiment ID: 20000794 Result: Up-regulated in Transcription
  misc_feature: MA Experiment 20000794 PARAMETER Experiment Name: At_Petals_P Parameter: Age (day) Value: 23-25 days
  misc_feature: MA Experiment 20000794 PARAMETER Experiment Name: At_Petals_P Parameter: Plant Line Value: WS
  misc_feature: MA Experiment 20000794 PARAMETER Experiment Name: At_Petals_P Parameter: Tissue Value: Petals vs. Whole plant
aagatctaagcgaaaacaaaaaaaaatgccttaaaacatttgaagaagcaaaacgaagaaacagtgagagagatagaaatggcgagcttaactagtaataagcctagaaattttggtgcgtatagtcactacgctactccctgcactcgcacgcaccagattggacctctttttctcgtcgtctctaccttcttcgtcactaggcttttcgatcagtggttctcggaatccaattccgttactccggtgattgatctccgtcgtacttcttcttcttacggaatcaaaactgataacggtattatacggtggccggagcgaggttatgggtctcacctctcgctgaagatctacgtttatgatgagaatgagatcgacggtcttaaagagctgttgtacggtagggatggtagtgttaagaccaccgcatgcttgaaaggtcaatggggatctcaggttaaaattcacaagttgcttttggagtccaaatttaggacgattaagaaagatgaagcggatttgttctttgtgccagcttatgttaaatgtgtgagaatgttgggaggtcttaatgacaaggagatcaatcagacctatgtcaaggttttgagtcaaatgccgtatttccgaagatctggtggtcgtgatcatatatttgtttttccgagtggtgctggagctcacttgtttagatcctggtcaacatttatcaaccgctctattatcctcactcccgaggctgaccggactgacaagaaagacacaactgcctttaattcatggaaagatataatcataccaggaaacgtcgatgatgctatgactaaaaatggacaacctgatgttcagcctttgcctctgtcaaagaggaagtatttagcaaattatttaggtcgtgcacaagggaaggctggtcgacttaaattgattgacctatcaaagcaatttccagataagctagaatgtccagatttgaagtttagcggaactgaaaagtttggaaggacaacatattttgaacatctgaggaatgccaagttctgcctcgctcctcgtggggaatcatcatggacacttcgcttttatgaatcattctttgtggaatgtgtcccggttcttttatctgaccacgccgagctgcctttccagaatgttatcgactatgcccaagtatcgatcaaatggccatcaactcgaataggctcagagtttcttgattacttagcttcaatatcagatagagacatagaaggaatgatagcccgaggtcggaagattagatgtttgtttgtgtacggtccagattccgcaccctgcagtgcggttaaagggattctatgggagcttcaacgcaaagttagacatttccagcaatcgactgagacgttttggctgcacaatggcagttttgtgaatagagaactggtccagttcagtagctggagacctcctatgcctctaccttgaccggtttcaacattccactagaatatcttgtgtttacgaaacaaaatgaatgatacatttgagtacagtttttttgtgaacttgatttttttgtacatatcactcttcagtggaatttgtttgactaaaatttgatagaaaaatgacgaaccaacaaaattgatggcttcc

SEQ ID NO: 25983 - protein, 462 aa, Arabidopsis thaliana
  peptide (1)..(462): Ceres Seq. ID no. 12332930
  misc_feature (91)..(296): Pfam Name: Exostosin family Pfam Description: Exostosin family
  misc_feature (84)..(367): Homolog of NCBI NO: 15237173 NR Description: putative protein; protein id: At5g22940.1
  misc_feature (342)..(462): Homolog of NCBI NO: 25518706 NR Description: hypothetical protein F24J8.10 - Arabidopsis
  misc_feature (1)..(296): Homolog of NCBI NO: 25518706 NR Description: hypothetical protein F24J8.10 - Arabidopsis
  misc_feature (89)..(406): Homolog of NCBI NO: 15241150 NR Description: putative protein; protein id: At5g19670.1
  misc_feature (89)..(216): Homolog of NCBI NO: 15223522 NR Description: unknown protein; protein id: At1g27440.1
  misc_feature (133)..(423): Homolog of NCBI NO: 34909176 NR Description: P0468B07.31 [Oryza sativa (japonica
  misc_feature (310)..(429): Homolog of NCBI NO: 15223522 NR Description: unknown protein; protein id: At1g27440.1
  misc_feature (1)..(462): Homolog of NCBI NO: 21537341 NR Description: unknown [Arabidopsis thaliana]
  misc_feature (1)..(462): Homolog of NCBI NO: 18394994 NR Description: Exostosin family
  misc_feature (1)..(462): Homolog of NCBI NO: 18650643 NR Description: At1g21480/F24J8_23 [Arabidopsis thaliana]
MASLTSNKPRNFGAYSHYATPCTRTHQIGPLFLVVSTFFVTRLFDQWFSESNSVTPVIDLRRTSSSYGIKTDNGIIRWPERGYGSHLSLKIYVYDENEIDGLKELLYGRDGSVKTTACLKGQWGSQVKIHKLLLESKFRTIKKDEADLFFVPAYVKCVRMLGGLNDKEINQTYVKVLSQMPYFRRSGGRDHIFVFPSGAGAHLFRSWSTFINRSIILTPEADRTDKKDTTAFNSWKDIIIPGNVDDAMTKNGQPDVQPLPLSKRKYLANYLGRAQGKAGRLKLIDLSKQFPDKLECPDLKFSGTEKFGRTTYFEHLRNAKFCLAPRGESSWTLRFYESFFVECVPVLLSDHAELPFQNVIDYAQVSIKWPSTRIGSEFLDYLASISDRDIEGMIARGRKIRCLFVYGPDSAPCSAVKGILWELQRKVRHFQQSTETFWLHNGSFVNRELVQFSSWRPPMPLP

SEQ ID NO: 25984 - protein, 303 aa, Arabidopsis thaliana
  peptide (1)..(303): Ceres Seq. ID no. 12332931
  misc_feature (1)..(137): Pfam Name: Exostosin family Pfam Description: Exostosin family
  misc_feature (1)..(247): Homolog of NCBI NO: 15241150 NR Description: putative protein; protein id: At5g19670.1
  misc_feature (151)..(270): Homolog of NCBI NO: 15223522 NR Description: unknown protein; protein id: At1g27440.1
  misc_feature (1)..(57): Homolog of NCBI NO: 15223522 NR Description: unknown protein; protein id: At1g27440.1
  misc_feature (1)..(264): Homolog of NCBI NO: 34909176 NR Description: P0468B07.31 [Oryza sativa (japonica
  misc_feature (1)..(208): Homolog of NCBI NO: 15237173 NR Description: putative protein; protein id: At5g22940.1
  misc_feature (183)..(303): Homolog of NCBI NO: 25518706 NR Description: hypothetical protein F24J8.10 - Arabidopsis
  misc_feature (1)..(137): Homolog of NCBI NO: 25518706 NR Description: hypothetical protein F24J8.10 - Arabidopsis
  misc_feature (1)..(303): Homolog of NCBI NO: 21537341 NR Description: unknown [Arabidopsis thaliana]
  misc_feature (1)..(303): Homolog of NCBI NO: 18394994 NR Description: Exostosin family
  misc_feature (1)..(303): Homolog of NCBI NO: 18650643 NR Description: At1g21480/F24J8_23 [Arabidopsis thaliana]
MLGGLNDKEINQTYVKVLSQMPYFRRSGGRDHIFVFPSGAGAHLFRSWSTFINRSIILTPEADRTDKKDTTAFNSWKDIIIPGNVDDAMTKNGQPDVQPLPLSKRKYLANYLGRAQGKAGRLKLIDLSKQFPDKLECPDLKFSGTEKFGRTTYFEHLRNAKFCLAPRGESSWTLRFYESFFVECVPVLLSDHAELPFQNVIDYAQVSIKWPSTRIGSEFLDYLASISDRDIEGMIARGRKIRCLFVYGPDSAPCSAVKGILWELQRKVRHFQQSTETFWLHNGSFVNRELVQFSSWRPPMPLP

SEQ ID NO: 25985 - protein, 283 aa, Arabidopsis thaliana
  peptide (1)..(283): Ceres Seq. ID no. 12332932
  misc_feature (1)..(117): Pfam Name: Exostosin family Pfam Description: Exostosin family
  misc_feature (1)..(227): Homolog of NCBI NO: 15241150 NR Description: putative protein; protein id: At5g19670.1
  misc_feature (131)..(250): Homolog of NCBI NO: 15223522 NR Description: unknown protein; protein id: At1g27440.1
  misc_feature (1)..(37): Homolog of NCBI NO: 15223522 NR Description: unknown protein; protein id: At1g27440.1
  misc_feature (1)..(244): Homolog of NCBI NO: 34909176 NR Description: P0468B07.31 [Oryza sativa (japonica
  misc_feature (1)..(188): Homolog of NCBI NO: 15237173 NR Description: putative protein; protein id: At5g22940.1
  misc_feature (163)..(283): Homolog of NCBI NO: 25518706 NR Description: hypothetical protein F24J8.10 - Arabidopsis
  misc_feature (1)..(117): Homolog of NCBI NO: 25518706 NR Description: hypothetical protein F24J8.10 - Arabidopsis
  misc_feature (1)..(283): Homolog of NCBI NO: 21537341 NR Description: unknown [Arabidopsis thaliana]
  misc_feature (1)..(283): Homolog of NCBI NO: 18394994 NR Description: Exostosin family
  misc_feature (1)..(283): Homolog of NCBI NO: 18650643 NR Description: At1g21480/F24J8_23 [Arabidopsis thaliana]
MPYFRRSGGRDHIFVFPSGAGAHLFRSWSTFINRSIILTPEADRTDKKDTTAFNSWKDIIIPGNVDDAMTKNGQPDVQPLPLSKRKYLANYLGRAQGKAGRLKLIDLSKQFPDKLECPDLKFSGTEKFGRTTYFEHLRNAKFCLAPRGESSWTLRFYESFFVECVPVLLSDHAELPFQNVIDYAQVSIKWPSTRIGSEFLDYLASISDRDIEGMIARGRKIRCLFVYGPDSAPCSAVKGILWELQRKVRHFQQSTETFWLHNGSFVNRELVQFSSWRPPMPLP

SEQ ID NO: 25986 - DNA, 1116 bp, Arabidopsis thaliana
  misc_feature (1)..(1116): Ceres Seq. ID no. 12339397
  misc_feature: MA Experiment ID: 108434 Result: Up-regulated in Transcription
  misc_feature: MA Experiment 108434 PARAMETER Experiment Name: At_Root_Tips_cDNA_P Parameter: Tissue Value: Root Tips
  misc_feature: MA Experiment ID: 108579 Result: Down-regulated in Transcription
  misc_feature: MA Experiment 108579 PARAMETER Experiment Name: At_4deg_Cold_cDNA_P Parameter: Temperature (deg C) Value: 4 vs. 22
  misc_feature: MA Experiment 108579 PARAMETER Experiment Name: At_4deg_Cold_cDNA_P Parameter: Timepoint (hr) Value: 6
  misc_feature: MA Experiment 108579 PARAMETER Experiment Name: At_4deg_Cold_cDNA_P Parameter: Tissue Value: Aerial
  misc_feature: MA Experiment ID: 108595 Result: Down-regulated in Transcription
  misc_feature: MA Experiment 108595 PARAMETER Experiment Name: At_Ler-pi_Ovule_cDNA_P Parameter: Plant Line Value: null
  misc_feature: MA Experiment ID: 108607 Result: Down-regulated in Transcription
  misc_feature: MA Experiment 108607 PARAMETER Experiment Name: At_100uM_ABA_cDNA_P Parameter: Timepoint (hr) Value: 4
  misc_feature: MA Experiment 108607 PARAMETER Experiment Name: At_100uM_ABA_cDNA_P Parameter: Tissue Value: Aerial
  misc_feature: MA Experiment 108607 PARAMETER Experiment Name: At_100uM_ABA_cDNA_P Parameter: Treatment Value: 100uM ABA vs. No Treatment
  misc_feature: MA Experiment ID: 108608 Result: Down-regulated in Transcription
  misc_feature: MA Experiment 108608 PARAMETER Experiment Name: At_100uM_ABA_cDNA_P Parameter: Timepoint (hr) Value: 1
  misc_feature: MA Experiment 108608 PARAMETER Experiment Name: At_100uM_ABA_cDNA_P Parameter: Tissue Value: Aerial
  misc_feature: MA Experiment 108608 PARAMETER Experiment Name: At_100uM_ABA_cDNA_P Parameter: Treatment Value: 100uM ABA vs. No Treatment
  misc_feature: MA Experiment ID: 108609 Result: Down-regulated in Transcription
  misc_feature: MA Experiment 108609 PARAMETER Experiment Name: At_100uM_ABA_cDNA_P Parameter: Timepoint (hr) Value: 24
  misc_feature: MA Experiment 108609 PARAMETER Experiment Name: At_100uM_ABA_cDNA_P Parameter: Tissue Value: Aerial
  misc_feature: MA Experiment 108609 PARAMETER Experiment Name: At_100uM_ABA_cDNA_P Parameter: Treatment Value: 100uM ABA vs. No Treatment
  misc_feature: MA Experiment ID: 20000166 Result: Down-regulated in Transcription
  misc_feature: MA Experiment 20000166 PARAMETER Experiment Name: At_100uM_ABA_P Parameter: Age (day) Value: 14
  misc_feature: MA Experiment 20000166 PARAMETER Experiment Name: At_100uM_ABA_P Parameter: Organism Value: A. thaliana
  misc_feature: MA Experiment 20000166 PARAMETER Experiment Name: At_100uM_ABA_P Parameter: Plant Line Value: WS
  misc_feature: MA Experiment 20000166 PARAMETER Experiment Name: At_100uM_ABA_P Parameter: Timepoint (hr) Value: 1
  misc_feature: MA Experiment 20000166 PARAMETER Experiment Name: At_100uM_ABA_P Parameter: Tissue Value: Aerial
  misc_feature: MA Experiment 20000166 PARAMETER Experiment Name: At_100uM_ABA_P Parameter: Treatment Value: 100uM ABA vs. No Treatment
  misc_feature: MA Experiment ID: 20000234 Result: Down-regulated in Transcription
  misc_feature: MA Experiment 20000234 PARAMETER Experiment Name: At_Siliques_P Parameter: Age (day) Value: 21
  misc_feature: MA Experiment 20000234 PARAMETER Experiment Name: At_Siliques_P Parameter: Organism Value: A. thaliana
  misc_feature: MA Experiment 20000234 PARAMETER Experiment Name: At_Siliques_P Parameter: Plant Line Value: WS
  misc_feature: MA Experiment 20000234 PARAMETER Experiment Name: At_Siliques_P Parameter: Tissue Value: Less Than 5mm Siliques vs. Whole Plant
  misc_feature: MA Experiment ID: 20000235 Result: Down-regulated in Transcription
  misc_feature: MA Experiment 20000235 PARAMETER Experiment Name: At_Siliques_P Parameter: Age (day) Value: 21
  misc_feature: MA Experiment 20000235 PARAMETER Experiment Name: At_Siliques_P Parameter: Organism Value: A. thaliana
  misc_feature: MA Experiment 20000235 PARAMETER Experiment Name: At_Siliques_P Parameter: Plant Line Value: WS
  misc_feature: MA Experiment 20000235 PARAMETER Experiment Name: At_Siliques_P Parameter: Tissue Value: 5-10mm Siliques vs. Whole Plant
  misc_feature: MA Experiment ID: 20000264 Result: Down-regulated in Transcription
  misc_feature: MA Experiment 20000264 PARAMETER Experiment Name: At_Open_Flower_P Parameter: Age (day) Value: 21
  misc_feature: MA Experiment 20000264 PARAMETER Experiment Name: At_Open_Flower_P Parameter: Plant Line Value: WS
  misc_feature: MA Experiment 20000264 PARAMETER Experiment Name: At_Open_Flower_P Parameter: Tissue Value: Open Flower vs. Whole Plant
  misc_feature: MA Experiment ID: 20000265 Result: Down-regulated in Transcription
  misc_feature: MA Experiment 20000265 PARAMETER Experiment Name: At_Open_Flower_P Parameter: Age (day) Value: 21
  misc_feature: MA Experiment 20000265 PARAMETER Experiment Name: At_Open_Flower_P Parameter: Plant Line Value: WS
  misc_feature: MA Experiment 20000265 PARAMETER Experiment Name: At_Open_Flower_P Parameter: Tissue Value: Closed Flower vs. Whole Plant
  misc_feature: MA Experiment ID: 20000286 Result: Down-regulated in Transcription
  misc_feature: MA Experiment 20000286 PARAMETER Experiment Name: At_Open_Flower_P Parameter: Age (day) Value: 21
  misc_feature: MA Experiment 20000286 PARAMETER Experiment Name: At_Open_Flower_P Parameter: Plant Line Value: WS
  misc_feature: MA Experiment 20000286 PARAMETER Experiment Name: At_Open_Flower_P Parameter: Tissue Value: Half Open vs. Whole Plant
  misc_feature: MA Experiment ID: 20000436 Result: Down-regulated in Transcription
  misc_feature: MA Experiment 20000436 PARAMETER Experiment Name: At_Drought_P Parameter: Age (day) Value: 7
  misc_feature: MA Experiment 20000436 PARAMETER Experiment Name: At_Drought_P Parameter: Organism Value: A. thaliana
  misc_feature: MA Experiment 20000436 PARAMETER Experiment Name: At_Drought_P Parameter: Plant Line Value: WS
  misc_feature: MA Experiment 20000436 PARAMETER Experiment Name: At_Drought_P Parameter: Timepoint (hr) Value: 12
  misc_feature: MA Experiment 20000436 PARAMETER Experiment Name: At_Drought_P Parameter: Tissue Value: Whole Plant
  misc_feature: MA Experiment 20000436 PARAMETER Experiment Name: At_Drought_P Parameter: Treatment Value: Drought vs. No Drought
  misc_feature: MA Experiment ID: 20000437 Result: Down-regulated in Transcription
  misc_feature: MA Experiment 20000437 PARAMETER Experiment Name: At_Drought_P Parameter: Age (day) Value: 8
  misc_feature: MA Experiment 20000437 PARAMETER Experiment Name: At_Drought_P Parameter: Organism Value: A. thaliana
  misc_feature: MA Experiment 20000437 PARAMETER Experiment Name: At_Drought_P Parameter: Plant Line Value: WS
  misc_feature: MA Experiment 20000437 PARAMETER Experiment Name: At_Drought_P Parameter: Timepoint (hr) Value: 24
  misc_feature: MA Experiment 20000437 PARAMETER Experiment Name: At_Drought_P Parameter: Tissue Value: Whole Plant
  misc_feature: MA Experiment 20000437 PARAMETER Experiment Name: At_Drought_P Parameter: Treatment Value: Drought vs. No Drought
  misc_feature: MA Experiment ID: 20000453 Result: Down-regulated in Transcription
  misc_feature: MA Experiment 20000453 PARAMETER Experiment Name: At_100uM_ABA_P Parameter: Age (day) Value: 15
  misc_feature: MA Experiment 20000453 PARAMETER Experiment Name: At_100uM_ABA_P Parameter: Organism Value: A. thaliana
  misc_feature: MA Experiment 20000453 PARAMETER Experiment Name: At_100uM_ABA_P Parameter: Plant Line Value: WS
  misc_feature: MA Experiment 20000453 PARAMETER Experiment Name: At_100uM_ABA_P Parameter: Timepoint (hr) Value: 24
  misc_feature: MA Experiment 20000453 PARAMETER Experiment Name: At_100uM_ABA_P Parameter: Tissue Value: Aerial
  misc_feature: MA Experiment 20000453 PARAMETER Experiment Name: At_100uM_ABA_P Parameter: Treatment Value: 100uM ABA vs. No Treatment
  misc_feature: MA Experiment ID: 20000455 Result: Down-regulated in Transcription
  misc_feature: MA Experiment 20000455 PARAMETER Experiment Name: At_100uM_ABA_P Parameter: Age (day) Value: 16
  misc_feature: MA Experiment 20000455 PARAMETER Experiment Name: At_100uM_ABA_P Parameter: Organism Value: A. thaliana
  misc_feature: MA Experiment 20000455 PARAMETER Experiment Name: At_100uM_ABA_P Parameter: Plant Line Value: WS
  misc_feature: MA Experiment 20000455 PARAMETER Experiment Name: At_100uM_ABA_P Parameter: Timepoint (hr) Value: 48
  misc_feature: MA Experiment 20000455 PARAMETER Experiment Name: At_100uM_ABA_P Parameter: Tissue Value: Aerial
  misc_feature: MA Experiment 20000455 PARAMETER Experiment Name: At_100uM_ABA_P Parameter: Treatment Value: 100uM ABA vs. No Treatment
  misc_feature: MA Experiment ID: 20000573 Result: Up-regulated in Transcription
  misc_feature: MA Experiment 20000573 PARAMETER Experiment Name: At_100uM_ABA_Mutants__P Parameter: Organism Value: A. thaliana
  misc_feature: MA Experiment 20000573 PARAMETER Experiment Name: At_100uM_ABA_Mutants__P Parameter: Plant Line Value: CS22 vs. Ler wt
  misc_feature: MA Experiment 20000573 PARAMETER Experiment Name: At_100uM_ABA_Mutants__P Parameter: Timepoint (hr) Value: N/A
  misc_feature: MA Experiment 20000573 PARAMETER Experiment Name: At_100uM_ABA_Mutants__P Parameter: Tissue Value: Whole Plant
  misc_feature: MA Experiment 20000573 PARAMETER Experiment Name: At_100uM_ABA_Mutants__P Parameter: Treatment Value: None
  misc_feature: MA Experiment ID: 20001248 Result: Up-regulated in Transcription
  misc_feature: MA Experiment 20001248 PARAMETER Experiment Name: At_Far-red-induction_P Parameter: Age (day) Value: 7
  misc_feature: MA Experiment 20001248 PARAMETER Experiment Name: At_Far-red-induction_P Parameter: Light Value: Far-red vs. White
  misc_feature: MA Experiment 20001248 PARAMETER Experiment Name: At_Far-red-induction_P Parameter: Organism Value: A. thaliana
  misc_feature: MA Experiment 20001248 PARAMETER Experiment Name: At_Far-red-induction_P Parameter: Plant Line Value: Columbia
  misc_feature: MA Experiment 20001248 PARAMETER Experiment Name: At_Far-red-induction_P Parameter: Timepoint (hr) Value: 4
  misc_feature: MA Experiment 20001248 PARAMETER Experiment Name: At_Far-red-induction_P Parameter: Tissue Value: Whole Plant
  misc_feature: MA Experiment ID: 20001450 Result: Up-regulated in Transcription
  misc_feature: MA Experiment 20001450 PARAMETER Experiment Name: At_Far-red-induction_P Parameter: Age (day) Value: 7
  misc_feature: MA Experiment 20001450 PARAMETER Experiment Name: At_Far-red-induction_P Parameter: Light Value: Far-red vs. White
  misc_feature: MA Experiment 20001450 PARAMETER Experiment Name: At_Far-red-induction_P Parameter: Organism Value: A. thaliana
  misc_feature: MA Experiment 20001450 PARAMETER Experiment Name: At_Far-red-induction_P Parameter: Plant Line Value: Columbia
  misc_feature: MA Experiment 20001450 PARAMETER Experiment Name: At_Far-red-induction_P Parameter: Timepoint (hr) Value: 8
  misc_feature: MA Experiment 20001450 PARAMETER Experiment Name: At_Far-red-induction_P Parameter: Tissue Value: Whole Plant
  misc_feature: MA Experiment ID: 20001451 Result: Up-regulated in Transcription
  misc_feature: MA Experiment 20001451 PARAMETER Experiment Name: At_Far-red-induction_P Parameter: Age (day) Value: 7
  misc_feature: MA Experiment 20001451 PARAMETER Experiment Name: At_Far-red-induction_P Parameter: Light Value: Far-red vs. White
  misc_feature: MA Experiment 20001451 PARAMETER Experiment Name: At_Far-red-induction_P Parameter: Organism Value: A. thaliana
  misc_feature: MA Experiment 20001451 PARAMETER Experiment Name: At_Far-red-induction_P Parameter: Plant Line Value: Columbia
  misc_feature: MA Experiment 20001451 PARAMETER Experiment Name: At_Far-red-induction_P Parameter: Timepoint (hr) Value: 24
  misc_feature: MA Experiment 20001451 PARAMETER Experiment Name: At_Far-red-induction_P Parameter: Tissue Value: Whole Plant
  misc_feature: MA Experiment ID: 20001555 Result: Down-regulated in Transcription
  misc_feature: MA Experiment 20001555 PARAMETER Experiment Name: At_Drought_Soil_Dry_P Parameter: Age (day) Value: 24
  misc_feature: MA Experiment 20001555 PARAMETER Experiment Name: At_Drought_Soil_Dry_P Parameter: Organism Value: A. thaliana
  misc_feature: MA Experiment 20001555 PARAMETER Experiment Name: At_Drought_Soil_Dry_P Parameter: Plant Line Value: WS
  misc_feature: MA Experiment 20001555 PARAMETER Experiment Name: At_Drought_Soil_Dry_P Parameter: Post Timepoint (hr) Value: None
  misc_feature: MA Experiment 20001555 PARAMETER Experiment Name: At_Drought_Soil_Dry_P Parameter: Post-Treatment Value: None
  misc_feature: MA Experiment 20001555 PARAMETER Experiment Name: At_Drought_Soil_Dry_P Parameter: Timepoint (day) Value: 10
  misc_feature: MA Experiment 20001555 PARAMETER Experiment Name: At_Drought_Soil_Dry_P Parameter: Treatment Value: Drought vs. No Drought
  misc_feature: MA Experiment ID: 20001556 Result: Down-regulated in Transcription
  misc_feature: MA Experiment 20001556 PARAMETER Experiment Name: At_Drought_Soil_Dry_P Parameter: Age (day) Value: 26
  misc_feature: MA Experiment 20001556 PARAMETER Experiment Name: At_Drought_Soil_Dry_P Parameter: Organism Value: A. thaliana
  misc_feature: MA Experiment 20001556 PARAMETER Experiment Name: At_Drought_Soil_Dry_P Parameter: Plant Line Value: WS
  misc_feature: MA Experiment 20001556 PARAMETER Experiment Name: At_Drought_Soil_Dry_P Parameter: Post Timepoint (hr) Value: None
  misc_feature: MA Experiment 20001556 PARAMETER Experiment Name: At_Drought_Soil_Dry_P Parameter: Post-Treatment Value: None
  misc_feature: MA Experiment 20001556 PARAMETER Experiment Name: At_Drought_Soil_Dry_P Parameter: Timepoint (day) Value: 12
  misc_feature: MA Experiment 20001556 PARAMETER Experiment Name: At_Drought_Soil_Dry_P Parameter: Treatment Value: Drought vs. No Drought
  misc_feature: MA Experiment ID: 20001559 Result: Down-regulated in Transcription
  misc_feature: MA Experiment 20001559 PARAMETER Experiment Name: At_Drought_Soil_Dry_P Parameter: Age (day) Value: 28
  misc_feature: MA Experiment 20001559 PARAMETER Experiment Name: At_Drought_Soil_Dry_P Parameter: Organism Value: A. thaliana
  misc_feature: MA Experiment 20001559 PARAMETER Experiment Name: At_Drought_Soil_Dry_P Parameter: Plant Line Value: WS
  misc_feature: MA Experiment 20001559 PARAMETER Experiment Name: At_Drought_Soil_Dry_P Parameter: Post Timepoint (hr) Value: 29
  misc_feature: MA Experiment 20001559 PARAMETER Experiment Name: At_Drought_Soil_Dry_P Parameter: Post-Treatment Value: Re-Water vs. No Drought
  misc_feature: MA Experiment 20001559 PARAMETER Experiment Name: At_Drought_Soil_Dry_P Parameter: Timepoint (day) Value: 14
  misc_feature: MA Experiment 20001559 PARAMETER Experiment Name: At_Drought_Soil_Dry_P Parameter: Treatment Value: Drought vs. No Drought
  misc_feature: MA Experiment ID: 20001904 Result: Down-regulated in Transcription
  misc_feature: MA Experiment 20001904 PARAMETER Experiment Name: At_Drought_Reproduction_P Parameter: Age (day) Value: 37
  misc_feature: MA Experiment 20001904 PARAMETER Experiment Name: At_Drought_Reproduction_P Parameter: Organism Value: A. thaliana
  misc_feature: MA Experiment 20001904 PARAMETER Experiment Name: At_Drought_Reproduction_P Parameter: Plant Line Value: WS
  misc_feature: MA Experiment 20001904 PARAMETER Experiment Name: At_Drought_Reproduction_P Parameter: Timepoint (day) Value: 7
  misc_feature: MA Experiment 20001904 PARAMETER Experiment Name: At_Drought_Reproduction_P Parameter: Tissue Value: Rosettes
  misc_feature: MA Experiment 20001904 PARAMETER Experiment Name: At_Drought_Reproduction_P Parameter: Treatment Value: Drought vs. No Drought
  misc_feature: MA Experiment ID: 20001911 Result: Down-regulated in Transcription
  misc_feature: MA Experiment 20001911 PARAMETER Experiment Name: At_Drought_Reproduction_P Parameter: Age (day) Value: 40
  misc_feature: MA Experiment 20001911 PARAMETER Experiment Name: At_Drought_Reproduction_P Parameter: Organism Value: A. thaliana
  misc_feature: MA Experiment 20001911 PARAMETER Experiment Name: At_Drought_Reproduction_P Parameter: Plant Line Value: WS
  misc_feature: MA Experiment 20001911 PARAMETER Experiment Name: At_Drought_Reproduction_P Parameter: Timepoint (day) Value: 10
  misc_feature: MA Experiment 20001911 PARAMETER Experiment Name: At_Drought_Reproduction_P Parameter: Tissue Value: Flowers
  misc_feature: MA Experiment 20001911 PARAMETER Experiment Name: At_Drought_Reproduction_P Parameter: Treatment Value: Drought vs. No Drought
aaagtttgttggaggattcgtctctctctctctctctttctctttctctcatcttcttcttatctccctccaaagacggcgactgtataatctatcatttcttcacagtaacgctttcatcggaagatctcgccggcaaaaaaccttctctctgagatcagatctcttacgattctcagctcaatcttatctttttctttgttgtgctgcttttcactctcttctacgcgacgaatttggccttgttttttgtttgtttgtcgtatccgacgcggaggtattgagaaaccgtggcttaagacggaggaagaagatggaagctaacgggattgagaacttgacgaatccgaatcaggaaagagagtttataaggagacatcataagcatgagcttgtggataatcagtgtagctctacgcttgttaaacatatcaacgctcctgttcatattgtgtggtcacttgtgagaagatttgatcagccacagaagtataagccgtttatcagtagatgtgtggtgaaaggaaacatggagattggtacagtaagagaagttgatgtgaaatctggactaccagcaactagaagcactgagagattggagttacttgatgacaatgagcatattctcagtatcagaatcgttggtggtgatcatagacttaagaactattcttcaatcatctctcttcaccccgagactatagaaggaagaataggaacacttgtgattgagtcatttgtggttgatgtaccagaaggaaacacaaaggatgagacttgttactttgttgaagctttaatcaaatgcaatcttaaatctttagctgatatctctgaacgtcttgcggttcaagacacgacagaatcgagagtctaaagatcaaaggagtaaaaaactattgaatcagagagattttggttgccatggatgaagctctcaaagggaaaaagagagagtgggtgagtttctttgaggatggacaaggcaaaaaaagtatcatcatttatccagttacataataattttctcatttgctatttttggggtcatttcactttcaaaccctctttttaatttcatgtgtctaatttaatgaatgtgtttttggtttc

SEQ ID NO: 25987 - protein, 292 aa, Arabidopsis thaliana
  peptide (1)..(292): Ceres Seq. ID no. 12339399
  misc_feature (136)..(275): Pfam Name: Pathogenesis-related protein Bet v I family Pfam Description: Pathogenesis-related protein Bet v I family
  misc_feature (151)..(290): Homolog of NCBI NO: 7486358 NR Description: hypothetical protein F3I3.40 - Arabidopsis
  misc_feature (105)..(222): Homolog of NCBI NO: 30696291 NR Description: expressed protein [Arabidopsis thaliana]
  misc_feature (123)..(290): Homolog of NCBI NO: 21593105 NR Description: unknown [Arabidopsis thaliana]
  misc_feature (123)..(290): Homolog of NCBI NO: 18411513 NR Description: Expressed protein
  misc_feature (119)..(292): Homolog of NCBI NO: 7486961 NR Description: hypothetical protein T13J8.30 - Arabidopsis
  misc_feature (119)..(292): Homolog of NCBI NO: 30687786 NR Description: expressed protein [Arabidopsis thaliana]
  misc_feature (121)..(289): Homolog of NCBI NO: 25348264 NR Description: hypothetical protein F6F3.16 - Arabidopsis
  misc_feature (121)..(289): Homolog of NCBI NO: 21593547 NR Description: unknown [Arabidopsis thaliana]
  misc_feature (121)..(289): Homolog of NCBI NO: 18378830 NR Description: expressed protein
  misc_feature (105)..(292): Homolog of NCBI NO: 15238661 NR Description: putative protein; protein id: At5g53160.1
KFVGGFVSLSLSFSFSHLLLISLQRRRLYNLSFLHSNAFIGRSRRQKTFSLRSDLLRFSAQSYLFLCCAAFHSLLRDEFGLVFCLFVVSDAEVLRNRGLRRRKKMEANGIENLTNPNQEREFIRRHHKHELVDNQCSSTLVKHINAPVHIVWSLVRRFDQPQKYKPFISRCVVKGNMEIGTVREVDVKSGLPATRSTERLELLDDNEHILSIRIVGGDHRLKNYSSIISLHPETIEGRIGTLVIESFVVDVPEGNTKDETCYFVEALIKCNLKSLADISERLAVQDTTESRV

SEQ ID NO: 25988 - protein, 188 aa, Arabidopsis thaliana
  peptide (1)..(188): Ceres Seq. ID no. 12339400
  misc_feature (32)..(171): Pfam Name: Pathogenesis-related protein Bet v I family Pfam Description: Pathogenesis-related protein Bet v I family
  misc_feature (47)..(186): Homolog of NCBI NO: 7486358 NR Description: hypothetical protein F3I3.40 - Arabidopsis
  misc_feature (1)..(118): Homolog of NCBI NO: 30696291 NR Description: expressed protein [Arabidopsis thaliana]
  misc_feature (19)..(186): Homolog of NCBI NO: 21593105 NR Description: unknown [Arabidopsis thaliana]
  misc_feature (19)..(186): Homolog of NCBI NO: 18411513 NR Description: Expressed protein
  misc_feature (15)..(188): Homolog of NCBI NO: 7486961 NR Description: hypothetical protein T13J8.30 - Arabidopsis
  misc_feature (15)..(188): Homolog of NCBI NO: 30687786 NR Description: expressed protein [Arabidopsis thaliana]
  misc_feature (17)..(185): Homolog of NCBI NO: 25348264 NR Description: hypothetical protein F6F3.16 - Arabidopsis
  misc_feature (17)..(185): Homolog of NCBI NO: 21593547 NR Description: unknown [Arabidopsis thaliana]
  misc_feature (17)..(185): Homolog of NCBI NO: 18378830 NR Description: expressed protein
  misc_feature (1)..(188): Homolog of NCBI NO: 15238661 NR Description: putative protein; protein id: At5g53160.1
MEANGIENLTNPNQEREFIRRHHKHELVDNQCSSTLVKHINAPVHIVWSLVRRFDQPQKYKPFISRCVVKGNMEIGTVREVDVKSGLPATRSTERLELLDDNEHILSIRIVGGDHRLKNYSSIISLHPETIEGRIGTLVIESFVVDVPEGNTKDETCYFVEALIKCNLKSLADISERLAVQDTTESRV

SEQ ID NO: 25989 - DNA, 1188 bp, Arabidopsis thaliana
  misc_feature (1)..(1188): Ceres Seq. ID no. 12396278
  misc_feature: MA Experiment ID: 108434 Result: Down-regulated in Transcription
  misc_feature: MA Experiment 108434 PARAMETER Experiment Name: At_Root_Tips_cDNA_P Parameter: Tissue Value: Root Tips
  misc_feature: MA Experiment ID: 108435 Result: Down-regulated in Transcription
  misc_feature: MA Experiment 108435 PARAMETER Experiment Name: At_stm_Mutants_cDNA_P Parameter: Plant Line Value: wt Landsburg vs stm
  misc_feature: MA Experiment 108435 PARAMETER Experiment Name: At_stm_Mutants_cDNA_P Parameter: Tissue Value: Shoot Apical Meristem Region
  misc_feature: MA Experiment ID: 108461 Result: Up-regulated in Transcription
  misc_feature: MA Experiment 108461 PARAMETER Experiment Name: At_Germinating_Seeds_cDNA_P Parameter: Age (day) Value: 1 vs. 0
  misc_feature: MA Experiment 108461 PARAMETER Experiment Name: At_Germinating_Seeds_cDNA_P Parameter: Tissue Value: Germinating Seeds
  misc_feature: MA Experiment ID: 108462 Result: Up-regulated in Transcription
  misc_feature: MA Experiment 108462 PARAMETER Experiment Name: At_Germinating_Seeds_cDNA_P Parameter: Age (day) Value: 2 vs. 0
  misc_feature: MA Experiment 108462 PARAMETER Experiment Name: At_Germinating_Seeds_cDNA_P Parameter: Tissue Value: Germinating Seeds
  misc_feature: MA Experiment ID: 108463 Result: Up-regulated in Transcription
  misc_feature: MA Experiment 108463 PARAMETER Experiment Name: At_Germinating_Seeds_cDNA_P Parameter: Age (day) Value: 3 vs. 0
  misc_feature: MA Experiment 108463 PARAMETER Experiment Name: At_Germinating_Seeds_cDNA_P Parameter: Tissue Value: Germinating Seeds
  misc_feature: MA Experiment ID: 108464 Result: Up-regulated in Transcription
  misc_feature: MA Experiment 108464 PARAMETER Experiment Name: At_Germinating_Seeds_cDNA_P Parameter: Age (day) Value: 4 vs. 0
  misc_feature: MA Experiment 108464 PARAMETER Experiment Name: At_Germinating_Seeds_cDNA_P Parameter: Tissue Value: Germinating Seeds
  misc_feature: MA Experiment ID: 108469 Result: Up-regulated in Transcription
  misc_feature: MA Experiment ID: 108488 Result: Down-regulated in Transcription
  misc_feature: MA Experiment ID: 108573 Result: Down-regulated in Transcription
  misc_feature: MA Experiment 108573 PARAMETER Experiment Name: At_Drought_cDNA_P Parameter: Timepoint (hr) Value: 6
  misc_feature: MA Experiment 108573 PARAMETER Experiment Name: At_Drought_cDNA_P Parameter: Tissue Value: Aerial
  misc_feature: MA Experiment 108573 PARAMETER Experiment Name: At_Drought_cDNA_P Parameter: Treatment Value: Drought vs. No Drought
  misc_feature: MA Experiment ID: 108577 Result: Down-regulated in Transcription
  misc_feature: MA Experiment 108577 PARAMETER Experiment Name: At_42deg_Heat_cDNA_P Parameter: Temperature (deg C) Value: 42 vs. 22
  misc_feature: MA Experiment 108577 PARAMETER Experiment Name: At_42deg_Heat_cDNA_P Parameter: Timepoint (hr) Value: 6
  misc_feature: MA Experiment 108577 PARAMETER Experiment Name: At_42deg_Heat_cDNA_P Parameter: Tissue Value: Aerial
  misc_feature: MA Experiment ID: 108594 Result: Down-regulated in Transcription
  misc_feature: MA Experiment 108594 PARAMETER Experiment Name: At_Ler-rhl_Root_cDNA_P Parameter: Plant Line Value: null
  misc_feature: MA Experiment ID: 108595 Result: Down-regulated in Transcription
  misc_feature: MA Experiment 108595 PARAMETER Experiment Name: At_Ler-pi_Ovule_cDNA_P Parameter: Plant Line Value: null
  misc_feature: MA Experiment ID: 108668 Result: Up-regulated in Transcription
  misc_feature: MA Experiment 108668 PARAMETER Experiment Name: At_2mM_SA_cDNA_P Parameter: Plant Line Value: WS
  misc_feature: MA Experiment 108668 PARAMETER Experiment Name: At_2mM_SA_cDNA_P Parameter: Timepoint (hr) Value: 6
  misc_feature: MA Experiment 108668 PARAMETER Experiment Name: At_2mM_SA_cDNA_P Parameter: Treatment Value: 2mM SA vs. No Treatment
  misc_feature: MA Experiment ID: 20000088 Result: Up-regulated in Transcription
  misc_feature: MA Experiment 20000088 PARAMETER Experiment Name: At_100uM_ABA_Mutants_cDNA_P Parameter: Plant Line Value: Landsberg
  misc_feature: MA Experiment 20000088 PARAMETER Experiment Name: At_100uM_ABA_Mutants_cDNA_P Parameter: Timepoint (hr) Value: 6
  misc_feature: MA Experiment 20000088 PARAMETER Experiment Name: At_100uM_ABA_Mutants_cDNA_P Parameter: Tissue Value: Aerial
  misc_feature: MA Experiment 20000088 PARAMETER Experiment Name: At_100uM_ABA_Mutants_cDNA_P Parameter: Treatment Value: 100uM ABA vs. No Treatment
  misc_feature: MA Experiment ID: 20000113 Result: Down-regulated in Transcription
  misc_feature: MA Experiment 20000113 PARAMETER Experiment Name: At_42deg_Heat_cDNA_P Parameter: Temperature (deg C) Value: 42 vs. 22
  misc_feature: MA Experiment 20000113 PARAMETER Experiment Name: At_42deg_Heat_cDNA_P Parameter: Timepoint (hr) Value: 8
  misc_feature: MA Experiment 20000113 PARAMETER Experiment Name: At_42deg_Heat_cDNA_P Parameter: Tissue Value: Aerial
  misc_feature: MA Experiment ID: 20000173 Result: Down-regulated in Transcription
  misc_feature: MA Experiment 20000173 PARAMETER Experiment Name: At_42deg_Heat_P Parameter: Age (day) Value: 14
  misc_feature: MA Experiment 20000173 PARAMETER Experiment Name: At_42deg_Heat_P Parameter: Organism Value: A. thaliana
  misc_feature: MA Experiment 20000173 PARAMETER Experiment Name: At_42deg_Heat_P Parameter: Plant Line Value: WS
  misc_feature: MA Experiment 20000173 PARAMETER Experiment Name: At_42deg_Heat_P Parameter: Temperature (deg C) Value: 42 vs. 22
  misc_feature: MA Experiment 20000173 PARAMETER Experiment Name: At_42deg_Heat_P Parameter: Timepoint (hr) Value: 6
  misc_feature: MA Experiment 20000173 PARAMETER Experiment Name: At_42deg_Heat_P Parameter: Tissue Value: Aerial
  misc_feature: MA Experiment ID: 20000179 Result: Down-regulated in Transcription
  misc_feature: MA Experiment 20000179 PARAMETER Experiment Name: At_Germinating_Seeds_P Parameter: Age (hr) Value: 6 vs. 0
  misc_feature: MA Experiment 20000179 PARAMETER Experiment Name: At_Germinating_Seeds_P Parameter: Tissue Value: Germinating Seeds
  misc_feature: MA Experiment ID: 20000180 Result: Up-regulated in Transcription
  misc_feature: MA Experiment 20000180 PARAMETER Experiment Name: At_Germinating_Seeds_P Parameter: Age (hr) Value: 24 vs. 0
  misc_feature: MA Experiment 20000180 PARAMETER Experiment Name: At_Germinating_Seeds_P Parameter: Tissue Value: Germinating Seeds
  misc_feature: MA Experiment ID: 20000182 Result: Up-regulated in Transcription
  misc_feature: MA Experiment 20000182 PARAMETER Experiment Name: At_2mM_SA_P Parameter: Age (day) Value: 14
  misc_feature: MA Experiment 20000182 PARAMETER Experiment Name: At_2mM_SA_P Parameter: Organism Value: A. thaliana
  misc_feature: MA Experiment 20000182 PARAMETER Experiment Name: At_2mM_SA_P Parameter: Plant Line Value: WS
  misc_feature: MA Experiment 20000182 PARAMETER Experiment Name: At_2mM_SA_P Parameter: Timepoint (hr) Value: 6
  misc_feature: MA Experiment 20000182 PARAMETER Experiment Name: At_2mM_SA_P Parameter: Tissue Value: Aerial
  misc_feature: MA Experiment 20000182 PARAMETER Experiment Name: At_2mM_SA_P Parameter: Treatment Value: 2mM SA vs. No Treatment
  misc_feature: MA Experiment ID: 20000184 Result: Up-regulated in Transcription
  misc_feature: MA Experiment 20000184 PARAMETER Experiment Name: At_Shoots__P Parameter: Age (day) Value: 7
  misc_feature: MA Experiment 20000184 PARAMETER Experiment Name: At_Shoots__P Parameter: Tissue Value: Shoots vs. Whole Plant
  misc_feature: MA Experiment ID: 20000234 Result: Down-regulated in Transcription
  misc_feature: MA Experiment 20000234 PARAMETER Experiment Name: At_Siliques_P Parameter: Age (day) Value: 21
  misc_feature: MA Experiment 20000234 PARAMETER Experiment Name: At_Siliques_P Parameter: Organism Value: A. thaliana
  misc_feature: MA Experiment 20000234 PARAMETER Experiment Name: At_Siliques_P Parameter: Plant Line Value: WS
  misc_feature: MA Experiment 20000234 PARAMETER Experiment Name: At_Siliques_P Parameter: Tissue Value: Less Than 5mm Siliques vs. Whole Plant
  misc_feature: MA Experiment ID: 20000264 Result: Down-regulated in Transcription
  misc_feature: MA Experiment 20000264 PARAMETER Experiment Name: At_Open_Flower_P Parameter: Age (day) Value: 21
  misc_feature: MA Experiment 20000264 PARAMETER Experiment Name: At_Open_Flower_P Parameter: Plant Line Value: WS
  misc_feature: MA Experiment 20000264 PARAMETER Experiment Name: At_Open_Flower_P Parameter: Tissue Value: Open Flower vs. Whole Plant
  misc_feature: MA Experiment ID: 20000265 Result: Down-regulated in Transcription
  misc_feature: MA Experiment 20000265 PARAMETER Experiment Name: At_Open_Flower_P Parameter: Age (day) Value: 21
  misc_feature: MA Experiment 20000265 PARAMETER Experiment Name: At_Open_Flower_P Parameter: Plant Line Value: WS
  misc_feature: MA Experiment 20000265 PARAMETER Experiment Name: At_Open_Flower_P Parameter: Tissue Value: Closed Flower vs. Whole Plant
  misc_feature: MA Experiment ID: 20000286 Result: Down-regulated in Transcription
  misc_feature: MA Experiment 20000286 PARAMETER Experiment Name: At_Open_Flower_P Parameter: Age (day) Value: 21
  misc_feature: MA Experiment 20000286 PARAMETER Experiment Name: At_Open_Flower_P Parameter: Plant Line Value: WS
  misc_feature: MA Experiment 20000286 PARAMETER Experiment Name: At_Open_Flower_P Parameter: Tissue Value: Half Open vs. Whole Plant
  misc_feature: MA Experiment ID: 20000436 Result: Down-regulated in Transcription
  misc_feature: MA Experiment 20000436 PARAMETER Experiment Name: At_Drought_P Parameter: Age (day) Value: 7
  misc_feature: MA Experiment 20000436 PARAMETER Experiment Name: At_Drought_P Parameter: Organism Value: A. thaliana
  misc_feature: MA Experiment 20000436 PARAMETER Experiment Name: At_Drought_P Parameter: Plant Line Value: WS
  misc_feature: MA Experiment 20000436 PARAMETER Experiment Name: At_Drought_P Parameter: Timepoint (hr) Value: 12
  misc_feature: MA Experiment 20000436 PARAMETER Experiment Name: At_Drought_P Parameter: Tissue Value: Whole Plant
  misc_feature: MA Experiment 20000436 PARAMETER Experiment Name: At_Drought_P Parameter: Treatment Value: Drought vs. No Drought
  misc_feature: MA Experiment ID: 20000437 Result: Down-regulated in Transcription
  misc_feature: MA Experiment 20000437 PARAMETER Experiment Name: At_Drought_P Parameter: Age (day) Value: 8
  misc_feature: MA Experiment 20000437 PARAMETER Experiment Name: At_Drought_P Parameter: Organism Value: A. thaliana
  misc_feature: MA Experiment 20000437 PARAMETER Experiment Name: At_Drought_P Parameter: Plant Line Value: WS
  misc_feature: MA Experiment 20000437 PARAMETER Experiment Name: At_Drought_P Parameter: Timepoint (hr) Value: 24
  misc_feature: MA Experiment 20000437 PARAMETER Experiment Name: At_Drought_P Parameter: Tissue Value: Whole Plant
  misc_feature: MA Experiment 20000437 PARAMETER Experiment Name: At_Drought_P Parameter: Treatment Value: Drought vs. No Drought
  misc_feature: MA Experiment ID: 20000438 Result: Up-regulated in Transcription
  misc_feature: MA Experiment 20000438 PARAMETER Experiment Name: At_Shoots__P Parameter: Age (day) Value: 14
  misc_feature: MA Experiment 20000438 PARAMETER Experiment Name: At_Shoots__P Parameter: Tissue Value: Shoots vs. Whole Plant
  misc_feature: MA Experiment ID: 20000439 Result: Down-regulated in Transcription
  misc_feature: MA Experiment 20000439 PARAMETER Experiment Name: At_Roots__P Parameter: Age (day) Value: 14 vs. 21
  misc_feature: MA Experiment 20000439 PARAMETER Experiment Name: At_Roots__P Parameter: Organism Value: A. thaliana
  misc_feature: MA Experiment 20000439 PARAMETER Experiment Name: At_Roots__P Parameter: Tissue Value: Roots vs. Whole Plant
  misc_feature: MA Experiment ID: 20000441 Result: Up-regulated in Transcription
  misc_feature: MA Experiment 20000441 PARAMETER Experiment Name: At_1uM_BR-BRZ__P Parameter: Tissue Value: Shoot Apices
  misc_feature: MA Experiment 20000441 PARAMETER Experiment Name: At_1uM_BR-BRZ__P Parameter: Treatment Value: 1uM BR vs. No Treatment
  misc_feature: MA Experiment ID: 20000527 Result: Down-regulated in Transcription
  misc_feature: MA Experiment 20000527 PARAMETER Experiment Name: At_10percent_PEG_P Parameter: Age (day) Value: 20
  misc_feature: MA Experiment 20000527 PARAMETER Experiment Name: At_10percent_PEG_P Parameter: Organism Value: A. thaliana
  misc_feature: MA Experiment 20000527 PARAMETER Experiment Name: At_10percent_PEG_P Parameter: Plant Line Value: WS
  misc_feature: MA Experiment 20000527 PARAMETER Experiment Name: At_10percent_PEG_P Parameter: Timepoint (day) Value: 20
  misc_feature: MA Experiment 20000527 PARAMETER Experiment Name: At_10percent_PEG_P Parameter: Tissue Value: Whole Plant
  misc_feature: MA Experiment 20000527 PARAMETER Experiment Name: At_10percent_PEG_P Parameter: Treatment Value: 10percent PEG vs. No Treatment
  misc_feature: MA Experiment ID: 20001248 Result: Up-regulated in Transcription
  misc_feature: MA Experiment 20001248 PARAMETER Experiment Name: At_Far-red-induction_P Parameter: Age (day) Value: 7
  misc_feature: MA Experiment 20001248 PARAMETER Experiment Name: At_Far-red-induction_P Parameter: Light Value: Far-red vs. White
  misc_feature: MA Experiment 20001248 PARAMETER Experiment Name: At_Far-red-induction_P Parameter: Organism Value: A. thaliana
  misc_feature: MA Experiment 20001248 PARAMETER Experiment Name: At_Far-red-induction_P Parameter: Plant Line Value: Columbia
  misc_feature: MA Experiment 20001248 PARAMETER Experiment Name: At_Far-red-induction_P Parameter: Timepoint (hr) Value: 4
  misc_feature: MA Experiment 20001248 PARAMETER Experiment Name: At_Far-red-induction_P Parameter: Tissue Value: Whole Plant
  misc_feature: MA Experiment ID: 20001554 Result: Down-regulated in Transcription
  misc_feature: MA Experiment 20001554 PARAMETER Experiment Name: At_Drought_Soil_Dry_P Parameter: Age (day) Value: 21
  misc_feature: MA Experiment 20001554 PARAMETER Experiment Name: At_Drought_Soil_Dry_P Parameter: Organism Value: A. thaliana
  misc_feature: MA Experiment 20001554 PARAMETER Experiment Name: At_Drought_Soil_Dry_P Parameter: Plant Line Value: WS
  misc_feature: MA Experiment 20001554 PARAMETER Experiment Name: At_Drought_Soil_Dry_P Parameter: Post Timepoint (hr) Value: None
  misc_feature: MA Experiment 20001554 PARAMETER Experiment Name: At_Drought_Soil_Dry_P Parameter: Post-Treatment Value: None
  misc_feature: MA Experiment 20001554 PARAMETER Experiment Name: At_Drought_Soil_Dry_P Parameter: Timepoint (day) Value: 7
  misc_feature: MA Experiment 20001554 PARAMETER Experiment Name: At_Drought_Soil_Dry_P Parameter: Treatment Value: Drought vs. No Drought
  misc_feature: MA Experiment ID: 20001555 Result: Down-regulated in Transcription
  misc_feature: MA Experiment 20001555 PARAMETER Experiment Name: At_Drought_Soil_Dry_P Parameter: Age (day) Value: 24
  misc_feature: MA Experiment 20001555 PARAMETER Experiment Name: At_Drought_Soil_Dry_P Parameter: Organism Value: A. thaliana
  misc_feature: MA Experiment 20001555 PARAMETER Experiment Name: At_Drought_Soil_Dry_P Parameter: Plant Line Value: WS
  misc_feature: MA Experiment 20001555 PARAMETER Experiment Name: At_Drought_Soil_Dry_P Parameter: Post Timepoint (hr) Value: None
  misc_feature: MA Experiment 20001555 PARAMETER Experiment Name: At_Drought_Soil_Dry_P Parameter: Post-Treatment Value: None
  misc_feature: MA Experiment 20001555 PARAMETER Experiment Name: At_Drought_Soil_Dry_P Parameter: Timepoint (day) Value: 10
  misc_feature: MA Experiment 20001555 PARAMETER Experiment Name: At_Drought_Soil_Dry_P Parameter: Treatment Value: Drought vs. No Drought
  misc_feature: MA Experiment ID: 20001557 Result: Up-regulated in Transcription
  misc_feature: MA Experiment 20001557 PARAMETER Experiment Name: At_Drought_Soil_Dry_P Parameter: Age (day) Value: 27
  misc_feature: MA Experiment 20001557 PARAMETER Experiment Name: At_Drought_Soil_Dry_P Parameter: Organism Value: A. thaliana
  misc_feature: MA Experiment 20001557 PARAMETER Experiment Name: At_Drought_Soil_Dry_P Parameter: Plant Line Value: WS
  misc_feature: MA Experiment 20001557 PARAMETER Experiment Name: At_Drought_Soil_Dry_P Parameter: Post Timepoint (hr) Value: 3
  misc_feature: MA Experiment 20001557 PARAMETER Experiment Name: At_Drought_Soil_Dry_P Parameter: Post-Treatment Value: Re-Water vs. No Drought
  misc_feature: MA Experiment 20001557 PARAMETER Experiment Name: At_Drought_Soil_Dry_P Parameter: Timepoint (day) Value: 13
  misc_feature: MA Experiment 20001557 PARAMETER Experiment Name: At_Drought_Soil_Dry_P Parameter: Treatment Value: Drought vs. No Drought
  misc_feature: MA Experiment ID: 20001905 Result: Up-regulated in Transcription
  misc_feature: MA Experiment 20001905 PARAMETER Experiment Name: At_Drought_Reproduction_P Parameter: Age (day) Value: 40
  misc_feature: MA Experiment 20001905 PARAMETER Experiment Name: At_Drought_Reproduction_P Parameter: Organism Value: A. thaliana
  misc_feature: MA Experiment 20001905 PARAMETER Experiment Name: At_Drought_Reproduction_P Parameter: Plant Line Value: WS
  misc_feature: MA Experiment 20001905 PARAMETER Experiment Name: At_Drought_Reproduction_P Parameter: Timepoint (day) Value: 10
  misc_feature: MA Experiment 20001905 PARAMETER Experiment Name: At_Drought_Reproduction_P Parameter: Tissue Value: Rosettes
  misc_feature: MA Experiment 20001905 PARAMETER Experiment Name: At_Drought_Reproduction_P Parameter: Treatment Value: Drought vs. No Drought
  misc_feature: MA Experiment ID: 20001911 Result: Down-regulated in Transcription
  misc_feature: MA Experiment 20001911 PARAMETER Experiment Name: At_Drought_Reproduction_P Parameter: Age (day) Value: 40
  misc_feature: MA Experiment 20001911 PARAMETER Experiment Name: At_Drought_Reproduction_P Parameter: Organism Value: A. thaliana
  misc_feature: MA Experiment 20001911 PARAMETER Experiment Name: At_Drought_Reproduction_P Parameter: Plant Line Value: WS
  misc_feature: MA Experiment 20001911 PARAMETER Experiment Name: At_Drought_Reproduction_P Parameter: Timepoint (day) Value: 10
  misc_feature: MA Experiment 20001911 PARAMETER Experiment Name: At_Drought_Reproduction_P Parameter: Tissue Value: Flowers
  misc_feature: MA Experiment 20001911 PARAMETER Experiment Name: At_Drought_Reproduction_P Parameter: Treatment Value: Drought vs. No Drought
aaaaaaacttcaaaagcgtcaaacataaagttaggccaagaaacccatttaaaaaaaaagagagagagatggagagtttcccgatcatcaatctcgagaagcttaatggagaagagagagcaatcactatggagaagatcaaagacgcttgtgaaaactggggcttctttgagtgtgtgaaccatgggatttcactcgagcttttggacaaagtggagaagatgaccaaggaacattacaagaagtgcatggaagagagattcaaggaatcgattaagaacagaggtcttgactctcttcgctctgaagtcaacgacgttgactgggaatccactttctacctcaagcaccttcccgtctctaatatctccgatgtccctgatctcgacgacgattacagaacgttaatgaaagacttcgccggaaagatagagaagttgtcggaggagctactggatctgctgtgcgagaatctcggtttagagaagggttatttaaaaaaggtgttttacgggtcgaaaagaccgacttttggaaccaaagtcagcaattatccaccttgtcctaatccggacctagtcaagggtctccgagcccacaccgacgccggcggcatcatcctcctcttccaagacgacaaagtcagtggacttcagcttcttaaagacggcgagtgggtcgatgttcctccggttaagcattcaatcgtcgttaatctcggcgatcaacttgaggtgataaccaatgggaagtacaagagtgtggaacatagagtgctatctcagacagacggagaaggaagaatgtcgatcgcatcattctataatccgggaagcgactctgttatttttccggcgccggagctgatcggaaaagaagcagagaaggagaagaaagagaactatccgagatttgtgtttgaagattacatgaaactctactctgctgtcaagtttcaggccaaggaaccaaggtttgaagccatgaaagctatggagacaactgtggccaacaatgttggaccattggccactgcgtgaatgatatgtaactggttaataaatatatatatatagtctttatataatgtcttagaaacttgattattcactatacgaataattttgttcatgttgttgtatgtttaagtggtgaatgtgttttatatatgggaattaatgttttctg

SEQ ID NO: 25990 - protein, 345 aa, Arabidopsis thaliana
  peptide (1)..(345): Ceres Seq. ID no. 12396279
  misc_feature (175)..(276): Pfam Name: 2OG-Fe(II) oxygenase superfamily Pfam Description: 2OG-Fe(II) oxygenase superfamily
  misc_feature (175)..(276): Pfam Name: 2OG-Fe(II) oxygenase superfamily Pfam Description: 2OG-Fe(II) oxygenase superfamily
  misc_feature (23)..(345): Homolog of NCBI NO: 1085595 NR Description: 1-aminocyclopropane-1-carboxylate oxidase
  misc_feature (23)..(345): Homolog of NCBI NO: 532530 NR Description: 1-aminocyclopropane-1-carboxylate oxidase
  misc_feature (23)..(345): Homolog of NCBI NO: 584711 NR Description: 1-aminocyclopropane-1-carboxylate oxidase 3 (ACC
  misc_feature (23)..(344): Homolog of NCBI NO: 398994 NR Description: 1-aminocyclopropane-1-carboxylate oxidase (ACC
  misc_feature (23)..(344): Homolog of NCBI NO: 14573463 NR Description: 1-aminocyclopropane-1-carboxylate oxidase
  misc_feature (23)..(345): Homolog of NCBI NO: 1085595 NR Description: 1-aminocyclopropane-1-carboxylate oxidase
  misc_feature (23)..(345): Homolog of NCBI NO: 584711 NR Description: 1-aminocyclopropane-1-carboxylate oxidase 3 (ACC
  misc_feature (23)..(344): Homolog of NCBI NO: 14573463 NR Description: 1-aminocyclopropane-1-carboxylate oxidase
  misc_feature (23)..(345): Homolog of NCBI NO: 15220386 NR Description: 1-aminocyclopropane-1-carboxylate oxidase
  misc_feature (23)..(345): Homolog of NCBI NO: 541861 NR Description: ethylene-forming enzyme - Arabidopsis thaliana
  misc_feature (23)..(345): Homolog of NCBI NO: 13877785 NR Description: putative 1-aminocyclopropane-1-carboxylate
  misc_feature (23)..(345): Homolog of NCBI NO: 27447954 NR Description: putative 1-aminocyclopropane-1-carboxylate
  misc_feature (23)..(345): Homolog of NCBI NO: 7576446 NR Description: 1-aminocyclopropane-1-carboxylate oxidase
  misc_feature (23)..(344): Homolog of NCBI NO: 398994 NR Description: 1-aminocyclopropane-1-carboxylate oxidase (ACC
  misc_feature (23)..(345): Homolog of NCBI NO: 532530 NR Description: 1-aminocyclopropane-1-carboxylate oxidase
  misc_feature (23)..(345): Homolog of NCBI NO: 7576446 NR Description: 1-aminocyclopropane-1-carboxylate oxidase
  misc_feature (23)..(345): Homolog of NCBI NO: 27447954 NR Description: putative 1-aminocyclopropane-1-carboxylate
  misc_feature (23)..(345): Homolog of NCBI NO: 13877785 NR Description: putative 1-aminocyclopropane-1-carboxylate
  misc_feature (23)..(345): Homolog of NCBI NO: 541861 NR Description: ethylene-forming enzyme - Arabidopsis thaliana
  misc_feature (23)..(345): Homolog of NCBI NO: 15220386 NR Description: 1-aminocyclopropane-1-carboxylate oxidase
KNFKSVKHKVRPRNPFKKKEREMESFPIINLEKLNGEERAITMEKIKDACENWGFFECVNHGISLELLDKVEKMTKEHYKKCMEERFKESIKNRGLDSLRSEVNDVDWESTFYLKHLPVSNISDVPDLDDDYRTLMKDFAGKIEKLSEELLDLLCENLGLEKGYLKKVFYGSKRPTFGTKVSNYPPCPNPDLVKGLRAHTDAGGIILLFQDDKVSGLQLLKDGEWVDVPPVKHSIVVNLGDQLEVITNGKYKSVEHRVLSQTDGEGRMSIASFYNPGSDSVIFPAPELIGKEAEKEKKENYPRFVFEDYMKLYSAVKFQAKEPRFEAMKAMETTVANNVGPLATA

SEQ ID NO: 25991 - protein, 323 aa, Arabidopsis thaliana
  peptide (1)..(323): Ceres Seq. ID no. 12396280
  misc_feature (153)..(254): Pfam Name: 2OG-Fe(II) oxygenase superfamily Pfam Description: 2OG-Fe(II) oxygenase superfamily
  misc_feature (153)..(254): Pfam Name: 2OG-Fe(II) oxygenase superfamily Pfam Description: 2OG-Fe(II) oxygenase superfamily
  misc_feature (1)..(323): Homolog of NCBI NO: 1085595 NR Description: 1-aminocyclopropane-1-carboxylate oxidase
  misc_feature (1)..(323): Homolog of NCBI NO: 532530 NR Description: 1-aminocyclopropane-1-carboxylate oxidase
  misc_feature (1)..(323): Homolog of NCBI NO: 584711 NR Description: 1-aminocyclopropane-1-carboxylate oxidase 3 (ACC
  misc_feature (1)..(322): Homolog of NCBI NO: 398994 NR Description: 1-aminocyclopropane-1-carboxylate oxidase (ACC
  misc_feature (1)..(322): Homolog of NCBI NO: 14573463 NR Description: 1-aminocyclopropane-1-carboxylate oxidase
  misc_feature (1)..(323): Homolog of NCBI NO: 1085595 NR Description: 1-aminocyclopropane-1-carboxylate oxidase
  misc_feature (1)..(323): Homolog of NCBI NO: 584711 NR Description: 1-aminocyclopropane-1-carboxylate oxidase 3 (ACC
  misc_feature (1)..(322): Homolog of NCBI NO: 14573463 NR Description: 1-aminocyclopropane-1-carboxylate oxidase
  misc_feature (1)..(323): Homolog of NCBI NO: 15220386 NR Description: 1-aminocyclopropane-1-carboxylate oxidase
  misc_feature (1)..(323): Homolog of NCBI NO: 541861 NR Description: ethylene-forming enzyme - Arabidopsis thaliana
  misc_feature (1)..(323): Homolog of NCBI NO: 13877785 NR Description: putative 1-aminocyclopropane-1-carboxylate
  misc_feature (1)..(323): Homolog of NCBI NO: 27447954 NR Description: putative 1-aminocyclopropane-1-carboxylate
  misc_feature (1)..(323): Homolog of NCBI NO: 7576446 NR Description: 1-aminocyclopropane-1-carboxylate oxidase
  misc_feature (1)..(322): Homolog of NCBI NO: 398994 NR Description: 1-aminocyclopropane-1-carboxylate oxidase (ACC
  misc_feature (1)..(323): Homolog of NCBI NO: 532530 NR Description: 1-aminocyclopropane-1-carboxylate oxidase
  misc_feature (1)..(323): Homolog of NCBI NO: 7576446 NR Description: 1-aminocyclopropane-1-carboxylate oxidase
  misc_feature (1)..(323): Homolog of NCBI NO: 27447954 NR Description: putative 1-aminocyclopropane-1-carboxylate
  misc_feature (1)..(323): Homolog of NCBI NO: 13877785 NR Description: putative 1-aminocyclopropane-1-carboxylate
  misc_feature (1)..(323): Homolog of NCBI NO: 541861 NR Description: ethylene-forming enzyme - Arabidopsis thaliana
  misc_feature (1)..(323): Homolog of NCBI NO: 15220386 NR Description: 1-aminocyclopropane-1-carboxylate oxidase
MESFPIINLEKLNGEERAITMEKIKDACENWGFFECVNHGISLELLDKVEKMTKEHYKKCMEERFKESIKNRGLDSLRSEVNDVDWESTFYLKHLPVSNISDVPDLDDDYRTLMKDFAGKIEKLSEELLDLLCENLGLEKGYLKKVFYGSKRPTFGTKVSNYPPCPNPDLVKGLRAHTDAGGIILLFQDDKVSGLQLLKDGEWVDVPPVKHSIVVNLGDQLEVITNGKYKSVEHRVLSQTDGEGRMSIASFYNPGSDSVIFPAPELIGKEAEKEKKENYPRFVFEDYMKLYSAVKFQAKEPRFEAMKAMETTVANNVGPLATA

SEQ ID NO: 25992 - protein, 303 aa, Arabidopsis thaliana
  peptide (1)..(303): Ceres Seq. ID no. 12396281
  misc_feature (133)..(234): Pfam Name: 2OG-Fe(II) oxygenase superfamily Pfam Description: 2OG-Fe(II) oxygenase superfamily
  misc_feature (133)..(234): Pfam Name: 2OG-Fe(II) oxygenase superfamily Pfam Description: 2OG-Fe(II) oxygenase superfamily
  misc_feature (1)..(303): Homolog of NCBI NO: 1085595 NR Description: 1-aminocyclopropane-1-carboxylate oxidase
  misc_feature (1)..(303): Homolog of NCBI NO: 532530 NR Description: 1-aminocyclopropane-1-carboxylate oxidase
  misc_feature (1)..(303): Homolog of NCBI NO: 584711 NR Description: 1-aminocyclopropane-1-carboxylate oxidase 3 (ACC
  misc_feature (1)..(302): Homolog of NCBI NO: 398994 NR Description: 1-aminocyclopropane-1-carboxylate oxidase (ACC
  misc_feature (1)..(302): Homolog of NCBI NO: 14573463 NR Description: 1-aminocyclopropane-1-carboxylate oxidase
  misc_feature (1)..(303): Homolog of NCBI NO: 1085595 NR Description: 1-aminocyclopropane-1-carboxylate oxidase
  misc_feature (1)..(303): Homolog of NCBI NO: 584711 NR Description: 1-aminocyclopropane-1-carboxylate oxidase 3 (ACC
  misc_feature (1)..(302): Homolog of NCBI NO: 14573463 NR Description: 1-aminocyclopropane-1-carboxylate oxidase
  misc_feature (1)..(303): Homolog of NCBI NO: 15220386 NR Description: 1-aminocyclopropane-1-carboxylate oxidase
  misc_feature (1)..(303): Homolog of NCBI NO: 541861 NR Description: ethylene-forming enzyme - Arabidopsis thaliana
  misc_feature (1)..(303): Homolog of NCBI NO: 13877785 NR Description: putative 1-aminocyclopropane-1-carboxylate
  misc_feature (1)..(303): Homolog of NCBI NO: 27447954 NR Description: putative 1-aminocyclopropane-1-carboxylate
  misc_feature (1)..(303): Homolog of NCBI NO: 7576446 NR Description: 1-aminocyclopropane-1-carboxylate oxidase
  misc_feature (1)..(302): Homolog of NCBI NO: 398994 NR Description: 1-aminocyclopropane-1-carboxylate oxidase (ACC
  misc_feature (1)..(303): Homolog of NCBI NO: 532530 NR Description: 1-aminocyclopropane-1-carboxylate oxidase
  misc_feature (1)..(303): Homolog of NCBI NO: 7576446 NR Description: 1-aminocyclopropane-1-carboxylate oxidase
  misc_feature (1)..(303): Homolog of NCBI NO: 27447954 NR Description: putative 1-aminocyclopropane-1-carboxylate
  misc_feature (1)..(303): Homolog of NCBI NO: 13877785 NR Description: putative 1-aminocyclopropane-1-carboxylate
  misc_feature (1)..(303): Homolog of NCBI NO: 541861 NR Description: ethylene-forming enzyme - Arabidopsis thaliana
  misc_feature (1)..(303): Homolog of NCBI NO: 15220386 NR Description: 1-aminocyclopropane-1-carboxylate oxidase
MEKIKDACENWGFFECVNHGISLELLDKVEKMTKEHYKKCMEERFKESIKNRGLDSLRSEVNDVDWESTFYLKHLPVSNISDVPDLDDDYRTLMKDFAGKIEKLSEELLDLLCENLGLEKGYLKKVFYGSKRPTFGTKVSNYPPCPNPDLVKGLRAHTDAGGIILLFQDDKVSGLQLLKDGEWVDVPPVKHSIVVNLGDQLEVITNGKYKSVEHRVLSQTDGEGRMSIASFYNPGSDSVIFPAPELIGKEAEKEKKENYPRFVFEDYMKLYSAVKFQAKEPRFEAMKAMETTVANNVGPLATA

SEQ ID NO: 25993 - DNA, 1435 bp, Arabidopsis thaliana
  misc_feature (1)..(1435): Ceres Seq. ID no. 12338480
  misc_feature: MA Experiment ID: 108434 Result: Up-regulated in Transcription
  misc_feature: MA Experiment 108434 PARAMETER Experiment Name: At_Root_Tips_cDNA_P Parameter: Tissue Value: Root Tips
  misc_feature: MA Experiment ID: 108461 Result: Down-regulated in Transcription
  misc_feature: MA Experiment 108461 PARAMETER Experiment Name: At_Germinating_Seeds_cDNA_P Parameter: Age (day) Value: 1 vs. 0
  misc_feature: MA Experiment 108461 PARAMETER Experiment Name: At_Germinating_Seeds_cDNA_P Parameter: Tissue Value: Germinating Seeds
  misc_feature: MA Experiment ID: 108462 Result: Down-regulated in Transcription
  misc_feature: MA Experiment 108462 PARAMETER Experiment Name: At_Germinating_Seeds_cDNA_P Parameter: Age (day) Value: 2 vs. 0
  misc_feature: MA Experiment 108462 PARAMETER Experiment Name: At_Germinating_Seeds_cDNA_P Parameter: Tissue Value: Germinating Seeds
  misc_feature: MA Experiment ID: 108463 Result: Down-regulated in Transcription
  misc_feature: MA Experiment 108463 PARAMETER Experiment Name: At_Germinating_Seeds_cDNA_P Parameter: Age (day) Value: 3 vs. 0
  misc_feature: MA Experiment 108463 PARAMETER Experiment Name: At_Germinating_Seeds_cDNA_P Parameter: Tissue Value: Germinating Seeds
  misc_feature: MA Experiment ID: 108464 Result: Down-regulated in Transcription
  misc_feature: MA Experiment 108464 PARAMETER Experiment Name: At_Germinating_Seeds_cDNA_P Parameter: Age (day) Value: 4 vs. 0
  misc_feature: MA Experiment 108464 PARAMETER Experiment Name: At_Germinating_Seeds_cDNA_P Parameter: Tissue Value: Germinating Seeds
  misc_feature: MA Experiment ID: 108474 Result: Down-regulated in Transcription
  misc_feature: MA Experiment 108474 PARAMETER Experiment Name: At_Drought_Flowers_cDNA_P Parameter: Timepoint (hr) Value: null
  misc_feature: MA Experiment 108474 PARAMETER Experiment Name: At_Drought_Flowers_cDNA_P Parameter: Treatment Value: Drought vs. No Drought
  misc_feature: MA Experiment ID: 108561 Result: Down-regulated in Transcription
  misc_feature: MA Experiment 108561 PARAMETER Experiment Name: At_100uM_ABA_cDNA_P Parameter: Timepoint (hr) Value: 6
  misc_feature: MA Experiment 108561 PARAMETER Experiment Name: At_100uM_ABA_cDNA_P Parameter: Tissue Value: Aerial
  misc_feature: MA Experiment 108561 PARAMETER Experiment Name: At_100uM_ABA_cDNA_P Parameter: Treatment Value: 100uM ABA vs. No Treatment
  misc_feature: MA Experiment ID: 108569 Result: Up-regulated in Transcription
  misc_feature: MA Experiment 108569 PARAMETER Experiment Name: At_0.001%_MeJA__cDNA_P Parameter: Timepoint (hr) Value: 6
  misc_feature: MA Experiment 108569 PARAMETER Experiment Name: At_0.001%_MeJA__cDNA_P Parameter: Tissue Value: Aerial
  misc_feature: MA Experiment 108569 PARAMETER Experiment Name: At_0.001%_MeJA__cDNA_P Parameter: Treatment Value: 0.001% MeJA vs. No Treatment
  misc_feature: MA Experiment ID: 108572 Result: Down-regulated in Transcription
  misc_feature: MA Experiment 108572 PARAMETER Experiment Name: At_Drought_cDNA_P Parameter: Timepoint (hr) Value: 1
  misc_feature: MA Experiment 108572 PARAMETER Experiment Name: At_Drought_cDNA_P Parameter: Tissue Value: Aerial
  misc_feature: MA Experiment 108572 PARAMETER Experiment Name: At_Drought_cDNA_P Parameter: Treatment Value: Drought vs. No Drought
  misc_feature: MA Experiment ID: 108573 Result: Down-regulated in Transcription
  misc_feature: MA Experiment 108573 PARAMETER Experiment Name: At_Drought_cDNA_P Parameter: Timepoint (hr) Value: 6
  misc_feature: MA Experiment 108573 PARAMETER Experiment Name: At_Drought_cDNA_P Parameter: Tissue Value: Aerial
  misc_feature: MA Experiment 108573 PARAMETER Experiment Name: At_Drought_cDNA_P Parameter: Treatment Value: Drought vs. No Drought
  misc_feature: MA Experiment ID: 108577 Result: Down-regulated in Transcription
  misc_feature: MA Experiment 108577 PARAMETER Experiment Name: At_42deg_Heat_cDNA_P Parameter: Temperature (deg C) Value: 42 vs. 22
  misc_feature: MA Experiment 108577 PARAMETER Experiment Name: At_42deg_Heat_cDNA_P Parameter: Timepoint (hr) Value: 6
  misc_feature: MA Experiment 108577 PARAMETER Experiment Name: At_42deg_Heat_cDNA_P Parameter: Tissue Value: Aerial
  misc_feature: MA Experiment ID: 108579 Result: Down-regulated in Transcription
  misc_feature: MA Experiment 108579 PARAMETER Experiment Name: At_4deg_Cold_cDNA_P Parameter: Temperature (deg C) Value: 4 vs. 22
  misc_feature: MA Experiment 108579 PARAMETER Experiment Name: At_4deg_Cold_cDNA_P Parameter: Timepoint (hr) Value: 6
  misc_feature: MA Experiment 108579 PARAMETER Experiment Name: At_4deg_Cold_cDNA_P Parameter: Tissue Value: Aerial
  misc_feature: MA Experiment ID: 108585 Result: Down-regulated in Transcription
  misc_feature: MA Experiment 108585 PARAMETER Experiment Name: At_5mM_NaNP_cDNA_P Parameter: Timepoint (hr) Value: 6
  misc_feature: MA Experiment 108585 PARAMETER Experiment Name: At_5mM_NaNP_cDNA_P Parameter: Tissue Value: Aerial
  misc_feature: MA Experiment 108585 PARAMETER Experiment Name: At_5mM_NaNP_cDNA_P Parameter: Treatment Value: null
  misc_feature: MA Experiment ID: 108595 Result: Down-regulated in Transcription
  misc_feature: MA Experiment 108595 PARAMETER Experiment Name: At_Ler-pi_Ovule_cDNA_P Parameter: Plant Line Value: null
  misc_feature: MA Experiment ID: 108605 Result: Down-regulated in Transcription
  misc_feature: MA Experiment 108605 PARAMETER Experiment Name: At_100uM_ABA_cDNA_P Parameter: Timepoint (hr) Value: 6
  misc_feature: MA Experiment 108605 PARAMETER Experiment Name: At_100uM_ABA_cDNA_P Parameter: Tissue Value: Aerial
  misc_feature: MA Experiment 108605 PARAMETER Experiment Name: At_100uM_ABA_cDNA_P Parameter: Treatment Value: 100uM ABA vs. No Treatment
  misc_feature: MA Experiment ID: 108607 Result: Down-regulated in Transcription
  misc_feature: MA Experiment 108607 PARAMETER Experiment Name: At_100uM_ABA_cDNA_P Parameter: Timepoint (hr) Value: 4
  misc_feature: MA Experiment 108607 PARAMETER Experiment Name: At_100uM_ABA_cDNA_P Parameter: Tissue Value: Aerial
  misc_feature: MA Experiment 108607 PARAMETER Experiment Name: At_100uM_ABA_cDNA_P Parameter: Treatment Value: 100uM ABA vs. No Treatment
  misc_feature: MA Experiment ID: 108609 Result: Down-regulated in Transcription
  misc_feature: MA Experiment 108609 PARAMETER Experiment Name: At_100uM_ABA_cDNA_P Parameter: Timepoint (hr) Value: 24
  misc_feature: MA Experiment 108609 PARAMETER Experiment Name: At_100uM_ABA_cDNA_P Parameter: Tissue Value: Aerial
  misc_feature: MA Experiment 108609 PARAMETER Experiment Name: At_100uM_ABA_cDNA_P Parameter: Treatment Value: 100uM ABA vs. No Treatment
  misc_feature: MA Experiment ID: 20000069 Result: Down-regulated in Transcription
  misc_feature: MA Experiment 20000069 PARAMETER Experiment Name: At_100uM_ABA_Mutants_cDNA_P Parameter: Plant Line Value: CS23
  misc_feature: MA Experiment 20000069 PARAMETER Experiment Name: At_100uM_ABA_Mutants_cDNA_P Parameter: Timepoint (hr) Value: 6
  misc_feature: MA Experiment 20000069 PARAMETER Experiment Name: At_100uM_ABA_Mutants_cDNA_P Parameter: Tissue Value: Aerial
  misc_feature: MA Experiment 20000069 PARAMETER Experiment Name: At_100uM_ABA_Mutants_cDNA_P Parameter: Treatment Value: 100uM ABA vs. No Treatment
  misc_feature: MA Experiment ID: 20000086 Result: Down-regulated in Transcription
  misc_feature: MA Experiment 20000086 PARAMETER Experiment Name: At_100uM_ABA_Mutants_cDNA_P Parameter: Plant Line Value: CS22
  misc_feature: MA Experiment 20000086 PARAMETER Experiment Name: At_100uM_ABA_Mutants_cDNA_P Parameter: Timepoint (hr) Value: 6
  misc_feature: MA Experiment 20000086 PARAMETER Experiment Name: At_100uM_ABA_Mutants_cDNA_P Parameter: Tissue Value: Aerial
  misc_feature: MA Experiment 20000086 PARAMETER Experiment Name: At_100uM_ABA_Mutants_cDNA_P Parameter: Treatment Value: 100uM ABA vs. No Treatment
  misc_feature: MA Experiment ID: 20000087 Result: Down-regulated in Transcription
  misc_feature: MA Experiment 20000087 PARAMETER Experiment Name: At_100uM_ABA_Mutants_cDNA_P Parameter: Plant Line Value: WS
  misc_feature: MA Experiment 20000087 PARAMETER Experiment Name: At_100uM_ABA_Mutants_cDNA_P Parameter: Timepoint (hr) Value: 6
  misc_feature: MA Experiment 20000087 PARAMETER Experiment Name: At_100uM_ABA_Mutants_cDNA_P Parameter: Tissue Value: Aerial
  misc_feature: MA Experiment 20000087 PARAMETER Experiment Name: At_100uM_ABA_Mutants_cDNA_P Parameter: Treatment Value: 100uM ABA vs. No Treatment
  misc_feature: MA Experiment ID: 20000088 Result: Down-regulated in Transcription
  misc_feature: MA Experiment 20000088 PARAMETER Experiment Name: At_100uM_ABA_Mutants_cDNA_P Parameter: Plant Line Value: Landsberg
  misc_feature: MA Experiment 20000088 PARAMETER Experiment Name: At_100uM_ABA_Mutants_cDNA_P Parameter: Timepoint (hr) Value: 6
  misc_feature: MA Experiment 20000088 PARAMETER Experiment Name: At_100uM_ABA_Mutants_cDNA_P Parameter: Tissue Value: Aerial
  misc_feature: MA Experiment 20000088 PARAMETER Experiment Name: At_100uM_ABA_Mutants_cDNA_P Parameter: Treatment Value: 100uM ABA vs. No Treatment
  misc_feature: MA Experiment ID: 20000112 Result: Down-regulated in Transcription
  misc_feature: MA Experiment 20000112 PARAMETER Experiment Name: At_42deg_Heat_cDNA_P Parameter: Temperature (deg C) Value: 42 vs. 22
  misc_feature: MA Experiment 20000112 PARAMETER Experiment Name: At_42deg_Heat_cDNA_P Parameter: Timepoint (hr) Value: 2
  misc_feature: MA Experiment 20000112 PARAMETER Experiment Name: At_42deg_Heat_cDNA_P Parameter: Tissue Value: Aerial
  misc_feature: MA Experiment ID: 20000117 Result: Down-regulated in Transcription
  misc_feature: MA Experiment 20000117 PARAMETER Experiment Name: At_100uM_ABA_Mutants_cDNA_P Parameter: Plant Line Value: Columbia
  misc_feature: MA Experiment 20000117 PARAMETER Experiment Name: At_100uM_ABA_Mutants_cDNA_P Parameter: Timepoint (hr) Value: 6
  misc_feature: MA Experiment 20000117 PARAMETER Experiment Name: At_100uM_ABA_Mutants_cDNA_P Parameter: Tissue Value: Aerial
  misc_feature: MA Experiment 20000117 PARAMETER Experiment Name: At_100uM_ABA_Mutants_cDNA_P Parameter: Treatment Value: 100uM ABA vs. No Treatment
  misc_feature: MA Experiment ID: 20000169 Result: Down-regulated in Transcription
  misc_feature: MA Experiment 20000169 PARAMETER Experiment Name: At_100uM_ABA_P Parameter: Age (day) Value: 14
  misc_feature: MA Experiment 20000169 PARAMETER Experiment Name: At_100uM_ABA_P Parameter: Organism Value: A. thaliana
  misc_feature: MA Experiment 20000169 PARAMETER Experiment Name: At_100uM_ABA_P Parameter: Plant Line Value: WS
  misc_feature: MA Experiment 20000169 PARAMETER Experiment Name: At_100uM_ABA_P Parameter: Timepoint (hr) Value: 6
  misc_feature: MA Experiment 20000169 PARAMETER Experiment Name: At_100uM_ABA_P Parameter: Tissue Value: Aerial
  misc_feature: MA Experiment 20000169 PARAMETER Experiment Name: At_100uM_ABA_P Parameter: Treatment Value: 100uM ABA vs. No Treatment
  misc_feature: MA Experiment ID: 20000180 Result: Down-regulated in Transcription
  misc_feature: MA Experiment 20000180 PARAMETER Experiment Name: At_Germinating_Seeds_P Parameter: Age (hr) Value: 24 vs. 0
  misc_feature: MA Experiment 20000180 PARAMETER Experiment Name: At_Germinating_Seeds_P Parameter: Tissue Value: Germinating Seeds
  misc_feature: MA Experiment ID: 20000184 Result: Up-regulated in Transcription
  misc_feature: MA Experiment 20000184 PARAMETER Experiment Name: At_Shoots__P Parameter: Age (day) Value: 7
  misc_feature: MA Experiment 20000184 PARAMETER Experiment Name: At_Shoots__P Parameter: Tissue Value: Shoots vs. Whole Plant
  misc_feature: MA Experiment ID: 20000267 Result: Down-regulated in Transcription
  misc_feature: MA Experiment 20000267 PARAMETER Experiment Name: At_Drought_P Parameter: Age (day) Value: 7
  misc_feature: MA Experiment 20000267 PARAMETER Experiment Name: At_Drought_P Parameter: Organism Value: A. thaliana
  misc_feature: MA Experiment 20000267 PARAMETER Experiment Name: At_Drought_P Parameter: Plant Line Value: WS
  misc_feature: MA Experiment 20000267 PARAMETER Experiment Name: At_Drought_P Parameter: Timepoint (hr) Value: 6
  misc_feature: MA Experiment 20000267 PARAMETER Experiment Name: At_Drought_P Parameter: Tissue Value: Whole Plant
  misc_feature: MA Experiment 20000267 PARAMETER Experiment Name: At_Drought_P Parameter: Treatment Value: Drought vs. No Drought
  misc_feature: MA Experiment ID: 20000286 Result: Up-regulated in Transcription
  misc_feature: MA Experiment 20000286 PARAMETER Experiment Name: At_Open_Flower_P Parameter: Age (day) Value: 21
  misc_feature: MA Experiment 20000286 PARAMETER Experiment Name: At_Open_Flower_P Parameter: Plant Line Value: WS
  misc_feature: MA Experiment 20000286 PARAMETER Experiment Name: At_Open_Flower_P Parameter: Tissue Value: Half Open vs. Whole Plant
  misc_feature: MA Experiment ID: 20000436 Result: Down-regulated in Transcription
  misc_feature: MA Experiment 20000436 PARAMETER Experiment Name: At_Drought_P Parameter: Age (day) Value: 7
  misc_feature: MA Experiment 20000436 PARAMETER Experiment Name: At_Drought_P Parameter: Organism Value: A. thaliana
  misc_feature: MA Experiment 20000436 PARAMETER Experiment Name: At_Drought_P Parameter: Plant Line Value: WS
  misc_feature: MA Experiment 20000436 PARAMETER Experiment Name: At_Drought_P Parameter: Timepoint (hr) Value: 12
  misc_feature: MA Experiment 20000436 PARAMETER Experiment Name: At_Drought_P Parameter: Tissue Value: Whole Plant
  misc_feature: MA Experiment 20000436 PARAMETER Experiment Name: At_Drought_P Parameter: Treatment Value: Drought vs. No Drought
  misc_feature: MA Experiment ID: 20000437 Result: Down-regulated in Transcription
  misc_feature: MA Experiment 20000437 PARAMETER Experiment Name: At_Drought_P Parameter: Age (day) Value: 8
  misc_feature: MA Experiment 20000437 PARAMETER Experiment Name: At_Drought_P Parameter: Organism Value: A. thaliana
  misc_feature: MA Experiment 20000437 PARAMETER Experiment Name: At_Drought_P Parameter: Plant Line Value: WS
  misc_feature: MA Experiment 20000437 PARAMETER Experiment Name: At_Drought_P Parameter: Timepoint (hr) Value: 24
  misc_feature: MA Experiment 20000437 PARAMETER Experiment Name: At_Drought_P Parameter: Tissue Value: Whole Plant
  misc_feature: MA Experiment 20000437 PARAMETER Experiment Name: At_Drought_P Parameter: Treatment Value: Drought vs. No Drought
  misc_feature: MA Experiment ID: 20000438 Result: Up-regulated in Transcription
  misc_feature: MA Experiment 20000438 PARAMETER Experiment Name: At_Shoots__P Parameter: Age (day) Value: 14
  misc_feature: MA Experiment 20000438 PARAMETER Experiment Name: At_Shoots__P Parameter: Tissue Value: Shoots vs. Whole Plant
  misc_feature: MA Experiment ID: 20000451 Result: Up-regulated in Transcription
  misc_feature: MA Experiment 20000451 PARAMETER Experiment Name: At_CS6879_Shoots-Roots_P Parameter: Age (day) Value: 14
  misc_feature: MA Experiment 20000451 PARAMETER Experiment Name: At_CS6879_Shoots-Roots_P Parameter: Organism Value: A. thaliana
  misc_feature: MA Experiment 20000451 PARAMETER Experiment Name: At_CS6879_Shoots-Roots_P Parameter: Plant Line Value: CS6879 vs. WS
  misc_feature: MA Experiment 20000451 PARAMETER Experiment Name: At_CS6879_Shoots-Roots_P Parameter: Tissue Value: Roots
  misc_feature: MA Experiment ID: 20000453 Result: Down-regulated in Transcription
  misc_feature: MA Experiment 20000453 PARAMETER Experiment Name: At_100uM_ABA_P Parameter: Age (day) Value: 15
  misc_feature: MA Experiment 20000453 PARAMETER Experiment Name: At_100uM_ABA_P Parameter: Organism Value: A. thaliana
  misc_feature: MA Experiment 20000453 PARAMETER Experiment Name: At_100uM_ABA_P Parameter: Plant Line Value: WS
  misc_feature: MA Experiment 20000453 PARAMETER Experiment Name: At_100uM_ABA_P Parameter: Timepoint (hr) Value: 24
  misc_feature: MA Experiment 20000453 PARAMETER Experiment Name: At_100uM_ABA_P Parameter: Tissue Value: Aerial
  misc_feature: MA Experiment 20000453 PARAMETER Experiment Name: At_100uM_ABA_P Parameter: Treatment Value: 100uM ABA vs. No Treatment
  misc_feature: MA Experiment ID: 20000573 Result: Down-regulated in Transcription
  misc_feature: MA Experiment 20000573 PARAMETER Experiment Name: At_100uM_ABA_Mutants__P Parameter: Organism Value: A. thaliana
  misc_feature: MA Experiment 20000573 PARAMETER Experiment Name: At_100uM_ABA_Mutants__P Parameter: Plant Line Value: CS22 vs. Ler wt
  misc_feature: MA Experiment 20000573 PARAMETER Experiment Name: At_100uM_ABA_Mutants__P Parameter: Timepoint (hr) Value: N/A
  misc_feature: MA Experiment 20000573 PARAMETER Experiment Name: At_100uM_ABA_Mutants__P Parameter: Tissue Value: Whole Plant
  misc_feature: MA Experiment 20000573 PARAMETER Experiment Name: At_100uM_ABA_Mutants__P Parameter: Treatment Value: None
  misc_feature: MA Experiment ID: 20001248 Result: Up-regulated in Transcription
  misc_feature: MA Experiment 20001248 PARAMETER Experiment Name: At_Far-red-induction_P Parameter: Age (day) Value: 7
  misc_feature: MA Experiment 20001248 PARAMETER Experiment Name: At_Far-red-induction_P Parameter: Light Value: Far-red vs. White
  misc_feature: MA Experiment 20001248 PARAMETER Experiment Name: At_Far-red-induction_P Parameter: Organism Value: A. thaliana
  misc_feature: MA Experiment 20001248 PARAMETER Experiment Name: At_Far-red-induction_P Parameter: Plant Line Value: Columbia
  misc_feature: MA Experiment 20001248 PARAMETER Experiment Name: At_Far-red-induction_P Parameter: Timepoint (hr) Value: 4
  misc_feature: MA Experiment 20001248 PARAMETER Experiment Name: At_Far-red-induction_P Parameter: Tissue Value: Whole Plant
  misc_feature: MA Experiment ID: 20001450 Result: Up-regulated in Transcription
  misc_feature: MA Experiment 20001450 PARAMETER Experiment Name: At_Far-red-induction_P Parameter: Age (day) Value: 7
  misc_feature: MA Experiment 20001450 PARAMETER Experiment Name: At_Far-red-induction_P Parameter: Light Value: Far-red vs. White
  misc_feature: MA Experiment 20001450 PARAMETER Experiment Name: At_Far-red-induction_P Parameter: Organism Value: A. thaliana
  misc_feature: MA Experiment 20001450 PARAMETER Experiment Name: At_Far-red-induction_P Parameter: Plant Line Value: Columbia
  misc_feature: MA Experiment 20001450 PARAMETER Experiment Name: At_Far-red-induction_P Parameter: Timepoint (hr) Value: 8
  misc_feature: MA Experiment 20001450 PARAMETER Experiment Name: At_Far-red-induction_P Parameter: Tissue Value: Whole Plant
  misc_feature: MA Experiment ID: 20001554 Result: Down-regulated in Transcription
  misc_feature: MA Experiment 20001554 PARAMETER Experiment Name: At_Drought_Soil_Dry_P Parameter: Age (day) Value: 21
  misc_feature: MA Experiment 20001554 PARAMETER Experiment Name: At_Drought_Soil_Dry_P Parameter: Organism Value: A. thaliana
  misc_feature: MA Experiment 20001554 PARAMETER Experiment Name: At_Drought_Soil_Dry_P Parameter: Plant Line Value: WS
  misc_feature: MA Experiment 20001554 PARAMETER Experiment Name: At_Drought_Soil_Dry_P Parameter: Post Timepoint (hr) Value: None
  misc_feature: MA Experiment 20001554 PARAMETER Experiment Name: At_Drought_Soil_Dry_P Parameter: Post-Treatment Value: None
  misc_feature: MA Experiment 20001554 PARAMETER Experiment Name: At_Drought_Soil_Dry_P Parameter: Timepoint (day) Value: 7
  misc_feature: MA Experiment 20001554 PARAMETER Experiment Name: At_Drought_Soil_Dry_P Parameter: Treatment Value: Drought vs. No Drought
  misc_feature: MA Experiment ID: 20001555 Result: Down-regulated in Transcription
  misc_feature: MA Experiment 20001555 PARAMETER Experiment Name: At_Drought_Soil_Dry_P Parameter: Age (day) Value: 24
  misc_feature: MA Experiment 20001555 PARAMETER Experiment Name: At_Drought_Soil_Dry_P Parameter: Organism Value: A. thaliana
  misc_feature: MA Experiment 20001555 PARAMETER Experiment Name: At_Drought_Soil_Dry_P Parameter: Plant Line Value: WS
  misc_feature: MA Experiment 20001555 PARAMETER Experiment Name: At_Drought_Soil_Dry_P Parameter: Post Timepoint (hr) Value: None
  misc_feature: MA Experiment 20001555 PARAMETER Experiment Name: At_Drought_Soil_Dry_P Parameter: Post-Treatment Value: None
  misc_feature: MA Experiment 20001555 PARAMETER Experiment Name: At_Drought_Soil_Dry_P Parameter: Timepoint (day) Value: 10
  misc_feature: MA Experiment 20001555 PARAMETER Experiment Name: At_Drought_Soil_Dry_P Parameter: Treatment Value: Drought vs. No Drought
  misc_feature: MA Experiment ID: 20001556 Result: Down-regulated in Transcription
  misc_feature: MA Experiment 20001556 PARAMETER Experiment Name: At_Drought_Soil_Dry_P Parameter: Age (day) Value: 26
  misc_feature: MA Experiment 20001556 PARAMETER Experiment Name: At_Drought_Soil_Dry_P Parameter: Organism Value: A. thaliana
  misc_feature: MA Experiment 20001556 PARAMETER Experiment Name: At_Drought_Soil_Dry_P Parameter: Plant Line Value: WS
  misc_feature: MA Experiment 20001556 PARAMETER Experiment Name: At_Drought_Soil_Dry_P Parameter: Post Timepoint (hr) Value: None
  misc_feature: MA Experiment 20001556 PARAMETER Experiment Name: At_Drought_Soil_Dry_P Parameter: Post-Treatment Value: None
  misc_feature: MA Experiment 20001556 PARAMETER Experiment Name: At_Drought_Soil_Dry_P Parameter: Timepoint (day) Value: 12
  misc_feature: MA Experiment 20001556 PARAMETER Experiment Name: At_Drought_Soil_Dry_P Parameter: Treatment Value: Drought vs. No Drought
  misc_feature: MA Experiment ID: 20001557 Result: Up-regulated in Transcription
  misc_feature: MA Experiment 20001557 PARAMETER Experiment Name: At_Drought_Soil_Dry_P Parameter: Age (day) Value: 27
  misc_feature: MA Experiment 20001557 PARAMETER Experiment Name: At_Drought_Soil_Dry_P Parameter: Organism Value: A. thaliana
  misc_feature: MA Experiment 20001557 PARAMETER Experiment Name: At_Drought_Soil_Dry_P Parameter: Plant Line Value: WS
  misc_feature: MA Experiment 20001557 PARAMETER Experiment Name: At_Drought_Soil_Dry_P Parameter: Post Timepoint (hr) Value: 3
  misc_feature: MA Experiment 20001557 PARAMETER Experiment Name: At_Drought_Soil_Dry_P Parameter: Post-Treatment Value: Re-Water vs. No Drought
  misc_feature: MA Experiment 20001557 PARAMETER Experiment Name: At_Drought_Soil_Dry_P Parameter: Timepoint (day) Value: 13
  misc_feature: MA Experiment 20001557 PARAMETER Experiment Name: At_Drought_Soil_Dry_P Parameter: Treatment Value: Drought vs. No Drought
  misc_feature: MA Experiment ID: 20001558 Result: Up-regulated in Transcription
  misc_feature: MA Experiment 20001558 PARAMETER Experiment Name: At_Drought_Soil_Dry_P Parameter: Age (day) Value: 27
  misc_feature: MA Experiment 20001558 PARAMETER Experiment Name: At_Drought_Soil_Dry_P Parameter: Organism Value: A. thaliana
  misc_feature: MA Experiment 20001558 PARAMETER Experiment Name: At_Drought_Soil_Dry_P Parameter: Plant Line Value: WS
  misc_feature: MA Experiment 20001558 PARAMETER Experiment Name: At_Drought_Soil_Dry_P Parameter: Post Timepoint (hr) Value: 6
  misc_feature: MA Experiment 20001558 PARAMETER Experiment Name: At_Drought_Soil_Dry_P Parameter: Post-Treatment Value: Re-Water vs. No Drought
  misc_feature: MA Experiment 20001558 PARAMETER Experiment Name: At_Drought_Soil_Dry_P Parameter: Timepoint (day) Value: 13
  misc_feature: MA Experiment 20001558 PARAMETER Experiment Name: At_Drought_Soil_Dry_P Parameter: Treatment Value: Drought vs. No Drought
  misc_feature: MA Experiment ID: 20001559 Result: Down-regulated in Transcription
  misc_feature: MA Experiment 20001559 PARAMETER Experiment Name: At_Drought_Soil_Dry_P Parameter: Age (day) Value: 28
  misc_feature: MA Experiment 20001559 PARAMETER Experiment Name: At_Drought_Soil_Dry_P Parameter: Organism Value: A. thaliana
  misc_feature: MA Experiment 20001559 PARAMETER Experiment Name: At_Drought_Soil_Dry_P Parameter: Plant Line Value: WS
  misc_feature: MA Experiment 20001559 PARAMETER Experiment Name: At_Drought_Soil_Dry_P Parameter: Post Timepoint (hr) Value: 29
  misc_feature: MA Experiment 20001559 PARAMETER Experiment Name: At_Drought_Soil_Dry_P Parameter: Post-Treatment Value: Re-Water vs. No Drought
  misc_feature: MA Experiment 20001559 PARAMETER Experiment Name: At_Drought_Soil_Dry_P Parameter: Timepoint (day) Value: 14
  misc_feature: MA Experiment 20001559 PARAMETER Experiment Name: At_Drought_Soil_Dry_P Parameter: Treatment Value: Drought vs. No Drought
  misc_feature: MA Experiment ID: 20001757 Result: Up-regulated in Transcription
  misc_feature: MA Experiment 20001757 PARAMETER Experiment Name: At_50mM_NH4NO3_L-to-H_P Parameter: Timepoint (hr) Value: 6
  misc_feature: MA Experiment 20001757 PARAMETER Experiment Name: At_50mM_NH4NO3_L-to-H_P Parameter: Tissue Value: Leaf
  misc_feature: MA Experiment 20001757 PARAMETER Experiment Name: At_50mM_NH4NO3_L-to-H_P Parameter: Treatment Value: 50mM NH4NO3 vs 100mM Mannitol
  misc_feature: MA Experiment ID: 20001905 Result: Down-regulated in Transcription
  misc_feature: MA Experiment 20001905 PARAMETER Experiment Name: At_Drought_Reproduction_P Parameter: Age (day) Value: 40
  misc_feature: MA Experiment 20001905 PARAMETER Experiment Name: At_Drought_Reproduction_P Parameter: Organism Value: A. thaliana
  misc_feature: MA Experiment 20001905 PARAMETER Experiment Name: At_Drought_Reproduction_P Parameter: Plant Line Value: WS
  misc_feature: MA Experiment 20001905 PARAMETER Experiment Name: At_Drought_Reproduction_P Parameter: Timepoint (day) Value: 10
  misc_feature: MA Experiment 20001905 PARAMETER Experiment Name: At_Drought_Reproduction_P Parameter: Tissue Value: Rosettes
  misc_feature: MA Experiment 20001905 PARAMETER Experiment Name: At_Drought_Reproduction_P Parameter: Treatment Value: Drought vs. No Drought
  misc_feature: MA Experiment ID: 20001906 Result: Down-regulated in Transcription
  misc_feature: MA Experiment 20001906 PARAMETER Experiment Name: At_Drought_Reproduction_P Parameter: Age (day) Value: 35
  misc_feature: MA Experiment 20001906 PARAMETER Experiment Name: At_Drought_Reproduction_P Parameter: Organism Value: A. thaliana
  misc_feature: MA Experiment 20001906 PARAMETER Experiment Name: At_Drought_Reproduction_P Parameter: Plant Line Value: WS
  misc_feature: MA Experiment 20001906 PARAMETER Experiment Name: At_Drought_Reproduction_P Parameter: Timepoint (day) Value: 5
  misc_feature: MA Experiment 20001906 PARAMETER Experiment Name: At_Drought_Reproduction_P Parameter: Tissue Value: Siliques
  misc_feature: MA Experiment 20001906 PARAMETER Experiment Name: At_Drought_Reproduction_P Parameter: Treatment Value: Drought vs. No Drought
  misc_feature: MA Experiment ID: 20001908 Result: Down-regulated in Transcription
  misc_feature: MA Experiment 20001908 PARAMETER Experiment Name: At_Drought_Reproduction_P Parameter: Age (day) Value: 40
  misc_feature: MA Experiment 20001908 PARAMETER Experiment Name: At_Drought_Reproduction_P Parameter: Organism Value: A. thaliana
  misc_feature: MA Experiment 20001908 PARAMETER Experiment Name: At_Drought_Reproduction_P Parameter: Plant Line Value: WS
  misc_feature: MA Experiment 20001908 PARAMETER Experiment Name: At_Drought_Reproduction_P Parameter: Timepoint (day) Value: 10
  misc_feature: MA Experiment 20001908 PARAMETER Experiment Name: At_Drought_Reproduction_P Parameter: Tissue Value: Siliques
  misc_feature: MA Experiment 20001908 PARAMETER Experiment Name: At_Drought_Reproduction_P Parameter: Treatment Value: Drought vs. No Drought
  misc_feature: MA Experiment ID: 20001911 Result: Down-regulated in Transcription
  misc_feature: MA Experiment 20001911 PARAMETER Experiment Name: At_Drought_Reproduction_P Parameter: Age (day) Value: 40
  misc_feature: MA Experiment 20001911 PARAMETER Experiment Name: At_Drought_Reproduction_P Parameter: Organism Value: A. thaliana
  misc_feature: MA Experiment 20001911 PARAMETER Experiment Name: At_Drought_Reproduction_P Parameter: Plant Line Value: WS
  misc_feature: MA Experiment 20001911 PARAMETER Experiment Name: At_Drought_Reproduction_P Parameter: Timepoint (day) Value: 10
  misc_feature: MA Experiment 20001911 PARAMETER Experiment Name: At_Drought_Reproduction_P Parameter: Tissue Value: Flowers
  misc_feature: MA Experiment 20001911 PARAMETER Experiment Name: At_Drought_Reproduction_P Parameter: Treatment Value: Drought vs. No Drought
aaattacattttacactcatctcgttctctcttccgtcaatatggaaggcgtcaccgtcgtgtctttcttccttcttttcatcgccaccgccatggccgccaagtccaccgtctccttccgtgacggcatgttaccaaacggagacttcgagctaggaccaaaaccatcagacatgaaaggaacagaaatactaaacaaactagcaataccaaactgggaagtcacaggattcgtcgaatacattaaatcaggacataaacaaggagacatgcttctcgttgttcccgccggtaaattcgctgtaagacttgggaacgaagcatcgatcaaacaaagacttaaagtggttaaaggaatgtattactcactcacttttagtgctgctagaacttgtgcacaagacgagagacttaacatatctgtagcacctgactccggtgtgattccgattcagacggtttatagtagtagtggttgggatttatatgcttgggcgtttcaagctgagagtgatgttgctgaagttgtgattcataatcctggtgttgaggaagatccagcttgtggtccacttattgatggtgttgctatgagatctctttaccctcctagaccaactaataagaacattttgaaaaacggaggatttgaagaaggtccattagtattacccggctcgacaactggagttttgatcccaccgtttatagaagacgaccactctcctttacctggatggatggtggagtctctcaaagctgtcaagtacgtagacgttgaacatttctcagtcccacagggtcgcagagctattgagcttgtagcgggtaaagagagtgccatcgctcaagtggttcggactgtcattgggaagacttacgtgctgtcttttgcggttggagacgccaacaatgcttgcaaaggatcaatggtggttgaggcttttgcaggaaaagatacacttaaggtcccttacgagtcgaaaggcacaggagggtttaaacgagcttctattcgatttgtggcggtttcgacccgatcaagaattatgttctacagcactttctatgccatgaggagcgatgatttctcgtcattgtgtgggcctgtgatcgatgatgtcaagcttataagcgttcgtaaaccatagatgaatcaccaatcctattacaagaaaatgcatcgtgtggtcttcttttattttccttaaactgtctttggtgtgtgttggattttattgaaacgagaaggtgaaaaaaacagagttttatttacgagagttagggttttatataggcagatgggcctttgcttatattgtattttcttgtatgagaaggcaaaagaaacgttgcctatatcttatgtatctaggccttttaatttttatggaagagttacaaaacttacaataaagttgtatgcatattttat

SEQ ID NO: 25994 - protein, 382 aa, Arabidopsis thaliana
  peptide (1)..(382): Ceres Seq. ID no. 12338481
  misc_feature (58)..(380): Pfam Name: Protein of unknown function, DUF642 Pfam Description: Protein of unknown function, DUF642
  misc_feature (13)..(381): Homolog of NCBI NO: 7488741 NR Description: hypothetical protein precursor - alfalfa
  misc_feature (58)..(382): Homolog of NCBI NO: 7486632 NR Description: hypothetical protein F8B4.160 - Arabidopsis
  misc_feature (39)..(382): Homolog of NCBI NO: 18418018 NR Description: putative protein
  misc_feature (24)..(382): Homolog of NCBI NO: 7488898 NR Description: hypothetical protein - castor bean
  misc_feature (14)..(382): Homolog of NCBI NO: 21554402 NR Description: unknown [Arabidopsis thaliana]
  misc_feature (14)..(382): Homolog of NCBI NO: 23397043 NR Description: unknown protein [Arabidopsis thaliana]
  misc_feature (14)..(382): Homolog of NCBI NO: 15239049 NR Description: putative protein
  misc_feature (14)..(382): Homolog of NCBI NO: 21537379 NR Description: unknown [Arabidopsis thaliana]
  misc_feature (14)..(382): Homolog of NCBI NO: 15809822 NR Description: AT5g25460/F18G18_200 [Arabidopsis thaliana]
  misc_feature (14)..(382): Homolog of NCBI NO: 15239438 NR Description: putative protein
ITFYTHLVLSSVNMEGVTVVSFFLLFIATAMAAKSTVSFRDGMLPNGDFELGPKPSDMKGTEILNKLAIPNWEVTGFVEYIKSGHKQGDMLLVVPAGKFAVRLGNEASIKQRLKVVKGMYYSLTFSAARTCAQDERLNISVAPDSGVIPIQTVYSSSGWDLYAWAFQAESDVAEVVIHNPGVEEDPACGPLIDGVAMRSLYPPRPTNKNILKNGGFEEGPLVLPGSTTGVLIPPFIEDDHSPLPGWMVESLKAVKYVDVEHFSVPQGRRAIELVAGKESAIAQVVRTVIGKTYVLSFAVGDANNACKGSMVVEAFAGKDTLKVPYESKGTGGFKRASIRFVAVSTRSRIMFYSTFYAMRSDDFSSLCGPVIDDVKLISVRKP

SEQ ID NO: 25995 - protein, 369 aa, Arabidopsis thaliana
  peptide (1)..(369): Ceres Seq. ID no. 12338483
  misc_feature (45)..(367): Pfam Name: Protein of unknown function, DUF642 Pfam Description: Protein of unknown function, DUF642
  misc_feature (1)..(368): Homolog of NCBI NO: 7488741 NR Description: hypothetical protein precursor - alfalfa
  misc_feature (45)..(369): Homolog of NCBI NO: 7486632 NR Description: hypothetical protein F8B4.160 - Arabidopsis
  misc_feature (26)..(369): Homolog of NCBI NO: 18418018 NR Description: putative protein
  misc_feature (11)..(369): Homolog of NCBI NO: 7488898 NR Description: hypothetical protein - castor bean
  misc_feature (1)..(369): Homolog of NCBI NO: 21554402 NR Description: unknown [Arabidopsis thaliana]
  misc_feature (1)..(369): Homolog of NCBI NO: 23397043 NR Description: unknown protein [Arabidopsis thaliana]
  misc_feature (1)..(369): Homolog of NCBI NO: 15239049 NR Description: putative protein
  misc_feature (1)..(369): Homolog of NCBI NO: 21537379 NR Description: unknown [Arabidopsis thaliana]
  misc_feature (1)..(369): Homolog of NCBI NO: 15809822 NR Description: AT5g25460/F18G18_200 [Arabidopsis thaliana]
  misc_feature (1)..(369): Homolog of NCBI NO: 15239438 NR Description: putative protein
MEGVTVVSFFLLFIATAMAAKSTVSFRDGMLPNGDFELGPKPSDMKGTEILNKLAIPNWEVTGFVEYIKSGHKQGDMLLVVPAGKFAVRLGNEASIKQRLKVVKGMYYSLTFSAARTCAQDERLNISVAPDSGVIPIQTVYSSSGWDLYAWAFQAESDVAEVVIHNPGVEEDPACGPLIDGVAMRSLYPPRPTNKNILKNGGFEEGPLVLPGSTTGVLIPPFIEDDHSPLPGWMVESLKAVKYVDVEHFSVPQGRRAIELVAGKESAIAQVVRTVIGKTYVLSFAVGDANNACKGSMVVEAFAGKDTLKVPYESKGTGGFKRASIRFVAVSTRSRIMFYSTFYAMRSDDFSSLCGPVIDDVKLISVRKP

SEQ ID NO: 25996 - protein, 352 aa, Arabidopsis thaliana
  peptide (1)..(352): Ceres Seq. ID no. 12338484
  misc_feature (28)..(350): Pfam Name: Protein of unknown function, DUF642 Pfam Description: Protein of unknown function, DUF642
  misc_feature (1)..(351): Homolog of NCBI NO: 7488741 NR Description: hypothetical protein precursor - alfalfa
  misc_feature (28)..(352): Homolog of NCBI NO: 7486632 NR Description: hypothetical protein F8B4.160 - Arabidopsis
  misc_feature (9)..(352): Homolog of NCBI NO: 18418018 NR Description: putative protein
  misc_feature (1)..(352): Homolog of NCBI NO: 7488898 NR Description: hypothetical protein - castor bean
  misc_feature (1)..(352): Homolog of NCBI NO: 21554402 NR Description: unknown [Arabidopsis thaliana]
  misc_feature (1)..(352): Homolog of NCBI NO: 23397043 NR Description: unknown protein [Arabidopsis thaliana]
  misc_feature (1)..(352): Homolog of NCBI NO: 15239049 NR Description: putative protein
  misc_feature (1)..(352): Homolog of NCBI NO: 21537379 NR Description: unknown [Arabidopsis thaliana]
  misc_feature (1)..(352): Homolog of NCBI NO: 15809822 NR Description: AT5g25460/F18G18_200 [Arabidopsis thaliana]
  misc_feature (1)..(352): Homolog of NCBI NO: 15239438 NR Description: putative protein
MAAKSTVSFRDGMLPNGDFELGPKPSDMKGTEILNKLAIPNWEVTGFVEYIKSGHKQGDMLLVVPAGKFAVRLGNEASIKQRLKVVKGMYYSLTFSAARTCAQDERLNISVAPDSGVIPIQTVYSSSGWDLYAWAFQAESDVAEVVIHNPGVEEDPACGPLIDGVAMRSLYPPRPTNKNILKNGGFEEGPLVLPGSTTGVLIPPFIEDDHSPLPGWMVESLKAVKYVDVEHFSVPQGRRAIELVAGKESAIAQVVRTVIGKTYVLSFAVGDANNACKGSMVVEAFAGKDTLKVPYESKGTGGFKRASIRFVAVSTRSRIMFYSTFYAMRSDDFSSLCGPVIDDVKLISVRKP

SEQ ID NO: 25997 - DNA, 1088 bp, Arabidopsis thaliana
  misc_feature (1)..(1088): Ceres Seq. ID no. 12335935
  misc_feature: MA Experiment ID: 108434 Result: Down-regulated in Transcription
  misc_feature: MA Experiment 108434 PARAMETER Experiment Name: At_Root_Tips_cDNA_P Parameter: Tissue Value: Root Tips
  misc_feature: MA Experiment ID: 108464 Result: Up-regulated in Transcription
  misc_feature: MA Experiment 108464 PARAMETER Experiment Name: At_Germinating_Seeds_cDNA_P Parameter: Age (day) Value: 4 vs. 0
  misc_feature: MA Experiment 108464 PARAMETER Experiment Name: At_Germinating_Seeds_cDNA_P Parameter: Tissue Value: Germinating Seeds
  misc_feature: MA Experiment ID: 108488 Result: Down-regulated in Transcription
  misc_feature: MA Experiment ID: 108573 Result: Up-regulated in Transcription
  misc_feature: MA Experiment 108573 PARAMETER Experiment Name: At_Drought_cDNA_P Parameter: Timepoint (hr) Value: 6
  misc_feature: MA Experiment 108573 PARAMETER Experiment Name: At_Drought_cDNA_P Parameter: Tissue Value: Aerial
  misc_feature: MA Experiment 108573 PARAMETER Experiment Name: At_Drought_cDNA_P Parameter: Treatment Value: Drought vs. No Drought
  misc_feature: MA Experiment ID: 108595 Result: Down-regulated in Transcription
  misc_feature: MA Experiment 108595 PARAMETER Experiment Name: At_Ler-pi_Ovule_cDNA_P Parameter: Plant Line Value: null
  misc_feature: MA Experiment ID: 20000185 Result: Up-regulated in Transcription
  misc_feature: MA Experiment 20000185 PARAMETER Experiment Name: At_Roots__P Parameter: Age (day) Value: 7 vs. 21
  misc_feature: MA Experiment 20000185 PARAMETER Experiment Name: At_Roots__P Parameter: Organism Value: A. thaliana
  misc_feature: MA Experiment 20000185 PARAMETER Experiment Name: At_Roots__P Parameter: Tissue Value: Roots vs. Whole Plant
  misc_feature: MA Experiment ID: 20000439 Result: Up-regulated in Transcription
  misc_feature: MA Experiment 20000439 PARAMETER Experiment Name: At_Roots__P Parameter: Age (day) Value: 14 vs. 21
  misc_feature: MA Experiment 20000439 PARAMETER Experiment Name: At_Roots__P Parameter: Organism Value: A. thaliana
  misc_feature: MA Experiment 20000439 PARAMETER Experiment Name: At_Roots__P Parameter: Tissue Value: Roots vs. Whole Plant
  misc_feature: MA Experiment ID: 20001248 Result: Down-regulated in Transcription
  misc_feature: MA Experiment 20001248 PARAMETER Experiment Name: At_Far-red-induction_P Parameter: Age (day) Value: 7
  misc_feature: MA Experiment 20001248 PARAMETER Experiment Name: At_Far-red-induction_P Parameter: Light Value: Far-red vs. White
  misc_feature: MA Experiment 20001248 PARAMETER Experiment Name: At_Far-red-induction_P Parameter: Organism Value: A. thaliana
  misc_feature: MA Experiment 20001248 PARAMETER Experiment Name: At_Far-red-induction_P Parameter: Plant Line Value: Columbia
  misc_feature: MA Experiment 20001248 PARAMETER Experiment Name: At_Far-red-induction_P Parameter: Timepoint (hr) Value: 4
  misc_feature: MA Experiment 20001248 PARAMETER Experiment Name: At_Far-red-induction_P Parameter: Tissue Value: Whole Plant
  misc_feature: MA Experiment ID: 20001450 Result: Down-regulated in Transcription
  misc_feature: MA Experiment 20001450 PARAMETER Experiment Name: At_Far-red-induction_P Parameter: Age (day) Value: 7
  misc_feature: MA Experiment 20001450 PARAMETER Experiment Name: At_Far-red-induction_P Parameter: Light Value: Far-red vs. White
  misc_feature: MA Experiment 20001450 PARAMETER Experiment Name: At_Far-red-induction_P Parameter: Organism Value: A. thaliana
  misc_feature: MA Experiment 20001450 PARAMETER Experiment Name: At_Far-red-induction_P Parameter: Plant Line Value: Columbia
  misc_feature: MA Experiment 20001450 PARAMETER Experiment Name: At_Far-red-induction_P Parameter: Timepoint (hr) Value: 8
  misc_feature: MA Experiment 20001450 PARAMETER Experiment Name: At_Far-red-induction_P Parameter: Tissue Value: Whole Plant
atcgaacgacccagaaaagagatttgattcctttcctcatctttgttcctcagctctgtttgacccatttatcatatcaaaggaagaaactttaaaatgacaaccgattctgatgatggtttcgtttcttcaagacaactccttttgcttgcttcgatttgttctggtgctctcatgtgcaaaatcgtttatgacttgactcgtttcataagtccattgctcttcagtgtttatggaaaacttgacagcaaagttagaatggaatggaacaataggggattctcaacttttcatgctgtgtttacttctgtggcttcaatttacttcttggtgatatctgatcaatttgatgagaatgttcatggtgattcagtcattaatagtacaacgaggttatcggaatctgtaatggggatctccttaggctattttctagcagacttagcaatgatcttttggtattttcctactcttggtggtattgaatatgtttttcatcacttcttatcgatgtttgccatcattctttctgtcacaagtgggcaaagtcagttctacatcttcttagttctcttatcagaggctacaaccccgtttgttaatctacggtggtacttggataatagtggtcaaaaaggctcaaaggcttacacgctcaacggaattgctttgttcttggggtggctggttgcgagggtccttttgtttatcttcttctttgttcacatgtacctccatttccatcaggtgaagcaagtgtttccactgggattttacagccttcttacgataccaccggctctagcagtgatgaatctcctttggttctggaaaatcaccaaaggattgatcaaaacactctccaaggcgaaaacatcggggatgaagaaacagtgatggttaccctgaaaaagatttttcaactgcattcactttgatgtgtccatgaaaaattgattgatattcatgttgtggttgtcttggatgcccttttgggttttatgaacaaagagtgtgcaagctaatggggattgtatattcaaacttttcagctgtttcttaggtattcagtttgtatagttagaacc

SEQ ID NO: 25998 - protein, 266 aa, Arabidopsis thaliana
  peptide (1)..(266): Ceres Seq. ID no. 12335936
  misc_feature (17)..(261): Pfam Name: Eukaryotic protein of unknown function (DUF887) Pfam Description: Eukaryotic protein of unknown function (DUF887)
  misc_feature (15)..(255): Homolog of NCBI NO: 34783863 NR Description: Unknown (protein for MGC:64415) [Xenopus laevis]
  misc_feature (8)..(256): Homolog of NCBI NO: 30725869 NR Description: RIKEN cDNA C730036B01 [Mus musculus]
  misc_feature (20)..(198): Homolog of NCBI NO: 25403400 NR Description: protein T19E23.9 [imported] - Arabidopsis
  misc_feature (20)..(257): Homolog of NCBI NO: 22328807 NR Description: unknown protein; protein id: At4g19645.1
  misc_feature (15)..(257): Homolog of NCBI NO: 40538924 NR Description: expressed protein [Oryza sativa (japonica
  misc_feature (20)..(257): Homolog of NCBI NO: 18397885 NR Description: expressed protein
  misc_feature (6)..(259): Homolog of NCBI NO: 34909246 NR Description: B1148D12.11 [Oryza sativa (japonica
  misc_feature (1)..(266): Homolog of NCBI NO: 7486070 NR Description: hypothetical protein F24G24.160 - Arabidopsis
  misc_feature (1)..(266): Homolog of NCBI NO: 21537382 NR Description: unknown [Arabidopsis thaliana]
  misc_feature (1)..(266): Homolog of NCBI NO: 18413327 NR Description: expressed protein
MTTDSDDGFVSSRQLLLLASICSGALMCKIVYDLTRFISPLLFSVYGKLDSKVRMEWNNRGFSTFHAVFTSVASIYFLVISDQFDENVHGDSVINSTTRLSESVMGISLGYFLADLAMIFWYFPTLGGIEYVFHHFLSMFAIILSVTSGQSQFYIFLVLLSEATTPFVNLRWYLDNSGQKGSKAYTLNGIALFLGWLVARVLLFIFFFVHMYLHFHQVKQVFPLGFYSLLTIPPALAVMNLLWFWKITKGLIKTLSKAKTSGMKKQ

SEQ ID NO: 25999 - protein, 240 aa, Arabidopsis thaliana
  peptide (1)..(240): Ceres Seq. ID no. 12335937
  misc_feature (1)..(235): Pfam Name: Eukaryotic protein of unknown function (DUF887) Pfam Description: Eukaryotic protein of unknown function (DUF887)
  misc_feature (1)..(229): Homolog of NCBI NO: 34783863 NR Description: Unknown (protein for MGC:64415) [Xenopus laevis]
  misc_feature (1)..(230): Homolog of NCBI NO: 30725869 NR Description: RIKEN cDNA C730036B01 [Mus musculus]
  misc_feature (1)..(172): Homolog of NCBI NO: 25403400 NR Description: protein T19E23.9 [imported] - Arabidopsis
  misc_feature (1)..(231): Homolog of NCBI NO: 22328807 NR Description: unknown protein; protein id: At4g19645.1
  misc_feature (1)..(231): Homolog of NCBI NO: 40538924 NR Description: expressed protein [Oryza sativa (japonica
  misc_feature (1)..(231): Homolog of NCBI NO: 18397885 NR Description: expressed protein
  misc_feature (1)..(233): Homolog of NCBI NO: 34909246 NR Description: B1148D12.11 [Oryza sativa (japonica
  misc_feature (1)..(240): Homolog of NCBI NO: 7486070 NR Description: hypothetical protein F24G24.160 - Arabidopsis
  misc_feature (1)..(240): Homolog of NCBI NO: 21537382 NR Description: unknown [Arabidopsis thaliana]
  misc_feature (1)..(240): Homolog of NCBI NO: 18413327 NR Description: expressed protein
MCKIVYDLTRFISPLLFSVYGKLDSKVRMEWNNRGFSTFHAVFTSVASIYFLVISDQFDENVHGDSVINSTTRLSESVMGISLGYFLADLAMIFWYFPTLGGIEYVFHHFLSMFAIILSVTSGQSQFYIFLVLLSEATTPFVNLRWYLDNSGQKGSKAYTLNGIALFLGWLVARVLLFIFFFVHMYLHFHQVKQVFPLGFYSLLTIPPALAVMNLLWFWKITKGLIKTLSKAKTSGMKKQ

SEQ ID NO: 26000 - protein, 212 aa, Arabidopsis thaliana
  peptide (1)..(212): Ceres Seq. ID no. 12335938
  misc_feature (1)..(207): Pfam Name: Eukaryotic protein of unknown function (DUF887) Pfam Description: Eukaryotic protein of unknown function (DUF887)
  misc_feature (1)..(201): Homolog of NCBI NO: 34783863 NR Description: Unknown (protein for MGC:64415) [Xenopus laevis]
  misc_feature (1)..(202): Homolog of NCBI NO: 30725869 NR Description: RIKEN cDNA C730036B01 [Mus musculus]
  misc_feature (1)..(144): Homolog of NCBI NO: 25403400 NR Description: protein T19E23.9 [imported] - Arabidopsis
  misc_feature (1)..(203): Homolog of NCBI NO: 22328807 NR Description: unknown protein; protein id: At4g19645.1
  misc_feature (1)..(203): Homolog of NCBI NO: 40538924 NR Description: expressed protein [Oryza sativa (japonica
  misc_feature (1)..(203): Homolog of NCBI NO: 18397885 NR Description: expressed protein
  misc_feature (1)..(205): Homolog of NCBI NO: 34909246 NR Description: B1148D12.11 [Oryza sativa (japonica
  misc_feature (1)..(212): Homolog of NCBI NO: 7486070 NR Description: hypothetical protein F24G24.160 - Arabidopsis
  misc_feature (1)..(212): Homolog of NCBI NO: 21537382 NR Description: unknown [Arabidopsis thaliana]
  misc_feature (1)..(212): Homolog of NCBI NO: 18413327 NR Description: expressed protein
MEWNNRGFSTFHAVFTSVASIYFLVISDQFDENVHGDSVINSTTRLSESVMGISLGYFLADLAMIFWYFPTLGGIEYVFHHFLSMFAIILSVTSGQSQFYIFLVLLSEATTPFVNLRWYLDNSGQKGSKAYTLNGIALFLGWLVARVLLFIFFFVHMYLHFHQVKQVFPLGFYSLLTIPPALAVMNLLWFWKITKGLIKTLSKAKTSGMKKQ

SEQ ID NO: 26001 - DNA, 1149 bp, Arabidopsis thaliana
  misc_feature (1)..(1149): Ceres Seq. ID no. 12579770
  misc_feature: MA Experiment ID: 20000180 Result: Up-regulated in Transcription
  misc_feature: MA Experiment 20000180 PARAMETER Experiment Name: At_Germinating_Seeds_P Parameter: Age (hr) Value: 24 vs. 0
  misc_feature: MA Experiment 20000180 PARAMETER Experiment Name: At_Germinating_Seeds_P Parameter: Tissue Value: Germinating Seeds
  misc_feature: MA Experiment ID: 20000185 Result: Down-regulated in Transcription
  misc_feature: MA Experiment 20000185 PARAMETER Experiment Name: At_Roots__P Parameter: Age (day) Value: 7 vs. 21
  misc_feature: MA Experiment 20000185 PARAMETER Experiment Name: At_Roots__P Parameter: Organism Value: A. thaliana
  misc_feature: MA Experiment 20000185 PARAMETER Experiment Name: At_Roots__P Parameter: Tissue Value: Roots vs. Whole Plant
  misc_feature: MA Experiment ID: 20000234 Result: Up-regulated in Transcription
  misc_feature: MA Experiment 20000234 PARAMETER Experiment Name: At_Siliques_P Parameter: Age (day) Value: 21
  misc_feature: MA Experiment 20000234 PARAMETER Experiment Name: At_Siliques_P Parameter: Organism Value: A. thaliana
  misc_feature: MA Experiment 20000234 PARAMETER Experiment Name: At_Siliques_P Parameter: Plant Line Value: WS
  misc_feature: MA Experiment 20000234 PARAMETER Experiment Name: At_Siliques_P Parameter: Tissue Value: Less Than 5mm Siliques vs. Whole Plant
  misc_feature: MA Experiment ID: 20000265 Result: Up-regulated in Transcription
  misc_feature: MA Experiment 20000265 PARAMETER Experiment Name: At_Open_Flower_P Parameter: Age (day) Value: 21
  misc_feature: MA Experiment 20000265 PARAMETER Experiment Name: At_Open_Flower_P Parameter: Plant Line Value: WS
  misc_feature: MA Experiment 20000265 PARAMETER Experiment Name: At_Open_Flower_P Parameter: Tissue Value: Closed Flower vs. Whole Plant
  misc_feature: MA Experiment ID: 20000286 Result: Up-regulated in Transcription
  misc_feature: MA Experiment 20000286 PARAMETER Experiment Name: At_Open_Flower_P Parameter: Age (day) Value: 21
  misc_feature: MA Experiment 20000286 PARAMETER Experiment Name: At_Open_Flower_P Parameter: Plant Line Value: WS
  misc_feature: MA Experiment 20000286 PARAMETER Experiment Name: At_Open_Flower_P Parameter: Tissue Value: Half Open vs. Whole Plant
  misc_feature: MA Experiment ID: 20000437 Result: Down-regulated in Transcription
  misc_feature: MA Experiment 20000437 PARAMETER Experiment Name: At_Drought_P Parameter: Age (day) Value: 8
  misc_feature: MA Experiment 20000437 PARAMETER Experiment Name: At_Drought_P Parameter: Organism Value: A. thaliana
  misc_feature: MA Experiment 20000437 PARAMETER Experiment Name: At_Drought_P Parameter: Plant Line Value: WS
  misc_feature: MA Experiment 20000437 PARAMETER Experiment Name: At_Drought_P Parameter: Timepoint (hr) Value: 24
  misc_feature: MA Experiment 20000437 PARAMETER Experiment Name: At_Drought_P Parameter: Tissue Value: Whole Plant
  misc_feature: MA Experiment 20000437 PARAMETER Experiment Name: At_Drought_P Parameter: Treatment Value: Drought vs. No Drought
  misc_feature: MA Experiment ID: 20000439 Result: Down-regulated in Transcription
  misc_feature: MA Experiment 20000439 PARAMETER Experiment Name: At_Roots__P Parameter: Age (day) Value: 14 vs. 21
  misc_feature: MA Experiment 20000439 PARAMETER Experiment Name: At_Roots__P Parameter: Organism Value: A. thaliana
  misc_feature: MA Experiment 20000439 PARAMETER Experiment Name: At_Roots__P Parameter: Tissue Value: Roots vs. Whole Plant
  misc_feature: MA Experiment ID: 20000495 Result: Up-regulated in Transcription
  misc_feature: MA Experiment 20000495 PARAMETER Experiment Name: At_Guard_Cells_P Parameter: Harvest Date Value: 8/2/2002
  misc_feature: MA Experiment 20000495 PARAMETER Experiment Name: At_Guard_Cells_P Parameter: Organism Value: A. thaliana
  misc_feature: MA Experiment 20000495 PARAMETER Experiment Name: At_Guard_Cells_P Parameter: Tissue Value: Guard Cells vs. Leaves
  misc_feature: MA Experiment ID: 20001248 Result: Down-regulated in Transcription
  misc_feature: MA Experiment 20001248 PARAMETER Experiment Name: At_Far-red-induction_P Parameter: Age (day) Value: 7
  misc_feature: MA Experiment 20001248 PARAMETER Experiment Name: At_Far-red-induction_P Parameter: Light Value: Far-red vs. White
  misc_feature: MA Experiment 20001248 PARAMETER Experiment Name: At_Far-red-induction_P Parameter: Organism Value: A. thaliana
  misc_feature: MA Experiment 20001248 PARAMETER Experiment Name: At_Far-red-induction_P Parameter: Plant Line Value: Columbia
  misc_feature: MA Experiment 20001248 PARAMETER Experiment Name: At_Far-red-induction_P Parameter: Timepoint (hr) Value: 4
  misc_feature: MA Experiment 20001248 PARAMETER Experiment Name: At_Far-red-induction_P Parameter: Tissue Value: Whole Plant
  misc_feature: MA Experiment ID: 20001555 Result: Down-regulated in Transcription
  misc_feature: MA Experiment 20001555 PARAMETER Experiment Name: At_Drought_Soil_Dry_P Parameter: Age (day) Value: 24
  misc_feature: MA Experiment 20001555 PARAMETER Experiment Name: At_Drought_Soil_Dry_P Parameter: Organism Value: A. thaliana
  misc_feature: MA Experiment 20001555 PARAMETER Experiment Name: At_Drought_Soil_Dry_P Parameter: Plant Line Value: WS
  misc_feature: MA Experiment 20001555 PARAMETER Experiment Name: At_Drought_Soil_Dry_P Parameter: Post Timepoint (hr) Value: None
  misc_feature: MA Experiment 20001555 PARAMETER Experiment Name: At_Drought_Soil_Dry_P Parameter: Post-Treatment Value: None
  misc_feature: MA Experiment 20001555 PARAMETER Experiment Name: At_Drought_Soil_Dry_P Parameter: Timepoint (day) Value: 10
  misc_feature: MA Experiment 20001555 PARAMETER Experiment Name: At_Drought_Soil_Dry_P Parameter: Treatment Value: Drought vs. No Drought
acacatcttaaaaagtaaaaacacattcatctatccaacaaaaaaaaaaaaaaaaaggagaaatggaaggaatcgatcatagaatggtgagtgtcaatggcataactatgcacattgccgagaaaggtcccaaagaaggacctgtggtgcttctcctccatggattccctgatctctggtacacgtggcgtcaccagattagtgggttatcatctctaggttaccgcgctgtagctccagacctccgaggctacggagactctgattcgccagagtctttctccgagtacacgtgtcttaacgtcgttggggacctcgtagctcttctggacagtgttgctggaaatcaagagaaggtgtttctggtcggtcatgattggggagccattatcggatgatttctctgtttgtttcgacctgaaaagattaacggctttgtgtgtttgagtgtgccgtatagatcaagaaaccctaaagtcaagcccgttcaagggttcaaggctgtatttggagatgattactacatttgtagatttcaggaaccggggaagattgaaggagagattgcaagtgcagatccaagaatatttctgaggaacctcttcacagggaggacactcggtccgccgattttacctaaggataatccctttggggaaaaacctaaccctaatagcgaaaacattgaattgcctgaatggttttctaagaaagatctcgatttctatgtctccaaattcgagaaggcaggatttaccggtggattgaactactacagagccatggatctgaattgggagctcactgcaccatggaccggagctaagattcaagttccagtgaagttcatgacaggtgacttcgacatggtttacaccacaccagggatgaaagagtacattcacggtggtggatttgctgcagatgttccaactcttcaagagatagtggtgattgaagatgctggtcacttcgttaaccaagagaaacctcaagaggtcactgctcacatcaatgacttcttcaccaagcttcgggacaacaacaaaagcttttagagttctcgtttggttctattatgttggctctcaaaacaagttggttcttgcatgtgttgtttcgacaagattttgaataagacttggcatt

SEQ ID NO: 26002 - protein, 111 aa, Arabidopsis thaliana
  peptide (1)..(111): Ceres Seq. ID no. 12579771
  misc_feature (54)..(111): Pfam Name: alpha/beta hydrolase fold Pfam Description: alpha/beta hydrolase fold
  misc_feature (1)..(111): Homolog of NCBI NO: 15230018 NR Description: putative epoxide hydrolase
MEGIDHRMVSVNGITMHIAEKGPKEGPVVLLLHGFPDLWYTWRHQISGLSSLGYRAVAPDLRGYGDSDSPESFSEYTCLNVVGDLVALLDSVAGNQEKVFLVGHDWGAIIG

SEQ ID NO: 26003 - protein, 104 aa, Arabidopsis thaliana
  peptide (1)..(104): Ceres Seq. ID no. 12579772
  misc_feature (47)..(104): Pfam Name: alpha/beta hydrolase fold Pfam Description: alpha/beta hydrolase fold
  misc_feature (1)..(104): Homolog of NCBI NO: 15230018 NR Description: putative epoxide hydrolase
MVSVNGITMHIAEKGPKEGPVVLLLHGFPDLWYTWRHQISGLSSLGYRAVAPDLRGYGDSDSPESFSEYTCLNVVGDLVALLDSVAGNQEKVFLVGHDWGAIIG

SEQ ID NO: 26004 - protein, 96 aa, Arabidopsis thaliana
  peptide (1)..(96): Ceres Seq. ID no. 12579773
  misc_feature (39)..(96): Pfam Name: alpha/beta hydrolase fold Pfam Description: alpha/beta hydrolase fold
  misc_feature (1)..(96): Homolog of NCBI NO: 15230018 NR Description: putative epoxide hydrolase
MHIAEKGPKEGPVVLLLHGFPDLWYTWRHQISGLSSLGYRAVAPDLRGYGDSDSPESFSEYTCLNVVGDLVALLDSVAGNQEKVFLVGHDWGAIIG

SEQ ID NO: 26005 - DNA, 1369 bp, Arabidopsis thaliana; identical to SEQ ID NO: 21457
  misc_feature (1)..(1369): Ceres Seq. ID no. 13491211
  misc_feature: MA Experiment ID: 108569 Result: Up-regulated in Transcription
  misc_feature: MA Experiment 108569 PARAMETER Experiment Name: At_0.001%_MeJA__cDNA_P Parameter: Timepoint (hr) Value: 6
  misc_feature: MA Experiment 108569 PARAMETER Experiment Name: At_0.001%_MeJA__cDNA_P Parameter: Tissue Value: Aerial
  misc_feature: MA Experiment 108569 PARAMETER Experiment Name: At_0.001%_MeJA__cDNA_P Parameter: Treatment Value: 0.001% MeJA vs. No Treatment
  misc_feature: MA Experiment ID: 108573 Result: Up-regulated in Transcription
  misc_feature: MA Experiment 108573 PARAMETER Experiment Name: At_Drought_cDNA_P Parameter: Timepoint (hr) Value: 6
  misc_feature: MA Experiment 108573 PARAMETER Experiment Name: At_Drought_cDNA_P Parameter: Tissue Value: Aerial
  misc_feature: MA Experiment 108573 PARAMETER Experiment Name: At_Drought_cDNA_P Parameter: Treatment Value: Drought vs. No Drought
  misc_feature: MA Experiment ID: 20000070 Result: Up-regulated in Transcription
  misc_feature: MA Experiment 20000070 PARAMETER Experiment Name: At_100uM_ABA_Mutants_cDNA_P Parameter: Plant Line Value: CS24
  misc_feature: MA Experiment 20000070 PARAMETER Experiment Name: At_100uM_ABA_Mutants_cDNA_P Parameter: Timepoint (hr) Value: 6
  misc_feature: MA Experiment 20000070 PARAMETER Experiment Name: At_100uM_ABA_Mutants_cDNA_P Parameter: Tissue Value: Aerial
  misc_feature: MA Experiment 20000070 PARAMETER Experiment Name: At_100uM_ABA_Mutants_cDNA_P Parameter: Treatment Value: 100uM ABA vs. No Treatment
  misc_feature: MA Experiment ID: 20000071 Result: Up-regulated in Transcription
  misc_feature: MA Experiment 20000071 PARAMETER Experiment Name: At_100uM_ABA_Mutants_cDNA_P Parameter: Plant Line Value: CS8104
  misc_feature: MA Experiment 20000071 PARAMETER Experiment Name: At_100uM_ABA_Mutants_cDNA_P Parameter: Timepoint (hr) Value: 6
  misc_feature: MA Experiment 20000071 PARAMETER Experiment Name: At_100uM_ABA_Mutants_cDNA_P Parameter: Tissue Value: Aerial
  misc_feature: MA Experiment 20000071 PARAMETER Experiment Name: At_100uM_ABA_Mutants_cDNA_P Parameter: Treatment Value: 100uM ABA vs. No Treatment
  misc_feature: MA Experiment ID: 20000087 Result: Up-regulated in Transcription
  misc_feature: MA Experiment 20000087 PARAMETER Experiment Name: At_100uM_ABA_Mutants_cDNA_P Parameter: Plant Line Value: WS
  misc_feature: MA Experiment 20000087 PARAMETER Experiment Name: At_100uM_ABA_Mutants_cDNA_P Parameter: Timepoint (hr) Value: 6
  misc_feature: MA Experiment 20000087 PARAMETER Experiment Name: At_100uM_ABA_Mutants_cDNA_P Parameter: Tissue Value: Aerial
  misc_feature: MA Experiment 20000087 PARAMETER Experiment Name: At_100uM_ABA_Mutants_cDNA_P Parameter: Treatment Value: 100uM ABA vs. No Treatment
  misc_feature: MA Experiment ID: 20000093 Result: Down-regulated in Transcription
  misc_feature: MA Experiment 20000093 PARAMETER Experiment Name: At_42deg_Heat_cDNA_P Parameter: Temperature (deg C) Value: 42 vs. 22
  misc_feature: MA Experiment 20000093 PARAMETER Experiment Name: At_42deg_Heat_cDNA_P Parameter: Timepoint (hr) Value: 0.5
  misc_feature: MA Experiment 20000093 PARAMETER Experiment Name: At_42deg_Heat_cDNA_P Parameter: Tissue Value: Aerial
  misc_feature: MA Experiment ID: 20000111 Result: Down-regulated in Transcription
  misc_feature: MA Experiment 20000111 PARAMETER Experiment Name: At_42deg_Heat_cDNA_P Parameter: Temperature (deg C) Value: 42 vs. 22
  misc_feature: MA Experiment 20000111 PARAMETER Experiment Name: At_42deg_Heat_cDNA_P Parameter: Timepoint (hr) Value: 6
  misc_feature: MA Experiment 20000111 PARAMETER Experiment Name: At_42deg_Heat_cDNA_P Parameter: Tissue Value: Aerial
  misc_feature: MA Experiment ID: 20000112 Result: Down-regulated in Transcription
  misc_feature: MA Experiment 20000112 PARAMETER Experiment Name: At_42deg_Heat_cDNA_P Parameter: Temperature (deg C) Value: 42 vs. 22
  misc_feature: MA Experiment 20000112 PARAMETER Experiment Name: At_42deg_Heat_cDNA_P Parameter: Timepoint (hr) Value: 2
  misc_feature: MA Experiment 20000112 PARAMETER Experiment Name: At_42deg_Heat_cDNA_P Parameter: Tissue Value: Aerial
  misc_feature: MA Experiment ID: 20000117 Result: Up-regulated in Transcription
  misc_feature: MA Experiment 20000117 PARAMETER Experiment Name: At_100uM_ABA_Mutants_cDNA_P Parameter: Plant Line Value: Columbia
  misc_feature: MA Experiment 20000117 PARAMETER Experiment Name: At_100uM_ABA_Mutants_cDNA_P Parameter: Timepoint (hr) Value: 6
  misc_feature: MA Experiment 20000117 PARAMETER Experiment Name: At_100uM_ABA_Mutants_cDNA_P Parameter: Tissue Value: Aerial
  misc_feature: MA Experiment 20000117 PARAMETER Experiment Name: At_100uM_ABA_Mutants_cDNA_P Parameter: Treatment Value: 100uM ABA vs. No Treatment
  misc_feature: MA Experiment ID: 20000144 Result: Down-regulated in Transcription
  misc_feature: MA Experiment 20000144 PARAMETER Experiment Name: At_42deg_Heat_cDNA_P Parameter: Temperature (deg C) Value: 42 vs. 22
  misc_feature: MA Experiment 20000144 PARAMETER Experiment Name: At_42deg_Heat_cDNA_P Parameter: Timepoint (hr) Value: 1
  misc_feature: MA Experiment 20000144 PARAMETER Experiment Name: At_42deg_Heat_cDNA_P Parameter: Tissue Value: Aerial
  misc_feature: MA Experiment ID: 20000171 Result: Down-regulated in Transcription
  misc_feature: MA Experiment 20000171 PARAMETER Experiment Name: At_42deg_Heat_P Parameter: Age (day) Value: 14
  misc_feature: MA Experiment 20000171 PARAMETER Experiment Name: At_42deg_Heat_P Parameter: Organism Value: A. thaliana
  misc_feature: MA Experiment 20000171 PARAMETER Experiment Name: At_42deg_Heat_P Parameter: Plant Line Value: WS
  misc_feature: MA Experiment 20000171 PARAMETER Experiment Name: At_42deg_Heat_P Parameter: Temperature (deg C) Value: 42 vs. 22
  misc_feature: MA Experiment 20000171 PARAMETER Experiment Name: At_42deg_Heat_P Parameter: Timepoint (hr) Value: 1
  misc_feature: MA Experiment 20000171 PARAMETER Experiment Name: At_42deg_Heat_P Parameter: Tissue Value: Aerial
  misc_feature: MA Experiment ID: 20000173 Result: Down-regulated in Transcription
  misc_feature: MA Experiment 20000173 PARAMETER Experiment Name: At_42deg_Heat_P Parameter: Age (day) Value: 14
  misc_feature: MA Experiment 20000173 PARAMETER Experiment Name: At_42deg_Heat_P Parameter: Organism Value: A. thaliana
  misc_feature: MA Experiment 20000173 PARAMETER Experiment Name: At_42deg_Heat_P Parameter: Plant Line Value: WS
  misc_feature: MA Experiment 20000173 PARAMETER Experiment Name: At_42deg_Heat_P Parameter: Temperature (deg C) Value: 42 vs. 22
  misc_feature: MA Experiment 20000173 PARAMETER Experiment Name: At_42deg_Heat_P Parameter: Timepoint (hr) Value: 6
  misc_feature: MA Experiment 20000173 PARAMETER Experiment Name: At_42deg_Heat_P Parameter: Tissue Value: Aerial
  misc_feature: MA Experiment ID: 20000179 Result: Up-regulated in Transcription
  misc_feature: MA Experiment 20000179 PARAMETER Experiment Name: At_Germinating_Seeds_P Parameter: Age (hr) Value: 6 vs. 0
  misc_feature: MA Experiment 20000179 PARAMETER Experiment Name: At_Germinating_Seeds_P Parameter: Tissue Value: Germinating Seeds
  misc_feature: MA Experiment ID: 20000180 Result: Up-regulated in Transcription
  misc_feature: MA Experiment 20000180 PARAMETER Experiment Name: At_Germinating_Seeds_P Parameter: Age (hr) Value: 24 vs. 0
  misc_feature: MA Experiment 20000180 PARAMETER Experiment Name: At_Germinating_Seeds_P Parameter: Tissue Value: Germinating Seeds
  misc_feature: MA Experiment ID: 20000213 Result: Up-regulated in Transcription
  misc_feature: MA Experiment 20000213 PARAMETER Experiment Name: At_4deg_Cold_P Parameter: Timepoint (hr) Value: 2
  misc_feature: MA Experiment ID: 20000224 Result: Down-regulated in Transcription

SEQ ID NO: 26006 - protein, 289 aa, Arabidopsis thaliana; identical to SEQ ID NO: 21458
  peptide (1)..(289): Ceres Seq. ID no. 13491212
  misc_feature (42)..(289): Pfam Name: Protein of unknown function (DUF579) Pfam Description: Protein of unknown function (DUF579)
  misc_feature (42)..(289): Pfam Name: Protein of unknown function (DUF579) Pfam Description: Protein of unknown function (DUF579)
  misc_feature (42)..(289): Pfam Name: Protein of unknown function (DUF579) Pfam Description: Protein of unknown function (DUF579)
  misc_feature (43)..(289): Homolog of NCBI NO: 18397819 NR Description: expressed protein [Arabidopsis thaliana]
  misc_feature (1)..(278): Homolog of NCBI NO: 15234881 NR Description: expressed protein [Arabidopsis thaliana]
  misc_feature (48)..(289): Homolog of NCBI NO: 25402555 NR Description: hypothetical protein [imported] - Arabidopsis
  misc_feature (62)..(279): Homolog of NCBI NO: 18398986 NR Description: expressed protein [Arabidopsis thaliana]
  misc_feature (16)..(289): Homolog of NCBI NO: 15217566 NR Description: hypothetical protein [Arabidopsis thaliana]
  misc_feature (43)..(289): Homolog of NCBI NO: 18397819 NR Description: expressed protein [Arabidopsis thaliana]
  misc_feature (48)..(289): Homolog of NCBI NO: 25402555 NR Description: hypothetical protein [imported] - Arabidopsis
  misc_feature (16)..(289): Homolog of NCBI NO: 15217566 NR Description: hypothetical protein [Arabidopsis thaliana]
  misc_feature (62)..(279): Homolog of NCBI NO: 18398986 NR Description: expressed protein [Arabidopsis thaliana]
  misc_feature (48)..(289): Homolog of NCBI NO: 25402555 NR Description: hypothetical protein [imported] - Arabidopsis
  misc_feature (1)..(278): Homolog of NCBI NO: 15234881 NR Description: expressed protein [Arabidopsis thaliana]
  misc_feature (43)..(289): Homolog of NCBI NO: 18397819 NR Description: expressed protein [Arabidopsis thaliana]
  misc_feature (1)..(289): Homolog of NCBI NO: 18396558 NR Description: expressed protein [Arabidopsis thaliana]
  misc_feature (1)..(289): Homolog of NCBI NO: 21537399 NR Description: unknown [Arabidopsis thaliana]
  misc_feature (8)..(289): Homolog of NCBI NO: 15220402 NR Description: expressed protein [Arabidopsis thaliana]
  misc_feature (29)..(289): Homolog of NCBI NO: 18409879 NR Description: expressed protein [Arabidopsis thaliana]
  misc_feature (29)..(289): Homolog of NCBI NO: 25354648 NR Description: hypothetical protein F14O23.3 [imported] -
  misc_feature (1)..(289): Homolog of NCBI NO: 18396558 NR Description: expressed protein [Arabidopsis thaliana]
  misc_feature (1)..(289): Homolog of NCBI NO: 21537399 NR Description: unknown [Arabidopsis thaliana]
  misc_feature (8)..(289): Homolog of NCBI NO: 15220402 NR Description: expressed protein [Arabidopsis thaliana]
  misc_feature (29)..(289): Homolog of NCBI NO: 18409879 NR Description: expressed protein [Arabidopsis thaliana]
  misc_feature (29)..(289): Homolog of NCBI NO: 25354648 NR Description: hypothetical protein F14O23.3 [imported] -
  misc_feature (16)..(289): Homolog of NCBI NO: 15217566 NR Description: hypothetical protein [Arabidopsis thaliana]
  misc_feature (62)..(279): Homolog of NCBI NO: 18398986 NR Description: expressed protein [Arabidopsis thaliana]
  misc_feature (1)..(278): Homolog of NCBI NO: 15234881 NR Description: expressed protein [Arabidopsis thaliana]
  misc_feature (29)..(289): Homolog of NCBI NO: 25354648 NR Description: hypothetical protein F14O23.3 [imported] -
  misc_feature (29)..(289): Homolog of NCBI NO: 18409879 NR Description: expressed protein [Arabidopsis thaliana]
  misc_feature (8)..(289): Homolog of NCBI NO: 15220402 NR Description: expressed protein [Arabidopsis thaliana]
  misc_feature (1)..(289): Homolog of NCBI NO: 21537399 NR Description: unknown [Arabidopsis thaliana]
  misc_feature (1)..(289): Homolog of NCBI NO: 18396558 NR Description: expressed protein [Arabidopsis thaliana]

SEQ ID NO: 26007 - protein, 179 aa, Arabidopsis thaliana; identical to SEQ ID NO: 21459
  peptide (1)..(179): Ceres Seq. ID no. 13491213
  misc_feature (1)..(179): Pfam Name: Protein of unknown function (DUF579) Pfam Description: Protein of unknown function (DUF579)
  misc_feature (1)..(179): Pfam Name: Protein of unknown function (DUF579) Pfam Description: Protein of unknown function (DUF579)
  misc_feature (1)..(179): Pfam Name: Protein of unknown function (DUF579) Pfam Description: Protein of unknown function (DUF579)
  misc_feature (1)..(179): Homolog of NCBI NO: 18397819 NR Description: expressed protein [Arabidopsis thaliana]
  misc_feature (1)..(168): Homolog of NCBI NO: 15234881 NR Description: expressed protein [Arabidopsis thaliana]
  misc_feature (1)..(179): Homolog of NCBI NO: 25402555 NR Description: hypothetical protein [imported] - Arabidopsis
  misc_feature (1)..(169): Homolog of NCBI NO: 18398986 NR Description: expressed protein [Arabidopsis thaliana]
  misc_feature (1)..(179): Homolog of NCBI NO: 15217566 NR Description: hypothetical protein [Arabidopsis thaliana]
  misc_feature (1)..(168): Homolog of NCBI NO: 15234881 NR Description: expressed protein [Arabidopsis thaliana]
  misc_feature (1)..(169): Homolog of NCBI NO: 18398986 NR Description: expressed protein [Arabidopsis thaliana]
  misc_feature (1)..(179): Homolog of NCBI NO: 25402555 NR Description: hypothetical protein [imported] - Arabidopsis
  misc_feature (1)..(168): Homolog of NCBI NO: 15234881 NR Description: expressed protein [Arabidopsis thaliana]
  misc_feature (1)..(179): Homolog of NCBI NO: 18397819 NR Description: expressed protein [Arabidopsis thaliana]
  misc_feature (1)..(179): Homolog of NCBI NO: 18396558 NR Description: expressed protein [Arabidopsis thaliana]
  misc_feature (1)..(179): Homolog of NCBI NO: 21537399 NR Description: unknown [Arabidopsis thaliana]
  misc_feature (1)..(179): Homolog of NCBI NO: 15220402 NR Description: expressed protein [Arabidopsis thaliana]
  misc_feature (1)..(179): Homolog of NCBI NO: 18409879 NR Description: expressed protein [Arabidopsis thaliana]
  misc_feature (1)..(179): Homolog of NCBI NO: 25354648 NR Description: hypothetical protein F14O23.3 [imported] -
  misc_feature (1)..(179): Homolog of NCBI NO: 15217566 NR Description: hypothetical protein [Arabidopsis thaliana]
  misc_feature (1)..(179): Homolog of NCBI NO: 18396558 NR Description: expressed protein [Arabidopsis thaliana]
  misc_feature (1)..(179): Homolog of NCBI NO: 21537399 NR Description: unknown [Arabidopsis thaliana]
  misc_feature (1)..(179): Homolog of NCBI NO: 15220402 NR Description: expressed protein [Arabidopsis thaliana]
  misc_feature (1)..(179): Homolog of NCBI NO: 18409879 NR Description: expressed protein [Arabidopsis thaliana]
  misc_feature (1)..(179): Homolog of NCBI NO: 25354648 NR Description: hypothetical protein F14O23.3 [imported] -
  misc_feature (1)..(179): Homolog of NCBI NO: 15217566 NR Description: hypothetical protein [Arabidopsis thaliana]
  misc_feature (1)..(169): Homolog of NCBI NO: 18398986 NR Description: expressed protein [Arabidopsis thaliana]
  misc_feature (1)..(179): Homolog of NCBI NO: 25402555 NR Description: hypothetical protein [imported] - Arabidopsis
  misc_feature (1)..(179): Homolog of NCBI NO: 18397819 NR Description: expressed protein [Arabidopsis thaliana]
  misc_feature (1)..(179): Homolog of NCBI NO: 25354648 NR Description: hypothetical protein F14O23.3 [imported] -
  misc_feature (1)..(179): Homolog of NCBI NO: 18409879 NR Description: expressed protein [Arabidopsis thaliana]
  misc_feature (1)..(179): Homolog of NCBI NO: 15220402 NR Description: expressed protein [Arabidopsis thaliana]
  misc_feature (1)..(179): Homolog of NCBI NO: 21537399 NR Description: unknown [Arabidopsis thaliana]
  misc_feature (1)..(179): Homolog of NCBI NO: 18396558 NR Description: expressed protein [Arabidopsis thaliana]

SEQ ID NO: 26008 - DNA, 1153 bp, Arabidopsis thaliana
  misc_feature (1)..(1153): Ceres Seq. ID no. 12333192
  misc_feature: MA Experiment ID: 20000173 Result: Down-regulated in Transcription
  misc_feature: MA Experiment 20000173 PARAMETER Experiment Name: At_42deg_Heat_P Parameter: Age (day) Value: 14
  misc_feature: MA Experiment 20000173 PARAMETER Experiment Name: At_42deg_Heat_P Parameter: Organism Value: A. thaliana
  misc_feature: MA Experiment 20000173 PARAMETER Experiment Name: At_42deg_Heat_P Parameter: Plant Line Value: WS
  misc_feature: MA Experiment 20000173 PARAMETER Experiment Name: At_42deg_Heat_P Parameter: Temperature (deg C) Value: 42 vs. 22
  misc_feature: MA Experiment 20000173 PARAMETER Experiment Name: At_42deg_Heat_P Parameter: Timepoint (hr) Value: 6
  misc_feature: MA Experiment 20000173 PARAMETER Experiment Name: At_42deg_Heat_P Parameter: Tissue Value: Aerial
  misc_feature: MA Experiment ID: 20000184 Result: Down-regulated in Transcription
  misc_feature: MA Experiment 20000184 PARAMETER Experiment Name: At_Shoots__P Parameter: Age (day) Value: 7
  misc_feature: MA Experiment 20000184 PARAMETER Experiment Name: At_Shoots__P Parameter: Tissue Value: Shoots vs. Whole Plant
  misc_feature: MA Experiment ID: 20000224 Result: Up-regulated in Transcription
  misc_feature: MA Experiment ID: 20000794 Result: Up-regulated in Transcription
  misc_feature: MA Experiment 20000794 PARAMETER Experiment Name: At_Petals_P Parameter: Age (day) Value: 23-25 days
  misc_feature: MA Experiment 20000794 PARAMETER Experiment Name: At_Petals_P Parameter: Plant Line Value: WS
  misc_feature: MA Experiment 20000794 PARAMETER Experiment Name: At_Petals_P Parameter: Tissue Value: Petals vs. Whole plant
aatcaccaaccagtgacctaacaatggccgttcctccattattcttcctcctcacactcctctctctcccttctcttcttatctccgccggtgcttccaatgcctatccttctattcccggaaccgctcctatcgacggaggtttcaccgatgaacttaaacccattcgccgtgaagtctacgggaatggcaaaatctatgacatcagtcaccgttacactccggagatgccgtcgtgggactcatcggaaggaatcggacggttcctatggttagctgcgagtatgaagaacggatctcttgctaataactctgaaatgaagattcccacgcacactggtactcatgttgattcacctggtcacgtctatgacaagtattacgatgctggctttgatgttgactcgcttgatcttcaagtcctcaatggtcttgcgttgttggttgatgttccaaaggataagaacattactgctgaagtgatgaaatctcttcacattccaaaaggagttagtcgtgtgcttttcagaacattgaacactgacaggcgtcttatgttcaagaaagaatttgatacaagctatgtcggattcatgaaggatggtgcgcaatggttggtagacaacacagacatcaaacttgttgggattgattatctatcagtagctgcatatgatgatcttattccatcccacctagtattcctaaaagaccgggagactatactcgtggaggggttgaagctggatggtgtgaaggcaggactctactctgtccattgcttacctctaagactggttggagcagaagggtctccaattcgttgcatcctcatcgattgattctctcccatcacaaacctgccaaatccgaaattgtccgtaatcaaaagcttgcttagcttatgaactgaatatcagtttgtgctagatttatgcaaccaatatggagattgaagtaggaagaaataagagagatgcagagaagaccaagttgatgataatgaagcaccgaagaaaaaagatttttcatttctatgtatatgtcaataaataaattaaaaattctcttaatctgtcaaggttgtactaattatcaaatagggaaaagttcataacatataaatccttgttgaaataggtttttgttttcc

SEQ ID NO: 26009 - protein, 279 aa, Arabidopsis thaliana
  peptide (1)..(279): Ceres Seq. ID no. 12333193
  misc_feature (65)..(265): Pfam Name: Putative cyclase Pfam Description: Putative cyclase
  misc_feature (8)..(157): Homolog of NCBI NO: 7486023 NR Description: hypothetical protein F23E12.220 - Arabidopsis
  misc_feature (12)..(278): Homolog of NCBI NO: 35215089 NR Description: hypothetical protein [Oryza sativa (japonica
  misc_feature (64)..(277): Homolog of NCBI NO: 39998438 NR Description: cyclase, putative [Geobacter sulfurreducens PCA]
  misc_feature (65)..(277): Homolog of NCBI NO: 16330650 NR Description: hypothetical protein [Synechocystis sp. PCC 6803]
  misc_feature (50)..(278): Homolog of NCBI NO: 18418393 NR Description: putative protein
  misc_feature (13)..(278): Homolog of NCBI NO: 15219416 NR Description: hypothetical protein; protein id: At1g44542.1
  misc_feature (50)..(238): Homolog of NCBI NO: 7486287 NR Description: hypothetical protein F28A23.60 - Arabidopsis
  misc_feature (66)..(277): Homolog of NCBI NO: 23016903 NR Description: hypothetical protein [Magnetospirillum
  misc_feature (65)..(277): Homolog of NCBI NO: 23056289 NR Description: hypothetical protein [Geobacter metallireducens]
  misc_feature (8)..(279): Homolog of NCBI NO: 18418598 NR Description: putative protein
SPTSDLTMAVPPLFFLLTLLSLPSLLISAGASNAYPSIPGTAPIDGGFTDELKPIRREVYGNGKIYDISHRYTPEMPSWDSSEGIGRFLWLAASMKNGSLANNSEMKIPTHTGTHVDSPGHVYDKYYDAGFDVDSLDLQVLNGLALLVDVPKDKNITAEVMKSLHIPKGVSRVLFRTLNTDRRLMFKKEFDTSYVGFMKDGAQWLVDNTDIKLVGIDYLSVAAYDDLIPSHLVFLKDRETILVEGLKLDGVKAGLYSVHCLPLRLVGAEGSPIRCILID

SEQ ID NO: 26010 - protein, 272 aa, Arabidopsis thaliana
  peptide (1)..(272): Ceres Seq. ID no. 12333194
  misc_feature (58)..(258): Pfam Name: Putative cyclase Pfam Description: Putative cyclase
  misc_feature (58)..(270): Homolog of NCBI NO: 23056289 NR Description: hypothetical protein [Geobacter metallireducens]
  misc_feature (57)..(270): Homolog of NCBI NO: 39998438 NR Description: cyclase, putative [Geobacter sulfurreducens PCA]
  misc_feature (59)..(270): Homolog of NCBI NO: 23016903 NR Description: hypothetical protein [Magnetospirillum
  misc_feature (58)..(270): Homolog of NCBI NO: 16330650 NR Description: hypothetical protein [Synechocystis sp. PCC 6803]
  misc_feature (43)..(231): Homolog of NCBI NO: 7486287 NR Description: hypothetical protein F28A23.60 - Arabidopsis
  misc_feature (43)..(271): Homolog of NCBI NO: 18418393 NR Description: putative protein
  misc_feature (6)..(271): Homolog of NCBI NO: 15219416 NR Description: hypothetical protein; protein id: At1g44542.1
  misc_feature (1)..(150): Homolog of NCBI NO: 7486023 NR Description: hypothetical protein F23E12.220 - Arabidopsis
  misc_feature (5)..(271): Homolog of NCBI NO: 35215089 NR Description: hypothetical protein [Oryza sativa (japonica
  misc_feature (1)..(272): Homolog of NCBI NO: 18418598 NR Description: putative protein
MAVPPLFFLLTLLSLPSLLISAGASNAYPSIPGTAPIDGGFTDELKPIRREVYGNGKIYDISHRYTPEMPSWDSSEGIGRFLWLAASMKNGSLANNSEMKIPTHTGTHVDSPGHVYDKYYDAGFDVDSLDLQVLNGLALLVDVPKDKNITAEVMKSLHIPKGVSRVLFRTLNTDRRLMFKKEFDTSYVGFMKDGAQWLVDNTDIKLVGIDYLSVAAYDDLIPSHLVFLKDRETILVEGLKLDGVKAGLYSVHCLPLRLVGAEGSPIRCILID

SEQ ID NO: 26011 - protein, 204 aa, Arabidopsis thaliana
  peptide (1)..(204): Ceres Seq. ID no. 12333195
  misc_feature (1)..(190): Pfam Name: Putative cyclase Pfam Description: Putative cyclase
  misc_feature (1)..(202): Homolog of NCBI NO: 23056289 NR Description: hypothetical protein [Geobacter metallireducens]
  misc_feature (1)..(202): Homolog of NCBI NO: 39998438 NR Description: cyclase, putative [Geobacter sulfurreducens PCA]
  misc_feature (1)..(202): Homolog of NCBI NO: 23016903 NR Description: hypothetical protein [Magnetospirillum
  misc_feature (1)..(202): Homolog of NCBI NO: 16330650 NR Description: hypothetical protein [Synechocystis sp. PCC 6803]
  misc_feature (1)..(163): Homolog of NCBI NO: 7486287 NR Description: hypothetical protein F28A23.60 - Arabidopsis
  misc_feature (1)..(203): Homolog of NCBI NO: 18418393 NR Description: putative protein
  misc_feature (1)..(203): Homolog of NCBI NO: 15219416 NR Description: hypothetical protein; protein id: At1g44542.1
  misc_feature (1)..(82): Homolog of NCBI NO: 7486023 NR Description: hypothetical protein F23E12.220 - Arabidopsis
  misc_feature (1)..(203): Homolog of NCBI NO: 35215089 NR Description: hypothetical protein [Oryza sativa (japonica
  misc_feature (1)..(204): Homolog of NCBI NO: 18418598 NR Description: putative protein
MPSWDSSEGIGRFLWLAASMKNGSLANNSEMKIPTHTGTHVDSPGHVYDKYYDAGFDVDSLDLQVLNGLALLVDVPKDKNITAEVMKSLHIPKGVSRVLFRTLNTDRRLMFKKEFDTSYVGFMKDGAQWLVDNTDIKLVGIDYLSVAAYDDLIPSHLVFLKDRETILVEGLKLDGVKAGLYSVHCLPLRLVGAEGSPIRCILID

SEQ ID NO: 26012 - DNA, 999 bp, Arabidopsis thaliana
  misc_feature (1)..(999): Ceres Seq. ID no. 12335964
  misc_feature: MA Experiment ID: 108488 Result: Down-regulated in Transcription
  misc_feature: MA Experiment ID: 108573 Result: Up-regulated in Transcription
  misc_feature: MA Experiment 108573 PARAMETER Experiment Name: At_Drought_cDNA_P Parameter: Timepoint (hr) Value: 6
  misc_feature: MA Experiment 108573 PARAMETER Experiment Name: At_Drought_cDNA_P Parameter: Tissue Value: Aerial
  misc_feature: MA Experiment 108573 PARAMETER Experiment Name: At_Drought_cDNA_P Parameter: Treatment Value: Drought vs. No Drought
  misc_feature: MA Experiment ID: 108579 Result: Down-regulated in Transcription
  misc_feature: MA Experiment 108579 PARAMETER Experiment Name: At_4deg_Cold_cDNA_P Parameter: Temperature (deg C) Value: 4 vs. 22
  misc_feature: MA Experiment 108579 PARAMETER Experiment Name: At_4deg_Cold_cDNA_P Parameter: Timepoint (hr) Value: 6
  misc_feature: MA Experiment 108579 PARAMETER Experiment Name: At_4deg_Cold_cDNA_P Parameter: Tissue Value: Aerial
  misc_feature: MA Experiment ID: 108585 Result: Up-regulated in Transcription
  misc_feature: MA Experiment 108585 PARAMETER Experiment Name: At_5mM_NaNP_cDNA_P Parameter: Timepoint (hr) Value: 6
  misc_feature: MA Experiment 108585 PARAMETER Experiment Name: At_5mM_NaNP_cDNA_P Parameter: Tissue Value: Aerial
  misc_feature: MA Experiment 108585 PARAMETER Experiment Name: At_5mM_NaNP_cDNA_P Parameter: Treatment Value: null
  misc_feature: MA Experiment ID: 20000070 Result: Up-regulated in Transcription
  misc_feature: MA Experiment 20000070 PARAMETER Experiment Name: At_100uM_ABA_Mutants_cDNA_P Parameter: Plant Line Value: CS24
  misc_feature: MA Experiment 20000070 PARAMETER Experiment Name: At_100uM_ABA_Mutants_cDNA_P Parameter: Timepoint (hr) Value: 6
  misc_feature: MA Experiment 20000070 PARAMETER Experiment Name: At_100uM_ABA_Mutants_cDNA_P Parameter: Tissue Value: Aerial
  misc_feature: MA Experiment 20000070 PARAMETER Experiment Name: At_100uM_ABA_Mutants_cDNA_P Parameter: Treatment Value: 100uM ABA vs. No Treatment
  misc_feature: MA Experiment ID: 20000071 Result: Up-regulated in Transcription
  misc_feature: MA Experiment 20000071 PARAMETER Experiment Name: At_100uM_ABA_Mutants_cDNA_P Parameter: Plant Line Value: CS8104
  misc_feature: MA Experiment 20000071 PARAMETER Experiment Name: At_100uM_ABA_Mutants_cDNA_P Parameter: Timepoint (hr) Value: 6
  misc_feature: MA Experiment 20000071 PARAMETER Experiment Name: At_100uM_ABA_Mutants_cDNA_P Parameter: Tissue Value: Aerial
  misc_feature: MA Experiment 20000071 PARAMETER Experiment Name: At_100uM_ABA_Mutants_cDNA_P Parameter: Treatment Value: 100uM ABA vs. No Treatment
  misc_feature: MA Experiment ID: 20000072 Result: Up-regulated in Transcription
  misc_feature: MA Experiment 20000072 PARAMETER Experiment Name: At_100uM_ABA_Mutants_cDNA_P Parameter: Plant Line Value: CS8105
  misc_feature: MA Experiment 20000072 PARAMETER Experiment Name: At_100uM_ABA_Mutants_cDNA_P Parameter: Timepoint (hr) Value: 6
  misc_feature: MA Experiment 20000072 PARAMETER Experiment Name: At_100uM_ABA_Mutants_cDNA_P Parameter: Tissue Value: Aerial
  misc_feature: MA Experiment 20000072 PARAMETER Experiment Name: At_100uM_ABA_Mutants_cDNA_P Parameter: Treatment Value: 100uM ABA vs. No Treatment
  misc_feature: MA Experiment ID: 20000086 Result: Up-regulated in Transcription
  misc_feature: MA Experiment 20000086 PARAMETER Experiment Name: At_100uM_ABA_Mutants_cDNA_P Parameter: Plant Line Value: CS22
  misc_feature: MA Experiment 20000086 PARAMETER Experiment Name: At_100uM_ABA_Mutants_cDNA_P Parameter: Timepoint (hr) Value: 6
  misc_feature: MA Experiment 20000086 PARAMETER Experiment Name: At_100uM_ABA_Mutants_cDNA_P Parameter: Tissue Value: Aerial
  misc_feature: MA Experiment 20000086 PARAMETER Experiment Name: At_100uM_ABA_Mutants_cDNA_P Parameter: Treatment Value: 100uM ABA vs. No Treatment
  misc_feature: MA Experiment ID: 20000088 Result: Up-regulated in Transcription
  misc_feature: MA Experiment 20000088 PARAMETER Experiment Name: At_100uM_ABA_Mutants_cDNA_P Parameter: Plant Line Value: Landsberg
  misc_feature: MA Experiment 20000088 PARAMETER Experiment Name: At_100uM_ABA_Mutants_cDNA_P Parameter: Timepoint (hr) Value: 6
  misc_feature: MA Experiment 20000088 PARAMETER Experiment Name: At_100uM_ABA_Mutants_cDNA_P Parameter: Tissue Value: Aerial
  misc_feature: MA Experiment 20000088 PARAMETER Experiment Name: At_100uM_ABA_Mutants_cDNA_P Parameter: Treatment Value: 100uM ABA vs. No Treatment
  misc_feature: MA Experiment ID: 20000090 Result: Up-regulated in Transcription
  misc_feature: MA Experiment ID: 20000111 Result: Down-regulated in Transcription
  misc_feature: MA Experiment 20000111 PARAMETER Experiment Name: At_42deg_Heat_cDNA_P Parameter: Temperature (deg C) Value: 42 vs. 22
  misc_feature: MA Experiment 20000111 PARAMETER Experiment Name: At_42deg_Heat_cDNA_P Parameter: Timepoint (hr) Value: 6
  misc_feature: MA Experiment 20000111 PARAMETER Experiment Name: At_42deg_Heat_cDNA_P Parameter: Tissue Value: Aerial
  misc_feature: MA Experiment ID: 20000113 Result: Down-regulated in Transcription
  misc_feature: MA Experiment 20000113 PARAMETER Experiment Name: At_42deg_Heat_cDNA_P Parameter: Temperature (deg C) Value: 42 vs. 22
  misc_feature: MA Experiment 20000113 PARAMETER Experiment Name: At_42deg_Heat_cDNA_P Parameter: Timepoint (hr) Value: 8
  misc_feature: MA Experiment 20000113 PARAMETER Experiment Name: At_42deg_Heat_cDNA_P Parameter: Tissue Value: Aerial
  misc_feature: MA Experiment ID: 20000224 Result: Down-regulated in Transcription
  misc_feature: MA Experiment ID: 20000227 Result: Down-regulated in Transcription
  misc_feature: MA Experiment 20000227 PARAMETER Experiment Name: At_Root-Tips-vs-Tops_P Parameter: Tissue Value: Root Tips vs. Root Tops
  misc_feature: MA Experiment ID: 20000234 Result: Down-regulated in Transcription
  misc_feature: MA Experiment 20000234 PARAMETER Experiment Name: At_Siliques_P Parameter: Age (day) Value: 21
  misc_feature: MA Experiment 20000234 PARAMETER Experiment Name: At_Siliques_P Parameter: Organism Value: A. thaliana
  misc_feature: MA Experiment 20000234 PARAMETER Experiment Name: At_Siliques_P Parameter: Plant Line Value: WS
  misc_feature: MA Experiment 20000234 PARAMETER Experiment Name: At_Siliques_P Parameter: Tissue Value: Less Than 5mm Siliques vs. Whole Plant
  misc_feature: MA Experiment ID: 20000286 Result: Down-regulated in Transcription
  misc_feature: MA Experiment 20000286 PARAMETER Experiment Name: At_Open_Flower_P Parameter: Age (day) Value: 21
  misc_feature: MA Experiment 20000286 PARAMETER Experiment Name: At_Open_Flower_P Parameter: Plant Line Value: WS
  misc_feature: MA Experiment 20000286 PARAMETER Experiment Name: At_Open_Flower_P Parameter: Tissue Value: Half Open vs. Whole Plant
  misc_feature: MA Experiment ID: 20000437 Result: Up-regulated in Transcription
  misc_feature: MA Experiment 20000437 PARAMETER Experiment Name: At_Drought_P Parameter: Age (day) Value: 8
  misc_feature: MA Experiment 20000437 PARAMETER Experiment Name: At_Drought_P Parameter: Organism Value: A. thaliana
  misc_feature: MA Experiment 20000437 PARAMETER Experiment Name: At_Drought_P Parameter: Plant Line Value: WS
  misc_feature: MA Experiment 20000437 PARAMETER Experiment Name: At_Drought_P Parameter: Timepoint (hr) Value: 24
  misc_feature: MA Experiment 20000437 PARAMETER Experiment Name: At_Drought_P Parameter: Tissue Value: Whole Plant
  misc_feature: MA Experiment 20000437 PARAMETER Experiment Name: At_Drought_P Parameter: Treatment Value: Drought vs. No Drought
  misc_feature: MA Experiment ID: 20001905 Result: Up-regulated in Transcription
  misc_feature: MA Experiment 20001905 PARAMETER Experiment Name: At_Drought_Reproduction_P Parameter: Age (day) Value: 40
  misc_feature: MA Experiment 20001905 PARAMETER Experiment Name: At_Drought_Reproduction_P Parameter: Organism Value: A. thaliana
  misc_feature: MA Experiment 20001905 PARAMETER Experiment Name: At_Drought_Reproduction_P Parameter: Plant Line Value: WS
  misc_feature: MA Experiment 20001905 PARAMETER Experiment Name: At_Drought_Reproduction_P Parameter: Timepoint (day) Value: 10
  misc_feature: MA Experiment 20001905 PARAMETER Experiment Name: At_Drought_Reproduction_P Parameter: Tissue Value: Rosettes
  misc_feature: MA Experiment 20001905 PARAMETER Experiment Name: At_Drought_Reproduction_P Parameter: Treatment Value: Drought vs. No Drought
aatattctgaaaatatctttctctcgatgaaacttgtctcctccggccaaccttaacccttaagcgaacggtgttcctttgcggattgcgatcgttccgtcgatcccttcatcgcccgatctaaatctctaatcgtgtcggagattaaaagcagaggttttgtggtgaatcatgtctgatgtcccttcttgttctagcggtaatgatacaaacaacaatgattcgagtaacttcgaatgtaacatctgcttagacttggctcaagatcctattgtcactctctgtggtcacttgttctgttggccttgtttatacaaatggctccatctccattctcaatctaaggactgtcctgtttgcaaagccgtgatcgaagaagacagattggttcctttgtacggtagaggtaaatcgtctgctgaccctcggtccaagtccattccgggtctcgaagtgcctaaccgtccatcgggacagagacccgaaactgcacaacctcctgatcctaaccatggttttgctcatcatcatgggtttggagggttcatgggaggttttgctgctccgatggcgagtgcgcggttcgggaatgttacattgtctgcagcgtttggcggtttgattccttctttgttcaacctccatttccatggtttccctgatgcagccatgtatggagctgctgcttctggcggcttccctcacggtttctcgaatccgtttcatggaggacactcgcatatgcatagttaccagcggcacacgggtcgacaaggacaacaagaccatcacttgaggatattgttactcattgttttcgtcgttgttgtgttttctctcttcttgagctagtgaggaaatcgatttagctaactgtatttcgctttttattctagattttattgcataaaaacatgggaaaatatgtgctgtgagttggcttgtaaactgctactttagcaaattgttcatatattaataaaacctgtcggattctcc

SEQ ID NO: 26013 - protein, 226 aa, Arabidopsis thaliana
  peptide (1)..(226): Ceres Seq. ID no. 12335965
  misc_feature (23)..(63): Pfam Name: Zinc finger, C3HC4 type (RING finger) Pfam Description: Zinc finger, C3HC4 type (RING finger)
  misc_feature (5)..(161): Homolog of NCBI NO: 29841097 NR Description: similar to GenBank Accession Number AJ428489
  misc_feature (17)..(156): Homolog of NCBI NO: 18859961 NR Description: CG8974-PC [Drosophila melanogaster]
  misc_feature (13)..(225): Homolog of NCBI NO: 39581891 NR Description: Hypothetical protein CBG20152 [Caenorhabditis
  misc_feature (5)..(225): Homolog of NCBI NO: 17554742 NR Description: Ring finger protein RNF-5 (24.9 kD) (rnf-5)
  misc_feature (13)..(143): Homolog of NCBI NO: 15222064 NR Description: putative RING zinc finger protein
  misc_feature (6)..(223): Homolog of NCBI NO: 29150403 NR Description: unknown protein [Oryza sativa (japonica
  misc_feature (9)..(223): Homolog of NCBI NO: 15224062 NR Description: putative RING zinc finger protein
  misc_feature (6)..(223): Homolog of NCBI NO: 21553849 NR Description: putative RING zinc finger protein [Arabidopsis
  misc_feature (17)..(225): Homolog of NCBI NO: 34909840 NR Description: P0403C05.28 [Oryza sativa (japonica
  misc_feature (1)..(226): Homolog of NCBI NO: 18394721 NR Description: expressed protein
MSDVPSCSSGNDTNNNDSSNFECNICLDLAQDPIVTLCGHLFCWPCLYKWLHLHSQSKDCPVCKAVIEEDRLVPLYGRGKSSADPRSKSIPGLEVPNRPSGQRPETAQPPDPNHGFAHHHGFGGFMGGFAAPMASARFGNVTLSAAFGGLIPSLFNLHFHGFPDAAMYGAAASGGFPHGFSNPFHGGHSHMHSYQRHTGRQGQQDHHLRILLLIVFVVVVFSLFLS

SEQ ID NO: 26014 - DNA, 1234 bp, Arabidopsis thaliana
  misc_feature (1)..(1234): Ceres Seq. ID no. 12393756
  misc_feature: MA Experiment ID: 108576 Result: Up-regulated in Transcription
  misc_feature: MA Experiment 108576 PARAMETER Experiment Name: At_42deg_Heat_cDNA_P Parameter: Temperature (deg C) Value: 42 vs. 22
  misc_feature: MA Experiment 108576 PARAMETER Experiment Name: At_42deg_Heat_cDNA_P Parameter: Timepoint (hr) Value: 1
  misc_feature: MA Experiment 108576 PARAMETER Experiment Name: At_42deg_Heat_cDNA_P Parameter: Tissue Value: Aerial
  misc_feature: MA Experiment ID: 20000171 Result: Up-regulated in Transcription
  misc_feature: MA Experiment 20000171 PARAMETER Experiment Name: At_42deg_Heat_P Parameter: Age (day) Value: 14
  misc_feature: MA Experiment 20000171 PARAMETER Experiment Name: At_42deg_Heat_P Parameter: Organism Value: A. thaliana
  misc_feature: MA Experiment 20000171 PARAMETER Experiment Name: At_42deg_Heat_P Parameter: Plant Line Value: WS
  misc_feature: MA Experiment 20000171 PARAMETER Experiment Name: At_42deg_Heat_P Parameter: Temperature (deg C) Value: 42 vs. 22
  misc_feature: MA Experiment 20000171 PARAMETER Experiment Name: At_42deg_Heat_P Parameter: Timepoint (hr) Value: 1
  misc_feature: MA Experiment 20000171 PARAMETER Experiment Name: At_42deg_Heat_P Parameter: Tissue Value: Aerial
  misc_feature: MA Experiment ID: 20000173 Result: Up-regulated in Transcription
  misc_feature: MA Experiment 20000173 PARAMETER Experiment Name: At_42deg_Heat_P Parameter: Age (day) Value: 14
  misc_feature: MA Experiment 20000173 PARAMETER Experiment Name: At_42deg_Heat_P Parameter: Organism Value: A. thaliana
  misc_feature: MA Experiment 20000173 PARAMETER Experiment Name: At_42deg_Heat_P Parameter: Plant Line Value: WS
  misc_feature: MA Experiment 20000173 PARAMETER Experiment Name: At_42deg_Heat_P Parameter: Temperature (deg C) Value: 42 vs. 22
  misc_feature: MA Experiment 20000173 PARAMETER Experiment Name: At_42deg_Heat_P Parameter: Timepoint (hr) Value: 6
  misc_feature: MA Experiment 20000173 PARAMETER Experiment Name: At_42deg_Heat_P Parameter: Tissue Value: Aerial
  misc_feature: MA Experiment ID: 20000184 Result: Up-regulated in Transcription
  misc_feature: MA Experiment 20000184 PARAMETER Experiment Name: At_Shoots__P Parameter: Age (day) Value: 7
  misc_feature: MA Experiment 20000184 PARAMETER Experiment Name: At_Shoots__P Parameter: Tissue Value: Shoots vs. Whole Plant
  misc_feature: MA Experiment ID: 20000185 Result: Up-regulated in Transcription
  misc_feature: MA Experiment 20000185 PARAMETER Experiment Name: At_Roots__P Parameter: Age (day) Value: 7 vs. 21
  misc_feature: MA Experiment 20000185 PARAMETER Experiment Name: At_Roots__P Parameter: Organism Value: A. thaliana
  misc_feature: MA Experiment 20000185 PARAMETER Experiment Name: At_Roots__P Parameter: Tissue Value: Roots vs. Whole Plant
  misc_feature: MA Experiment ID: 20000234 Result: Up-regulated in Transcription
  misc_feature: MA Experiment 20000234 PARAMETER Experiment Name: At_Siliques_P Parameter: Age (day) Value: 21
  misc_feature: MA Experiment 20000234 PARAMETER Experiment Name: At_Siliques_P Parameter: Organism Value: A. thaliana
  misc_feature: MA Experiment 20000234 PARAMETER Experiment Name: At_Siliques_P Parameter: Plant Line Value: WS
  misc_feature: MA Experiment 20000234 PARAMETER Experiment Name: At_Siliques_P Parameter: Tissue Value: Less Than 5mm Siliques vs. Whole Plant
  misc_feature: MA Experiment ID: 20000235 Result: Up-regulated in Transcription
  misc_feature: MA Experiment 20000235 PARAMETER Experiment Name: At_Siliques_P Parameter: Age (day) Value: 21
  misc_feature: MA Experiment 20000235 PARAMETER Experiment Name: At_Siliques_P Parameter: Organism Value: A. thaliana
  misc_feature: MA Experiment 20000235 PARAMETER Experiment Name: At_Siliques_P Parameter: Plant Line Value: WS
  misc_feature: MA Experiment 20000235 PARAMETER Experiment Name: At_Siliques_P Parameter: Tissue Value: 5-10mm Siliques vs. Whole Plant
  misc_feature: MA Experiment ID: 20000264 Result: Up-regulated in Transcription
  misc_feature: MA Experiment 20000264 PARAMETER Experiment Name: At_Open_Flower_P Parameter: Age (day) Value: 21
  misc_feature: MA Experiment 20000264 PARAMETER Experiment Name: At_Open_Flower_P Parameter: Plant Line Value: WS
  misc_feature: MA Experiment 20000264 PARAMETER Experiment Name: At_Open_Flower_P Parameter: Tissue Value: Open Flower vs. Whole Plant
  misc_feature: MA Experiment ID: 20000265 Result: Up-regulated in Transcription
  misc_feature: MA Experiment 20000265 PARAMETER Experiment Name: At_Open_Flower_P Parameter: Age (day) Value: 21
  misc_feature: MA Experiment 20000265 PARAMETER Experiment Name: At_Open_Flower_P Parameter: Plant Line Value: WS
  misc_feature: MA Experiment 20000265 PARAMETER Experiment Name: At_Open_Flower_P Parameter: Tissue Value: Closed Flower vs. Whole Plant
  misc_feature: MA Experiment ID: 20000439 Result: Up-regulated in Transcription
  misc_feature: MA Experiment 20000439 PARAMETER Experiment Name: At_Roots__P Parameter: Age (day) Value: 14 vs. 21
  misc_feature: MA Experiment 20000439 PARAMETER Experiment Name: At_Roots__P Parameter: Organism Value: A. thaliana
  misc_feature: MA Experiment 20000439 PARAMETER Experiment Name: At_Roots__P Parameter: Tissue Value: Roots vs. Whole Plant
  misc_feature: MA Experiment ID: 20001248 Result: Down-regulated in Transcription
  misc_feature: MA Experiment 20001248 PARAMETER Experiment Name: At_Far-red-induction_P Parameter: Age (day) Value: 7
  misc_feature: MA Experiment 20001248 PARAMETER Experiment Name: At_Far-red-induction_P Parameter: Light Value: Far-red vs. White
  misc_feature: MA Experiment 20001248 PARAMETER Experiment Name: At_Far-red-induction_P Parameter: Organism Value: A. thaliana
  misc_feature: MA Experiment 20001248 PARAMETER Experiment Name: At_Far-red-induction_P Parameter: Plant Line Value: Columbia
  misc_feature: MA Experiment 20001248 PARAMETER Experiment Name: At_Far-red-induction_P Parameter: Timepoint (hr) Value: 4
  misc_feature: MA Experiment 20001248 PARAMETER Experiment Name: At_Far-red-induction_P Parameter: Tissue Value: Whole Plant
  misc_feature: MA Experiment ID: 20001560 Result: Up-regulated in Transcription
  misc_feature: MA Experiment 20001560 PARAMETER Experiment Name: At_Drought_Soil_Dry_P Parameter: Age (day) Value: 28
  misc_feature: MA Experiment 20001560 PARAMETER Experiment Name: At_Drought_Soil_Dry_P Parameter: Organism Value: A. thaliana
  misc_feature: MA Experiment 20001560 PARAMETER Experiment Name: At_Drought_Soil_Dry_P Parameter: Plant Line Value: WS
  misc_feature: MA Experiment 20001560 PARAMETER Experiment Name: At_Drought_Soil_Dry_P Parameter: Post Timepoint (hr) Value: None
  misc_feature: MA Experiment 20001560 PARAMETER Experiment Name: At_Drought_Soil_Dry_P Parameter: Post-Treatment Value: None
  misc_feature: MA Experiment 20001560 PARAMETER Experiment Name: At_Drought_Soil_Dry_P Parameter: Timepoint (day) Value: 14
  misc_feature: MA Experiment 20001560 PARAMETER Experiment Name: At_Drought_Soil_Dry_P Parameter: Treatment Value: Drought vs. No Drought
agaatcctccattactcttcttctcgacttcggaatctttcaaagcttcttcgatttttccagaggcaatcatggttaaaggtccaggactctacactgaaatcggcaaaaaggccagagatcttctgtacagggattaccaaggagaccagaaattcagtgtcaccacttactcttcaactggtgttgcgatcactacaacgggaacaaacaaaggaagcttgtttttgggtgatgttgctacccaagtgaagaacaacaacttcactgctgatgtcaaagtttccactgattcttctcttttgaccactcttacctttgatgagcctgcccctggactgaaagttattgttcaggctaagttgcccgatcacaaatctggaaaggctgaggttcagtatttccatgactatgctggtatctctaccagcgttggattcacagctaccccgattgtcaacttctccggtgtggttggaaccaatggtttgtctcttggtactgatgtggcctataacaccgaatctggcaacttcaaacatttcaatgctggtttcaacttcaccaaggatgatttgactgcttccctcattctgaatgacaaaggtgagaaattgaatgcatcctactaccagattgtgagcccgtcgactgtggttggagctgagattagccacaacttcacgaccaaagagaacgccatcactgtcggaactcaacacgcgcttgacccattgaccacagtgaaggcaagagtgaacaatgctggtgtggctaacgctctgatccaacatgagtggcgtccaaagtcgttcttcaccgtttctggagaggttgattctaaggcgatcgataagagtgccaaggttgggattgctctcgctctcaagccctgagaagataccaccaaatgggccctgaagtgggtagaataggtgttatttctttttcgtcttcaaatctttggacaaatcgctgtctggtttgctaaacaatctttcatttgttttttttgttcggtgttgggatttgtagaaaataaaagagaaaaatactattgaaaggatcgtctttgacgataaagaaccattaagatcgttttacttggctctctctcttttattttccgcctctgctacaatactctgttccatatcttttacttggttctctcttttattttctgcctctgctatactttgttccatttggagttcccttagtggatttttct

SEQ ID NO: 26015 - protein, 297 aa, Arabidopsis thaliana
  peptide (1)..(297): Ceres Seq. ID no. 12393757
  misc_feature (27)..(290): Pfam Name: Eukaryotic porin Pfam Description: Eukaryotic porin
  misc_feature (24)..(297): Homolog of NCBI NO: 1172556 NR Description: 36 kDa outer mitochondrial membrane protein porin
  misc_feature (24)..(297): Homolog of NCBI NO: 7442953 NR Description: porin - common ice plant
  misc_feature (24)..(297): Homolog of NCBI NO: 21593558 NR Description: putative porin [Arabidopsis thaliana]
  misc_feature (24)..(297): Homolog of NCBI NO: 15232074 NR Description: putative porin
  misc_feature (24)..(297): Homolog of NCBI NO: 1172555 NR Description: 34 kDa outer mitochondrial membrane protein porin
  misc_feature (24)..(297): Homolog of NCBI NO: 36957183 NR Description: VDAC1.2 [Lotus corniculatus var. japonicus]
  misc_feature (24)..(297): Homolog of NCBI NO: 36957170 NR Description: VDAC1.1 [Lotus corniculatus var. japonicus]
  misc_feature (24)..(297): Homolog of NCBI NO: 5031279 NR Description: porin [Prunus armeniaca]
  misc_feature (24)..(297): Homolog of NCBI NO: 21553387 NR Description: voltage-dependent anion-selective channel protein
  misc_feature (24)..(297): Homolog of NCBI NO: 15242210 NR Description: voltage-dependent anion-selective channel protein
NPPLLFFSTSESFKASSIFPEAIMVKGPGLYTEIGKKARDLLYRDYQGDQKFSVTTYSSTGVAITTTGTNKGSLFLGDVATQVKNNNFTADVKVSTDSSLLTTLTFDEPAPGLKVIVQAKLPDHKSGKAEVQYFHDYAGISTSVGFTATPIVNFSGVVGTNGLSLGTDVAYNTESGNFKHFNAGFNFTKDDLTASLILNDKGEKLNASYYQIVSPSTVVGAEISHNFTTKENAITVGTQHALDPLTTVKARVNNAGVANALIQHEWRPKSFFTVSGEVDSKAIDKSAKVGIALALKP

SEQ ID NO: 26016 - protein, 274 aa, Arabidopsis thaliana
  peptide (1)..(274): Ceres Seq. ID no. 12393758
  misc_feature (4)..(267): Pfam Name: Eukaryotic porin Pfam Description: Eukaryotic porin
  misc_feature (1)..(274): Homolog of NCBI NO: 1172556 NR Description: 36 kDa outer mitochondrial membrane protein porin
  misc_feature (1)..(274): Homolog of NCBI NO: 7442953 NR Description: porin - common ice plant
  misc_feature (1)..(274): Homolog of NCBI NO: 21593558 NR Description: putative porin [Arabidopsis thaliana]
  misc_feature (1)..(274): Homolog of NCBI NO: 15232074 NR Description: putative porin
  misc_feature (1)..(274): Homolog of NCBI NO: 1172555 NR Description: 34 kDa outer mitochondrial membrane protein porin
  misc_feature (1)..(274): Homolog of NCBI NO: 36957183 NR Description: VDAC1.2 [Lotus corniculatus var. japonicus]
  misc_feature (1)..(274): Homolog of NCBI NO: 36957170 NR Description: VDAC1.1 [Lotus corniculatus var. japonicus]
  misc_feature (1)..(274): Homolog of NCBI NO: 5031279 NR Description: porin [Prunus armeniaca]
  misc_feature (1)..(274): Homolog of NCBI NO: 21553387 NR Description: voltage-dependent anion-selective channel protein
  misc_feature (1)..(274): Homolog of NCBI NO: 15242210 NR Description: voltage-dependent anion-selective channel protein
MVKGPGLYTEIGKKARDLLYRDYQGDQKFSVTTYSSTGVAITTTGTNKGSLFLGDVATQVKNNNFTADVKVSTDSSLLTTLTFDEPAPGLKVIVQAKLPDHKSGKAEVQYFHDYAGISTSVGFTATPIVNFSGVVGTNGLSLGTDVAYNTESGNFKHFNAGFNFTKDDLTASLILNDKGEKLNASYYQIVSPSTVVGAEISHNFTTKENAITVGTQHALDPLTTVKARVNNAGVANALIQHEWRPKSFFTVSGEVDSKAIDKSAKVGIALALKP

SEQ ID NO: 26017 - DNA, 816 bp, Arabidopsis thaliana
  misc_feature (1)..(816): Ceres Seq. ID no. 12481979
acacagtttcaaattagagcttcaaatctagttacttgttcttctacagtacatcatcaaaagtcaaaaccatggactcgagatgttttggcttcttctttactttgttatctctaaatgtgattgttcttgcttacgatcctgacacacttcaagatctctgcgttgcggatcgcacttcagggataaaagtgaatggtttcacatgtaaacccgaatcaaacatcaccgcttcagattttttcttcgccggaatcggaaaacccgccgtcgttaacaacacagtcgggtcagccgtcacgggagcaaacgtagagaagatcgcagggcttaacacgctcggagtctcactcgcgcgtatcgactacgctcccggaggtttaaacccgccgcacacgcatccacgcgccaccgaagtgatcttcgttttggaaggcgagcttgacgttggattcataacgacggcgaacaagctcttcgctaagacggtgaagaaaggagaagtgttcgtcttccctagaggattgattcattaccagaaaaacaacgacaaagcgaaaccggcgtcggtgatctctgcgttcaacagtcaattaccgggaacacaatcgatcgccgccacgctattcacagccactccggcgattccggatcacgttttaacgacgacgtttcaaatcggaacgaaagaaatcgaaaaaatcaaatctaagtttgctcccaagaaagtctaaaaatcgcgtcgttatatatatatattttaaattttattaattggtttttaaattttaataaaggaaaaaataaaccttgttc

SEQ ID NO: 26018 - protein, 220 aa, Arabidopsis thaliana
  peptide (1)..(220): Ceres Seq. ID no. 12481980
  misc_feature (60)..(209): Pfam Name: Cupin Pfam Description: Cupin
  misc_feature (6)..(219): Homolog of NCBI NO: 7447341 NR Description: germin homolog - potato
  misc_feature (1)..(219): Homolog of NCBI NO: 18203447 NR Description: Nectarin 1 precursor (Superoxide dismutase [Mn])
  misc_feature (1)..(219): Homolog of NCBI NO: 27805638 NR Description: Nectarin 1 precursor (Superoxide dismutase [Mn])
  misc_feature (23)..(219): Homolog of NCBI NO: 15217561 NR Description: germin-like protein
  misc_feature (20)..(219): Homolog of NCBI NO: 34904670 NR Description: putative germin protein [Oryza sativa (japonica
  misc_feature (12)..(219): Homolog of NCBI NO: 18203442 NR Description: Rhicadhesin receptor precursor (Germin-like
  misc_feature (19)..(219): Homolog of NCBI NO: 26449711 NR Description: putative germin [Arabidopsis thaliana]
  misc_feature (19)..(219): Homolog of NCBI NO: 18202917 NR Description: Germin-like protein subfamily 2 member 2
  misc_feature (17)..(220): Homolog of NCBI NO: 1934730 NR Description: germin-like protein [Arabidopsis thaliana]
  misc_feature (1)..(220): Homolog of NCBI NO: 15228673 NR Description: germin-like protein (GLP10); protein id:
MDSRCFGFFFTLLSLNVIVLAYDPDTLQDLCVADRTSGIKVNGFTCKPESNITASDFFFAGIGKPAVVNNTVGSAVTGANVEKIAGLNTLGVSLARIDYAPGGLNPPHTHPRATEVIFVLEGELDVGFITTANKLFAKTVKKGEVFVFPRGLIHYQKNNDKAKPASVISAFNSQLPGTQSIAATLFTATPAIPDHVLTTTFQIGTKEIEKIKSKFAPKKV

SEQ ID NO: 26019 - DNA, 662 bp, Arabidopsis thaliana
  misc_feature (1)..(662): Ceres Seq. ID no. 12333508
  misc_feature: MA Experiment ID: 108434 Result: Down-regulated in Transcription
  misc_feature: MA Experiment 108434 PARAMETER Experiment Name: At_Root_Tips_cDNA_P Parameter: Tissue Value: Root Tips
  misc_feature: MA Experiment ID: 108435 Result: Down-regulated in Transcription
  misc_feature: MA Experiment 108435 PARAMETER Experiment Name: At_stm_Mutants_cDNA_P Parameter: Plant Line Value: wt Landsburg vs stm
  misc_feature: MA Experiment 108435 PARAMETER Experiment Name: At_stm_Mutants_cDNA_P Parameter: Tissue Value: Shoot Apical Meristem Region
  misc_feature: MA Experiment ID: 108461 Result: Up-regulated in Transcription
  misc_feature: MA Experiment 108461 PARAMETER Experiment Name: At_Germinating_Seeds_cDNA_P Parameter: Age (day) Value: 1 vs. 0
  misc_feature: MA Experiment 108461 PARAMETER Experiment Name: At_Germinating_Seeds_cDNA_P Parameter: Tissue Value: Germinating Seeds
  misc_feature: MA Experiment ID: 108462 Result: Up-regulated in Transcription
  misc_feature: MA Experiment 108462 PARAMETER Experiment Name: At_Germinating_Seeds_cDNA_P Parameter: Age (day) Value: 2 vs. 0
  misc_feature: MA Experiment 108462 PARAMETER Experiment Name: At_Germinating_Seeds_cDNA_P Parameter: Tissue Value: Germinating Seeds
  misc_feature: MA Experiment ID: 108463 Result: Up-regulated in Transcription
  misc_feature: MA Experiment 108463 PARAMETER Experiment Name: At_Germinating_Seeds_cDNA_P Parameter: Age (day) Value: 3 vs. 0
  misc_feature: MA Experiment 108463 PARAMETER Experiment Name: At_Germinating_Seeds_cDNA_P Parameter: Tissue Value: Germinating Seeds
  misc_feature: MA Experiment ID: 108464 Result: Up-regulated in Transcription
  misc_feature: MA Experiment 108464 PARAMETER Experiment Name: At_Germinating_Seeds_cDNA_P Parameter: Age (day) Value: 4 vs. 0
  misc_feature: MA Experiment 108464 PARAMETER Experiment Name: At_Germinating_Seeds_cDNA_P Parameter: Tissue Value: Germinating Seeds
  misc_feature: MA Experiment ID: 108488 Result: Up-regulated in Transcription
  misc_feature: MA Experiment ID: 108489 Result: Down-regulated in Transcription
  misc_feature: MA Experiment ID: 108573 Result: Down-regulated in Transcription
  misc_feature: MA Experiment 108573 PARAMETER Experiment Name: At_Drought_cDNA_P Parameter: Timepoint (hr) Value: 6
  misc_feature: MA Experiment 108573 PARAMETER Experiment Name: At_Drought_cDNA_P Parameter: Tissue Value: Aerial
  misc_feature: MA Experiment 108573 PARAMETER Experiment Name: At_Drought_cDNA_P Parameter: Treatment Value: Drought vs. No Drought
  misc_feature: MA Experiment ID: 108595 Result: Down-regulated in Transcription
  misc_feature: MA Experiment 108595 PARAMETER Experiment Name: At_Ler-pi_Ovule_cDNA_P Parameter: Plant Line Value: null
  misc_feature: MA Experiment ID: 20000180 Result: Up-regulated in Transcription
  misc_feature: MA Experiment 20000180 PARAMETER Experiment Name: At_Germinating_Seeds_P Parameter: Age (hr) Value: 24 vs. 0
  misc_feature: MA Experiment 20000180 PARAMETER Experiment Name: At_Germinating_Seeds_P Parameter: Tissue Value: Germinating Seeds
  misc_feature: MA Experiment ID: 20000184 Result: Up-regulated in Transcription
  misc_feature: MA Experiment 20000184 PARAMETER Experiment Name: At_Shoots__P Parameter: Age (day) Value: 7
  misc_feature: MA Experiment 20000184 PARAMETER Experiment Name: At_Shoots__P Parameter: Tissue Value: Shoots vs. Whole Plant
  misc_feature: MA Experiment ID: 20000185 Result: Down-regulated in Transcription
  misc_feature: MA Experiment 20000185 PARAMETER Experiment Name: At_Roots__P Parameter: Age (day) Value: 7 vs. 21
  misc_feature: MA Experiment 20000185 PARAMETER Experiment Name: At_Roots__P Parameter: Organism Value: A. thaliana
  misc_feature: MA Experiment 20000185 PARAMETER Experiment Name: At_Roots__P Parameter: Tissue Value: Roots vs. Whole Plant
  misc_feature: MA Experiment ID: 20000286 Result: Down-regulated in Transcription
  misc_feature: MA Experiment 20000286 PARAMETER Experiment Name: At_Open_Flower_P Parameter: Age (day) Value: 21
  misc_feature: MA Experiment 20000286 PARAMETER Experiment Name: At_Open_Flower_P Parameter: Plant Line Value: WS
  misc_feature: MA Experiment 20000286 PARAMETER Experiment Name: At_Open_Flower_P Parameter: Tissue Value: Half Open vs. Whole Plant
  misc_feature: MA Experiment ID: 20000437 Result: Down-regulated in Transcription
  misc_feature: MA Experiment 20000437 PARAMETER Experiment Name: At_Drought_P Parameter: Age (day) Value: 8
  misc_feature: MA Experiment 20000437 PARAMETER Experiment Name: At_Drought_P Parameter: Organism Value: A. thaliana
  misc_feature: MA Experiment 20000437 PARAMETER Experiment Name: At_Drought_P Parameter: Plant Line Value: WS
  misc_feature: MA Experiment 20000437 PARAMETER Experiment Name: At_Drought_P Parameter: Timepoint (hr) Value: 24
  misc_feature: MA Experiment 20000437 PARAMETER Experiment Name: At_Drought_P Parameter: Tissue Value: Whole Plant
  misc_feature: MA Experiment 20000437 PARAMETER Experiment Name: At_Drought_P Parameter: Treatment Value: Drought vs. No Drought
  misc_feature: MA Experiment ID: 20000438 Result: Up-regulated in Transcription
  misc_feature: MA Experiment 20000438 PARAMETER Experiment Name: At_Shoots__P Parameter: Age (day) Value: 14
  misc_feature: MA Experiment 20000438 PARAMETER Experiment Name: At_Shoots__P Parameter: Tissue Value: Shoots vs. Whole Plant
  misc_feature: MA Experiment ID: 20000439 Result: Down-regulated in Transcription
  misc_feature: MA Experiment 20000439 PARAMETER Experiment Name: At_Roots__P Parameter: Age (day) Value: 14 vs. 21
  misc_feature: MA Experiment 20000439 PARAMETER Experiment Name: At_Roots__P Parameter: Organism Value: A. thaliana
  misc_feature: MA Experiment 20000439 PARAMETER Experiment Name: At_Roots__P Parameter: Tissue Value: Roots vs. Whole Plant
  misc_feature: MA Experiment ID: 20000495 Result: Down-regulated in Transcription
  misc_feature: MA Experiment 20000495 PARAMETER Experiment Name: At_Guard_Cells_P Parameter: Harvest Date Value: 8/2/2002
  misc_feature: MA Experiment 20000495 PARAMETER Experiment Name: At_Guard_Cells_P Parameter: Organism Value: A. thaliana
  misc_feature: MA Experiment 20000495 PARAMETER Experiment Name: At_Guard_Cells_P Parameter: Tissue Value: Guard Cells vs. Leaves
  misc_feature: MA Experiment ID: 20000573 Result: Down-regulated in Transcription
  misc_feature: MA Experiment 20000573 PARAMETER Experiment Name: At_100uM_ABA_Mutants__P Parameter: Organism Value: A. thaliana
  misc_feature: MA Experiment 20000573 PARAMETER Experiment Name: At_100uM_ABA_Mutants__P Parameter: Plant Line Value: CS22 vs. Ler wt
  misc_feature: MA Experiment 20000573 PARAMETER Experiment Name: At_100uM_ABA_Mutants__P Parameter: Timepoint (hr) Value: N/A
  misc_feature: MA Experiment 20000573 PARAMETER Experiment Name: At_100uM_ABA_Mutants__P Parameter: Tissue Value: Whole Plant
  misc_feature: MA Experiment 20000573 PARAMETER Experiment Name: At_100uM_ABA_Mutants__P Parameter: Treatment Value: None
  misc_feature: MA Experiment ID: 20000794 Result: Down-regulated in Transcription
  misc_feature: MA Experiment 20000794 PARAMETER Experiment Name: At_Petals_P Parameter: Age (day) Value: 23-25 days
  misc_feature: MA Experiment 20000794 PARAMETER Experiment Name: At_Petals_P Parameter: Plant Line Value: WS
  misc_feature: MA Experiment 20000794 PARAMETER Experiment Name: At_Petals_P Parameter: Tissue Value: Petals vs. Whole plant
  misc_feature: MA Experiment ID: 20001248 Result: Down-regulated in Transcription
  misc_feature: MA Experiment 20001248 PARAMETER Experiment Name: At_Far-red-induction_P Parameter: Age (day) Value: 7
  misc_feature: MA Experiment 20001248 PARAMETER Experiment Name: At_Far-red-induction_P Parameter: Light Value: Far-red vs. White
  misc_feature: MA Experiment 20001248 PARAMETER Experiment Name: At_Far-red-induction_P Parameter: Organism Value: A. thaliana
  misc_feature: MA Experiment 20001248 PARAMETER Experiment Name: At_Far-red-induction_P Parameter: Plant Line Value: Columbia
  misc_feature: MA Experiment 20001248 PARAMETER Experiment Name: At_Far-red-induction_P Parameter: Timepoint (hr) Value: 4
  misc_feature: MA Experiment 20001248 PARAMETER Experiment Name: At_Far-red-induction_P Parameter: Tissue Value: Whole Plant
  misc_feature: MA Experiment ID: 20001450 Result: Down-regulated in Transcription
  misc_feature: MA Experiment 20001450 PARAMETER Experiment Name: At_Far-red-induction_P Parameter: Age (day) Value: 7
  misc_feature: MA Experiment 20001450 PARAMETER Experiment Name: At_Far-red-induction_P Parameter: Light Value: Far-red vs. White
  misc_feature: MA Experiment 20001450 PARAMETER Experiment Name: At_Far-red-induction_P Parameter: Organism Value: A. thaliana
  misc_feature: MA Experiment 20001450 PARAMETER Experiment Name: At_Far-red-induction_P Parameter: Plant Line Value: Columbia
  misc_feature: MA Experiment 20001450 PARAMETER Experiment Name: At_Far-red-induction_P Parameter: Timepoint (hr) Value: 8
  misc_feature: MA Experiment 20001450 PARAMETER Experiment Name: At_Far-red-induction_P Parameter: Tissue Value: Whole Plant
  misc_feature: MA Experiment ID: 20001451 Result: Down-regulated in Transcription
  misc_feature: MA Experiment 20001451 PARAMETER Experiment Name: At_Far-red-induction_P Parameter: Age (day) Value: 7
  misc_feature: MA Experiment 20001451 PARAMETER Experiment Name: At_Far-red-induction_P Parameter: Light Value: Far-red vs. White
  misc_feature: MA Experiment 20001451 PARAMETER Experiment Name: At_Far-red-induction_P Parameter: Organism Value: A. thaliana
  misc_feature: MA Experiment 20001451 PARAMETER Experiment Name: At_Far-red-induction_P Parameter: Plant Line Value: Columbia
  misc_feature: MA Experiment 20001451 PARAMETER Experiment Name: At_Far-red-induction_P Parameter: Timepoint (hr) Value: 24
  misc_feature: MA Experiment 20001451 PARAMETER Experiment Name: At_Far-red-induction_P Parameter: Tissue Value: Whole Plant
  misc_feature: MA Experiment ID: 20001555 Result: Down-regulated in Transcription
  misc_feature: MA Experiment 20001555 PARAMETER Experiment Name: At_Drought_Soil_Dry_P Parameter: Age (day) Value: 24
  misc_feature: MA Experiment 20001555 PARAMETER Experiment Name: At_Drought_Soil_Dry_P Parameter: Organism Value: A. thaliana
  misc_feature: MA Experiment 20001555 PARAMETER Experiment Name: At_Drought_Soil_Dry_P Parameter: Plant Line Value: WS
  misc_feature: MA Experiment 20001555 PARAMETER Experiment Name: At_Drought_Soil_Dry_P Parameter: Post Timepoint (hr) Value: None
  misc_feature: MA Experiment 20001555 PARAMETER Experiment Name: At_Drought_Soil_Dry_P Parameter: Post-Treatment Value: None
  misc_feature: MA Experiment 20001555 PARAMETER Experiment Name: At_Drought_Soil_Dry_P Parameter: Timepoint (day) Value: 10
  misc_feature: MA Experiment 20001555 PARAMETER Experiment Name: At_Drought_Soil_Dry_P Parameter: Treatment Value: Drought vs. No Drought
  misc_feature: MA Experiment ID: 20001557 Result: Down-regulated in Transcription
  misc_feature: MA Experiment 20001557 PARAMETER Experiment Name: At_Drought_Soil_Dry_P Parameter: Age (day) Value: 27
  misc_feature: MA Experiment 20001557 PARAMETER Experiment Name: At_Drought_Soil_Dry_P Parameter: Organism Value: A. thaliana
  misc_feature: MA Experiment 20001557 PARAMETER Experiment Name: At_Drought_Soil_Dry_P Parameter: Plant Line Value: WS
  misc_feature: MA Experiment 20001557 PARAMETER Experiment Name: At_Drought_Soil_Dry_P Parameter: Post Timepoint (hr) Value: 3
  misc_feature: MA Experiment 20001557 PARAMETER Experiment Name: At_Drought_Soil_Dry_P Parameter: Post-Treatment Value: Re-Water vs. No Drought
  misc_feature: MA Experiment 20001557 PARAMETER Experiment Name: At_Drought_Soil_Dry_P Parameter: Timepoint (day) Value: 13
  misc_feature: MA Experiment 20001557 PARAMETER Experiment Name: At_Drought_Soil_Dry_P Parameter: Treatment Value: Drought vs. No Drought
  misc_feature: MA Experiment ID: 20001757 Result: Up-regulated in Transcription
  misc_feature: MA Experiment 20001757 PARAMETER Experiment Name: At_50mM_NH4NO3_L-to-H_P Parameter: Timepoint (hr) Value: 6
  misc_feature: MA Experiment 20001757 PARAMETER Experiment Name: At_50mM_NH4NO3_L-to-H_P Parameter: Tissue Value: Leaf
  misc_feature: MA Experiment 20001757 PARAMETER Experiment Name: At_50mM_NH4NO3_L-to-H_P Parameter: Treatment Value: 50mM NH4NO3 vs 100mM Mannitol
  misc_feature: MA Experiment ID: 20001908 Result: Down-regulated in Transcription
  misc_feature: MA Experiment 20001908 PARAMETER Experiment Name: At_Drought_Reproduction_P Parameter: Age (day) Value: 40
  misc_feature: MA Experiment 20001908 PARAMETER Experiment Name: At_Drought_Reproduction_P Parameter: Organism Value: A. thaliana
  misc_feature: MA Experiment 20001908 PARAMETER Experiment Name: At_Drought_Reproduction_P Parameter: Plant Line Value: WS
  misc_feature: MA Experiment 20001908 PARAMETER Experiment Name: At_Drought_Reproduction_P Parameter: Timepoint (day) Value: 10
  misc_feature: MA Experiment 20001908 PARAMETER Experiment Name: At_Drought_Reproduction_P Parameter: Tissue Value: Siliques
  misc_feature: MA Experiment 20001908 PARAMETER Experiment Name: At_Drought_Reproduction_P Parameter: Treatment Value: Drought vs. No Drought
acaaattacatcaatccactcacttactttggcaacaaacaaacaacaacaaagagagaaattaacatggcgtcttttgcaaccatcgccgccgtacaaccttctgccgccgtgaaaggacttggaggtagctctcttgccggagctaagctcttcatcaaaccttctcgccaaagcttcaaaaccaaatccaccagagctggtgctgtggtggctaagtatggagacaaaagtgtatactttgatttagaagatttgggtaacacaacaggacaatgggatgtgtatggatctgatgctccttctccttataacccacttcagagcaagttctttgagacatttgctgctcctttcacaaagagaggtttgcttctcaaatttttgattcttggaggaggctctttgcttacatatgttagtgcgaactctaccggcgatgttcttccgattaagagaggtcctcaagagccacctaagctcggtcctcgcggcaagctttaaattagctttctaaaatctttcaaaaagtcagaaactttctccccaattctatgaaccctatttatgtatattgtactgtgttgtgttaattgctttgtaagctagtgattctgaaaatcagttatgatgaatcaatgaaattgcatttcaagtctgct

SEQ ID NO: 26020 - protein, 167 aa, Arabidopsis thaliana
  peptide (1)..(167): Ceres Seq. ID no. 12333509
  misc_feature (28)..(167): Pfam Name: Photosystem I reaction centre subunit VI Pfam Description: Photosystem I reaction centre subunit VI
  misc_feature (23)..(167): Homolog of NCBI NO: 445928 NR Description: photosystem I:SUBUNIT=PS I-H
  misc_feature (23)..(167): Homolog of NCBI NO: 3914465 NR Description: Photosystem I reaction center subunit VI,
  misc_feature (23)..(167): Homolog of NCBI NO: 7443140 NR Description: photosystem I psaH precursor - wood tobacco
  misc_feature (23)..(167): Homolog of NCBI NO: 7443138 NR Description: photosystem I protein psaH precursor - wood
  misc_feature (23)..(167): Homolog of NCBI NO: 7443139 NR Description: photosystem I protein psaH precursor - wood
  misc_feature (23)..(167): Homolog of NCBI NO: 33520419 NR Description: photosystem I psaH protein [Trifolium pratense]
  misc_feature (23)..(167): Homolog of NCBI NO: 131199 NR Description: Photosystem I reaction center subunit VI,
  misc_feature (23)..(167): Homolog of NCBI NO: 15233291 NR Description: photosystem I subunit VI precursor
  misc_feature (23)..(167): Homolog of NCBI NO: 3914442 NR Description: Photosystem I reaction center subunit VI,
  misc_feature (23)..(167): Homolog of NCBI NO: 15218186 NR Description: photosystem I subunit VI precursor
TNYINPLTYFGNKQTTTKREINMASFATIAAVQPSAAVKGLGGSSLAGAKLFIKPSRQSFKTKSTRAGAVVAKYGDKSVYFDLEDLGNTTGQWDVYGSDAPSPYNPLQSKFFETFAAPFTKRGLLLKFLILGGGSLLTYVSANSTGDVLPIKRGPQEPPKLGPRGKL

SEQ ID NO: 26021 - protein, 145 aa, Arabidopsis thaliana
  peptide (1)..(145): Ceres Seq. ID no. 12333510
  misc_feature (6)..(145): Pfam Name: Photosystem I reaction centre subunit VI Pfam Description: Photosystem I reaction centre subunit VI
  misc_feature (1)..(145): Homolog of NCBI NO: 445928 NR Description: photosystem I:SUBUNIT=PS I-H
  misc_feature (1)..(145): Homolog of NCBI NO: 3914465 NR Description: Photosystem I reaction center subunit VI,
  misc_feature (1)..(145): Homolog of NCBI NO: 7443140 NR Description: photosystem I psaH precursor - wood tobacco
  misc_feature (1)..(145): Homolog of NCBI NO: 7443138 NR Description: photosystem I protein psaH precursor - wood
  misc_feature (1)..(145): Homolog of NCBI NO: 7443139 NR Description: photosystem I protein psaH precursor - wood
  misc_feature (1)..(145): Homolog of NCBI NO: 33520419 NR Description: photosystem I psaH protein [Trifolium pratense]
  misc_feature (1)..(145): Homolog of NCBI NO: 131199 NR Description: Photosystem I reaction center subunit VI,
  misc_feature (1)..(145): Homolog of NCBI NO: 15233291 NR Description: photosystem I subunit VI precursor
  misc_feature (1)..(145): Homolog of NCBI NO: 3914442 NR Description: Photosystem I reaction center subunit VI,
  misc_feature (1)..(145): Homolog of NCBI NO: 15218186 NR Description: photosystem I subunit VI precursor
MASFATIAAVQPSAAVKGLGGSSLAGAKLFIKPSRQSFKTKSTRAGAVVAKYGDKSVYFDLEDLGNTTGQWDVYGSDAPSPYNPLQSKFFETFAAPFTKRGLLLKFLILGGGSLLTYVSANSTGDVLPIKRGPQEPPKLGPRGKL

SEQ ID NO: 26022 - DNA, 1566 bp, Arabidopsis thaliana
  misc_feature (1)..(1566): Ceres Seq. ID no. 12489600
  misc_feature: MA Experiment ID: 108488 Result: Down-regulated in Transcription
  misc_feature: MA Experiment ID: 108595 Result: Up-regulated in Transcription
  misc_feature: MA Experiment 108595 PARAMETER Experiment Name: At_Ler-pi_Ovule_cDNA_P Parameter: Plant Line Value: null
  misc_feature: MA Experiment ID: 20000086 Result: Down-regulated in Transcription
  misc_feature: MA Experiment 20000086 PARAMETER Experiment Name: At_100uM_ABA_Mutants_cDNA_P Parameter: Plant Line Value: CS22
  misc_feature: MA Experiment 20000086 PARAMETER Experiment Name: At_100uM_ABA_Mutants_cDNA_P Parameter: Timepoint (hr) Value: 6
  misc_feature: MA Experiment 20000086 PARAMETER Experiment Name: At_100uM_ABA_Mutants_cDNA_P Parameter: Tissue Value: Aerial
  misc_feature: MA Experiment 20000086 PARAMETER Experiment Name: At_100uM_ABA_Mutants_cDNA_P Parameter: Treatment Value: 100uM ABA vs. No Treatment
  misc_feature: MA Experiment ID: 20000087 Result: Up-regulated in Transcription
  misc_feature: MA Experiment 20000087 PARAMETER Experiment Name: At_100uM_ABA_Mutants_cDNA_P Parameter: Plant Line Value: WS
  misc_feature: MA Experiment 20000087 PARAMETER Experiment Name: At_100uM_ABA_Mutants_cDNA_P Parameter: Timepoint (hr) Value: 6
  misc_feature: MA Experiment 20000087 PARAMETER Experiment Name: At_100uM_ABA_Mutants_cDNA_P Parameter: Tissue Value: Aerial
  misc_feature: MA Experiment 20000087 PARAMETER Experiment Name: At_100uM_ABA_Mutants_cDNA_P Parameter: Treatment Value: 100uM ABA vs. No Treatment
  misc_feature: MA Experiment ID: 20000111 Result: Up-regulated in Transcription
  misc_feature: MA Experiment 20000111 PARAMETER Experiment Name: At_42deg_Heat_cDNA_P Parameter: Temperature (deg C) Value: 42 vs. 22
  misc_feature: MA Experiment 20000111 PARAMETER Experiment Name: At_42deg_Heat_cDNA_P Parameter: Timepoint (hr) Value: 6
  misc_feature: MA Experiment 20000111 PARAMETER Experiment Name: At_42deg_Heat_cDNA_P Parameter: Tissue Value: Aerial
  misc_feature: MA Experiment ID: 20000112 Result: Up-regulated in Transcription
  misc_feature: MA Experiment 20000112 PARAMETER Experiment Name: At_42deg_Heat_cDNA_P Parameter: Temperature (deg C) Value: 42 vs. 22
  misc_feature: MA Experiment 20000112 PARAMETER Experiment Name: At_42deg_Heat_cDNA_P Parameter: Timepoint (hr) Value: 2
  misc_feature: MA Experiment 20000112 PARAMETER Experiment Name: At_42deg_Heat_cDNA_P Parameter: Tissue Value: Aerial
  misc_feature: MA Experiment ID: 20000179 Result: Down-regulated in Transcription
  misc_feature: MA Experiment 20000179 PARAMETER Experiment Name: At_Germinating_Seeds_P Parameter: Age (hr) Value: 6 vs. 0
  misc_feature: MA Experiment 20000179 PARAMETER Experiment Name: At_Germinating_Seeds_P Parameter: Tissue Value: Germinating Seeds
  misc_feature: MA Experiment ID: 20000180 Result: Down-regulated in Transcription
  misc_feature: MA Experiment 20000180 PARAMETER Experiment Name: At_Germinating_Seeds_P Parameter: Age (hr) Value: 24 vs. 0
  misc_feature: MA Experiment 20000180 PARAMETER Experiment Name: At_Germinating_Seeds_P Parameter: Tissue Value: Germinating Seeds
  misc_feature: MA Experiment ID: 20001557 Result: Up-regulated in Transcription
  misc_feature: MA Experiment 20001557 PARAMETER Experiment Name: At_Drought_Soil_Dry_P Parameter: Age (day) Value: 27
  misc_feature: MA Experiment 20001557 PARAMETER Experiment Name: At_Drought_Soil_Dry_P Parameter: Organism Value: A. thaliana
  misc_feature: MA Experiment 20001557 PARAMETER Experiment Name: At_Drought_Soil_Dry_P Parameter: Plant Line Value: WS
  misc_feature: MA Experiment 20001557 PARAMETER Experiment Name: At_Drought_Soil_Dry_P Parameter: Post Timepoint (hr) Value: 3
  misc_feature: MA Experiment 20001557 PARAMETER Experiment Name: At_Drought_Soil_Dry_P Parameter: Post-Treatment Value: Re-Water vs. No Drought
  misc_feature: MA Experiment 20001557 PARAMETER Experiment Name: At_Drought_Soil_Dry_P Parameter: Timepoint (day) Value: 13
  misc_feature: MA Experiment 20001557 PARAMETER Experiment Name: At_Drought_Soil_Dry_P Parameter: Treatment Value: Drought vs. No Drought
  misc_feature: MA Experiment ID: 20001558 Result: Up-regulated in Transcription
  misc_feature: MA Experiment 20001558 PARAMETER Experiment Name: At_Drought_Soil_Dry_P Parameter: Age (day) Value: 27
  misc_feature: MA Experiment 20001558 PARAMETER Experiment Name: At_Drought_Soil_Dry_P Parameter: Organism Value: A. thaliana
  misc_feature: MA Experiment 20001558 PARAMETER Experiment Name: At_Drought_Soil_Dry_P Parameter: Plant Line Value: WS
  misc_feature: MA Experiment 20001558 PARAMETER Experiment Name: At_Drought_Soil_Dry_P Parameter: Post Timepoint (hr) Value: 6
  misc_feature: MA Experiment 20001558 PARAMETER Experiment Name: At_Drought_Soil_Dry_P Parameter: Post-Treatment Value: Re-Water vs. No Drought
  misc_feature: MA Experiment 20001558 PARAMETER Experiment Name: At_Drought_Soil_Dry_P Parameter: Timepoint (day) Value: 13
  misc_feature: MA Experiment 20001558 PARAMETER Experiment Name: At_Drought_Soil_Dry_P Parameter: Treatment Value: Drought vs. No Drought
aactttacttttcctctgctcgtagacagctttgtgcttgagacgattcccagtttctgcgattccaagtcgaagatataacctctcctatttgcgtctcagcttctacagagcttttagcattaaaagttgttaaaatggctggggggtcaaagaggtctaaaagagcaagacttgacagtgaatcggaagacataagcgaccaagaaaaccttaaggccgaaagcganaatgaagatgatcaattacctgatgggatagaggatgatgaagtagatagcatggaagatgatgagggagagagtgangaagacgatgaaggagataccgaggaagatgatgaaggagatatcgaggaagatgatgcaggagataacaaggaagacgaggatggagaaagcgaggactttgaagatggaaatgataaagagagtgagagtggcgatgaaggtaatgatgacaataaagatgctcagatggaagagcttgagaaagaggtcaaggagcttcgttcacaagagcaggatatattgaagaacttgaagcgtgataagggtgaagatgctgtttaaaggtcaagcggtgaagaatcagaaggctctttgggataagattctggagttcagattcttacttcagaaagcatttgatcgttcaaacagattaccacaggagcctgtgaaatcgttattttgttcggaagatgaggatgtctcaacagcatatacagatctagttacttcatctaagaagacattagattccctcttggagttgcaagaggctttgtttgagaagaacccctcagttgatcaacaagtgaatgcaacagctagtgaagaatccaataaatcagatgcggaagatagcgatgaatggcagcgaatatctgacttgcagaaaagaatgtctgtgttccgaaacaaggctgtggacaaatggcagagaaaaacacaagtcacaactggtgcagctgctattaaaggaaagctccacgcctttaaccagaacgttagtgaacaggttgcttcctacatgagggatccaagtagaatgattaaacagatgcaacaatcaagatctactgttgctgtttttggaactgtccctcaggaagccatggaaccaaatccagaggaaaaacaacaagaaggagaccctgaacttgtggaagatgctgagttctataggcagttactaaaagagtttcttgagaacatcgatccagcttcctcagaggcggctttctacgaantgaagaagtttcagacgaagaagaggaaagttgtggatcgacgtgcctcaaagagcagaaagatcaggtataatgttcatgagaagattgtcaacttcatggctccacgaccagcaaagattcctccaaacactgcggatttgcttaagaatctcttcggtctcaagaccagaaacgttcagtctgaagcttaatatcaaagaaaccacaattttgaaacgctgtaatagatcgtccctttttctgtggtgtgttgtaatactactattgacaccgtttctatcgaaagacatatgtgaaagcatcgagtt

SEQ ID NO: 26023 - protein, 295 aa, Arabidopsis thaliana
  peptide (1)..(295): Ceres Seq. ID no. 12489601
  misc_feature (4)..(104): Homolog of NCBI NO: 16758536 NR Description: apoptosis antagonizing transcription factor
  misc_feature (199)..(285): Homolog of NCBI NO: 7657013 NR Description: apoptosis antagonizing transcription factor [Homo
  misc_feature (4)..(115): Homolog of NCBI NO: 7657013 NR Description: apoptosis antagonizing transcription factor [Homo
  misc_feature (4)..(104): Homolog of NCBI NO: 9790013 NR Description: apoptosis antagonizing transcription factor;
  misc_feature (181)..(285): Homolog of NCBI NO: 9790013 NR Description: apoptosis antagonizing transcription factor;
  misc_feature (4)..(284): Homolog of NCBI NO: 19920846 NR Description: CG11188-PA [Drosophila melanogaster]
  misc_feature (4)..(286): Homolog of NCBI NO: 34913376 NR Description: B1147B04.8 [Oryza sativa (japonica
  misc_feature (4)..(295): Homolog of NCBI NO: 15240224 NR Description: putative protein; protein id: At5g61330.1
  misc_feature (4)..(295): Homolog of NCBI NO: 28416553 NR Description: At5g61330 [Arabidopsis thaliana]
  misc_feature (4)..(295): Homolog of NCBI NO: 9757854 NR Description: contains similarity to apoptosis antagonizing
  misc_feature (232)..(232): Xaa is any aa, unknown or other
MLFKGQAVKNQKALWDKILEFRFLLQKAFDRSNRLPQEPVKSLFCSEDEDVSTAYTDLVTSSKKTLDSLLELQEALFEKNPSVDQQVNATASEESNKSDAEDSDEWQRISDLQKRMSVFRNKAVDKWQRKTQVTTGAAAIKGKLHAFNQNVSEQVASYMRDPSRMIKQMQQSRSTVAVFGTVPQEAMEPNPEEKQQEGDPELVEDAEFYRQLLKEFLENIDPASSEAAFYEXKKFQTKKRKVVDRRASKSRKIRYNVHEKIVNFMAPRPAKIPPNTADLLKNLFGLKTRNVQSEA

SEQ ID NO: 26024 - protein, 180 aa, Arabidopsis thaliana
  peptide (1)..(180): Ceres Seq. ID no. 12489602
  misc_feature (1)..(152): Homolog of NCBI NO: 40742916 NR Description: hypothetical protein AN7526.2 [Aspergillus
  misc_feature (84)..(170): Homolog of NCBI NO: 5813799 NR Description: Che-1 [Homo sapiens]
  misc_feature (84)..(174): Homolog of NCBI NO: 16758536 NR Description: apoptosis antagonizing transcription factor
  misc_feature (84)..(170): Homolog of NCBI NO: 7657013 NR Description: apoptosis antagonizing transcription factor [Homo
  misc_feature (66)..(170): Homolog of NCBI NO: 9790013 NR Description: apoptosis antagonizing transcription factor;
  misc_feature (1)..(169): Homolog of NCBI NO: 19920846 NR Description: CG11188-PA [Drosophila melanogaster]
  misc_feature (1)..(171): Homolog of NCBI NO: 34913376 NR Description: B1147B04.8 [Oryza sativa (japonica
  misc_feature (1)..(180): Homolog of NCBI NO: 15240224 NR Description: putative protein; protein id: At5g61330.1
  misc_feature (1)..(180): Homolog of NCBI NO: 28416553 NR Description: At5g61330 [Arabidopsis thaliana]
  misc_feature (1)..(180): Homolog of NCBI NO: 9757854 NR Description: contains similarity to apoptosis antagonizing
  misc_feature (117)..(117): Xaa is any aa, unknown or other
MSVFRNKAVDKWQRKTQVTTGAAAIKGKLHAFNQNVSEQVASYMRDPSRMIKQMQQSRSTVAVFGTVPQEAMEPNPEEKQQEGDPELVEDAEFYRQLLKEFLENIDPASSEAAFYEXKKFQTKKRKVVDRRASKSRKIRYNVHEKIVNFMAPRPAKIPPNTADLLKNLFGLKTRNVQSEA

SEQ ID NO: 26025 - DNA, 1601 bp, Arabidopsis thaliana
  misc_feature (1)..(1601): Ceres Seq. ID no. 12331374
  misc_feature: MA Experiment ID: 108461 Result: Up-regulated in Transcription
  misc_feature: MA Experiment 108461 PARAMETER Experiment Name: At_Germinating_Seeds_cDNA_P Parameter: Age (day) Value: 1 vs. 0
  misc_feature: MA Experiment 108461 PARAMETER Experiment Name: At_Germinating_Seeds_cDNA_P Parameter: Tissue Value: Germinating Seeds
  misc_feature: MA Experiment ID: 20000113 Result: Down-regulated in Transcription
  misc_feature: MA Experiment 20000113 PARAMETER Experiment Name: At_42deg_Heat_cDNA_P Parameter: Temperature (deg C) Value: 42 vs. 22
  misc_feature: MA Experiment 20000113 PARAMETER Experiment Name: At_42deg_Heat_cDNA_P Parameter: Timepoint (hr) Value: 8
  misc_feature: MA Experiment 20000113 PARAMETER Experiment Name: At_42deg_Heat_cDNA_P Parameter: Tissue Value: Aerial
  misc_feature: MA Experiment ID: 20000173 Result: Down-regulated in Transcription
  misc_feature: MA Experiment 20000173 PARAMETER Experiment Name: At_42deg_Heat_P Parameter: Age (day) Value: 14
  misc_feature: MA Experiment 20000173 PARAMETER Experiment Name: At_42deg_Heat_P Parameter: Organism Value: A. thaliana
  misc_feature: MA Experiment 20000173 PARAMETER Experiment Name: At_42deg_Heat_P Parameter: Plant Line Value: WS
  misc_feature: MA Experiment 20000173 PARAMETER Experiment Name: At_42deg_Heat_P Parameter: Temperature (deg C) Value: 42 vs. 22
  misc_feature: MA Experiment 20000173 PARAMETER Experiment Name: At_42deg_Heat_P Parameter: Timepoint (hr) Value: 6
  misc_feature: MA Experiment 20000173 PARAMETER Experiment Name: At_42deg_Heat_P Parameter: Tissue Value: Aerial
  misc_feature: MA Experiment ID: 20000180 Result: Up-regulated in Transcription
  misc_feature: MA Experiment 20000180 PARAMETER Experiment Name: At_Germinating_Seeds_P Parameter: Age (hr) Value: 24 vs. 0
  misc_feature: MA Experiment 20000180 PARAMETER Experiment Name: At_Germinating_Seeds_P Parameter: Tissue Value: Germinating Seeds
  misc_feature: MA Experiment ID: 20000184 Result: Down-regulated in Transcription
  misc_feature: MA Experiment 20000184 PARAMETER Experiment Name: At_Shoots__P Parameter: Age (day) Value: 7
  misc_feature: MA Experiment 20000184 PARAMETER Experiment Name: At_Shoots__P Parameter: Tissue Value: Shoots vs. Whole Plant
  misc_feature: MA Experiment ID: 20000227 Result: Up-regulated in Transcription
  misc_feature: MA Experiment 20000227 PARAMETER Experiment Name: At_Root-Tips-vs-Tops_P Parameter: Tissue Value: Root Tips vs. Root Tops
  misc_feature: MA Experiment ID: 20000234 Result: Up-regulated in Transcription
  misc_feature: MA Experiment 20000234 PARAMETER Experiment Name: At_Siliques_P Parameter: Age (day) Value: 21
  misc_feature: MA Experiment 20000234 PARAMETER Experiment Name: At_Siliques_P Parameter: Organism Value: A. thaliana
  misc_feature: MA Experiment 20000234 PARAMETER Experiment Name: At_Siliques_P Parameter: Plant Line Value: WS
  misc_feature: MA Experiment 20000234 PARAMETER Experiment Name: At_Siliques_P Parameter: Tissue Value: Less Than 5mm Siliques vs. Whole Plant
  misc_feature: MA Experiment ID: 20000235 Result: Up-regulated in Transcription
  misc_feature: MA Experiment 20000235 PARAMETER Experiment Name: At_Siliques_P Parameter: Age (day) Value: 21
  misc_feature: MA Experiment 20000235 PARAMETER Experiment Name: At_Siliques_P Parameter: Organism Value: A. thaliana
  misc_feature: MA Experiment 20000235 PARAMETER Experiment Name: At_Siliques_P Parameter: Plant Line Value: WS
  misc_feature: MA Experiment 20000235 PARAMETER Experiment Name: At_Siliques_P Parameter: Tissue Value: 5-10mm Siliques vs. Whole Plant
  misc_feature: MA Experiment ID: 20000264 Result: Up-regulated in Transcription
  misc_feature: MA Experiment 20000264 PARAMETER Experiment Name: At_Open_Flower_P Parameter: Age (day) Value: 21
  misc_feature: MA Experiment 20000264 PARAMETER Experiment Name: At_Open_Flower_P Parameter: Plant Line Value: WS
  misc_feature: MA Experiment 20000264 PARAMETER Experiment Name: At_Open_Flower_P Parameter: Tissue Value: Open Flower vs. Whole Plant
  misc_feature: MA Experiment ID: 20000265 Result: Up-regulated in Transcription
  misc_feature: MA Experiment 20000265 PARAMETER Experiment Name: At_Open_Flower_P Parameter: Age (day) Value: 21
  misc_feature: MA Experiment 20000265 PARAMETER Experiment Name: At_Open_Flower_P Parameter: Plant Line Value: WS
  misc_feature: MA Experiment 20000265 PARAMETER Experiment Name: At_Open_Flower_P Parameter: Tissue Value: Closed Flower vs. Whole Plant
  misc_feature: MA Experiment ID: 20000286 Result: Up-regulated in Transcription
  misc_feature: MA Experiment 20000286 PARAMETER Experiment Name: At_Open_Flower_P Parameter: Age (day) Value: 21
  misc_feature: MA Experiment 20000286 PARAMETER Experiment Name: At_Open_Flower_P Parameter: Plant Line Value: WS
  misc_feature: MA Experiment 20000286 PARAMETER Experiment Name: At_Open_Flower_P Parameter: Tissue Value: Half Open vs. Whole Plant
  misc_feature: MA Experiment ID: 20000794 Result: Up-regulated in Transcription
  misc_feature: MA Experiment 20000794 PARAMETER Experiment Name: At_Petals_P Parameter: Age (day) Value: 23-25 days
  misc_feature: MA Experiment 20000794 PARAMETER Experiment Name: At_Petals_P Parameter: Plant Line Value: WS
  misc_feature: MA Experiment 20000794 PARAMETER Experiment Name: At_Petals_P Parameter: Tissue Value: Petals vs. Whole plant
atcagagagactaggtttggtaattgatcagaaagtaattaagaagatcacacaaaattcacatccccaaaaactaatccgataaaaatcataaatctcaacggcactctcttctcttgtctctccttatttctcaatccagattccaatttctctcagcgaagtgagtgatctcgtcgtttgtgttccgctggtgaatcatcaccggagaattgcagatccaatgatacatccctaatcggttttattttgagtgacgacgaatcattggatccagaaaatccgatttctggaggtttgaattagtgaaatttgatcgaatttcgacagtgatgaggcatttgcgtctgattgctttgactaagagatctgattttggatctatttcaatggcgaggaaagggtcgagtataagattatcgagctcgagaatatcaacccttttgctctttatgtttgcaacttttgcttccttctatgtagcaggccgtttatggcaagaatctcaaactagggttcatctaatcaatgagctcgatagagtaaccggacaggggaaatctgctatatcagtggatgatactttgaagatcatagcttgcagggaacagaagaagacactagcagctcttgagatggaattaagttcagctaggcaagaaggctttgtttcaaaaagtcccaaacttgctgatggaactgaaaccaagaaaagaccgttagtggttatcgggataatgacaagtttgggtaacaagaagaagagggatgcagttcgtcaagcatggatggggactggtgcatcacttaaaaaacttgaaagtgaaaagggtgtgattgcaagatttgttattggaagaagtgcaaataaaggggacagcatggacaagagcattgatactgaaaatagtcaaaccgatgacttcattattctcgatgatgtagttgaggcacccgaggaagcttctaagaaggtaaaactgttctttgcctacgctgcagataggtgggatgcacagttttatgcaaaagccatcgacaatatctacgtaaatatagatgctctgggaactacgcttgcagcacatctggaaaacccacgggcttacatcggttgcatgaaatcaggcgaagtcttctcagaaccgaaccacaaatggtatgaaccagagtggtggaaattcggtgacaagaaagcatacttccggcatgcttatggggagatgtatgttataacgcacgcattggctagatttgtatcgatcaatagagacattcttcattcgtatgctcatgatgacgtcagcacgggttcatggtttgtgggtcttgatgttaagcatgtagatgaaggaaagttttgctgttctgcgtggtcctcagaagccatatgcgcaggagtgtagtagaaccaaagacgaatccaaagtgtgaggctcttggctctttggtgcttatagagaaagaagaacaaatgacatttgtctgaacttgccattttattggcattgcattatacgaagtctaggatttggatgtgggaatagatattcttaccgacaaacgttaaactccaaaaaaaataatcattcatttacagc

SEQ ID NO: 26026 - protein, 357 aa, Arabidopsis thaliana
  peptide (1)..(357): Ceres Seq. ID no. 12331375
  misc_feature (143)..(341): Pfam Name: Galactosyltransferase Pfam Description: Galactosyltransferase
  misc_feature (29)..(345): Homolog of NCBI NO: 15223337 NR Description: Avr9 elicitor response protein, putative; protein
  misc_feature (74)..(355): Homolog of NCBI NO: 26451702 NR Description: unknown protein [Arabidopsis thaliana]
  misc_feature (23)..(347): Homolog of NCBI NO: 15224704 NR Description: unknown protein; protein id: At2g25300.1
  misc_feature (22)..(355): Homolog of NCBI NO: 15236681 NR Description: putative protein
  misc_feature (19)..(355): Homolog of NCBI NO: 34898462 NR Description: ESTs D47620(S13223),AU029621(E31157) correspond a region of the predicted gene.~Similar to Arabidopsis thaliana
  misc_feature (34)..(350): Homolog of NCBI NO: 22553068 NR Description: beta 1,3-glycosyltransferase-like protein I
  misc_feature (22)..(357): Homolog of NCBI NO: 40253477 NR Description: putative Avr9 elicitor response protein
  misc_feature (20)..(355): Homolog of NCBI NO: 20372915 NR Description: beta 1,3-glycosyltransferase-like protein I
  misc_feature (20)..(357): Homolog of NCBI NO: 18423501 NR Description: Avr9 elicitor response protein-like
  misc_feature (20)..(347): Homolog of NCBI NO: 9759181 NR Description: Avr9 elicitor response protein-like [Arabidopsis
MRHLRLIALTKRSDFGSISMARKGSSIRLSSSRISTLLLFMFATFASFYVAGRLWQESQTRVHLINELDRVTGQGKSAISVDDTLKIIACREQKKTLAALEMELSSARQEGFVSKSPKLADGTETKKRPLVVIGIMTSLGNKKKRDAVRQAWMGTGASLKKLESEKGVIARFVIGRSANKGDSMDKSIDTENSQTDDFIILDDVVEAPEEASKKVKLFFAYAADRWDAQFYAKAIDNIYVNIDALGTTLAAHLENPRAYIGCMKSGEVFSEPNHKWYEPEWWKFGDKKAYFRHAYGEMYVITHALARFVSINRDILHSYAHDDVSTGSWFVGLDVKHVDEGKFCCSAWSSEAICAGV

SEQ ID NO: 26027 - protein, 338 aa, Arabidopsis thaliana
  peptide (1)..(338): Ceres Seq. ID no. 12331376
  misc_feature (124)..(322): Pfam Name: Galactosyltransferase Pfam Description: Galactosyltransferase
  misc_feature (10)..(326): Homolog of NCBI NO: 15223337 NR Description: Avr9 elicitor response protein, putative; protein
  misc_feature (55)..(336): Homolog of NCBI NO: 26451702 NR Description: unknown protein [Arabidopsis thaliana]
  misc_feature (4)..(328): Homolog of NCBI NO: 15224704 NR Description: unknown protein; protein id: At2g25300.1
  misc_feature (3)..(336): Homolog of NCBI NO: 15236681 NR Description: putative protein
  misc_feature (1)..(336): Homolog of NCBI NO: 34898462 NR Description: ESTs D47620(S13223),AU029621(E31157) correspond a region of the predicted gene.~Similar to Arabidopsis thaliana
  misc_feature (15)..(331): Homolog of NCBI NO: 22553068 NR Description: beta 1,3-glycosyltransferase-like protein I
  misc_feature (3)..(338): Homolog of NCBI NO: 40253477 NR Description: putative Avr9 elicitor response protein
  misc_feature (1)..(336): Homolog of NCBI NO: 20372915 NR Description: beta 1,3-glycosyltransferase-like protein I
  misc_feature (1)..(338): Homolog of NCBI NO: 18423501 NR Description: Avr9 elicitor response protein-like
  misc_feature (1)..(328): Homolog of NCBI NO: 9759181 NR Description: Avr9 elicitor response protein-like [Arabidopsis
MARKGSSIRLSSSRISTLLLFMFATFASFYVAGRLWQESQTRVHLINELDRVTGQGKSAISVDDTLKIIACREQKKTLAALEMELSSARQEGFVSKSPKLADGTETKKRPLVVIGIMTSLGNKKKRDAVRQAWMGTGASLKKLESEKGVIARFVIGRSANKGDSMDKSIDTENSQTDDFIILDDVVEAPEEASKKVKLFFAYAADRWDAQFYAKAIDNIYVNIDALGTTLAAHLENPRAYIGCMKSGEVFSEPNHKWYEPEWWKFGDKKAYFRHAYGEMYVITHALARFVSINRDILHSYAHDDVSTGSWFVGLDVKHVDEGKFCCSAWSSEAICAGV

SEQ ID NO: 26028 - protein, 317 aa, Arabidopsis thaliana
  peptide (1)..(317): Ceres Seq. ID no. 12331377
  misc_feature (103)..(301): Pfam Name: Galactosyltransferase Pfam Description: Galactosyltransferase
  misc_feature (1)..(305): Homolog of NCBI NO: 15223337 NR Description: Avr9 elicitor response protein, putative; protein
  misc_feature (34)..(315): Homolog of NCBI NO: 26451702 NR Description: unknown protein [Arabidopsis thaliana]
  misc_feature (1)..(307): Homolog of NCBI NO: 15224704 NR Description: unknown protein; protein id: At2g25300.1
  misc_feature (1)..(315): Homolog of NCBI NO: 15236681 NR Description: putative protein
  misc_feature (1)..(315): Homolog of NCBI NO: 34898462 NR Description: ESTs D47620(S13223),AU029621(E31157) correspond a region of the predicted gene.~Similar to Arabidopsis thaliana
  misc_feature (1)..(310): Homolog of NCBI NO: 22553068 NR Description: beta 1,3-glycosyltransferase-like protein I
  misc_feature (1)..(317): Homolog of NCBI NO: 40253477 NR Description: putative Avr9 elicitor response protein
  misc_feature (1)..(315): Homolog of NCBI NO: 20372915 NR Description: beta 1,3-glycosyltransferase-like protein I
  misc_feature (1)..(317): Homolog of NCBI NO: 18423501 NR Description: Avr9 elicitor response protein-like
  misc_feature (1)..(307): Homolog of NCBI NO: 9759181 NR Description: Avr9 elicitor response protein-like [Arabidopsis
MFATFASFYVAGRLWQESQTRVHLINELDRVTGQGKSAISVDDTLKIIACREQKKTLAALEMELSSARQEGFVSKSPKLADGTETKKRPLVVIGIMTSLGNKKKRDAVRQAWMGTGASLKKLESEKGVIARFVIGRSANKGDSMDKSIDTENSQTDDFIILDDVVEAPEEASKKVKLFFAYAADRWDAQFYAKAIDNIYVNIDALGTTLAAHLENPRAYIGCMKSGEVFSEPNHKWYEPEWWKFGDKKAYFRHAYGEMYVITHALARFVSINRDILHSYAHDDVSTGSWFVGLDVKHVDEGKFCCSAWSSEAICAGV

SEQ ID NO: 26029 - DNA, 1140 bp, Arabidopsis thaliana
  misc_feature (1)..(1140): Ceres Seq. ID no. 13491954
  misc_feature: MA Experiment ID: 20000171 Result: Up-regulated in Transcription
  misc_feature: MA Experiment 20000171 PARAMETER Experiment Name: At_42deg_Heat_P Parameter: Age (day) Value: 14
  misc_feature: MA Experiment 20000171 PARAMETER Experiment Name: At_42deg_Heat_P Parameter: Organism Value: A. thaliana
  misc_feature: MA Experiment 20000171 PARAMETER Experiment Name: At_42deg_Heat_P Parameter: Plant Line Value: WS
  misc_feature: MA Experiment 20000171 PARAMETER Experiment Name: At_42deg_Heat_P Parameter: Temperature (deg C) Value: 42 vs. 22
  misc_feature: MA Experiment 20000171 PARAMETER Experiment Name: At_42deg_Heat_P Parameter: Timepoint (hr) Value: 1
  misc_feature: MA Experiment 20000171 PARAMETER Experiment Name: At_42deg_Heat_P Parameter: Tissue Value: Aerial
  misc_feature: MA Experiment ID: 20000173 Result: Up-regulated in Transcription
  misc_feature: MA Experiment 20000173 PARAMETER Experiment Name: At_42deg_Heat_P Parameter: Age (day) Value: 14
  misc_feature: MA Experiment 20000173 PARAMETER Experiment Name: At_42deg_Heat_P Parameter: Organism Value: A. thaliana
  misc_feature: MA Experiment 20000173 PARAMETER Experiment Name: At_42deg_Heat_P Parameter: Plant Line Value: WS
  misc_feature: MA Experiment 20000173 PARAMETER Experiment Name: At_42deg_Heat_P Parameter: Temperature (deg C) Value: 42 vs. 22
  misc_feature: MA Experiment 20000173 PARAMETER Experiment Name: At_42deg_Heat_P Parameter: Timepoint (hr) Value: 6
  misc_feature: MA Experiment 20000173 PARAMETER Experiment Name: At_42deg_Heat_P Parameter: Tissue Value: Aerial
  misc_feature: MA Experiment ID: 20000182 Result: Up-regulated in Transcription
  misc_feature: MA Experiment 20000182 PARAMETER Experiment Name: At_2mM_SA_P Parameter: Age (day) Value: 14
  misc_feature: MA Experiment 20000182 PARAMETER Experiment Name: At_2mM_SA_P Parameter: Organism Value: A. thaliana
  misc_feature: MA Experiment 20000182 PARAMETER Experiment Name: At_2mM_SA_P Parameter: Plant Line Value: WS
  misc_feature: MA Experiment 20000182 PARAMETER Experiment Name: At_2mM_SA_P Parameter: Timepoint (hr) Value: 6
  misc_feature: MA Experiment 20000182 PARAMETER Experiment Name: At_2mM_SA_P Parameter: Tissue Value: Aerial
  misc_feature: MA Experiment 20000182 PARAMETER Experiment Name: At_2mM_SA_P Parameter: Treatment Value: 2mM SA vs. No Treatment
  misc_feature: MA Experiment ID: 20000184 Result: Up-regulated in Transcription
  misc_feature: MA Experiment 20000184 PARAMETER Experiment Name: At_Shoots__P Parameter: Age (day) Value: 7
  misc_feature: MA Experiment 20000184 PARAMETER Experiment Name: At_Shoots__P Parameter: Tissue Value: Shoots vs. Whole Plant
  misc_feature: MA Experiment ID: 20000185 Result: Down-regulated in Transcription
  misc_feature: MA Experiment 20000185 PARAMETER Experiment Name: At_Roots__P Parameter: Age (day) Value: 7 vs. 21
  misc_feature: MA Experiment 20000185 PARAMETER Experiment Name: At_Roots__P Parameter: Organism Value: A. thaliana
  misc_feature: MA Experiment 20000185 PARAMETER Experiment Name: At_Roots__P Parameter: Tissue Value: Roots vs. Whole Plant
  misc_feature: MA Experiment ID: 20000264 Result: Up-regulated in Transcription
  misc_feature: MA Experiment 20000264 PARAMETER Experiment Name: At_Open_Flower_P Parameter: Age (day) Value: 21
  misc_feature: MA Experiment 20000264 PARAMETER Experiment Name: At_Open_Flower_P Parameter: Plant Line Value: WS
  misc_feature: MA Experiment 20000264 PARAMETER Experiment Name: At_Open_Flower_P Parameter: Tissue Value: Open Flower vs. Whole Plant
  misc_feature: MA Experiment ID: 20000265 Result: Up-regulated in Transcription
  misc_feature: MA Experiment 20000265 PARAMETER Experiment Name: At_Open_Flower_P Parameter: Age (day) Value: 21
  misc_feature: MA Experiment 20000265 PARAMETER Experiment Name: At_Open_Flower_P Parameter: Plant Line Value: WS
  misc_feature: MA Experiment 20000265 PARAMETER Experiment Name: At_Open_Flower_P Parameter: Tissue Value: Closed Flower vs. Whole Plant
  misc_feature: MA Experiment ID: 20000267 Result: Up-regulated in Transcription
  misc_feature: MA Experiment 20000267 PARAMETER Experiment Name: At_Drought_P Parameter: Age (day) Value: 7
  misc_feature: MA Experiment 20000267 PARAMETER Experiment Name: At_Drought_P Parameter: Organism Value: A. thaliana
  misc_feature: MA Experiment 20000267 PARAMETER Experiment Name: At_Drought_P Parameter: Plant Line Value: WS
  misc_feature: MA Experiment 20000267 PARAMETER Experiment Name: At_Drought_P Parameter: Timepoint (hr) Value: 6
  misc_feature: MA Experiment 20000267 PARAMETER Experiment Name: At_Drought_P Parameter: Tissue Value: Whole Plant
  misc_feature: MA Experiment 20000267 PARAMETER Experiment Name: At_Drought_P Parameter: Treatment Value: Drought vs. No Drought
  misc_feature: MA Experiment ID: 20000268 Result: Up-regulated in Transcription
  misc_feature: MA Experiment 20000268 PARAMETER Experiment Name: At_100mM_NaCl__P Parameter: Age (day) Value: 14
  misc_feature: MA Experiment 20000268 PARAMETER Experiment Name: At_100mM_NaCl__P Parameter: Organism Value: A. thaliana
  misc_feature: MA Experiment 20000268 PARAMETER Experiment Name: At_100mM_NaCl__P Parameter: Plant Line Value: WS
  misc_feature: MA Experiment 20000268 PARAMETER Experiment Name: At_100mM_NaCl__P Parameter: Timepoint (hr) Value: 6
  misc_feature: MA Experiment 20000268 PARAMETER Experiment Name: At_100mM_NaCl__P Parameter: Tissue Value: Whole Plant
  misc_feature: MA Experiment 20000268 PARAMETER Experiment Name: At_100mM_NaCl__P Parameter: Treatment Value: 100mM NaCl vs. No Treatment
  misc_feature: MA Experiment ID: 20000286 Result: Up-regulated in Transcription
  misc_feature: MA Experiment 20000286 PARAMETER Experiment Name: At_Open_Flower_P Parameter: Age (day) Value: 21
  misc_feature: MA Experiment 20000286 PARAMETER Experiment Name: At_Open_Flower_P Parameter: Plant Line Value: WS
  misc_feature: MA Experiment 20000286 PARAMETER Experiment Name: At_Open_Flower_P Parameter: Tissue Value: Half Open vs. Whole Plant
  misc_feature: MA Experiment ID: 20000436 Result: Up-regulated in Transcription
  misc_feature: MA Experiment 20000436 PARAMETER Experiment Name: At_Drought_P Parameter: Age (day) Value: 7
  misc_feature: MA Experiment 20000436 PARAMETER Experiment Name: At_Drought_P Parameter: Organism Value: A. thaliana
  misc_feature: MA Experiment 20000436 PARAMETER Experiment Name: At_Drought_P Parameter: Plant Line Value: WS
  misc_feature: MA Experiment 20000436 PARAMETER Experiment Name: At_Drought_P Parameter: Timepoint (hr) Value: 12
  misc_feature: MA Experiment 20000436 PARAMETER Experiment Name: At_Drought_P Parameter: Tissue Value: Whole Plant
  misc_feature: MA Experiment 20000436 PARAMETER Experiment Name: At_Drought_P Parameter: Treatment Value: Drought vs. No Drought
  misc_feature: MA Experiment ID: 20000438 Result: Up-regulated in Transcription
  misc_feature: MA Experiment 20000438 PARAMETER Experiment Name: At_Shoots__P Parameter: Age (day) Value: 14
  misc_feature: MA Experiment 20000438 PARAMETER Experiment Name: At_Shoots__P Parameter: Tissue Value: Shoots vs. Whole Plant
  misc_feature: MA Experiment ID: 20000445 Result: Up-regulated in Transcription
  misc_feature: MA Experiment 20000445 PARAMETER Experiment Name: At_100uM_NAA__P Parameter: Age (day) Value: 14
  misc_feature: MA Experiment 20000445 PARAMETER Experiment Name: At_100uM_NAA__P Parameter: Organism Value: A. thaliana
  misc_feature: MA Experiment 20000445 PARAMETER Experiment Name: At_100uM_NAA__P Parameter: Plant Line Value: WS
  misc_feature: MA Experiment 20000445 PARAMETER Experiment Name: At_100uM_NAA__P Parameter: Timepoint (hr) Value: 6
  misc_feature: MA Experiment 20000445 PARAMETER Experiment Name: At_100uM_NAA__P Parameter: Tissue Value: Aerial
  misc_feature: MA Experiment 20000445 PARAMETER Experiment Name: At_100uM_NAA__P Parameter: Treatment Value: 100uM NAA vs. No Treatment
  misc_feature: MA Experiment ID: 20000451 Result: Down-regulated in Transcription
  misc_feature: MA Experiment 20000451 PARAMETER Experiment Name: At_CS6879_Shoots-Roots_P Parameter: Age (day) Value: 14
  misc_feature: MA Experiment 20000451 PARAMETER Experiment Name: At_CS6879_Shoots-Roots_P Parameter: Organism Value: A. thaliana
  misc_feature: MA Experiment 20000451 PARAMETER Experiment Name: At_CS6879_Shoots-Roots_P Parameter: Plant Line Value: CS6879 vs. WS
  misc_feature: MA Experiment 20000451 PARAMETER Experiment Name: At_CS6879_Shoots-Roots_P Parameter: Tissue Value: Roots
  misc_feature: MA Experiment ID: 20000495 Result: Down-regulated in Transcription
  misc_feature: MA Experiment 20000495 PARAMETER Experiment Name: At_Guard_Cells_P Parameter: Harvest Date Value: 8/2/2002
  misc_feature: MA Experiment 20000495 PARAMETER Experiment Name: At_Guard_Cells_P Parameter: Organism Value: A. thaliana
  misc_feature: MA Experiment 20000495 PARAMETER Experiment Name: At_Guard_Cells_P Parameter: Tissue Value: Guard Cells vs. Leaves
  misc_feature: MA Experiment ID: 20000573 Result: Down-regulated in Transcription
  misc_feature: MA Experiment 20000573 PARAMETER Experiment Name: At_100uM_ABA_Mutants__P Parameter: Organism Value: A. thaliana
  misc_feature: MA Experiment 20000573 PARAMETER Experiment Name: At_100uM_ABA_Mutants__P Parameter: Plant Line Value: CS22 vs. Ler wt
  misc_feature: MA Experiment 20000573 PARAMETER Experiment Name: At_100uM_ABA_Mutants__P Parameter: Timepoint (hr) Value: N/A
  misc_feature: MA Experiment 20000573 PARAMETER Experiment Name: At_100uM_ABA_Mutants__P Parameter: Tissue Value: Whole Plant
  misc_feature: MA Experiment 20000573 PARAMETER Experiment Name: At_100uM_ABA_Mutants__P Parameter: Treatment Value: None
  misc_feature: MA Experiment ID: 20000574 Result: Down-regulated in Transcription
  misc_feature: MA Experiment 20000574 PARAMETER Experiment Name: At_100uM_ABA_Mutants__P Parameter: Organism Value: A. thaliana
  misc_feature: MA Experiment 20000574 PARAMETER Experiment Name: At_100uM_ABA_Mutants__P Parameter: Plant Line Value: CS23 vs. Ler wt
  misc_feature: MA Experiment 20000574 PARAMETER Experiment Name: At_100uM_ABA_Mutants__P Parameter: Timepoint (hr) Value: N/A
  misc_feature: MA Experiment 20000574 PARAMETER Experiment Name: At_100uM_ABA_Mutants__P Parameter: Tissue Value: Whole Plant
  misc_feature: MA Experiment 20000574 PARAMETER Experiment Name: At_100uM_ABA_Mutants__P Parameter: Treatment Value: None
  misc_feature: MA Experiment ID: 20000794 Result: Up-regulated in Transcription
  misc_feature: MA Experiment 20000794 PARAMETER Experiment Name: At_Petals_P Parameter: Age (day) Value: 23-25 days
  misc_feature: MA Experiment 20000794 PARAMETER Experiment Name: At_Petals_P Parameter: Plant Line Value: WS
  misc_feature: MA Experiment 20000794 PARAMETER Experiment Name: At_Petals_P Parameter: Tissue Value: Petals vs. Whole plant
  misc_feature: MA Experiment ID: 20001248 Result: Down-regulated in Transcription
  misc_feature: MA Experiment 20001248 PARAMETER Experiment Name: At_Far-red-induction_P Parameter: Age (day) Value: 7
  misc_feature: MA Experiment 20001248 PARAMETER Experiment Name: At_Far-red-induction_P Parameter: Light Value: Far-red vs. White
  misc_feature: MA Experiment 20001248 PARAMETER Experiment Name: At_Far-red-induction_P Parameter: Organism Value: A. thaliana
  misc_feature: MA Experiment 20001248 PARAMETER Experiment Name: At_Far-red-induction_P Parameter: Plant Line Value: Columbia
  misc_feature: MA Experiment 20001248 PARAMETER Experiment Name: At_Far-red-induction_P Parameter: Timepoint (hr) Value: 4
  misc_feature: MA Experiment 20001248 PARAMETER Experiment Name: At_Far-red-induction_P Parameter: Tissue Value: Whole Plant
  misc_feature: MA Experiment ID: 20001450 Result: Down-regulated in Transcription
  misc_feature: MA Experiment 20001450 PARAMETER Experiment Name: At_Far-red-induction_P Parameter: Age (day) Value: 7
  misc_feature: MA Experiment 20001450 PARAMETER Experiment Name: At_Far-red-induction_P Parameter: Light Value: Far-red vs. White
  misc_feature: MA Experiment 20001450 PARAMETER Experiment Name: At_Far-red-induction_P Parameter: Organism Value: A. thaliana
  misc_feature: MA Experiment 20001450 PARAMETER Experiment Name: At_Far-red-induction_P Parameter: Plant Line Value: Columbia
  misc_feature: MA Experiment 20001450 PARAMETER Experiment Name: At_Far-red-induction_P Parameter: Timepoint (hr) Value: 8
  misc_feature: MA Experiment 20001450 PARAMETER Experiment Name: At_Far-red-induction_P Parameter: Tissue Value: Whole Plant
  misc_feature: MA Experiment ID: 20001451 Result: Down-regulated in Transcription
  misc_feature: MA Experiment 20001451 PARAMETER Experiment Name: At_Far-red-induction_P Parameter: Age (day) Value: 7
  misc_feature: MA Experiment 20001451 PARAMETER Experiment Name: At_Far-red-induction_P Parameter: Light Value: Far-red vs. White
  misc_feature: MA Experiment 20001451 PARAMETER Experiment Name: At_Far-red-induction_P Parameter: Organism Value: A. thaliana
  misc_feature: MA Experiment 20001451 PARAMETER Experiment Name: At_Far-red-induction_P Parameter: Plant Line Value: Columbia
  misc_feature: MA Experiment 20001451 PARAMETER Experiment Name: At_Far-red-induction_P Parameter: Timepoint (hr) Value: 24
  misc_feature: MA Experiment 20001451 PARAMETER Experiment Name: At_Far-red-induction_P Parameter: Tissue Value: Whole Plant
  misc_feature: MA Experiment ID: 20001560 Result: Down-regulated in Transcription
  misc_feature: MA Experiment 20001560 PARAMETER Experiment Name: At_Drought_Soil_Dry_P Parameter: Age (day) Value: 28
  misc_feature: MA Experiment 20001560 PARAMETER Experiment Name: At_Drought_Soil_Dry_P Parameter: Organism Value: A. thaliana
  misc_feature: MA Experiment 20001560 PARAMETER Experiment Name: At_Drought_Soil_Dry_P Parameter: Plant Line Value: WS
  misc_feature: MA Experiment 20001560 PARAMETER Experiment Name: At_Drought_Soil_Dry_P Parameter: Post Timepoint (hr) Value: None
  misc_feature: MA Experiment 20001560 PARAMETER Experiment Name: At_Drought_Soil_Dry_P Parameter: Post-Treatment Value: None
  misc_feature: MA Experiment 20001560 PARAMETER Experiment Name: At_Drought_Soil_Dry_P Parameter: Timepoint (day) Value: 14
  misc_feature: MA Experiment 20001560 PARAMETER Experiment Name: At_Drought_Soil_Dry_P Parameter: Treatment Value: Drought vs. No Drought
gaaacacaaaaatggcgacggtaccattgttcacccagtttccctgcaaaaccctaaatccaagctcatcaaacactaaacaccaatcgaaatctccgatcctactaccgattaactcaataaatcggcgatcggagattggagtctctgttcatcggccagatttcaaaatccgagcgacggacatcgacgacgaatggggtcaagatggagtggagagagtatttgcctcatcttcaaccgtatcggtagcagataaagcaatcgaatccgtggaggagacggagaggctaaagagatcactagcggattcgttgtacggaacagatcgaggtttaagcgtatcgagtgatacgagagctgagatcagcgagctcatcacacagctcgagtctaagaaccctactccagctcctaacgaagctctgtttctcctcaacggcaaatggatcctcgcctacacgtcgttcgtggggttgttcccattgctctcacgaagaattgaaccgttggttaaagtggatgagatctcacaaaccattgattccgatagcttcaccgttcaaaactctgtccggttcgctggtccgttttccacaacgtcgtttagcaccaacgctaagtttgaaatccgaagtcctaaacgtgtccagattaagttcgagcaaggtgttatagggactcctcagctaacggattcgattgaaataccggaatccgtggaggttcttggtcagaaaatcgatctcaatcccattaaaggtttacttacatcagtccaagacactgcttcttcagtggctagaaccatttcaaaccaaccaccattgaagttttctctgcctagtgacaacacgcagtcgtggctgctcacaacttatctcgacaaggaccttcggatctcgagaggcgatggtggaagcgtctatgtgctcatcaaagaaggaagctctctcttaaacccttaaatcatcataactctcatcacatccatagtaacatatatacaagtatagacccatctgtctatgtttactagtgttgtaactgttatatagcttctttacctgttggagagttataaacttataatggatgttactcttggtatactgtactacaatacatatacataactac

SEQ ID NO: 26030 - protein, 321 aa, Arabidopsis thaliana
  peptide (1)..(321): Ceres Seq. ID no. 13491955
  misc_feature (95)..(312): Pfam Name: PAP_fibrillin Pfam Description: PAP_fibrillin
  misc_feature (4)..(321): Homolog of NCBI NO: 22261807 NR Description: Light-induced protein, chloroplast precursor
  misc_feature (85)..(321): Homolog of NCBI NO: 4139097 NR Description: fibrillin [Brassica napus]
  misc_feature (4)..(321): Homolog of NCBI NO: 21618237 NR Description: fibrillin precursor-like protein [Arabidopsis
  misc_feature (4)..(321): Homolog of NCBI NO: 18377868 NR Description: AT4g22240/T10I14_70 [Arabidopsis thaliana]
  misc_feature (4)..(321): Homolog of NCBI NO: 14248550 NR Description: plastid-lipid associated protein PAP2 [Brassica
  misc_feature (4)..(321): Homolog of NCBI NO: 15235575 NR Description: plastid-lipid associated protein (PAP), putative
  misc_feature (4)..(321): Homolog of NCBI NO: 14248556 NR Description: plastid-lipid associated protein PAP2 [Brassica
  misc_feature (6)..(321): Homolog of NCBI NO: 14248548 NR Description: plastid-lipid associated protein PAP1 [Brassica
  misc_feature (6)..(321): Homolog of NCBI NO: 14248554 NR Description: plastid-lipid associated protein PAP1 [Brassica
  misc_feature (4)..(321): Homolog of NCBI NO: 15233357 NR Description: plastid-lipid associated protein PAP/fibrillin,
NTKMATVPLFTQFPCKTLNPSSSNTKHQSKSPILLPINSINRRSEIGVSVHRPDFKIRATDIDDEWGQDGVERVFASSSTVSVADKAIESVEETERLKRSLADSLYGTDRGLSVSSDTRAEISELITQLESKNPTPAPNEALFLLNGKWILAYTSFVGLFPLLSRRIEPLVKVDEISQTIDSDSFTVQNSVRFAGPFSTTSFSTNAKFEIRSPKRVQIKFEQGVIGTPQLTDSIEIPESVEVLGQKIDLNPIKGLLTSVQDTASSVARTISNQPPLKFSLPSDNTQSWLLTTYLDKDLRISRGDGGSVYVLIKEGSSLLNP

SEQ ID NO: 26031 - protein, 318 aa, Arabidopsis thaliana
  peptide (1)..(318): Ceres Seq. ID no. 13491956
  misc_feature (92)..(309): Pfam Name: PAP_fibrillin Pfam Description: PAP_fibrillin
  misc_feature (1)..(318): Homolog of NCBI NO: 22261807 NR Description: Light-induced protein, chloroplast precursor
  misc_feature (82)..(318): Homolog of NCBI NO: 4139097 NR Description: fibrillin [Brassica napus]
  misc_feature (1)..(318): Homolog of NCBI NO: 21618237 NR Description: fibrillin precursor-like protein [Arabidopsis
  misc_feature (1)..(318): Homolog of NCBI NO: 18377868 NR Description: AT4g22240/T10I14_70 [Arabidopsis thaliana]
  misc_feature (1)..(318): Homolog of NCBI NO: 14248550 NR Description: plastid-lipid associated protein PAP2 [Brassica
  misc_feature (1)..(318): Homolog of NCBI NO: 15235575 NR Description: plastid-lipid associated protein (PAP), putative
  misc_feature (1)..(318): Homolog of NCBI NO: 14248556 NR Description: plastid-lipid associated protein PAP2 [Brassica
  misc_feature (3)..(318): Homolog of NCBI NO: 14248548 NR Description: plastid-lipid associated protein PAP1 [Brassica
  misc_feature (3)..(318): Homolog of NCBI NO: 14248554 NR Description: plastid-lipid associated protein PAP1 [Brassica
  misc_feature (1)..(318): Homolog of NCBI NO: 15233357 NR Description: plastid-lipid associated protein PAP/fibrillin,
MATVPLFTQFPCKTLNPSSSNTKHQSKSPILLPINSINRRSEIGVSVHRPDFKIRATDIDDEWGQDGVERVFASSSTVSVADKAIESVEETERLKRSLADSLYGTDRGLSVSSDTRAEISELITQLESKNPTPAPNEALFLLNGKWILAYTSFVGLFPLLSRRIEPLVKVDEISQTIDSDSFTVQNSVRFAGPFSTTSFSTNAKFEIRSPKRVQIKFEQGVIGTPQLTDSIEIPESVEVLGQKIDLNPIKGLLTSVQDTASSVARTISNQPPLKFSLPSDNTQSWLLTTYLDKDLRISRGDGGSVYVLIKEGSSLLNP

SEQ ID NO: 26032 - DNA, 1133 bp, Arabidopsis thaliana
  misc_feature (1)..(1133): Ceres Seq. ID no. 12421743
  misc_feature: MA Experiment ID: 108595 Result: Down-regulated in Transcription
  misc_feature: MA Experiment 108595 PARAMETER Experiment Name: At_Ler-pi_Ovule_cDNA_P Parameter: Plant Line Value: null
  misc_feature: MA Experiment ID: 20000214 Result: Up-regulated in Transcription
  misc_feature: MA Experiment 20000214 PARAMETER Experiment Name: At_4deg_Cold_P Parameter: Timepoint (hr) Value: 6
  misc_feature: MA Experiment ID: 20000264 Result: Up-regulated in Transcription
  misc_feature: MA Experiment 20000264 PARAMETER Experiment Name: At_Open_Flower_P Parameter: Age (day) Value: 21
  misc_feature: MA Experiment 20000264 PARAMETER Experiment Name: At_Open_Flower_P Parameter: Plant Line Value: WS
  misc_feature: MA Experiment 20000264 PARAMETER Experiment Name: At_Open_Flower_P Parameter: Tissue Value: Open Flower vs. Whole Plant
  misc_feature: MA Experiment ID: 20001248 Result: Down-regulated in Transcription
  misc_feature: MA Experiment 20001248 PARAMETER Experiment Name: At_Far-red-induction_P Parameter: Age (day) Value: 7
  misc_feature: MA Experiment 20001248 PARAMETER Experiment Name: At_Far-red-induction_P Parameter: Light Value: Far-red vs. White
  misc_feature: MA Experiment 20001248 PARAMETER Experiment Name: At_Far-red-induction_P Parameter: Organism Value: A. thaliana
  misc_feature: MA Experiment 20001248 PARAMETER Experiment Name: At_Far-red-induction_P Parameter: Plant Line Value: Columbia
  misc_feature: MA Experiment 20001248 PARAMETER Experiment Name: At_Far-red-induction_P Parameter: Timepoint (hr) Value: 4
  misc_feature: MA Experiment 20001248 PARAMETER Experiment Name: At_Far-red-induction_P Parameter: Tissue Value: Whole Plant
tttagatttgattcttcttctctgatctctgaaaaaacacaatgtcttcgaaagacaagaaaccgtcgaagccatcgagtagtcgtggtggaatccgaactctttccgatcttaaccgtaggtctggtcctgactccgacagtgattccgatggtccacaagaatactacacaggtggtgagaaaagtggtatgttagttcaagatccatcgaaaaaagatgatgttgatgagatatttaatcaagctagacaactaggagctgtagaaggacctcttgagccacctccgagttccaggagtttcactggaactggtagattgctttctggtgaaaatgtgcctactggtaatcaacagcctgagcctgttgttcacaacattgttttctggtctaatggtttcactattgatgatggtcctttgaggaaattggatgatcctgagaatgcatcgtttctcgagagcattcgaaagtctgagtgcccgaaagagcttgagcctgccgatagaagagctccggttcatgtcaacttgatgcgaaaggaagagaaatgccctgaaagacagaaacgtagggtttcatttcagggtgttggaagaactctaggtggtagcaatgaaggtagcggaagtagctcacctgtggctccagactccgctcccattcccatccaaaccgaaccagcaccatctcaaagtcttgtaatagatgaaaccgttccaaccacatcgatacagcttagactagcggatgggacacgtctggtggctaagttcaatcaccatcacacggtcaacgacattcgcggtttcattgactcatctcgacctggagcctcgttgaactaccagcttcagacaatggggttcccacctaagcctttgactgatctcactcagaccattgaagaagctggtctcgccaactctgttgttcttcagaaattctagaaaattctacaaggtgtggttctttttgtctatctatatgcattataatgagattttcataactgttgtagtaaccaggtctttaaaatgtaagttacttcttcactctgtatactcagcataagccggcggggacttgtggtatagtttttcttaatttattgaaattttatagtttca

SEQ ID NO: 26033 - protein, 303 aa, Arabidopsis thaliana
  peptide (1)..(303): Ceres Seq. ID no. 12421744
  misc_feature (224)..(303): Pfam Name: UBX domain Pfam Description: UBX domain
  misc_feature (1)..(303): Homolog of NCBI NO: 7487458 NR Description: hypothetical protein T27D20.10 - Arabidopsis
  misc_feature (1)..(48): Homolog of NCBI NO: 32489879 NR Description: OSJNBa0060P14.10 [Oryza sativa (japonica
  misc_feature (1)..(299): Homolog of NCBI NO: 7485149 NR Description: hypothetical protein - Arabidopsis thaliana
  misc_feature (7)..(302): Homolog of NCBI NO: 13123657 NR Description: phosphatase-like protein Mtc923 [Medicago
  misc_feature (1)..(303): Homolog of NCBI NO: 18414442 NR Description: phosphatase like protein
  misc_feature (1)..(303): Homolog of NCBI NO: 15234731 NR Description: putative protein; protein id: At4g22150.1
  misc_feature (1)..(303): Homolog of NCBI NO: 15292665 NR Description: putative phosphatase [Arabidopsis thaliana]
  misc_feature (1)..(302): Homolog of NCBI NO: 13123659 NR Description: phosphatase-like protein Psc923 [Pisum sativum]
  misc_feature (39)..(302): Homolog of NCBI NO: 32489879 NR Description: OSJNBa0060P14.10 [Oryza sativa (japonica
  misc_feature (1)..(303): Homolog of NCBI NO: 18412499 NR Description: putative membrane trafficking factor
MSSKDKKPSKPSSSRGGIRTLSDLNRRSGPDSDSDSDGPQEYYTGGEKSGMLVQDPSKKDDVDEIFNQARQLGAVEGPLEPPPSSRSFTGTGRLLSGENVPTGNQQPEPVVHNIVFWSNGFTIDDGPLRKLDDPENASFLESIRKSECPKELEPADRRAPVHVNLMRKEEKCPERQKRRVSFQGVGRTLGGSNEGSGSSSPVAPDSAPIPIQTEPAPSQSLVIDETVPTTSIQLRLADGTRLVAKFNHHHTVNDIRGFIDSSRPGASLNYQLQTMGFPPKPLTDLTQTIEEAGLANSVVLQKF

SEQ ID NO: 26034 - protein, 253 aa, Arabidopsis thaliana
  peptide (1)..(253): Ceres Seq. ID no. 12421745
  misc_feature (174)..(253): Pfam Name: UBX domain Pfam Description: UBX domain
  misc_feature (137)..(253): Homolog of NCBI NO: 15233121 NR Description: ubiquitin-regulatory protein, putative; protein
  misc_feature (1)..(252): Homolog of NCBI NO: 32489879 NR Description: OSJNBa0060P14.10 [Oryza sativa (japonica
  misc_feature (1)..(249): Homolog of NCBI NO: 7485149 NR Description: hypothetical protein - Arabidopsis thaliana
  misc_feature (1)..(252): Homolog of NCBI NO: 13123659 NR Description: phosphatase-like protein Psc923 [Pisum sativum]
  misc_feature (1)..(252): Homolog of NCBI NO: 13123657 NR Description: phosphatase-like protein Mtc923 [Medicago
  misc_feature (1)..(253): Homolog of NCBI NO: 15292665 NR Description: putative phosphatase [Arabidopsis thaliana]
  misc_feature (1)..(253): Homolog of NCBI NO: 18414442 NR Description: phosphatase like protein
  misc_feature (1)..(253): Homolog of NCBI NO: 15234731 NR Description: putative protein; protein id: At4g22150.1
  misc_feature (1)..(253): Homolog of NCBI NO: 7487458 NR Description: hypothetical protein T27D20.10 - Arabidopsis
  misc_feature (1)..(253): Homolog of NCBI NO: 18412499 NR Description: putative membrane trafficking factor
MLVQDPSKKDDVDEIFNQARQLGAVEGPLEPPPSSRSFTGTGRLLSGENVPTGNQQPEPVVHNIVFWSNGFTIDDGPLRKLDDPENASFLESIRKSECPKELEPADRRAPVHVNLMRKEEKCPERQKRRVSFQGVGRTLGGSNEGSGSSSPVAPDSAPIPIQTEPAPSQSLVIDETVPTTSIQLRLADGTRLVAKFNHHHTVNDIRGFIDSSRPGASLNYQLQTMGFPPKPLTDLTQTIEEAGLANSVVLQKF

SEQ ID NO: 26035 - DNA, 1092 bp, Arabidopsis thaliana
  misc_feature (1)..(1092): Ceres Seq. ID no. 12327523
  misc_feature: MA Experiment ID: 108434 Result: Up-regulated in Transcription
  misc_feature: MA Experiment 108434 PARAMETER Experiment Name: At_Root_Tips_cDNA_P Parameter: Tissue Value: Root Tips
  misc_feature: MA Experiment ID: 108463 Result: Down-regulated in Transcription
  misc_feature: MA Experiment 108463 PARAMETER Experiment Name: At_Germinating_Seeds_cDNA_P Parameter: Age (day) Value: 3 vs. 0
  misc_feature: MA Experiment 108463 PARAMETER Experiment Name: At_Germinating_Seeds_cDNA_P Parameter: Tissue Value: Germinating Seeds
  misc_feature: MA Experiment ID: 108569 Result: Up-regulated in Transcription
  misc_feature: MA Experiment 108569 PARAMETER Experiment Name: At_0.001%_MeJA__cDNA_P Parameter: Timepoint (hr) Value: 6
  misc_feature: MA Experiment 108569 PARAMETER Experiment Name: At_0.001%_MeJA__cDNA_P Parameter: Tissue Value: Aerial
  misc_feature: MA Experiment 108569 PARAMETER Experiment Name: At_0.001%_MeJA__cDNA_P Parameter: Treatment Value: 0.001% MeJA vs. No Treatment
  misc_feature: MA Experiment ID: 108573 Result: Up-regulated in Transcription
  misc_feature: MA Experiment 108573 PARAMETER Experiment Name: At_Drought_cDNA_P Parameter: Timepoint (hr) Value: 6
  misc_feature: MA Experiment 108573 PARAMETER Experiment Name: At_Drought_cDNA_P Parameter: Tissue Value: Aerial
  misc_feature: MA Experiment 108573 PARAMETER Experiment Name: At_Drought_cDNA_P Parameter: Treatment Value: Drought vs. No Drought
  misc_feature: MA Experiment ID: 108585 Result: Up-regulated in Transcription
  misc_feature: MA Experiment 108585 PARAMETER Experiment Name: At_5mM_NaNP_cDNA_P Parameter: Timepoint (hr) Value: 6
  misc_feature: MA Experiment 108585 PARAMETER Experiment Name: At_5mM_NaNP_cDNA_P Parameter: Tissue Value: Aerial
  misc_feature: MA Experiment 108585 PARAMETER Experiment Name: At_5mM_NaNP_cDNA_P Parameter: Treatment Value: null
  misc_feature: MA Experiment ID: 108595 Result: Down-regulated in Transcription
  misc_feature: MA Experiment 108595 PARAMETER Experiment Name: At_Ler-pi_Ovule_cDNA_P Parameter: Plant Line Value: null
  misc_feature: MA Experiment ID: 20000314 Result: Up-regulated in Transcription
  misc_feature: MA Experiment 20000314 PARAMETER Experiment Name: At_14day_Shoots-Roots_Sub_P Parameter: Age (day) Value: 14
  misc_feature: MA Experiment 20000314 PARAMETER Experiment Name: At_14day_Shoots-Roots_Sub_P Parameter: Organism Value: A. thaliana
  misc_feature: MA Experiment 20000314 PARAMETER Experiment Name: At_14day_Shoots-Roots_Sub_P Parameter: Plant Line Value: WS
  misc_feature: MA Experiment 20000314 PARAMETER Experiment Name: At_14day_Shoots-Roots_Sub_P Parameter: Tissue Value: Roots vs. Whole Plant
  misc_feature: MA Experiment ID: 20000315 Result: Up-regulated in Transcription
  misc_feature: MA Experiment 20000315 PARAMETER Experiment Name: At_14day_Shoots-Roots_Sub_P Parameter: Age (day) Value: 14
  misc_feature: MA Experiment 20000315 PARAMETER Experiment Name: At_14day_Shoots-Roots_Sub_P Parameter: Organism Value: A. thaliana
  misc_feature: MA Experiment 20000315 PARAMETER Experiment Name: At_14day_Shoots-Roots_Sub_P Parameter: Plant Line Value: WS
  misc_feature: MA Experiment 20000315 PARAMETER Experiment Name: At_14day_Shoots-Roots_Sub_P Parameter: Tissue Value: Shoots vs. Whole Plant
  misc_feature: MA Experiment ID: 20000355 Result: Up-regulated in Transcription
  misc_feature: MA Experiment 20000355 PARAMETER Experiment Name: At_Siliques_Sub_P Parameter: Age (day) Value: 21
  misc_feature: MA Experiment 20000355 PARAMETER Experiment Name: At_Siliques_Sub_P Parameter: Organism Value: A. thaliana
  misc_feature: MA Experiment 20000355 PARAMETER Experiment Name: At_Siliques_Sub_P Parameter: Plant Line Value: WS
  misc_feature: MA Experiment 20000355 PARAMETER Experiment Name: At_Siliques_Sub_P Parameter: Tissue Value: Less Than 5mm Siliques vs. Whole Plant
actagtaagtagtctcttgtgttttgttttgcatcggccgtcccaaacctgaggatttctctgttcagctagagcgaaaccctagattcacatttgagctgagagatgctgcgtgtagcagggaggaggcttttctctgtctcgcagagatcttcgactgcgacctccttcgtcgtctcccgtgaccataccctttccgatggtggcggcgactcctcttcagctcccagatccctcccctctgcagatctctcatcttaccaccgtagccttatcagaggcttctcttctcaagtccttgctcaaggaaatgagataggttttggttcagaagtcccagccacagtcgaagctgtcaaaacgcctaactcaaagattgtctatgatgaccataaccatgagcgttacccacctggtgaccctagcaagcgtgcattcgcctattttgtcttgtcgggtgggaggtttgtttatgcctctgtcctccgcctgcttgttttgaagcttattgtgagcatgtctgcaagtaaagatgtccttgcccttgcatcccttgaggttgacctagggagcatagaaccaggaactaccgtgacagtcaagtggcgtggaaagcccgtcttcatcaggcgaagaacagaagatgacatcaagctggccaatagtgtggatgttggatccctgagggacccacaagaagactcggttagggtcaagaatccagaatggttagtggttgttggagtgtgcactcatttggggtgcatccccttgcctaatgctggtgattatggtggttggttttgtccgtgtcacggatcacattacgatatatctggaagaattaggaaaggtcctgcaccatacaacctggaagtaccaacctacagcttcctggaagagaataagttactcatcggttgattaataaaagcacaacagtcaagagtctggatctgaatgatgatcttcacttgttctttttttcttttaattaatattttccggcatgttagagcaagattgacttgtttttgctgaataatacaaacttgtgatttttgtttgaagtatactcaatcttcgtttatc

SEQ ID NO: 26036 - protein, 272 aa, Arabidopsis thaliana
  peptide (1)..(272): Ceres Seq. ID no. 12327524
  misc_feature (172)..(268): Pfam Name: Rieske [2Fe-2S] domain Pfam Description: Rieske [2Fe-2S] domain
  misc_feature (1)..(272): Homolog of NCBI NO: 1717953 NR Description: Ubiquinol-cytochrome C reductase iron-sulfur
  misc_feature (1)..(272): Homolog of NCBI NO: 1717951 NR Description: Ubiquinol-cytochrome C reductase iron-sulfur
  misc_feature (1)..(272): Homolog of NCBI NO: 1717950 NR Description: Ubiquinol-cytochrome C reductase iron-sulfur
  misc_feature (1)..(272): Homolog of NCBI NO: 586145 NR Description: Ubiquinol-cytochrome C reductase iron-sulfur
  misc_feature (1)..(272): Homolog of NCBI NO: 1076675 NR Description: ubiquinol-cytochrome-c reductase (EC 1.10.2.2)
  misc_feature (72)..(272): Homolog of NCBI NO: 11248861 NR Description: ubiquinol-cytochrome-c reductase (EC 1.10.2.2)
  misc_feature (1)..(272): Homolog of NCBI NO: 21554278 NR Description: ubiquinol--cytochrome-c reductase-like protein
  misc_feature (1)..(272): Homolog of NCBI NO: 15240627 NR Description: ubiquinol--cytochrome-c reductase - like protein
  misc_feature (1)..(272): Homolog of NCBI NO: 21553507 NR Description: ubiquinol--cytochrome-c reductase-like protein
  misc_feature (1)..(272): Homolog of NCBI NO: 18417067 NR Description: ubiquinol--cytochrome-c reductase - like protein
MLRVAGRRLFSVSQRSSTATSFVVSRDHTLSDGGGDSSSAPRSLPSADLSSYHRSLIRGFSSQVLAQGNEIGFGSEVPATVEAVKTPNSKIVYDDHNHERYPPGDPSKRAFAYFVLSGGRFVYASVLRLLVLKLIVSMSASKDVLALASLEVDLGSIEPGTTVTVKWRGKPVFIRRRTEDDIKLANSVDVGSLRDPQEDSVRVKNPEWLVVVGVCTHLGCIPLPNAGDYGGWFCPCHGSHYDISGRIRKGPAPYNLEVPTYSFLEENKLLIG

SEQ ID NO: 26037 - DNA, 1251 bp, Arabidopsis thaliana
  misc_feature (1)..(1251): Ceres Seq. ID no. 12327166
  misc_feature: MA Experiment ID: 108461 Result: Up-regulated in Transcription
  misc_feature: MA Experiment 108461 PARAMETER Experiment Name: At_Germinating_Seeds_cDNA_P Parameter: Age (day) Value: 1 vs. 0
  misc_feature: MA Experiment 108461 PARAMETER Experiment Name: At_Germinating_Seeds_cDNA_P Parameter: Tissue Value: Germinating Seeds
  misc_feature: MA Experiment ID: 108463 Result: Up-regulated in Transcription
  misc_feature: MA Experiment 108463 PARAMETER Experiment Name: At_Germinating_Seeds_cDNA_P Parameter: Age (day) Value: 3 vs. 0
  misc_feature: MA Experiment 108463 PARAMETER Experiment Name: At_Germinating_Seeds_cDNA_P Parameter: Tissue Value: Germinating Seeds
  misc_feature: MA Experiment ID: 108577 Result: Down-regulated in Transcription
  misc_feature: MA Experiment 108577 PARAMETER Experiment Name: At_42deg_Heat_cDNA_P Parameter: Temperature (deg C) Value: 42 vs. 22
  misc_feature: MA Experiment 108577 PARAMETER Experiment Name: At_42deg_Heat_cDNA_P Parameter: Timepoint (hr) Value: 6
  misc_feature: MA Experiment 108577 PARAMETER Experiment Name: At_42deg_Heat_cDNA_P Parameter: Tissue Value: Aerial
  misc_feature: MA Experiment ID: 20000069 Result: Up-regulated in Transcription
  misc_feature: MA Experiment 20000069 PARAMETER Experiment Name: At_100uM_ABA_Mutants_cDNA_P Parameter: Plant Line Value: CS23
  misc_feature: MA Experiment 20000069 PARAMETER Experiment Name: At_100uM_ABA_Mutants_cDNA_P Parameter: Timepoint (hr) Value: 6
  misc_feature: MA Experiment 20000069 PARAMETER Experiment Name: At_100uM_ABA_Mutants_cDNA_P Parameter: Tissue Value: Aerial
  misc_feature: MA Experiment 20000069 PARAMETER Experiment Name: At_100uM_ABA_Mutants_cDNA_P Parameter: Treatment Value: 100uM ABA vs. No Treatment
  misc_feature: MA Experiment ID: 20000111 Result: Down-regulated in Transcription
  misc_feature: MA Experiment 20000111 PARAMETER Experiment Name: At_42deg_Heat_cDNA_P Parameter: Temperature (deg C) Value: 42 vs. 22
  misc_feature: MA Experiment 20000111 PARAMETER Experiment Name: At_42deg_Heat_cDNA_P Parameter: Timepoint (hr) Value: 6
  misc_feature: MA Experiment 20000111 PARAMETER Experiment Name: At_42deg_Heat_cDNA_P Parameter: Tissue Value: Aerial
  misc_feature: MA Experiment ID: 20000113 Result: Down-regulated in Transcription
  misc_feature: MA Experiment 20000113 PARAMETER Experiment Name: At_42deg_Heat_cDNA_P Parameter: Temperature (deg C) Value: 42 vs. 22
  misc_feature: MA Experiment 20000113 PARAMETER Experiment Name: At_42deg_Heat_cDNA_P Parameter: Timepoint (hr) Value: 8
  misc_feature: MA Experiment 20000113 PARAMETER Experiment Name: At_42deg_Heat_cDNA_P Parameter: Tissue Value: Aerial
  misc_feature: MA Experiment ID: 20000179 Result: Up-regulated in Transcription
  misc_feature: MA Experiment 20000179 PARAMETER Experiment Name: At_Germinating_Seeds_P Parameter: Age (hr) Value: 6 vs. 0
  misc_feature: MA Experiment 20000179 PARAMETER Experiment Name: At_Germinating_Seeds_P Parameter: Tissue Value: Germinating Seeds
  misc_feature: MA Experiment ID: 20000180 Result: Up-regulated in Transcription
  misc_feature: MA Experiment 20000180 PARAMETER Experiment Name: At_Germinating_Seeds_P Parameter: Age (hr) Value: 24 vs. 0
  misc_feature: MA Experiment 20000180 PARAMETER Experiment Name: At_Germinating_Seeds_P Parameter: Tissue Value: Germinating Seeds
  misc_feature: MA Experiment ID: 20000214 Result: Down-regulated in Transcription
  misc_feature: MA Experiment 20000214 PARAMETER Experiment Name: At_4deg_Cold_P Parameter: Timepoint (hr) Value: 6
  misc_feature: MA Experiment ID: 20000227 Result: Up-regulated in Transcription
  misc_feature: MA Experiment 20000227 PARAMETER Experiment Name: At_Root-Tips-vs-Tops_P Parameter: Tissue Value: Root Tips vs. Root Tops
accctctgttttgtttctccccaataaaaaaaatctcaatcccaatcacttcgcttctaatcttaaagcctttaatttagtcttcgagccctctaatggcggatcagagcaaaaacactccagagatcttcgagctcaacaatggcaccatgcaggtcaagatctcaaactacggcaccaccatcacctctttgtctgttcccgacaagaacgggaaactgggggatgtagttctcggattcgactcggtggatccatatgtgaaagggcttgcaccatactttgggtgcattgttggtcgtgtggcaaatcggatcaaggagggaaaattcagtctcaatggagttaactacactttgcctatcaacaagcctcctaatagtctccacggtggtaacaagggtttcgataagaagatatgggaagttgcagggcacaagagagacggcgaaaaacctttcatcactttcaaatatcacagtgccgatggagaagaaggttaccctggtgcggtttctgtcacggcgacatacactctcacgtcagccacgacaatgagacttgacatggaagctgttccagagaacaaagatactcccatcaacttagctcaacatacatactggaacttagcaggtcatgactcaggaaacattctagaccataagattcagatatgggggtctcatatcacgccggttgacgaatacacagttcctacaggagagatcttgcctgtaaagggaactcctttcgatttcactgaggagaagcggataggcgagtctattggagaggttggtatcggatacgatcataactacgtgttggactgtcctgatcaagagaaggaggggctgaaacacgcagcgaagctcagtgatgctgctagctcaagggtactgaacttgtggaccaatgtgccgggaatgcagttttataccgggaactatgtgaatggagtggttgggaaagggaatgcggtttacgggaaacatgcgggtgtgtgccttgagacgcagggattcccgaacgcgattaaccagtcgaatttcccgtctgttgtggttaaggctggtgagaagtacaatcacacgatgctgtttgagttttcagcttgagtttatagatggacgttttaggtgttagatgatgggaataaagggccggttcatttgattcactgggctggaaaaagagtgattttaattttatctctttgggggagaataataaaaccaaactgtttac

SEQ ID NO: 26038 - protein, 341 aa, Arabidopsis thaliana
  peptide (1)..(341): Ceres Seq. ID no. 12327167
  misc_feature (10)..(338): Pfam Name: Aldose 1-epimerase Pfam Description: Aldose 1-epimerase
  misc_feature (6)..(340): Homolog of NCBI NO: 40882679 NR Description: putative aldose 1-epimerase
  misc_feature (11)..(340): Homolog of NCBI NO: 15824565 NR Description: non-cell-autonomous protein pathway1;
  misc_feature (3)..(340): Homolog of NCBI NO: 15242223 NR Description: putative aldose 1-epimerase - like protein
  misc_feature (11)..(340): Homolog of NCBI NO: 15824567 NR Description: non-cell-autonomous protein pathway2;
  misc_feature (11)..(340): Homolog of NCBI NO: 7430313 NR Description: probable aldose 1-epimerase (EC 5.1.3.3) - common
  misc_feature (1)..(341): Homolog of NCBI NO: 21537069 NR Description: aldose 1-epimerase-like protein [Arabidopsis
  misc_feature (1)..(341): Homolog of NCBI NO: 15228261 NR Description: aldose 1-epimerase - like protein
  misc_feature (10)..(341): Homolog of NCBI NO: 37531218 NR Description: putative aldose 1-epimerase - like protein
  misc_feature (19)..(341): Homolog of NCBI NO: 14532616 NR Description: putative aldose 1-epimerase [Arabidopsis
  misc_feature (1)..(341): Homolog of NCBI NO: 30684727 NR Description: aldose 1-epimerase family [Arabidopsis thaliana]
MADQSKNTPEIFELNNGTMQVKISNYGTTITSLSVPDKNGKLGDVVLGFDSVDPYVKGLAPYFGCIVGRVANRIKEGKFSLNGVNYTLPINKPPNSLHGGNKGFDKKIWEVAGHKRDGEKPFITFKYHSADGEEGYPGAVSVTATYTLTSATTMRLDMEAVPENKDTPINLAQHTYWNLAGHDSGNILDHKIQIWGSHITPVDEYTVPTGEILPVKGTPFDFTEEKRIGESIGEVGIGYDHNYVLDCPDQEKEGLKHAAKLSDAASSRVLNLWTNVPGMQFYTGNYVNGVVGKGNAVYGKHAGVCLETQGFPNAINQSNFPSVVVKAGEKYNHTMLFEFSA

SEQ ID NO: 26039 - protein, 323 aa, Arabidopsis thaliana
  peptide (1)..(323): Ceres Seq. ID no. 12327168
  misc_feature (1)..(320): Pfam Name: Aldose 1-epimerase Pfam Description: Aldose 1-epimerase
  misc_feature (1)..(322): Homolog of NCBI NO: 40882679 NR Description: putative aldose 1-epimerase
  misc_feature (1)..(322): Homolog of NCBI NO: 15824565 NR Description: non-cell-autonomous protein pathway1;
  misc_feature (1)..(322): Homolog of NCBI NO: 15242223 NR Description: putative aldose 1-epimerase - like protein
  misc_feature (1)..(322): Homolog of NCBI NO: 15824567 NR Description: non-cell-autonomous protein pathway2;
  misc_feature (1)..(322): Homolog of NCBI NO: 7430313 NR Description: probable aldose 1-epimerase (EC 5.1.3.3) - common
  misc_feature (1)..(323): Homolog of NCBI NO: 21537069 NR Description: aldose 1-epimerase-like protein [Arabidopsis
  misc_feature (1)..(323): Homolog of NCBI NO: 15228261 NR Description: aldose 1-epimerase - like protein
  misc_feature (1)..(323): Homolog of NCBI NO: 37531218 NR Description: putative aldose 1-epimerase - like protein
  misc_feature (1)..(323): Homolog of NCBI NO: 14532616 NR Description: putative aldose 1-epimerase [Arabidopsis
  misc_feature (1)..(323): Homolog of NCBI NO: 30684727 NR Description: aldose 1-epimerase family [Arabidopsis thaliana]
MQVKISNYGTTITSLSVPDKNGKLGDVVLGFDSVDPYVKGLAPYFGCIVGRVANRIKEGKFSLNGVNYTLPINKPPNSLHGGNKGFDKKIWEVAGHKRDGEKPFITFKYHSADGEEGYPGAVSVTATYTLTSATTMRLDMEAVPENKDTPINLAQHTYWNLAGHDSGNILDHKIQIWGSHITPVDEYTVPTGEILPVKGTPFDFTEEKRIGESIGEVGIGYDHNYVLDCPDQEKEGLKHAAKLSDAASSRVLNLWTNVPGMQFYTGNYVNGVVGKGNAVYGKHAGVCLETQGFPNAINQSNFPSVVVKAGEKYNHTMLFEFSA

SEQ ID NO: 26040 - protein, 188 aa, Arabidopsis thaliana
  peptide (1)..(188): Ceres Seq. ID no. 12327169
  misc_feature (1)..(185): Pfam Name: Aldose 1-epimerase Pfam Description: Aldose 1-epimerase
  misc_feature (1)..(187): Homolog of NCBI NO: 40882679 NR Description: putative aldose 1-epimerase
  misc_feature (1)..(187): Homolog of NCBI NO: 15824565 NR Description: non-cell-autonomous protein pathway1;
  misc_feature (1)..(187): Homolog of NCBI NO: 15242223 NR Description: putative aldose 1-epimerase - like protein
  misc_feature (1)..(187): Homolog of NCBI NO: 15824567 NR Description: non-cell-autonomous protein pathway2;
  misc_feature (1)..(187): Homolog of NCBI NO: 7430313 NR Description: probable aldose 1-epimerase (EC 5.1.3.3) - common
  misc_feature (1)..(188): Homolog of NCBI NO: 21537069 NR Description: aldose 1-epimerase-like protein [Arabidopsis
  misc_feature (1)..(188): Homolog of NCBI NO: 15228261 NR Description: aldose 1-epimerase - like protein
  misc_feature (1)..(188): Homolog of NCBI NO: 37531218 NR Description: putative aldose 1-epimerase - like protein
  misc_feature (1)..(188): Homolog of NCBI NO: 14532616 NR Description: putative aldose 1-epimerase [Arabidopsis
  misc_feature (1)..(188): Homolog of NCBI NO: 30684727 NR Description: aldose 1-epimerase family [Arabidopsis thaliana]
MRLDMEAVPENKDTPINLAQHTYWNLAGHDSGNILDHKIQIWGSHITPVDEYTVPTGEILPVKGTPFDFTEEKRIGESIGEVGIGYDHNYVLDCPDQEKEGLKHAAKLSDAASSRVLNLWTNVPGMQFYTGNYVNGVVGKGNAVYGKHAGVCLETQGFPNAINQSNFPSVVVKAGEKYNHTMLFEFSA

SEQ ID NO: 26041 - DNA, 946 bp, Arabidopsis thaliana
  misc_feature (1)..(946): Ceres Seq. ID no. 12561965
  misc_feature: MA Experiment ID: 108462 Result: Up-regulated in Transcription
  misc_feature: MA Experiment 108462 PARAMETER Experiment Name: At_Germinating_Seeds_cDNA_P Parameter: Age (day) Value: 2 vs. 0
  misc_feature: MA Experiment 108462 PARAMETER Experiment Name: At_Germinating_Seeds_cDNA_P Parameter: Tissue Value: Germinating Seeds
  misc_feature: MA Experiment ID: 108464 Result: Up-regulated in Transcription
  misc_feature: MA Experiment 108464 PARAMETER Experiment Name: At_Germinating_Seeds_cDNA_P Parameter: Age (day) Value: 4 vs. 0
  misc_feature: MA Experiment 108464 PARAMETER Experiment Name: At_Germinating_Seeds_cDNA_P Parameter: Tissue Value: Germinating Seeds
  misc_feature: MA Experiment ID: 108488 Result: Down-regulated in Transcription
  misc_feature: MA Experiment ID: 108573 Result: Up-regulated in Transcription
  misc_feature: MA Experiment 108573 PARAMETER Experiment Name: At_Drought_cDNA_P Parameter: Timepoint (hr) Value: 6
  misc_feature: MA Experiment 108573 PARAMETER Experiment Name: At_Drought_cDNA_P Parameter: Tissue Value: Aerial
  misc_feature: MA Experiment 108573 PARAMETER Experiment Name: At_Drought_cDNA_P Parameter: Treatment Value: Drought vs. No Drought
  misc_feature: MA Experiment ID: 108585 Result: Up-regulated in Transcription
  misc_feature: MA Experiment 108585 PARAMETER Experiment Name: At_5mM_NaNP_cDNA_P Parameter: Timepoint (hr) Value: 6
  misc_feature: MA Experiment 108585 PARAMETER Experiment Name: At_5mM_NaNP_cDNA_P Parameter: Tissue Value: Aerial
  misc_feature: MA Experiment 108585 PARAMETER Experiment Name: At_5mM_NaNP_cDNA_P Parameter: Treatment Value: null
  misc_feature: MA Experiment ID: 108607 Result: Up-regulated in Transcription
  misc_feature: MA Experiment 108607 PARAMETER Experiment Name: At_100uM_ABA_cDNA_P Parameter: Timepoint (hr) Value: 4
  misc_feature: MA Experiment 108607 PARAMETER Experiment Name: At_100uM_ABA_cDNA_P Parameter: Tissue Value: Aerial
  misc_feature: MA Experiment 108607 PARAMETER Experiment Name: At_100uM_ABA_cDNA_P Parameter: Treatment Value: 100uM ABA vs. No Treatment
  misc_feature: MA Experiment ID: 108668 Result: Up-regulated in Transcription
  misc_feature: MA Experiment 108668 PARAMETER Experiment Name: At_2mM_SA_cDNA_P Parameter: Plant Line Value: WS
  misc_feature: MA Experiment 108668 PARAMETER Experiment Name: At_2mM_SA_cDNA_P Parameter: Timepoint (hr) Value: 6
  misc_feature: MA Experiment 108668 PARAMETER Experiment Name: At_2mM_SA_cDNA_P Parameter: Treatment Value: 2mM SA vs. No Treatment
  misc_feature: MA Experiment ID: 20000072 Result: Up-regulated in Transcription
  misc_feature: MA Experiment 20000072 PARAMETER Experiment Name: At_100uM_ABA_Mutants_cDNA_P Parameter: Plant Line Value: CS8105
  misc_feature: MA Experiment 20000072 PARAMETER Experiment Name: At_100uM_ABA_Mutants_cDNA_P Parameter: Timepoint (hr) Value: 6
  misc_feature: MA Experiment 20000072 PARAMETER Experiment Name: At_100uM_ABA_Mutants_cDNA_P Parameter: Tissue Value: Aerial
  misc_feature: MA Experiment 20000072 PARAMETER Experiment Name: At_100uM_ABA_Mutants_cDNA_P Parameter: Treatment Value: 100uM ABA vs. No Treatment
  misc_feature: MA Experiment ID: 20000180 Result: Up-regulated in Transcription
  misc_feature: MA Experiment 20000180 PARAMETER Experiment Name: At_Germinating_Seeds_P Parameter: Age (hr) Value: 24 vs. 0
  misc_feature: MA Experiment 20000180 PARAMETER Experiment Name: At_Germinating_Seeds_P Parameter: Tissue Value: Germinating Seeds
  misc_feature: MA Experiment ID: 20000182 Result: Up-regulated in Transcription
  misc_feature: MA Experiment 20000182 PARAMETER Experiment Name: At_2mM_SA_P Parameter: Age (day) Value: 14
  misc_feature: MA Experiment 20000182 PARAMETER Experiment Name: At_2mM_SA_P Parameter: Organism Value: A. thaliana
  misc_feature: MA Experiment 20000182 PARAMETER Experiment Name: At_2mM_SA_P Parameter: Plant Line Value: WS
  misc_feature: MA Experiment 20000182 PARAMETER Experiment Name: At_2mM_SA_P Parameter: Timepoint (hr) Value: 6
  misc_feature: MA Experiment 20000182 PARAMETER Experiment Name: At_2mM_SA_P Parameter: Tissue Value: Aerial
  misc_feature: MA Experiment 20000182 PARAMETER Experiment Name: At_2mM_SA_P Parameter: Treatment Value: 2mM SA vs. No Treatment
  misc_feature: MA Experiment ID: 20000437 Result: Up-regulated in Transcription
  misc_feature: MA Experiment 20000437 PARAMETER Experiment Name: At_Drought_P Parameter: Age (day) Value: 8
  misc_feature: MA Experiment 20000437 PARAMETER Experiment Name: At_Drought_P Parameter: Organism Value: A. thaliana
  misc_feature: MA Experiment 20000437 PARAMETER Experiment Name: At_Drought_P Parameter: Plant Line Value: WS
  misc_feature: MA Experiment 20000437 PARAMETER Experiment Name: At_Drought_P Parameter: Timepoint (hr) Value: 24
  misc_feature: MA Experiment 20000437 PARAMETER Experiment Name: At_Drought_P Parameter: Tissue Value: Whole Plant
  misc_feature: MA Experiment 20000437 PARAMETER Experiment Name: At_Drought_P Parameter: Treatment Value: Drought vs. No Drought
  misc_feature: MA Experiment ID: 20000794 Result: Up-regulated in Transcription
  misc_feature: MA Experiment 20000794 PARAMETER Experiment Name: At_Petals_P Parameter: Age (day) Value: 23-25 days
  misc_feature: MA Experiment 20000794 PARAMETER Experiment Name: At_Petals_P Parameter: Plant Line Value: WS
  misc_feature: MA Experiment 20000794 PARAMETER Experiment Name: At_Petals_P Parameter: Tissue Value: Petals vs. Whole plant
  misc_feature: MA Experiment ID: 20001905 Result: Up-regulated in Transcription
  misc_feature: MA Experiment 20001905 PARAMETER Experiment Name: At_Drought_Reproduction_P Parameter: Age (day) Value: 40
  misc_feature: MA Experiment 20001905 PARAMETER Experiment Name: At_Drought_Reproduction_P Parameter: Organism Value: A. thaliana
  misc_feature: MA Experiment 20001905 PARAMETER Experiment Name: At_Drought_Reproduction_P Parameter: Plant Line Value: WS
  misc_feature: MA Experiment 20001905 PARAMETER Experiment Name: At_Drought_Reproduction_P Parameter: Timepoint (day) Value: 10
  misc_feature: MA Experiment 20001905 PARAMETER Experiment Name: At_Drought_Reproduction_P Parameter: Tissue Value: Rosettes
  misc_feature: MA Experiment 20001905 PARAMETER Experiment Name: At_Drought_Reproduction_P Parameter: Treatment Value: Drought vs. No Drought
aagccaaagccacatagaagaaaaaaaaaagaacattcacgtctctctcgtttttttggccgacgacgatcgctgaattgactgccggagattcctttaatcgtcagattctcgttgagggataatgaatcctgaatatgactatctgttcaagcttctgcttattggtgattctggtgttggaaaatcatgcttgcttctaagatttgctgatgattcttacctggatagctacataagcaccattggtgttgactttaaaattcgcacagttgagcaggacggaaagaccatcaaactccagatctgggacacagcaggccaagaacgtttcaggacaatcactagcagctactacagaggagctcatgggatcattgtcacttatgatgtcacagacctagagagcttcaacaacgtcaaacaatggctgaatgaaattgaccgttacgctagcgaaaatgtgaacaagctactggttgggaacaagaacgatctcacttcacagaaagttgtatccactgagacagctaaggcttttgcagatgaacttgggatcccattcttggaaacaagtgctaaaaatgcaaccaatgtggaagaagctttcatggctatgactgctgcaattaagacaagaatggctagccaaccagctggaggtgccaagccaccaacggtccagatccgtggacagccagtgaaccagcaatcaggctgttgttcttcttgattcaattagtcaccactcctctttcgatcatcacaccattatgatcatttgtttgcattgcatgttagacttctccaaattaacaactctttggatccttttgcttgtttttcatttgctttcttttgatccgattcttttctgatgtacgttgaagtttgaaacccataacttctatatagtaaaaggtcttttatgcaaataatgtagagc

SEQ ID NO: 26042 - protein, 202 aa, Arabidopsis thaliana
  peptide (1)..(202): Ceres Seq. ID no. 12561966
  misc_feature (10)..(171): Pfam Name: Ras family Pfam Description: Ras family
  misc_feature (1)..(202): Homolog of NCBI NO: 466172 NR Description: GTP-BINDING PROTEIN YPTM2
  misc_feature (1)..(202): Homolog of NCBI NO: 1616614 NR Description: small GTP-binding protein [Nicotiana
  misc_feature (1)..(202): Homolog of NCBI NO: 14140133 NR Description: putative GTP-binding protein [Oryza sativa]
  misc_feature (1)..(202): Homolog of NCBI NO: 4586580 NR Description: rab-type small GTP-binding protein [Cicer
  misc_feature (1)..(202): Homolog of NCBI NO: 303750 NR Description: GTP-binding protein [Pisum sativum]
  misc_feature (1)..(202): Homolog of NCBI NO: 1370166 NR Description: RAB1C [Lotus japonicus]
  misc_feature (6)..(202): Homolog of NCBI NO: 7438375 NR Description: GTP-binding protein - Arabidopsis thaliana
  misc_feature (1)..(202): Homolog of NCBI NO: 16974365 NR Description: AT4g17530/dl4800c [Arabidopsis thaliana]
  misc_feature (1)..(202): Homolog of NCBI NO: 15236555 NR Description: ras-related small GTP-binding protein RAB1c
  misc_feature (1)..(202): Homolog of NCBI NO: 18422766 NR Description: ras-related small GTP-binding protein-like
MNPEYDYLFKLLLIGDSGVGKSCLLLRFADDSYLDSYISTIGVDFKIRTVEQDGKTIKLQIWDTAGQERFRTITSSYYRGAHGIIVTYDVTDLESFNNVKQWLNEIDRYASENVNKLLVGNKNDLTSQKVVSTETAKAFADELGIPFLETSAKNATNVEEAFMAMTAAIKTRMASQPAGGAKPPTVQIRGQPVNQQSGCCSS

SEQ ID NO: 26043 - DNA, 605 bp, Arabidopsis thaliana
  misc_feature (1)..(605): Ceres Seq. ID no. 12323302
  misc_feature: MA Experiment ID: 108434 Result: Up-regulated in Transcription
  misc_feature: MA Experiment 108434 PARAMETER Experiment Name: At_Root_Tips_cDNA_P Parameter: Tissue Value: Root Tips
  misc_feature: MA Experiment ID: 108435 Result: Up-regulated in Transcription
  misc_feature: MA Experiment 108435 PARAMETER Experiment Name: At_stm_Mutants_cDNA_P Parameter: Plant Line Value: wt Landsburg vs stm
  misc_feature: MA Experiment 108435 PARAMETER Experiment Name: At_stm_Mutants_cDNA_P Parameter: Tissue Value: Shoot Apical Meristem Region
  misc_feature: MA Experiment ID: 108462 Result: Down-regulated in Transcription
  misc_feature: MA Experiment 108462 PARAMETER Experiment Name: At_Germinating_Seeds_cDNA_P Parameter: Age (day) Value: 2 vs. 0
  misc_feature: MA Experiment 108462 PARAMETER Experiment Name: At_Germinating_Seeds_cDNA_P Parameter: Tissue Value: Germinating Seeds
  misc_feature: MA Experiment ID: 108463 Result: Down-regulated in Transcription
  misc_feature: MA Experiment 108463 PARAMETER Experiment Name: At_Germinating_Seeds_cDNA_P Parameter: Age (day) Value: 3 vs. 0
  misc_feature: MA Experiment 108463 PARAMETER Experiment Name: At_Germinating_Seeds_cDNA_P Parameter: Tissue Value: Germinating Seeds
  misc_feature: MA Experiment ID: 108464 Result: Down-regulated in Transcription
  misc_feature: MA Experiment 108464 PARAMETER Experiment Name: At_Germinating_Seeds_cDNA_P Parameter: Age (day) Value: 4 vs. 0
  misc_feature: MA Experiment 108464 PARAMETER Experiment Name: At_Germinating_Seeds_cDNA_P Parameter: Tissue Value: Germinating Seeds
  misc_feature: MA Experiment ID: 108561 Result: Down-regulated in Transcription
  misc_feature: MA Experiment 108561 PARAMETER Experiment Name: At_100uM_ABA_cDNA_P Parameter: Timepoint (hr) Value: 6
  misc_feature: MA Experiment 108561 PARAMETER Experiment Name: At_100uM_ABA_cDNA_P Parameter: Tissue Value: Aerial
  misc_feature: MA Experiment 108561 PARAMETER Experiment Name: At_100uM_ABA_cDNA_P Parameter: Treatment Value: 100uM ABA vs. No Treatment
  misc_feature: MA Experiment ID: 108573 Result: Down-regulated in Transcription
  misc_feature: MA Experiment 108573 PARAMETER Experiment Name: At_Drought_cDNA_P Parameter: Timepoint (hr) Value: 6
  misc_feature: MA Experiment 108573 PARAMETER Experiment Name: At_Drought_cDNA_P Parameter: Tissue Value: Aerial
  misc_feature: MA Experiment 108573 PARAMETER Experiment Name: At_Drought_cDNA_P Parameter: Treatment Value: Drought vs. No Drought
  misc_feature: MA Experiment ID: 20000087 Result: Down-regulated in Transcription
  misc_feature: MA Experiment 20000087 PARAMETER Experiment Name: At_100uM_ABA_Mutants_cDNA_P Parameter: Plant Line Value: WS
  misc_feature: MA Experiment 20000087 PARAMETER Experiment Name: At_100uM_ABA_Mutants_cDNA_P Parameter: Timepoint (hr) Value: 6
  misc_feature: MA Experiment 20000087 PARAMETER Experiment Name: At_100uM_ABA_Mutants_cDNA_P Parameter: Tissue Value: Aerial
  misc_feature: MA Experiment 20000087 PARAMETER Experiment Name: At_100uM_ABA_Mutants_cDNA_P Parameter: Treatment Value: 100uM ABA vs. No Treatment
  misc_feature: MA Experiment ID: 20000171 Result: Down-regulated in Transcription
  misc_feature: MA Experiment 20000171 PARAMETER Experiment Name: At_42deg_Heat_P Parameter: Age (day) Value: 14
  misc_feature: MA Experiment 20000171 PARAMETER Experiment Name: At_42deg_Heat_P Parameter: Organism Value: A. thaliana
  misc_feature: MA Experiment 20000171 PARAMETER Experiment Name: At_42deg_Heat_P Parameter: Plant Line Value: WS
  misc_feature: MA Experiment 20000171 PARAMETER Experiment Name: At_42deg_Heat_P Parameter: Temperature (deg C) Value: 42 vs. 22
  misc_feature: MA Experiment 20000171 PARAMETER Experiment Name: At_42deg_Heat_P Parameter: Timepoint (hr) Value: 1
  misc_feature: MA Experiment 20000171 PARAMETER Experiment Name: At_42deg_Heat_P Parameter: Tissue Value: Aerial
  misc_feature: MA Experiment ID: 20000182 Result: Down-regulated in Transcription
  misc_feature: MA Experiment 20000182 PARAMETER Experiment Name: At_2mM_SA_P Parameter: Age (day) Value: 14
  misc_feature: MA Experiment 20000182 PARAMETER Experiment Name: At_2mM_SA_P Parameter: Organism Value: A. thaliana
  misc_feature: MA Experiment 20000182 PARAMETER Experiment Name: At_2mM_SA_P Parameter: Plant Line Value: WS
  misc_feature: MA Experiment 20000182 PARAMETER Experiment Name: At_2mM_SA_P Parameter: Timepoint (hr) Value: 6
  misc_feature: MA Experiment 20000182 PARAMETER Experiment Name: At_2mM_SA_P Parameter: Tissue Value: Aerial
  misc_feature: MA Experiment 20000182 PARAMETER Experiment Name: At_2mM_SA_P Parameter: Treatment Value: 2mM SA vs. No Treatment
  misc_feature: MA Experiment ID: 20000185 Result: Up-regulated in Transcription
  misc_feature: MA Experiment 20000185 PARAMETER Experiment Name: At_Roots__P Parameter: Age (day) Value: 7 vs. 21
  misc_feature: MA Experiment 20000185 PARAMETER Experiment Name: At_Roots__P Parameter: Organism Value: A. thaliana
  misc_feature: MA Experiment 20000185 PARAMETER Experiment Name: At_Roots__P Parameter: Tissue Value: Roots vs. Whole Plant
  misc_feature: MA Experiment ID: 20000227 Result: Up-regulated in Transcription
  misc_feature: MA Experiment 20000227 PARAMETER Experiment Name: At_Root-Tips-vs-Tops_P Parameter: Tissue Value: Root Tips vs. Root Tops
  misc_feature: MA Experiment ID: 20000234 Result: Up-regulated in Transcription
  misc_feature: MA Experiment 20000234 PARAMETER Experiment Name: At_Siliques_P Parameter: Age (day) Value: 21
  misc_feature: MA Experiment 20000234 PARAMETER Experiment Name: At_Siliques_P Parameter: Organism Value: A. thaliana
  misc_feature: MA Experiment 20000234 PARAMETER Experiment Name: At_Siliques_P Parameter: Plant Line Value: WS
  misc_feature: MA Experiment 20000234 PARAMETER Experiment Name: At_Siliques_P Parameter: Tissue Value: Less Than 5mm Siliques vs. Whole Plant
  misc_feature: MA Experiment ID: 20000235 Result: Up-regulated in Transcription
  misc_feature: MA Experiment 20000235 PARAMETER Experiment Name: At_Siliques_P Parameter: Age (day) Value: 21
  misc_feature: MA Experiment 20000235 PARAMETER Experiment Name: At_Siliques_P Parameter: Organism Value: A. thaliana
  misc_feature: MA Experiment 20000235 PARAMETER Experiment Name: At_Siliques_P Parameter: Plant Line Value: WS
  misc_feature: MA Experiment 20000235 PARAMETER Experiment Name: At_Siliques_P Parameter: Tissue Value: 5-10mm Siliques vs. Whole Plant
  misc_feature: MA Experiment ID: 20000264 Result: Up-regulated in Transcription
  misc_feature: MA Experiment 20000264 PARAMETER Experiment Name: At_Open_Flower_P Parameter: Age (day) Value: 21
  misc_feature: MA Experiment 20000264 PARAMETER Experiment Name: At_Open_Flower_P Parameter: Plant Line Value: WS
  misc_feature: MA Experiment 20000264 PARAMETER Experiment Name: At_Open_Flower_P Parameter: Tissue Value: Open Flower vs. Whole Plant
  misc_feature: MA Experiment ID: 20000265 Result: Up-regulated in Transcription
  misc_feature: MA Experiment 20000265 PARAMETER Experiment Name: At_Open_Flower_P Parameter: Age (day) Value: 21
  misc_feature: MA Experiment 20000265 PARAMETER Experiment Name: At_Open_Flower_P Parameter: Plant Line Value: WS
  misc_feature: MA Experiment 20000265 PARAMETER Experiment Name: At_Open_Flower_P Parameter: Tissue Value: Closed Flower vs. Whole Plant
  misc_feature: MA Experiment ID: 20000286 Result: Up-regulated in Transcription
  misc_feature: MA Experiment 20000286 PARAMETER Experiment Name: At_Open_Flower_P Parameter: Age (day) Value: 21
  misc_feature: MA Experiment 20000286 PARAMETER Experiment Name: At_Open_Flower_P Parameter: Plant Line Value: WS
  misc_feature: MA Experiment 20000286 PARAMETER Experiment Name: At_Open_Flower_P Parameter: Tissue Value: Half Open vs. Whole Plant
  misc_feature: MA Experiment ID: 20000436 Result: Down-regulated in Transcription
  misc_feature: MA Experiment 20000436 PARAMETER Experiment Name: At_Drought_P Parameter: Age (day) Value: 7
  misc_feature: MA Experiment 20000436 PARAMETER Experiment Name: At_Drought_P Parameter: Organism Value: A. thaliana
  misc_feature: MA Experiment 20000436 PARAMETER Experiment Name: At_Drought_P Parameter: Plant Line Value: WS
  misc_feature: MA Experiment 20000436 PARAMETER Experiment Name: At_Drought_P Parameter: Timepoint (hr) Value: 12
  misc_feature: MA Experiment 20000436 PARAMETER Experiment Name: At_Drought_P Parameter: Tissue Value: Whole Plant
  misc_feature: MA Experiment 20000436 PARAMETER Experiment Name: At_Drought_P Parameter: Treatment Value: Drought vs. No Drought
  misc_feature: MA Experiment ID: 20000437 Result: Down-regulated in Transcription
  misc_feature: MA Experiment 20000437 PARAMETER Experiment Name: At_Drought_P Parameter: Age (day) Value: 8
  misc_feature: MA Experiment 20000437 PARAMETER Experiment Name: At_Drought_P Parameter: Organism Value: A. thaliana
  misc_feature: MA Experiment 20000437 PARAMETER Experiment Name: At_Drought_P Parameter: Plant Line Value: WS
  misc_feature: MA Experiment 20000437 PARAMETER Experiment Name: At_Drought_P Parameter: Timepoint (hr) Value: 24
  misc_feature: MA Experiment 20000437 PARAMETER Experiment Name: At_Drought_P Parameter: Tissue Value: Whole Plant
  misc_feature: MA Experiment 20000437 PARAMETER Experiment Name: At_Drought_P Parameter: Treatment Value: Drought vs. No Drought
  misc_feature: MA Experiment ID: 20000438 Result: Up-regulated in Transcription
  misc_feature: MA Experiment 20000438 PARAMETER Experiment Name: At_Shoots__P Parameter: Age (day) Value: 14
  misc_feature: MA Experiment 20000438 PARAMETER Experiment Name: At_Shoots__P Parameter: Tissue Value: Shoots vs. Whole Plant
  misc_feature: MA Experiment ID: 20000439 Result: Up-regulated in Transcription
  misc_feature: MA Experiment 20000439 PARAMETER Experiment Name: At_Roots__P Parameter: Age (day) Value: 14 vs. 21
  misc_feature: MA Experiment 20000439 PARAMETER Experiment Name: At_Roots__P Parameter: Organism Value: A. thaliana
  misc_feature: MA Experiment 20000439 PARAMETER Experiment Name: At_Roots__P Parameter: Tissue Value: Roots vs. Whole Plant
  misc_feature: MA Experiment ID: 20000453 Result: Down-regulated in Transcription
  misc_feature: MA Experiment 20000453 PARAMETER Experiment Name: At_100uM_ABA_P Parameter: Age (day) Value: 15
  misc_feature: MA Experiment 20000453 PARAMETER Experiment Name: At_100uM_ABA_P Parameter: Organism Value: A. thaliana
  misc_feature: MA Experiment 20000453 PARAMETER Experiment Name: At_100uM_ABA_P Parameter: Plant Line Value: WS
  misc_feature: MA Experiment 20000453 PARAMETER Experiment Name: At_100uM_ABA_P Parameter: Timepoint (hr) Value: 24
  misc_feature: MA Experiment 20000453 PARAMETER Experiment Name: At_100uM_ABA_P Parameter: Tissue Value: Aerial
  misc_feature: MA Experiment 20000453 PARAMETER Experiment Name: At_100uM_ABA_P Parameter: Treatment Value: 100uM ABA vs. No Treatment
  misc_feature: MA Experiment ID: 20000456 Result: Up-regulated in Transcription
  misc_feature: MA Experiment 20000456 PARAMETER Experiment Name: At_100uM_BA_P Parameter: Age (day) Value: 14
  misc_feature: MA Experiment 20000456 PARAMETER Experiment Name: At_100uM_BA_P Parameter: Organism Value: A. thaliana
  misc_feature: MA Experiment 20000456 PARAMETER Experiment Name: At_100uM_BA_P Parameter: Plant Line Value: WS
  misc_feature: MA Experiment 20000456 PARAMETER Experiment Name: At_100uM_BA_P Parameter: Timepoint (hr) Value: 6
  misc_feature: MA Experiment 20000456 PARAMETER Experiment Name: At_100uM_BA_P Parameter: Tissue Value: Aerial
  misc_feature: MA Experiment 20000456 PARAMETER Experiment Name: At_100uM_BA_P Parameter: Treatment Value: 100uM BA vs. No Treatment
  misc_feature: MA Experiment ID: 20000709 Result: Up-regulated in Transcription
  misc_feature: MA Experiment 20000709 PARAMETER Experiment Name: At_15mM_NH4NO3_L-to-H_P Parameter: Age (hr) Value: 14
  misc_feature: MA Experiment 20000709 PARAMETER Experiment Name: At_15mM_NH4NO3_L-to-H_P Parameter: Organism Value: A. thaliana
  misc_feature: MA Experiment 20000709 PARAMETER Experiment Name: At_15mM_NH4NO3_L-to-H_P Parameter: Plant Line Value: WS
  misc_feature: MA Experiment 20000709 PARAMETER Experiment Name: At_15mM_NH4NO3_L-to-H_P Parameter: Timepoint (hr) Value: 4
  misc_feature: MA Experiment 20000709 PARAMETER Experiment Name: At_15mM_NH4NO3_L-to-H_P Parameter: Tissue Value: Aerial
  misc_feature: MA Experiment 20000709 PARAMETER Experiment Name: At_15mM_NH4NO3_L-to-H_P Parameter: Treatment Value: 15mM NH4NO3 vs. 30mM Mannitol
  misc_feature: MA Experiment ID: 20000794 Result: Down-regulated in Transcription
  misc_feature: MA Experiment 20000794 PARAMETER Experiment Name: At_Petals_P Parameter: Age (day) Value: 23-25 days
  misc_feature: MA Experiment 20000794 PARAMETER Experiment Name: At_Petals_P Parameter: Plant Line Value: WS
  misc_feature: MA Experiment 20000794 PARAMETER Experiment Name: At_Petals_P Parameter: Tissue Value: Petals vs. Whole plant
  misc_feature: MA Experiment ID: 20001557 Result: Up-regulated in Transcription
  misc_feature: MA Experiment 20001557 PARAMETER Experiment Name: At_Drought_Soil_Dry_P Parameter: Age (day) Value: 27
  misc_feature: MA Experiment 20001557 PARAMETER Experiment Name: At_Drought_Soil_Dry_P Parameter: Organism Value: A. thaliana
  misc_feature: MA Experiment 20001557 PARAMETER Experiment Name: At_Drought_Soil_Dry_P Parameter: Plant Line Value: WS
  misc_feature: MA Experiment 20001557 PARAMETER Experiment Name: At_Drought_Soil_Dry_P Parameter: Post Timepoint (hr) Value: 3
  misc_feature: MA Experiment 20001557 PARAMETER Experiment Name: At_Drought_Soil_Dry_P Parameter: Post-Treatment Value: Re-Water vs. No Drought
  misc_feature: MA Experiment 20001557 PARAMETER Experiment Name: At_Drought_Soil_Dry_P Parameter: Timepoint (day) Value: 13
  misc_feature: MA Experiment 20001557 PARAMETER Experiment Name: At_Drought_Soil_Dry_P Parameter: Treatment Value: Drought vs. No Drought
  misc_feature: MA Experiment ID: 20001558 Result: Up-regulated in Transcription
  misc_feature: MA Experiment 20001558 PARAMETER Experiment Name: At_Drought_Soil_Dry_P Parameter: Age (day) Value: 27
  misc_feature: MA Experiment 20001558 PARAMETER Experiment Name: At_Drought_Soil_Dry_P Parameter: Organism Value: A. thaliana
  misc_feature: MA Experiment 20001558 PARAMETER Experiment Name: At_Drought_Soil_Dry_P Parameter: Plant Line Value: WS
  misc_feature: MA Experiment 20001558 PARAMETER Experiment Name: At_Drought_Soil_Dry_P Parameter: Post Timepoint (hr) Value: 6
  misc_feature: MA Experiment 20001558 PARAMETER Experiment Name: At_Drought_Soil_Dry_P Parameter: Post-Treatment Value: Re-Water vs. No Drought
  misc_feature: MA Experiment 20001558 PARAMETER Experiment Name: At_Drought_Soil_Dry_P Parameter: Timepoint (day) Value: 13
  misc_feature: MA Experiment 20001558 PARAMETER Experiment Name: At_Drought_Soil_Dry_P Parameter: Treatment Value: Drought vs. No Drought
  misc_feature: MA Experiment ID: 20001560 Result: Up-regulated in Transcription
  misc_feature: MA Experiment 20001560 PARAMETER Experiment Name: At_Drought_Soil_Dry_P Parameter: Age (day) Value: 28
  misc_feature: MA Experiment 20001560 PARAMETER Experiment Name: At_Drought_Soil_Dry_P Parameter: Organism Value: A. thaliana
  misc_feature: MA Experiment 20001560 PARAMETER Experiment Name: At_Drought_Soil_Dry_P Parameter: Plant Line Value: WS
  misc_feature: MA Experiment 20001560 PARAMETER Experiment Name: At_Drought_Soil_Dry_P Parameter: Post Timepoint (hr) Value: None
  misc_feature: MA Experiment 20001560 PARAMETER Experiment Name: At_Drought_Soil_Dry_P Parameter: Post-Treatment Value: None
  misc_feature: MA Experiment 20001560 PARAMETER Experiment Name: At_Drought_Soil_Dry_P Parameter: Timepoint (day) Value: 14
  misc_feature: MA Experiment 20001560 PARAMETER Experiment Name: At_Drought_Soil_Dry_P Parameter: Treatment Value: Drought vs. No Drought
  misc_feature: Phenotype: ROSETTE LEAVES Disorganized Rosette-Disorganized Rosette
  misc_feature: Phenotype: ROSETTE LEAVES Shape-Serrate
  misc_feature: Phenotype: ROSETTE LEAVES Shape-Serrate
  misc_feature: Phenotype: WHOLE PLANT Color-Dark Green
  misc_feature: Phenotype: WHOLE PLANT Color-Dark Green
  misc_feature: Phenotype: CAULINE LEAVES Shape-Serrate
  misc_feature: Phenotype: CAULINE LEAVES Size-Large
  misc_feature: Phenotype: FERTILITY Fertility-Sterile
  misc_feature: Phenotype: ROSETTE LEAVES Other
  misc_feature: Phenotype: WHOLE PLANT Color-Dark Green
  misc_feature: Phenotype: INFLORESCENCE Height-Short
  misc_feature: Phenotype: FERTILITY Fertility-Reduced
tttctcaaacaagaaaatgcagatcttcgtgaaaaccctaacggggaagacaataaccttagaggtagaatcatcagacacaatcgacaatgtgaaagcgaagatccaagacaaggaaggaatcccaccggatcagcaacggttgatcttcgccggaaaacaattggaagatggaagaacactagctgattacaacatccagaaagagtcgacgcttcatttggttctacgtctgagaggaggtgcgaagaagaggaagaagaagacgtacacgaaacctaagaagattaagcatacgcacaagaaagtgaagctagcagttctgcagttttacaaggttgatggaagtgggaaagttcagaggttgaagaaagagtgtccttctgttagttgtggtcctggaactttcatggcgagtcatttcgataggcattattgtgggaaatgtggaactacttacgtgttcaagaaggctgatgaagagtaggttatgtctttttgcttttggaatttagattgttttttttttaattcagatattttgagatggttttatactattgagggatggtttaattgttgcataatacattatattatctttg

SEQ ID NO: 26044 - protein, 161 aa, Arabidopsis thaliana
  peptide (1)..(161): Ceres Seq. ID no. 12323303
  misc_feature (6)..(79): Pfam Name: Ubiquitin family Pfam Description: Ubiquitin family
  misc_feature (6)..(158): Homolog of NCBI NO: 279636 NR Description: ubiquitin / ribosomal protein S27a - tomato
  misc_feature (6)..(158): Homolog of NCBI NO: 25294256 NR Description: ubiquitin extension protein [imported] - common
  misc_feature (6)..(158): Homolog of NCBI NO: 25294255 NR Description: ubiquitin extension protein [imported] - potato
  misc_feature (6)..(158): Homolog of NCBI NO: 18252349 NR Description: ubiquitin extension protein [Pyrus communis]
  misc_feature (6)..(158): Homolog of NCBI NO: 34581769 NR Description: ubiquitin extension protein [Cucumis sativus]
  misc_feature (6)..(159): Homolog of NCBI NO: 541954 NR Description: ubiquitin/ribosomal protein S27a fusion protein -
  misc_feature (6)..(159): Homolog of NCBI NO: 541953 NR Description: ubiquitin/ribosomal protein S27a fusion protein -
  misc_feature (6)..(157): Homolog of NCBI NO: 18407264 NR Description: ubiquitin extension protein (UBQ6)
  misc_feature (6)..(161): Homolog of NCBI NO: 15228715 NR Description: ubiquitin extension protein (UBQ5)
  misc_feature (6)..(161): Homolog of NCBI NO: 15220742 NR Description: ubiquitin extension protein, putative
FSNKKMQIFVKTLTGKTITLEVESSDTIDNVKAKIQDKEGIPPDQQRLIFAGKQLEDGRTLADYNIQKESTLHLVLRLRGGAKKRKKKTYTKPKKIKHTHKKVKLAVLQFYKVDGSGKVQRLKKECPSVSCGPGTFMASHFDRHYCGKCGTTYVFKKADEE

SEQ ID NO: 26045 - protein, 156 aa, Arabidopsis thaliana
  peptide (1)..(156): Ceres Seq. ID no. 12323304
  misc_feature (1)..(74): Pfam Name: Ubiquitin family Pfam Description: Ubiquitin family
  misc_feature (1)..(156): Homolog of NCBI NO: 15228715 NR Description: ubiquitin extension protein (UBQ5)
  misc_feature (1)..(153): Homolog of NCBI NO: 279636 NR Description: ubiquitin / ribosomal protein S27a - tomato
  misc_feature (1)..(153): Homolog of NCBI NO: 25294255 NR Description: ubiquitin extension protein [imported] - potato
  misc_feature (1)..(153): Homolog of NCBI NO: 34581769 NR Description: ubiquitin extension protein [Cucumis sativus]
  misc_feature (1)..(154): Homolog of NCBI NO: 541953 NR Description: ubiquitin/ribosomal protein S27a fusion protein -
  misc_feature (1)..(152): Homolog of NCBI NO: 18407264 NR Description: ubiquitin extension protein (UBQ6)
  misc_feature (1)..(154): Homolog of NCBI NO: 541954 NR Description: ubiquitin/ribosomal protein S27a fusion protein -
  misc_feature (1)..(153): Homolog of NCBI NO: 18252349 NR Description: ubiquitin extension protein [Pyrus communis]
  misc_feature (1)..(153): Homolog of NCBI NO: 25294256 NR Description: ubiquitin extension protein [imported] - common
  misc_feature (1)..(156): Homolog of NCBI NO: 15220742 NR Description: ubiquitin extension protein, putative
MQIFVKTLTGKTITLEVESSDTIDNVKAKIQDKEGIPPDQQRLIFAGKQLEDGRTLADYNIQKESTLHLVLRLRGGAKKRKKKTYTKPKKIKHTHKKVKLAVLQFYKVDGSGKVQRLKKECPSVSCGPGTFMASHFDRHYCGKCGTTYVFKKADEE

SEQ ID NO: 26046 - DNA, 1821 bp, Arabidopsis thaliana
  misc_feature (1)..(1821): Ceres Seq. ID no. 13495696
  misc_feature: MA Experiment ID: 108434 Result: Down-regulated in Transcription
  misc_feature: MA Experiment 108434 PARAMETER Experiment Name: At_Root_Tips_cDNA_P Parameter: Tissue Value: Root Tips
  misc_feature: MA Experiment ID: 108461 Result: Down-regulated in Transcription
  misc_feature: MA Experiment 108461 PARAMETER Experiment Name: At_Germinating_Seeds_cDNA_P Parameter: Age (day) Value: 1 vs. 0
  misc_feature: MA Experiment 108461 PARAMETER Experiment Name: At_Germinating_Seeds_cDNA_P Parameter: Tissue Value: Germinating Seeds
  misc_feature: MA Experiment ID: 108501 Result: Down-regulated in Transcription
  misc_feature: MA Experiment 108501 PARAMETER Experiment Name: At_ap2_floral_buds_cDNA_P Parameter: Plant Line Value: ap2 (Ler.)
  misc_feature: MA Experiment 108501 PARAMETER Experiment Name: At_ap2_floral_buds_cDNA_P Parameter: Tissue Value: Closed Flower
  misc_feature: MA Experiment ID: 108668 Result: Up-regulated in Transcription
  misc_feature: MA Experiment 108668 PARAMETER Experiment Name: At_2mM_SA_cDNA_P Parameter: Plant Line Value: WS
  misc_feature: MA Experiment 108668 PARAMETER Experiment Name: At_2mM_SA_cDNA_P Parameter: Timepoint (hr) Value: 6
  misc_feature: MA Experiment 108668 PARAMETER Experiment Name: At_2mM_SA_cDNA_P Parameter: Treatment Value: 2mM SA vs. No Treatment
  misc_feature: MA Experiment ID: 20000087 Result: Up-regulated in Transcription
  misc_feature: MA Experiment 20000087 PARAMETER Experiment Name: At_100uM_ABA_Mutants_cDNA_P Parameter: Plant Line Value: WS
  misc_feature: MA Experiment 20000087 PARAMETER Experiment Name: At_100uM_ABA_Mutants_cDNA_P Parameter: Timepoint (hr) Value: 6
  misc_feature: MA Experiment 20000087 PARAMETER Experiment Name: At_100uM_ABA_Mutants_cDNA_P Parameter: Tissue Value: Aerial
  misc_feature: MA Experiment 20000087 PARAMETER Experiment Name: At_100uM_ABA_Mutants_cDNA_P Parameter: Treatment Value: 100uM ABA vs. No Treatment
  misc_feature: MA Experiment ID: 20000117 Result: Up-regulated in Transcription
  misc_feature: MA Experiment 20000117 PARAMETER Experiment Name: At_100uM_ABA_Mutants_cDNA_P Parameter: Plant Line Value: Columbia
  misc_feature: MA Experiment 20000117 PARAMETER Experiment Name: At_100uM_ABA_Mutants_cDNA_P Parameter: Timepoint (hr) Value: 6
  misc_feature: MA Experiment 20000117 PARAMETER Experiment Name: At_100uM_ABA_Mutants_cDNA_P Parameter: Tissue Value: Aerial
  misc_feature: MA Experiment 20000117 PARAMETER Experiment Name: At_100uM_ABA_Mutants_cDNA_P Parameter: Treatment Value: 100uM ABA vs. No Treatment
  misc_feature: MA Experiment ID: 20000173 Result: Down-regulated in Transcription
  misc_feature: MA Experiment 20000173 PARAMETER Experiment Name: At_42deg_Heat_P Parameter: Age (day) Value: 14
  misc_feature: MA Experiment 20000173 PARAMETER Experiment Name: At_42deg_Heat_P Parameter: Organism Value: A. thaliana
  misc_feature: MA Experiment 20000173 PARAMETER Experiment Name: At_42deg_Heat_P Parameter: Plant Line Value: WS
  misc_feature: MA Experiment 20000173 PARAMETER Experiment Name: At_42deg_Heat_P Parameter: Temperature (deg C) Value: 42 vs. 22
  misc_feature: MA Experiment 20000173 PARAMETER Experiment Name: At_42deg_Heat_P Parameter: Timepoint (hr) Value: 6
  misc_feature: MA Experiment 20000173 PARAMETER Experiment Name: At_42deg_Heat_P Parameter: Tissue Value: Aerial
  misc_feature: MA Experiment ID: 20000182 Result: Up-regulated in Transcription
  misc_feature: MA Experiment 20000182 PARAMETER Experiment Name: At_2mM_SA_P Parameter: Age (day) Value: 14
  misc_feature: MA Experiment 20000182 PARAMETER Experiment Name: At_2mM_SA_P Parameter: Organism Value: A. thaliana
  misc_feature: MA Experiment 20000182 PARAMETER Experiment Name: At_2mM_SA_P Parameter: Plant Line Value: WS
  misc_feature: MA Experiment 20000182 PARAMETER Experiment Name: At_2mM_SA_P Parameter: Timepoint (hr) Value: 6
  misc_feature: MA Experiment 20000182 PARAMETER Experiment Name: At_2mM_SA_P Parameter: Tissue Value: Aerial
  misc_feature: MA Experiment 20000182 PARAMETER Experiment Name: At_2mM_SA_P Parameter: Treatment Value: 2mM SA vs. No Treatment
  misc_feature: MA Experiment ID: 20000184 Result: Down-regulated in Transcription
  misc_feature: MA Experiment 20000184 PARAMETER Experiment Name: At_Shoots__P Parameter: Age (day) Value: 7
  misc_feature: MA Experiment 20000184 PARAMETER Experiment Name: At_Shoots__P Parameter: Tissue Value: Shoots vs. Whole Plant
  misc_feature: MA Experiment ID: 20000573 Result: Up-regulated in Transcription
  misc_feature: MA Experiment 20000573 PARAMETER Experiment Name: At_100uM_ABA_Mutants__P Parameter: Organism Value: A. thaliana
  misc_feature: MA Experiment 20000573 PARAMETER Experiment Name: At_100uM_ABA_Mutants__P Parameter: Plant Line Value: CS22 vs. Ler wt
  misc_feature: MA Experiment 20000573 PARAMETER Experiment Name: At_100uM_ABA_Mutants__P Parameter: Timepoint (hr) Value: N/A
  misc_feature: MA Experiment 20000573 PARAMETER Experiment Name: At_100uM_ABA_Mutants__P Parameter: Tissue Value: Whole Plant
  misc_feature: MA Experiment 20000573 PARAMETER Experiment Name: At_100uM_ABA_Mutants__P Parameter: Treatment Value: None
  misc_feature: MA Experiment ID: 20000574 Result: Up-regulated in Transcription
  misc_feature: MA Experiment 20000574 PARAMETER Experiment Name: At_100uM_ABA_Mutants__P Parameter: Organism Value: A. thaliana
  misc_feature: MA Experiment 20000574 PARAMETER Experiment Name: At_100uM_ABA_Mutants__P Parameter: Plant Line Value: CS23 vs. Ler wt
  misc_feature: MA Experiment 20000574 PARAMETER Experiment Name: At_100uM_ABA_Mutants__P Parameter: Timepoint (hr) Value: N/A
  misc_feature: MA Experiment 20000574 PARAMETER Experiment Name: At_100uM_ABA_Mutants__P Parameter: Tissue Value: Whole Plant
  misc_feature: MA Experiment 20000574 PARAMETER Experiment Name: At_100uM_ABA_Mutants__P Parameter: Treatment Value: None
  misc_feature: MA Experiment ID: 20000794 Result: Up-regulated in Transcription
  misc_feature: MA Experiment 20000794 PARAMETER Experiment Name: At_Petals_P Parameter: Age (day) Value: 23-25 days
  misc_feature: MA Experiment 20000794 PARAMETER Experiment Name: At_Petals_P Parameter: Plant Line Value: WS
  misc_feature: MA Experiment 20000794 PARAMETER Experiment Name: At_Petals_P Parameter: Tissue Value: Petals vs. Whole plant
  misc_feature: MA Experiment ID: 20001248 Result: Up-regulated in Transcription
  misc_feature: MA Experiment 20001248 PARAMETER Experiment Name: At_Far-red-induction_P Parameter: Age (day) Value: 7
  misc_feature: MA Experiment 20001248 PARAMETER Experiment Name: At_Far-red-induction_P Parameter: Light Value: Far-red vs. White
  misc_feature: MA Experiment 20001248 PARAMETER Experiment Name: At_Far-red-induction_P Parameter: Organism Value: A. thaliana
  misc_feature: MA Experiment 20001248 PARAMETER Experiment Name: At_Far-red-induction_P Parameter: Plant Line Value: Columbia
  misc_feature: MA Experiment 20001248 PARAMETER Experiment Name: At_Far-red-induction_P Parameter: Timepoint (hr) Value: 4
  misc_feature: MA Experiment 20001248 PARAMETER Experiment Name: At_Far-red-induction_P Parameter: Tissue Value: Whole Plant
  misc_feature: MA Experiment ID: 20001450 Result: Up-regulated in Transcription
  misc_feature: MA Experiment 20001450 PARAMETER Experiment Name: At_Far-red-induction_P Parameter: Age (day) Value: 7
  misc_feature: MA Experiment 20001450 PARAMETER Experiment Name: At_Far-red-induction_P Parameter: Light Value: Far-red vs. White
  misc_feature: MA Experiment 20001450 PARAMETER Experiment Name: At_Far-red-induction_P Parameter: Organism Value: A. thaliana
  misc_feature: MA Experiment 20001450 PARAMETER Experiment Name: At_Far-red-induction_P Parameter: Plant Line Value: Columbia
  misc_feature: MA Experiment 20001450 PARAMETER Experiment Name: At_Far-red-induction_P Parameter: Timepoint (hr) Value: 8
  misc_feature: MA Experiment 20001450 PARAMETER Experiment Name: At_Far-red-induction_P Parameter: Tissue Value: Whole Plant
  misc_feature: MA Experiment ID: 20001905 Result: Up-regulated in Transcription
  misc_feature: MA Experiment 20001905 PARAMETER Experiment Name: At_Drought_Reproduction_P Parameter: Age (day) Value: 40
  misc_feature: MA Experiment 20001905 PARAMETER Experiment Name: At_Drought_Reproduction_P Parameter: Organism Value: A. thaliana
  misc_feature: MA Experiment 20001905 PARAMETER Experiment Name: At_Drought_Reproduction_P Parameter: Plant Line Value: WS
  misc_feature: MA Experiment 20001905 PARAMETER Experiment Name: At_Drought_Reproduction_P Parameter: Timepoint (day) Value: 10
  misc_feature: MA Experiment 20001905 PARAMETER Experiment Name: At_Drought_Reproduction_P Parameter: Tissue Value: Rosettes
  misc_feature: MA Experiment 20001905 PARAMETER Experiment Name: At_Drought_Reproduction_P Parameter: Treatment Value: Drought vs. No Drought
  misc_feature: MA Experiment ID: 20001908 Result: Up-regulated in Transcription
  misc_feature: MA Experiment 20001908 PARAMETER Experiment Name: At_Drought_Reproduction_P Parameter: Age (day) Value: 40
  misc_feature: MA Experiment 20001908 PARAMETER Experiment Name: At_Drought_Reproduction_P Parameter: Organism Value: A. thaliana
  misc_feature: MA Experiment 20001908 PARAMETER Experiment Name: At_Drought_Reproduction_P Parameter: Plant Line Value: WS
  misc_feature: MA Experiment 20001908 PARAMETER Experiment Name: At_Drought_Reproduction_P Parameter: Timepoint (day) Value: 10
  misc_feature: MA Experiment 20001908 PARAMETER Experiment Name: At_Drought_Reproduction_P Parameter: Tissue Value: Siliques
  misc_feature: MA Experiment 20001908 PARAMETER Experiment Name: At_Drought_Reproduction_P Parameter: Treatment Value: Drought vs. No Drought
  misc_feature: MA Experiment ID: 20001911 Result: Up-regulated in Transcription
  misc_feature: MA Experiment 20001911 PARAMETER Experiment Name: At_Drought_Reproduction_P Parameter: Age (day) Value: 40
  misc_feature: MA Experiment 20001911 PARAMETER Experiment Name: At_Drought_Reproduction_P Parameter: Organism Value: A. thaliana
  misc_feature: MA Experiment 20001911 PARAMETER Experiment Name: At_Drought_Reproduction_P Parameter: Plant Line Value: WS
  misc_feature: MA Experiment 20001911 PARAMETER Experiment Name: At_Drought_Reproduction_P Parameter: Timepoint (day) Value: 10
  misc_feature: MA Experiment 20001911 PARAMETER Experiment Name: At_Drought_Reproduction_P Parameter: Tissue Value: Flowers
  misc_feature: MA Experiment 20001911 PARAMETER Experiment Name: At_Drought_Reproduction_P Parameter: Treatment Value: Drought vs. No Drought
tggtcccaaacgattcacttttctcaccatctcaatctccagaccaaaagaaacaaaaaatggattctttttcatattcttcgatgaaatccatgttgattcaagctcgtggctcgttgaactcgcgtttgtcggagtttgagccactggttctgctattggttccgcttgtctctctgtttctcgctcagattatcggatctgtgtttggcgttgttcacgagaaaggcctcaaagcttgtcttattgggtttatcatgggactcctcaaaatgattcctggagttcagaattacattgatgctgagaaacaaaaggttgttgaccaattacaatctggtagcagctctaagaaaaagaataagactgaagtattgccagtaaaaggtctaggagttgaagttttagagaaaatggagaatgagaagaggaatgatgctatttggcaaggaaaatgctctggcactgtatacataggtggagccgagtctgaaggacatttttcattgataaatcaagcatgttcaatgtttgcgcataccaatccgttgcatatagacgtattccagagtgtggtgcggtttgagtcagaagtagtcgcaatgactgctgcgttacttgggagtaaagaaacggcgtcaggaggtcaaatatgcggaaacatgacgtctggaggaacagaaagtatagtgttggctgtgaagtcatctcgtgactatatgaagtacaagaagggaatcacacggccagaaatgattatacctgagtcgggtcattcggcttatgataaggcggcccagtattttaaaatcaagttgtggcgagttccagttgacaaagacttccgagctgatgtgaaggcaacaaggcggcatattaacagaaacaccatcatgattgttggatcagcaccaggattccctcatggcatcattgatcctatcgaggagcttggtcaactggctcttagctatggaatatgctttcatgttgacctttgccttggtggttttgtgttacctttcgctcgtaaacttgggtaccagatcccaccttttgatttttctgtacaaggagttacttcaatttctgtggacgtgcataaatatggtttggctcctaaaggaactagtacagttctatatagaaatcatgagatcagaaagcaccaatttgttgctgtaactgaatggtcaggaggtctatacgtgtctccaactatcgctgggagtaggcctgggtctttggtagccggtgcttgggctgcaatgatgtcgctcggcgaagaaggttacctacaaaacacaagtaagataatggaagcatcaaagagactagaagaaggagtaagagaaatccatgaactattcgtcattggaaagccagatatgacaatcgtggcttttggttctaaagcattggatatatttgaagttaatgacatcatgtcttctaaaggttggcatttgaatgcactacagagacccaacagcattcatatatgtattactcttcaacacgtccctgtagtcgatgacttccttcgggatctgcgtgaagctgtggaaactgtaaaagcaaacccaggaccgatcacgggaggcttggctccaatatatggagcagcagggaagatgccagaccgaggcatggtgaatgagcttctggttagtttcatggacagtcaatattaagtttcttgaaggttaaagcatctagtgggtaaattgatatcacatttcagttggagaagcaaaactttgtatattcacaaccacattgtttcgtttgccctactaataaaatttcattacaatcttc

SEQ ID NO: 26047 - protein, 563 aa, Arabidopsis thaliana
  peptide (1)..(563): Ceres Seq. ID no. 13495697
  misc_feature (165)..(471): Pfam Name: Pyridoxal-dependent decarboxylase conserved domain Pfam Description: Pyridoxal-dependent decarboxylase conserved
  misc_feature (69)..(563): Homolog of NCBI NO: 40744734 NR Description: hypothetical protein AN1989.2 [Aspergillus
  misc_feature (95)..(563): Homolog of NCBI NO: 6320500 NR Description: dihydrosphingosine phosphate lyase (also known as
  misc_feature (90)..(563): Homolog of NCBI NO: 21355963 NR Description: CG8946-PA [Drosophila melanogaster]
  misc_feature (28)..(563): Homolog of NCBI NO: 26335473 NR Description: unnamed protein product [Mus musculus]
  misc_feature (34)..(563): Homolog of NCBI NO: 6330874 NR Description: KIAA1252 protein [Homo sapiens]
  misc_feature (34)..(563): Homolog of NCBI NO: 27465561 NR Description: sphingosine-1-phosphate lyase 1 [Rattus
  misc_feature (40)..(560): Homolog of NCBI NO: 30908928 NR Description: sphingosine-1-phosphate lyase [Dictyostelium
  misc_feature (391)..(561): Homolog of NCBI NO: 34893998 NR Description: putative sphingosine-1-phosphate lyase
  misc_feature (33)..(394): Homolog of NCBI NO: 34893998 NR Description: putative sphingosine-1-phosphate lyase
  misc_feature (20)..(563): Homolog of NCBI NO: 15217780 NR Description: sphingosine-1-phosphate lyase -related
VPNDSLFSPSQSPDQKKQKMDSFSYSSMKSMLIQARGSLNSRLSEFEPLVLLLVPLVSLFLAQIIGSVFGVVHEKGLKACLIGFIMGLLKMIPGVQNYIDAEKQKVVDQLQSGSSSKKKNKTEVLPVKGLGVEVLEKMENEKRNDAIWQGKCSGTVYIGGAESEGHFSLINQACSMFAHTNPLHIDVFQSVVRFESEVVAMTAALLGSKETASGGQICGNMTSGGTESIVLAVKSSRDYMKYKKGITRPEMIIPESGHSAYDKAAQYFKIKLWRVPVDKDFRADVKATRRHINRNTIMIVGSAPGFPHGIIDPIEELGQLALSYGICFHVDLCLGGFVLPFARKLGYQIPPFDFSVQGVTSISVDVHKYGLAPKGTSTVLYRNHEIRKHQFVAVTEWSGGLYVSPTIAGSRPGSLVAGAWAAMMSLGEEGYLQNTSKIMEASKRLEEGVREIHELFVIGKPDMTIVAFGSKALDIFEVNDIMSSKGWHLNALQRPNSIHICITLQHVPVVDDFLRDLREAVETVKANPGPITGGLAPIYGAAGKMPDRGMVNELLVSFMDSQY

SEQ ID NO: 26048 - protein, 544 aa, Arabidopsis thaliana
  peptide (1)..(544): Ceres Seq. ID no. 13495698
  misc_feature (146)..(452): Pfam Name: Pyridoxal-dependent decarboxylase conserved domain Pfam Description: Pyridoxal-dependent decarboxylase conserved
  misc_feature (50)..(544): Homolog of NCBI NO: 40744734 NR Description: hypothetical protein AN1989.2 [Aspergillus
  misc_feature (76)..(544): Homolog of NCBI NO: 6320500 NR Description: dihydrosphingosine phosphate lyase (also known as
  misc_feature (71)..(544): Homolog of NCBI NO: 21355963 NR Description: CG8946-PA [Drosophila melanogaster]
  misc_feature (9)..(544): Homolog of NCBI NO: 26335473 NR Description: unnamed protein product [Mus musculus]
  misc_feature (15)..(544): Homolog of NCBI NO: 6330874 NR Description: KIAA1252 protein [Homo sapiens]
  misc_feature (15)..(544): Homolog of NCBI NO: 27465561 NR Description: sphingosine-1-phosphate lyase 1 [Rattus
  misc_feature (21)..(541): Homolog of NCBI NO: 30908928 NR Description: sphingosine-1-phosphate lyase [Dictyostelium
  misc_feature (372)..(542): Homolog of NCBI NO: 34893998 NR Description: putative sphingosine-1-phosphate lyase
  misc_feature (14)..(375): Homolog of NCBI NO: 34893998 NR Description: putative sphingosine-1-phosphate lyase
  misc_feature (1)..(544): Homolog of NCBI NO: 15217780 NR Description: sphingosine-1-phosphate lyase -related
MDSFSYSSMKSMLIQARGSLNSRLSEFEPLVLLLVPLVSLFLAQIIGSVFGVVHEKGLKACLIGFIMGLLKMIPGVQNYIDAEKQKVVDQLQSGSSSKKKNKTEVLPVKGLGVEVLEKMENEKRNDAIWQGKCSGTVYIGGAESEGHFSLINQACSMFAHTNPLHIDVFQSVVRFESEVVAMTAALLGSKETASGGQICGNMTSGGTESIVLAVKSSRDYMKYKKGITRPEMIIPESGHSAYDKAAQYFKIKLWRVPVDKDFRADVKATRRHINRNTIMIVGSAPGFPHGIIDPIEELGQLALSYGICFHVDLCLGGFVLPFARKLGYQIPPFDFSVQGVTSISVDVHKYGLAPKGTSTVLYRNHEIRKHQFVAVTEWSGGLYVSPTIAGSRPGSLVAGAWAAMMSLGEEGYLQNTSKIMEASKRLEEGVREIHELFVIGKPDMTIVAFGSKALDIFEVNDIMSSKGWHLNALQRPNSIHICITLQHVPVVDDFLRDLREAVETVKANPGPITGGLAPIYGAAGKMPDRGMVNELLVSFMDSQY

SEQ ID NO: 26049 - protein, 536 aa, Arabidopsis thaliana
  peptide (1)..(536): Ceres Seq. ID no. 13495699
  misc_feature (138)..(444): Pfam Name: Pyridoxal-dependent decarboxylase conserved domain Pfam Description: Pyridoxal-dependent decarboxylase conserved
  misc_feature (42)..(536): Homolog of NCBI NO: 40744734 NR Description: hypothetical protein AN1989.2 [Aspergillus
  misc_feature (68)..(536): Homolog of NCBI NO: 6320500 NR Description: dihydrosphingosine phosphate lyase (also known as
  misc_feature (63)..(536): Homolog of NCBI NO: 21355963 NR Description: CG8946-PA [Drosophila melanogaster]
  misc_feature (1)..(536): Homolog of NCBI NO: 26335473 NR Description: unnamed protein product [Mus musculus]
  misc_feature (7)..(536): Homolog of NCBI NO: 6330874 NR Description: KIAA1252 protein [Homo sapiens]
  misc_feature (7)..(536): Homolog of NCBI NO: 27465561 NR Description: sphingosine-1-phosphate lyase 1 [Rattus
  misc_feature (13)..(533): Homolog of NCBI NO: 30908928 NR Description: sphingosine-1-phosphate lyase [Dictyostelium
  misc_feature (364)..(534): Homolog of NCBI NO: 34893998 NR Description: putative sphingosine-1-phosphate lyase
  misc_feature (6)..(367): Homolog of NCBI NO: 34893998 NR Description: putative sphingosine-1-phosphate lyase
  misc_feature (1)..(536): Homolog of NCBI NO: 15217780 NR Description: sphingosine-1-phosphate lyase -related
MKSMLIQARGSLNSRLSEFEPLVLLLVPLVSLFLAQIIGSVFGVVHEKGLKACLIGFIMGLLKMIPGVQNYIDAEKQKVVDQLQSGSSSKKKNKTEVLPVKGLGVEVLEKMENEKRNDAIWQGKCSGTVYIGGAESEGHFSLINQACSMFAHTNPLHIDVFQSVVRFESEVVAMTAALLGSKETASGGQICGNMTSGGTESIVLAVKSSRDYMKYKKGITRPEMIIPESGHSAYDKAAQYFKIKLWRVPVDKDFRADVKATRRHINRNTIMIVGSAPGFPHGIIDPIEELGQLALSYGICFHVDLCLGGFVLPFARKLGYQIPPFDFSVQGVTSISVDVHKYGLAPKGTSTVLYRNHEIRKHQFVAVTEWSGGLYVSPTIAGSRPGSLVAGAWAAMMSLGEEGYLQNTSKIMEASKRLEEGVREIHELFVIGKPDMTIVAFGSKALDIFEVNDIMSSKGWHLNALQRPNSIHICITLQHVPVVDDFLRDLREAVETVKANPGPITGGLAPIYGAAGKMPDRGMVNELLVSFMDSQY

SEQ ID NO: 26050 - DNA, 1055 bp, Arabidopsis thaliana
  misc_feature (1)..(1055): Ceres Seq. ID no. 12482030
  misc_feature: MA Experiment ID: 108434 Result: Up-regulated in Transcription
  misc_feature: MA Experiment 108434 PARAMETER Experiment Name: At_Root_Tips_cDNA_P Parameter: Tissue Value: Root Tips
  misc_feature: MA Experiment ID: 108488 Result: Down-regulated in Transcription
  misc_feature: MA Experiment ID: 20000224 Result: Down-regulated in Transcription
aaattaagagacatctgatcgaattttgttccgacgaccgtgaatcaccagcaaaggattcgtgtcaatgttcttgtgagatcgaactttctctgggttcgtgcagaagctttgcttttttgagtatcgcgtttaaggcacatcgaagaagagagaccctaatttgatattttgagttctatcgatggcttcgctactagctcgcaggtcgttcagtgctctccgagctcgacatctcgctttttcagggcaaggtttacagggatctcatctctgtgggctacagtcccgtgctatatcttatggaagcaacaaagatgatgaagaagctgagcagcttgctaaagagatctccaaggactggagtactgtctttgaacggagcatgaacaccctatttctcactgaaatggtcaggggtttgtcactgaccctcaagtacttctttgatccaaaagttacaatcaattatccttttgagaagggtccattgagccctcgtttccgtggtgaacacgctcttcgaaggtatccaactggggaagaacgctgcattgcctgcaaactctgcgaagctgtatgtccagctcaagcaatcacaatagaggcagaggagcgggaagatggaagccgcagaaccactaggtatgatatcgacatgacgaaatgcatctattgtggtttctgccaagaagcttgccctgttgatgcaatcgtggaaggaccaaactttgagtttgcaaccgagacacatgaggaacttctgtatgacaaagagaagcttcttgagaatggagataggtgggagacagagattgcagagaatctgaggtcggagagcctctaccgctgaatattgatccgaaaatgccttttgcctaattcttaaggaaacgttttcgtttgcttctgttacaaataaagatgcttcagcctttgcactgttattgctatctgtatttcttgagttcataccgatggcaaaatcaaatttggctttgtttccggtttgagctggaccgtgcggtaaatggattatgatatgattcaatggt

SEQ ID NO: 26051 - protein, 222 aa, Arabidopsis thaliana
  peptide (1)..(222): Ceres Seq. ID no. 12482031
  misc_feature (155)..(178): Pfam Name: 4Fe-4S binding domain Pfam Description: 4Fe-4S binding domain
  misc_feature (5)..(222): Homolog of NCBI NO: 17944955 NR Description: RE02647p [Drosophila melanogaster]
  misc_feature (5)..(222): Homolog of NCBI NO: 17864306 NR Description: NADH:ubiquinone reductase 23kD subunit precursor
  misc_feature (46)..(222): Homolog of NCBI NO: 34328786 NR Description: NADH:ubiquinone oxidoreductase subunit 8;
  misc_feature (62)..(222): Homolog of NCBI NO: 11466496 NR Description: NADH dehydrogenase, subunit 8 [Reclinomonas
  misc_feature (1)..(222): Homolog of NCBI NO: 34915206 NR Description: putative  NADH dehydrogenase
  misc_feature (1)..(222): Homolog of NCBI NO: 3929358 NR Description: NADH-ubiquinone oxidoreductase 23 kDa subunit, precursor (Complex I-23KD) (CI-23KD) (Complex I-28.5KD)
  misc_feature (1)..(222): Homolog of NCBI NO: 1076669 NR Description: NADH2 dehydrogenase (ubiquinone) (EC 1.6.5.3)
  misc_feature (1)..(222): Homolog of NCBI NO: 6226880 NR Description: NADH-ubiquinone oxidoreductase 23 kDa subunit, precursor (Complex I-23KD) (CI-23KD) (Complex I-28.5KD)
  misc_feature (1)..(222): Homolog of NCBI NO: 15219265 NR Description: NADH dehydrogenase, putative
  misc_feature (1)..(222): Homolog of NCBI NO: 15219311 NR Description: NADH:ubiquinone oxidoreductase, putative
MASLLARRSFSALRARHLAFSGQGLQGSHLCGLQSRAISYGSNKDDEEAEQLAKEISKDWSTVFERSMNTLFLTEMVRGLSLTLKYFFDPKVTINYPFEKGPLSPRFRGEHALRRYPTGEERCIACKLCEAVCPAQAITIEAEEREDGSRRTTRYDIDMTKCIYCGFCQEACPVDAIVEGPNFEFATETHEELLYDKEKLLENGDRWETEIAENLRSESLYR

SEQ ID NO: 26052 - protein, 155 aa, Arabidopsis thaliana
  peptide (1)..(155): Ceres Seq. ID no. 12482032
  misc_feature (88)..(111): Pfam Name: 4Fe-4S binding domain Pfam Description: 4Fe-4S binding domain
  misc_feature (1)..(155): Homolog of NCBI NO: 17944955 NR Description: RE02647p [Drosophila melanogaster]
  misc_feature (1)..(155): Homolog of NCBI NO: 17864306 NR Description: NADH:ubiquinone reductase 23kD subunit precursor
  misc_feature (1)..(155): Homolog of NCBI NO: 34328786 NR Description: NADH:ubiquinone oxidoreductase subunit 8;
  misc_feature (1)..(155): Homolog of NCBI NO: 11466496 NR Description: NADH dehydrogenase, subunit 8 [Reclinomonas
  misc_feature (1)..(155): Homolog of NCBI NO: 34915206 NR Description: putative  NADH dehydrogenase
  misc_feature (1)..(155): Homolog of NCBI NO: 3929358 NR Description: NADH-ubiquinone oxidoreductase 23 kDa subunit, precursor (Complex I-23KD) (CI-23KD) (Complex I-28.5KD)
  misc_feature (1)..(155): Homolog of NCBI NO: 1076669 NR Description: NADH2 dehydrogenase (ubiquinone) (EC 1.6.5.3)
  misc_feature (1)..(155): Homolog of NCBI NO: 6226880 NR Description: NADH-ubiquinone oxidoreductase 23 kDa subunit, precursor (Complex I-23KD) (CI-23KD) (Complex I-28.5KD)
  misc_feature (1)..(155): Homolog of NCBI NO: 15219265 NR Description: NADH dehydrogenase, putative
  misc_feature (1)..(155): Homolog of NCBI NO: 15219311 NR Description: NADH:ubiquinone oxidoreductase, putative
MNTLFLTEMVRGLSLTLKYFFDPKVTINYPFEKGPLSPRFRGEHALRRYPTGEERCIACKLCEAVCPAQAITIEAEEREDGSRRTTRYDIDMTKCIYCGFCQEACPVDAIVEGPNFEFATETHEELLYDKEKLLENGDRWETEIAENLRSESLYR

SEQ ID NO: 26053 - protein, 147 aa, Arabidopsis thaliana
  peptide (1)..(147): Ceres Seq. ID no. 12482033
  misc_feature (80)..(103): Pfam Name: 4Fe-4S binding domain Pfam Description: 4Fe-4S binding domain
  misc_feature (1)..(147): Homolog of NCBI NO: 17944955 NR Description: RE02647p [Drosophila melanogaster]
  misc_feature (1)..(147): Homolog of NCBI NO: 17864306 NR Description: NADH:ubiquinone reductase 23kD subunit precursor
  misc_feature (1)..(147): Homolog of NCBI NO: 34328786 NR Description: NADH:ubiquinone oxidoreductase subunit 8;
  misc_feature (1)..(147): Homolog of NCBI NO: 11466496 NR Description: NADH dehydrogenase, subunit 8 [Reclinomonas
  misc_feature (1)..(147): Homolog of NCBI NO: 34915206 NR Description: putative  NADH dehydrogenase
  misc_feature (1)..(147): Homolog of NCBI NO: 3929358 NR Description: NADH-ubiquinone oxidoreductase 23 kDa subunit, precursor (Complex I-23KD) (CI-23KD) (Complex I-28.5KD)
  misc_feature (1)..(147): Homolog of NCBI NO: 1076669 NR Description: NADH2 dehydrogenase (ubiquinone) (EC 1.6.5.3)
  misc_feature (1)..(147): Homolog of NCBI NO: 6226880 NR Description: NADH-ubiquinone oxidoreductase 23 kDa subunit, precursor (Complex I-23KD) (CI-23KD) (Complex I-28.5KD)
  misc_feature (1)..(147): Homolog of NCBI NO: 15219265 NR Description: NADH dehydrogenase, putative
  misc_feature (1)..(147): Homolog of NCBI NO: 15219311 NR Description: NADH:ubiquinone oxidoreductase, putative
MVRGLSLTLKYFFDPKVTINYPFEKGPLSPRFRGEHALRRYPTGEERCIACKLCEAVCPAQAITIEAEEREDGSRRTTRYDIDMTKCIYCGFCQEACPVDAIVEGPNFEFATETHEELLYDKEKLLENGDRWETEIAENLRSESLYR

SEQ ID NO: 26054 - DNA, 716 bp, Arabidopsis thaliana
  misc_feature (1)..(716): Ceres Seq. ID no. 12421069
  misc_feature: MA Experiment ID: 108435 Result: Down-regulated in Transcription
  misc_feature: MA Experiment 108435 PARAMETER Experiment Name: At_stm_Mutants_cDNA_P Parameter: Plant Line Value: wt Landsburg vs stm
  misc_feature: MA Experiment 108435 PARAMETER Experiment Name: At_stm_Mutants_cDNA_P Parameter: Tissue Value: Shoot Apical Meristem Region
  misc_feature: MA Experiment ID: 108462 Result: Up-regulated in Transcription
  misc_feature: MA Experiment 108462 PARAMETER Experiment Name: At_Germinating_Seeds_cDNA_P Parameter: Age (day) Value: 2 vs. 0
  misc_feature: MA Experiment 108462 PARAMETER Experiment Name: At_Germinating_Seeds_cDNA_P Parameter: Tissue Value: Germinating Seeds
  misc_feature: MA Experiment ID: 108463 Result: Up-regulated in Transcription
  misc_feature: MA Experiment 108463 PARAMETER Experiment Name: At_Germinating_Seeds_cDNA_P Parameter: Age (day) Value: 3 vs. 0
  misc_feature: MA Experiment 108463 PARAMETER Experiment Name: At_Germinating_Seeds_cDNA_P Parameter: Tissue Value: Germinating Seeds
  misc_feature: MA Experiment ID: 108464 Result: Up-regulated in Transcription
  misc_feature: MA Experiment 108464 PARAMETER Experiment Name: At_Germinating_Seeds_cDNA_P Parameter: Age (day) Value: 4 vs. 0
  misc_feature: MA Experiment 108464 PARAMETER Experiment Name: At_Germinating_Seeds_cDNA_P Parameter: Tissue Value: Germinating Seeds
  misc_feature: MA Experiment ID: 108501 Result: Up-regulated in Transcription
  misc_feature: MA Experiment 108501 PARAMETER Experiment Name: At_ap2_floral_buds_cDNA_P Parameter: Plant Line Value: ap2 (Ler.)
  misc_feature: MA Experiment 108501 PARAMETER Experiment Name: At_ap2_floral_buds_cDNA_P Parameter: Tissue Value: Closed Flower
  misc_feature: MA Experiment ID: 108561 Result: Down-regulated in Transcription
  misc_feature: MA Experiment 108561 PARAMETER Experiment Name: At_100uM_ABA_cDNA_P Parameter: Timepoint (hr) Value: 6
  misc_feature: MA Experiment 108561 PARAMETER Experiment Name: At_100uM_ABA_cDNA_P Parameter: Tissue Value: Aerial
  misc_feature: MA Experiment 108561 PARAMETER Experiment Name: At_100uM_ABA_cDNA_P Parameter: Treatment Value: 100uM ABA vs. No Treatment
  misc_feature: MA Experiment ID: 108572 Result: Up-regulated in Transcription
  misc_feature: MA Experiment 108572 PARAMETER Experiment Name: At_Drought_cDNA_P Parameter: Timepoint (hr) Value: 1
  misc_feature: MA Experiment 108572 PARAMETER Experiment Name: At_Drought_cDNA_P Parameter: Tissue Value: Aerial
  misc_feature: MA Experiment 108572 PARAMETER Experiment Name: At_Drought_cDNA_P Parameter: Treatment Value: Drought vs. No Drought
  misc_feature: MA Experiment ID: 108595 Result: Down-regulated in Transcription
  misc_feature: MA Experiment 108595 PARAMETER Experiment Name: At_Ler-pi_Ovule_cDNA_P Parameter: Plant Line Value: null
  misc_feature: MA Experiment ID: 108609 Result: Down-regulated in Transcription
  misc_feature: MA Experiment 108609 PARAMETER Experiment Name: At_100uM_ABA_cDNA_P Parameter: Timepoint (hr) Value: 24
  misc_feature: MA Experiment 108609 PARAMETER Experiment Name: At_100uM_ABA_cDNA_P Parameter: Tissue Value: Aerial
  misc_feature: MA Experiment 108609 PARAMETER Experiment Name: At_100uM_ABA_cDNA_P Parameter: Treatment Value: 100uM ABA vs. No Treatment
  misc_feature: MA Experiment ID: 108668 Result: Up-regulated in Transcription
  misc_feature: MA Experiment 108668 PARAMETER Experiment Name: At_2mM_SA_cDNA_P Parameter: Plant Line Value: WS
  misc_feature: MA Experiment 108668 PARAMETER Experiment Name: At_2mM_SA_cDNA_P Parameter: Timepoint (hr) Value: 6
  misc_feature: MA Experiment 108668 PARAMETER Experiment Name: At_2mM_SA_cDNA_P Parameter: Treatment Value: 2mM SA vs. No Treatment
  misc_feature: MA Experiment ID: 20000068 Result: Up-regulated in Transcription
  misc_feature: MA Experiment ID: 20000069 Result: Down-regulated in Transcription
  misc_feature: MA Experiment 20000069 PARAMETER Experiment Name: At_100uM_ABA_Mutants_cDNA_P Parameter: Plant Line Value: CS23
  misc_feature: MA Experiment 20000069 PARAMETER Experiment Name: At_100uM_ABA_Mutants_cDNA_P Parameter: Timepoint (hr) Value: 6
  misc_feature: MA Experiment 20000069 PARAMETER Experiment Name: At_100uM_ABA_Mutants_cDNA_P Parameter: Tissue Value: Aerial
  misc_feature: MA Experiment 20000069 PARAMETER Experiment Name: At_100uM_ABA_Mutants_cDNA_P Parameter: Treatment Value: 100uM ABA vs. No Treatment
  misc_feature: MA Experiment ID: 20000070 Result: Down-regulated in Transcription
  misc_feature: MA Experiment 20000070 PARAMETER Experiment Name: At_100uM_ABA_Mutants_cDNA_P Parameter: Plant Line Value: CS24
  misc_feature: MA Experiment 20000070 PARAMETER Experiment Name: At_100uM_ABA_Mutants_cDNA_P Parameter: Timepoint (hr) Value: 6
  misc_feature: MA Experiment 20000070 PARAMETER Experiment Name: At_100uM_ABA_Mutants_cDNA_P Parameter: Tissue Value: Aerial
  misc_feature: MA Experiment 20000070 PARAMETER Experiment Name: At_100uM_ABA_Mutants_cDNA_P Parameter: Treatment Value: 100uM ABA vs. No Treatment
  misc_feature: MA Experiment ID: 20000071 Result: Down-regulated in Transcription
  misc_feature: MA Experiment 20000071 PARAMETER Experiment Name: At_100uM_ABA_Mutants_cDNA_P Parameter: Plant Line Value: CS8104
  misc_feature: MA Experiment 20000071 PARAMETER Experiment Name: At_100uM_ABA_Mutants_cDNA_P Parameter: Timepoint (hr) Value: 6
  misc_feature: MA Experiment 20000071 PARAMETER Experiment Name: At_100uM_ABA_Mutants_cDNA_P Parameter: Tissue Value: Aerial
  misc_feature: MA Experiment 20000071 PARAMETER Experiment Name: At_100uM_ABA_Mutants_cDNA_P Parameter: Treatment Value: 100uM ABA vs. No Treatment
  misc_feature: MA Experiment ID: 20000072 Result: Down-regulated in Transcription
  misc_feature: MA Experiment 20000072 PARAMETER Experiment Name: At_100uM_ABA_Mutants_cDNA_P Parameter: Plant Line Value: CS8105
  misc_feature: MA Experiment 20000072 PARAMETER Experiment Name: At_100uM_ABA_Mutants_cDNA_P Parameter: Timepoint (hr) Value: 6
  misc_feature: MA Experiment 20000072 PARAMETER Experiment Name: At_100uM_ABA_Mutants_cDNA_P Parameter: Tissue Value: Aerial
  misc_feature: MA Experiment 20000072 PARAMETER Experiment Name: At_100uM_ABA_Mutants_cDNA_P Parameter: Treatment Value: 100uM ABA vs. No Treatment
  misc_feature: MA Experiment ID: 20000086 Result: Down-regulated in Transcription
  misc_feature: MA Experiment 20000086 PARAMETER Experiment Name: At_100uM_ABA_Mutants_cDNA_P Parameter: Plant Line Value: CS22
  misc_feature: MA Experiment 20000086 PARAMETER Experiment Name: At_100uM_ABA_Mutants_cDNA_P Parameter: Timepoint (hr) Value: 6
  misc_feature: MA Experiment 20000086 PARAMETER Experiment Name: At_100uM_ABA_Mutants_cDNA_P Parameter: Tissue Value: Aerial
  misc_feature: MA Experiment 20000086 PARAMETER Experiment Name: At_100uM_ABA_Mutants_cDNA_P Parameter: Treatment Value: 100uM ABA vs. No Treatment
  misc_feature: MA Experiment ID: 20000087 Result: Down-regulated in Transcription
  misc_feature: MA Experiment 20000087 PARAMETER Experiment Name: At_100uM_ABA_Mutants_cDNA_P Parameter: Plant Line Value: WS
  misc_feature: MA Experiment 20000087 PARAMETER Experiment Name: At_100uM_ABA_Mutants_cDNA_P Parameter: Timepoint (hr) Value: 6
  misc_feature: MA Experiment 20000087 PARAMETER Experiment Name: At_100uM_ABA_Mutants_cDNA_P Parameter: Tissue Value: Aerial
  misc_feature: MA Experiment 20000087 PARAMETER Experiment Name: At_100uM_ABA_Mutants_cDNA_P Parameter: Treatment Value: 100uM ABA vs. No Treatment
  misc_feature: MA Experiment ID: 20000088 Result: Down-regulated in Transcription
  misc_feature: MA Experiment 20000088 PARAMETER Experiment Name: At_100uM_ABA_Mutants_cDNA_P Parameter: Plant Line Value: Landsberg
  misc_feature: MA Experiment 20000088 PARAMETER Experiment Name: At_100uM_ABA_Mutants_cDNA_P Parameter: Timepoint (hr) Value: 6
  misc_feature: MA Experiment 20000088 PARAMETER Experiment Name: At_100uM_ABA_Mutants_cDNA_P Parameter: Tissue Value: Aerial
  misc_feature: MA Experiment 20000088 PARAMETER Experiment Name: At_100uM_ABA_Mutants_cDNA_P Parameter: Treatment Value: 100uM ABA vs. No Treatment
  misc_feature: MA Experiment ID: 20000089 Result: Down-regulated in Transcription
  misc_feature: MA Experiment ID: 20000090 Result: Down-regulated in Transcription
  misc_feature: MA Experiment ID: 20000111 Result: Up-regulated in Transcription
  misc_feature: MA Experiment 20000111 PARAMETER Experiment Name: At_42deg_Heat_cDNA_P Parameter: Temperature (deg C) Value: 42 vs. 22
  misc_feature: MA Experiment 20000111 PARAMETER Experiment Name: At_42deg_Heat_cDNA_P Parameter: Timepoint (hr) Value: 6
  misc_feature: MA Experiment 20000111 PARAMETER Experiment Name: At_42deg_Heat_cDNA_P Parameter: Tissue Value: Aerial
  misc_feature: MA Experiment ID: 20000113 Result: Up-regulated in Transcription
  misc_feature: MA Experiment 20000113 PARAMETER Experiment Name: At_42deg_Heat_cDNA_P Parameter: Temperature (deg C) Value: 42 vs. 22
  misc_feature: MA Experiment 20000113 PARAMETER Experiment Name: At_42deg_Heat_cDNA_P Parameter: Timepoint (hr) Value: 8
  misc_feature: MA Experiment 20000113 PARAMETER Experiment Name: At_42deg_Heat_cDNA_P Parameter: Tissue Value: Aerial
  misc_feature: MA Experiment ID: 20000117 Result: Down-regulated in Transcription
  misc_feature: MA Experiment 20000117 PARAMETER Experiment Name: At_100uM_ABA_Mutants_cDNA_P Parameter: Plant Line Value: Columbia
  misc_feature: MA Experiment 20000117 PARAMETER Experiment Name: At_100uM_ABA_Mutants_cDNA_P Parameter: Timepoint (hr) Value: 6
  misc_feature: MA Experiment 20000117 PARAMETER Experiment Name: At_100uM_ABA_Mutants_cDNA_P Parameter: Tissue Value: Aerial
  misc_feature: MA Experiment 20000117 PARAMETER Experiment Name: At_100uM_ABA_Mutants_cDNA_P Parameter: Treatment Value: 100uM ABA vs. No Treatment
  misc_feature: MA Experiment ID: 20000173 Result: Up-regulated in Transcription
  misc_feature: MA Experiment 20000173 PARAMETER Experiment Name: At_42deg_Heat_P Parameter: Age (day) Value: 14
  misc_feature: MA Experiment 20000173 PARAMETER Experiment Name: At_42deg_Heat_P Parameter: Organism Value: A. thaliana
  misc_feature: MA Experiment 20000173 PARAMETER Experiment Name: At_42deg_Heat_P Parameter: Plant Line Value: WS
  misc_feature: MA Experiment 20000173 PARAMETER Experiment Name: At_42deg_Heat_P Parameter: Temperature (deg C) Value: 42 vs. 22
  misc_feature: MA Experiment 20000173 PARAMETER Experiment Name: At_42deg_Heat_P Parameter: Timepoint (hr) Value: 6
  misc_feature: MA Experiment 20000173 PARAMETER Experiment Name: At_42deg_Heat_P Parameter: Tissue Value: Aerial
  misc_feature: MA Experiment ID: 20000182 Result: Up-regulated in Transcription
  misc_feature: MA Experiment 20000182 PARAMETER Experiment Name: At_2mM_SA_P Parameter: Age (day) Value: 14
  misc_feature: MA Experiment 20000182 PARAMETER Experiment Name: At_2mM_SA_P Parameter: Organism Value: A. thaliana
  misc_feature: MA Experiment 20000182 PARAMETER Experiment Name: At_2mM_SA_P Parameter: Plant Line Value: WS
  misc_feature: MA Experiment 20000182 PARAMETER Experiment Name: At_2mM_SA_P Parameter: Timepoint (hr) Value: 6
  misc_feature: MA Experiment 20000182 PARAMETER Experiment Name: At_2mM_SA_P Parameter: Tissue Value: Aerial
  misc_feature: MA Experiment 20000182 PARAMETER Experiment Name: At_2mM_SA_P Parameter: Treatment Value: 2mM SA vs. No Treatment
  misc_feature: MA Experiment ID: 20000184 Result: Up-regulated in Transcription
  misc_feature: MA Experiment 20000184 PARAMETER Experiment Name: At_Shoots__P Parameter: Age (day) Value: 7
  misc_feature: MA Experiment 20000184 PARAMETER Experiment Name: At_Shoots__P Parameter: Tissue Value: Shoots vs. Whole Plant
  misc_feature: MA Experiment ID: 20000308 Result: Down-regulated in Transcription
  misc_feature: MA Experiment 20000308 PARAMETER Experiment Name: At_100mM_NaCl__P Parameter: Age (day) Value: 17
  misc_feature: MA Experiment 20000308 PARAMETER Experiment Name: At_100mM_NaCl__P Parameter: Organism Value: A. thaliana
  misc_feature: MA Experiment 20000308 PARAMETER Experiment Name: At_100mM_NaCl__P Parameter: Plant Line Value: WS
  misc_feature: MA Experiment 20000308 PARAMETER Experiment Name: At_100mM_NaCl__P Parameter: Timepoint (hr) Value: 72
  misc_feature: MA Experiment 20000308 PARAMETER Experiment Name: At_100mM_NaCl__P Parameter: Tissue Value: Whole Plant
  misc_feature: MA Experiment 20000308 PARAMETER Experiment Name: At_100mM_NaCl__P Parameter: Treatment Value: 100mM NaCl vs. No Treatment
  misc_feature: MA Experiment ID: 20000437 Result: Down-regulated in Transcription
  misc_feature: MA Experiment 20000437 PARAMETER Experiment Name: At_Drought_P Parameter: Age (day) Value: 8
  misc_feature: MA Experiment 20000437 PARAMETER Experiment Name: At_Drought_P Parameter: Organism Value: A. thaliana
  misc_feature: MA Experiment 20000437 PARAMETER Experiment Name: At_Drought_P Parameter: Plant Line Value: WS
  misc_feature: MA Experiment 20000437 PARAMETER Experiment Name: At_Drought_P Parameter: Timepoint (hr) Value: 24
  misc_feature: MA Experiment 20000437 PARAMETER Experiment Name: At_Drought_P Parameter: Tissue Value: Whole Plant
  misc_feature: MA Experiment 20000437 PARAMETER Experiment Name: At_Drought_P Parameter: Treatment Value: Drought vs. No Drought
  misc_feature: MA Experiment ID: 20000438 Result: Up-regulated in Transcription
  misc_feature: MA Experiment 20000438 PARAMETER Experiment Name: At_Shoots__P Parameter: Age (day) Value: 14
  misc_feature: MA Experiment 20000438 PARAMETER Experiment Name: At_Shoots__P Parameter: Tissue Value: Shoots vs. Whole Plant
  misc_feature: MA Experiment ID: 20000441 Result: Up-regulated in Transcription
  misc_feature: MA Experiment 20000441 PARAMETER Experiment Name: At_1uM_BR-BRZ__P Parameter: Tissue Value: Shoot Apices
  misc_feature: MA Experiment 20000441 PARAMETER Experiment Name: At_1uM_BR-BRZ__P Parameter: Treatment Value: 1uM BR vs. No Treatment
  misc_feature: MA Experiment ID: 20000445 Result: Down-regulated in Transcription
  misc_feature: MA Experiment 20000445 PARAMETER Experiment Name: At_100uM_NAA__P Parameter: Age (day) Value: 14
  misc_feature: MA Experiment 20000445 PARAMETER Experiment Name: At_100uM_NAA__P Parameter: Organism Value: A. thaliana
  misc_feature: MA Experiment 20000445 PARAMETER Experiment Name: At_100uM_NAA__P Parameter: Plant Line Value: WS
  misc_feature: MA Experiment 20000445 PARAMETER Experiment Name: At_100uM_NAA__P Parameter: Timepoint (hr) Value: 6
  misc_feature: MA Experiment 20000445 PARAMETER Experiment Name: At_100uM_NAA__P Parameter: Tissue Value: Aerial
  misc_feature: MA Experiment 20000445 PARAMETER Experiment Name: At_100uM_NAA__P Parameter: Treatment Value: 100uM NAA vs. No Treatment
  misc_feature: MA Experiment ID: 20000452 Result: Up-regulated in Transcription
  misc_feature: MA Experiment 20000452 PARAMETER Experiment Name: At_CS6879_Shoots-Roots_P Parameter: Age (day) Value: 14
  misc_feature: MA Experiment 20000452 PARAMETER Experiment Name: At_CS6879_Shoots-Roots_P Parameter: Organism Value: A. thaliana
  misc_feature: MA Experiment 20000452 PARAMETER Experiment Name: At_CS6879_Shoots-Roots_P Parameter: Plant Line Value: CS6879 vs. WS
  misc_feature: MA Experiment 20000452 PARAMETER Experiment Name: At_CS6879_Shoots-Roots_P Parameter: Tissue Value: Shoots
  misc_feature: MA Experiment ID: 20000453 Result: Down-regulated in Transcription
  misc_feature: MA Experiment 20000453 PARAMETER Experiment Name: At_100uM_ABA_P Parameter: Age (day) Value: 15
  misc_feature: MA Experiment 20000453 PARAMETER Experiment Name: At_100uM_ABA_P Parameter: Organism Value: A. thaliana
  misc_feature: MA Experiment 20000453 PARAMETER Experiment Name: At_100uM_ABA_P Parameter: Plant Line Value: WS
  misc_feature: MA Experiment 20000453 PARAMETER Experiment Name: At_100uM_ABA_P Parameter: Timepoint (hr) Value: 24
  misc_feature: MA Experiment 20000453 PARAMETER Experiment Name: At_100uM_ABA_P Parameter: Tissue Value: Aerial
  misc_feature: MA Experiment 20000453 PARAMETER Experiment Name: At_100uM_ABA_P Parameter: Treatment Value: 100uM ABA vs. No Treatment
  misc_feature: MA Experiment ID: 20000455 Result: Down-regulated in Transcription
  misc_feature: MA Experiment 20000455 PARAMETER Experiment Name: At_100uM_ABA_P Parameter: Age (day) Value: 16
  misc_feature: MA Experiment 20000455 PARAMETER Experiment Name: At_100uM_ABA_P Parameter: Organism Value: A. thaliana
  misc_feature: MA Experiment 20000455 PARAMETER Experiment Name: At_100uM_ABA_P Parameter: Plant Line Value: WS
  misc_feature: MA Experiment 20000455 PARAMETER Experiment Name: At_100uM_ABA_P Parameter: Timepoint (hr) Value: 48
  misc_feature: MA Experiment 20000455 PARAMETER Experiment Name: At_100uM_ABA_P Parameter: Tissue Value: Aerial
  misc_feature: MA Experiment 20000455 PARAMETER Experiment Name: At_100uM_ABA_P Parameter: Treatment Value: 100uM ABA vs. No Treatment
  misc_feature: MA Experiment ID: 20000527 Result: Up-regulated in Transcription
  misc_feature: MA Experiment 20000527 PARAMETER Experiment Name: At_10percent_PEG_P Parameter: Age (day) Value: 20
  misc_feature: MA Experiment 20000527 PARAMETER Experiment Name: At_10percent_PEG_P Parameter: Organism Value: A. thaliana
  misc_feature: MA Experiment 20000527 PARAMETER Experiment Name: At_10percent_PEG_P Parameter: Plant Line Value: WS
  misc_feature: MA Experiment 20000527 PARAMETER Experiment Name: At_10percent_PEG_P Parameter: Timepoint (day) Value: 20
  misc_feature: MA Experiment 20000527 PARAMETER Experiment Name: At_10percent_PEG_P Parameter: Tissue Value: Whole Plant
  misc_feature: MA Experiment 20000527 PARAMETER Experiment Name: At_10percent_PEG_P Parameter: Treatment Value: 10percent PEG vs. No Treatment
  misc_feature: MA Experiment ID: 20000573 Result: Down-regulated in Transcription
  misc_feature: MA Experiment 20000573 PARAMETER Experiment Name: At_100uM_ABA_Mutants__P Parameter: Organism Value: A. thaliana
  misc_feature: MA Experiment 20000573 PARAMETER Experiment Name: At_100uM_ABA_Mutants__P Parameter: Plant Line Value: CS22 vs. Ler wt
  misc_feature: MA Experiment 20000573 PARAMETER Experiment Name: At_100uM_ABA_Mutants__P Parameter: Timepoint (hr) Value: N/A
  misc_feature: MA Experiment 20000573 PARAMETER Experiment Name: At_100uM_ABA_Mutants__P Parameter: Tissue Value: Whole Plant
  misc_feature: MA Experiment 20000573 PARAMETER Experiment Name: At_100uM_ABA_Mutants__P Parameter: Treatment Value: None
  misc_feature: MA Experiment ID: 20000574 Result: Down-regulated in Transcription
  misc_feature: MA Experiment 20000574 PARAMETER Experiment Name: At_100uM_ABA_Mutants__P Parameter: Organism Value: A. thaliana
  misc_feature: MA Experiment 20000574 PARAMETER Experiment Name: At_100uM_ABA_Mutants__P Parameter: Plant Line Value: CS23 vs. Ler wt
  misc_feature: MA Experiment 20000574 PARAMETER Experiment Name: At_100uM_ABA_Mutants__P Parameter: Timepoint (hr) Value: N/A
  misc_feature: MA Experiment 20000574 PARAMETER Experiment Name: At_100uM_ABA_Mutants__P Parameter: Tissue Value: Whole Plant
  misc_feature: MA Experiment 20000574 PARAMETER Experiment Name: At_100uM_ABA_Mutants__P Parameter: Treatment Value: None
  misc_feature: MA Experiment ID: 20001247 Result: Up-regulated in Transcription
  misc_feature: MA Experiment 20001247 PARAMETER Experiment Name: At_Far-red-induction_P Parameter: Age (day) Value: 7
  misc_feature: MA Experiment 20001247 PARAMETER Experiment Name: At_Far-red-induction_P Parameter: Light Value: Far-red vs. White
  misc_feature: MA Experiment 20001247 PARAMETER Experiment Name: At_Far-red-induction_P Parameter: Organism Value: A. thaliana
  misc_feature: MA Experiment 20001247 PARAMETER Experiment Name: At_Far-red-induction_P Parameter: Plant Line Value: Columbia
  misc_feature: MA Experiment 20001247 PARAMETER Experiment Name: At_Far-red-induction_P Parameter: Timepoint (hr) Value: 1
  misc_feature: MA Experiment 20001247 PARAMETER Experiment Name: At_Far-red-induction_P Parameter: Tissue Value: Whole Plant
  misc_feature: MA Experiment ID: 20001248 Result: Down-regulated in Transcription
  misc_feature: MA Experiment 20001248 PARAMETER Experiment Name: At_Far-red-induction_P Parameter: Age (day) Value: 7
  misc_feature: MA Experiment 20001248 PARAMETER Experiment Name: At_Far-red-induction_P Parameter: Light Value: Far-red vs. White
  misc_feature: MA Experiment 20001248 PARAMETER Experiment Name: At_Far-red-induction_P Parameter: Organism Value: A. thaliana
  misc_feature: MA Experiment 20001248 PARAMETER Experiment Name: At_Far-red-induction_P Parameter: Plant Line Value: Columbia
  misc_feature: MA Experiment 20001248 PARAMETER Experiment Name: At_Far-red-induction_P Parameter: Timepoint (hr) Value: 4
  misc_feature: MA Experiment 20001248 PARAMETER Experiment Name: At_Far-red-induction_P Parameter: Tissue Value: Whole Plant
  misc_feature: MA Experiment ID: 20001451 Result: Up-regulated in Transcription
  misc_feature: MA Experiment 20001451 PARAMETER Experiment Name: At_Far-red-induction_P Parameter: Age (day) Value: 7
  misc_feature: MA Experiment 20001451 PARAMETER Experiment Name: At_Far-red-induction_P Parameter: Light Value: Far-red vs. White
  misc_feature: MA Experiment 20001451 PARAMETER Experiment Name: At_Far-red-induction_P Parameter: Organism Value: A. thaliana
  misc_feature: MA Experiment 20001451 PARAMETER Experiment Name: At_Far-red-induction_P Parameter: Plant Line Value: Columbia
  misc_feature: MA Experiment 20001451 PARAMETER Experiment Name: At_Far-red-induction_P Parameter: Timepoint (hr) Value: 24
  misc_feature: MA Experiment 20001451 PARAMETER Experiment Name: At_Far-red-induction_P Parameter: Tissue Value: Whole Plant
  misc_feature: MA Experiment ID: 20001503 Result: Up-regulated in Transcription
  misc_feature: MA Experiment 20001503 PARAMETER Experiment Name: At_Far-red-enriched_P Parameter: Age (day) Value: 7
  misc_feature: MA Experiment 20001503 PARAMETER Experiment Name: At_Far-red-enriched_P Parameter: Light Value: Far-red enriched vs. White
  misc_feature: MA Experiment 20001503 PARAMETER Experiment Name: At_Far-red-enriched_P Parameter: Organism Value: A. thaliana
  misc_feature: MA Experiment 20001503 PARAMETER Experiment Name: At_Far-red-enriched_P Parameter: Plant Line Value: Columbia
  misc_feature: MA Experiment 20001503 PARAMETER Experiment Name: At_Far-red-enriched_P Parameter: Timepoint (day) Value: 3
  misc_feature: MA Experiment 20001503 PARAMETER Experiment Name: At_Far-red-enriched_P Parameter: Tissue Value: Whole Plant
  misc_feature: MA Experiment ID: 20001554 Result: Down-regulated in Transcription
  misc_feature: MA Experiment 20001554 PARAMETER Experiment Name: At_Drought_Soil_Dry_P Parameter: Age (day) Value: 21
  misc_feature: MA Experiment 20001554 PARAMETER Experiment Name: At_Drought_Soil_Dry_P Parameter: Organism Value: A. thaliana
  misc_feature: MA Experiment 20001554 PARAMETER Experiment Name: At_Drought_Soil_Dry_P Parameter: Plant Line Value: WS
  misc_feature: MA Experiment 20001554 PARAMETER Experiment Name: At_Drought_Soil_Dry_P Parameter: Post Timepoint (hr) Value: None
  misc_feature: MA Experiment 20001554 PARAMETER Experiment Name: At_Drought_Soil_Dry_P Parameter: Post-Treatment Value: None
  misc_feature: MA Experiment 20001554 PARAMETER Experiment Name: At_Drought_Soil_Dry_P Parameter: Timepoint (day) Value: 7
  misc_feature: MA Experiment 20001554 PARAMETER Experiment Name: At_Drought_Soil_Dry_P Parameter: Treatment Value: Drought vs. No Drought
  misc_feature: MA Experiment ID: 20001555 Result: Down-regulated in Transcription
  misc_feature: MA Experiment 20001555 PARAMETER Experiment Name: At_Drought_Soil_Dry_P Parameter: Age (day) Value: 24
  misc_feature: MA Experiment 20001555 PARAMETER Experiment Name: At_Drought_Soil_Dry_P Parameter: Organism Value: A. thaliana
  misc_feature: MA Experiment 20001555 PARAMETER Experiment Name: At_Drought_Soil_Dry_P Parameter: Plant Line Value: WS
  misc_feature: MA Experiment 20001555 PARAMETER Experiment Name: At_Drought_Soil_Dry_P Parameter: Post Timepoint (hr) Value: None
  misc_feature: MA Experiment 20001555 PARAMETER Experiment Name: At_Drought_Soil_Dry_P Parameter: Post-Treatment Value: None
  misc_feature: MA Experiment 20001555 PARAMETER Experiment Name: At_Drought_Soil_Dry_P Parameter: Timepoint (day) Value: 10
  misc_feature: MA Experiment 20001555 PARAMETER Experiment Name: At_Drought_Soil_Dry_P Parameter: Treatment Value: Drought vs. No Drought
  misc_feature: MA Experiment ID: 20001556 Result: Down-regulated in Transcription
  misc_feature: MA Experiment 20001556 PARAMETER Experiment Name: At_Drought_Soil_Dry_P Parameter: Age (day) Value: 26
  misc_feature: MA Experiment 20001556 PARAMETER Experiment Name: At_Drought_Soil_Dry_P Parameter: Organism Value: A. thaliana
  misc_feature: MA Experiment 20001556 PARAMETER Experiment Name: At_Drought_Soil_Dry_P Parameter: Plant Line Value: WS
  misc_feature: MA Experiment 20001556 PARAMETER Experiment Name: At_Drought_Soil_Dry_P Parameter: Post Timepoint (hr) Value: None
  misc_feature: MA Experiment 20001556 PARAMETER Experiment Name: At_Drought_Soil_Dry_P Parameter: Post-Treatment Value: None
  misc_feature: MA Experiment 20001556 PARAMETER Experiment Name: At_Drought_Soil_Dry_P Parameter: Timepoint (day) Value: 12
  misc_feature: MA Experiment 20001556 PARAMETER Experiment Name: At_Drought_Soil_Dry_P Parameter: Treatment Value: Drought vs. No Drought
  misc_feature: MA Experiment ID: 20001557 Result: Down-regulated in Transcription
  misc_feature: MA Experiment 20001557 PARAMETER Experiment Name: At_Drought_Soil_Dry_P Parameter: Age (day) Value: 27
  misc_feature: MA Experiment 20001557 PARAMETER Experiment Name: At_Drought_Soil_Dry_P Parameter: Organism Value: A. thaliana
  misc_feature: MA Experiment 20001557 PARAMETER Experiment Name: At_Drought_Soil_Dry_P Parameter: Plant Line Value: WS
  misc_feature: MA Experiment 20001557 PARAMETER Experiment Name: At_Drought_Soil_Dry_P Parameter: Post Timepoint (hr) Value: 3
  misc_feature: MA Experiment 20001557 PARAMETER Experiment Name: At_Drought_Soil_Dry_P Parameter: Post-Treatment Value: Re-Water vs. No Drought
  misc_feature: MA Experiment 20001557 PARAMETER Experiment Name: At_Drought_Soil_Dry_P Parameter: Timepoint (day) Value: 13
  misc_feature: MA Experiment 20001557 PARAMETER Experiment Name: At_Drought_Soil_Dry_P Parameter: Treatment Value: Drought vs. No Drought
  misc_feature: MA Experiment ID: 20001559 Result: Down-regulated in Transcription
  misc_feature: MA Experiment 20001559 PARAMETER Experiment Name: At_Drought_Soil_Dry_P Parameter: Age (day) Value: 28
  misc_feature: MA Experiment 20001559 PARAMETER Experiment Name: At_Drought_Soil_Dry_P Parameter: Organism Value: A. thaliana
  misc_feature: MA Experiment 20001559 PARAMETER Experiment Name: At_Drought_Soil_Dry_P Parameter: Plant Line Value: WS
  misc_feature: MA Experiment 20001559 PARAMETER Experiment Name: At_Drought_Soil_Dry_P Parameter: Post Timepoint (hr) Value: 29
  misc_feature: MA Experiment 20001559 PARAMETER Experiment Name: At_Drought_Soil_Dry_P Parameter: Post-Treatment Value: Re-Water vs. No Drought
  misc_feature: MA Experiment 20001559 PARAMETER Experiment Name: At_Drought_Soil_Dry_P Parameter: Timepoint (day) Value: 14
  misc_feature: MA Experiment 20001559 PARAMETER Experiment Name: At_Drought_Soil_Dry_P Parameter: Treatment Value: Drought vs. No Drought
  misc_feature: MA Experiment ID: 20001560 Result: Down-regulated in Transcription
  misc_feature: MA Experiment 20001560 PARAMETER Experiment Name: At_Drought_Soil_Dry_P Parameter: Age (day) Value: 28
  misc_feature: MA Experiment 20001560 PARAMETER Experiment Name: At_Drought_Soil_Dry_P Parameter: Organism Value: A. thaliana
  misc_feature: MA Experiment 20001560 PARAMETER Experiment Name: At_Drought_Soil_Dry_P Parameter: Plant Line Value: WS
  misc_feature: MA Experiment 20001560 PARAMETER Experiment Name: At_Drought_Soil_Dry_P Parameter: Post Timepoint (hr) Value: None
  misc_feature: MA Experiment 20001560 PARAMETER Experiment Name: At_Drought_Soil_Dry_P Parameter: Post-Treatment Value: None
  misc_feature: MA Experiment 20001560 PARAMETER Experiment Name: At_Drought_Soil_Dry_P Parameter: Timepoint (day) Value: 14
  misc_feature: MA Experiment 20001560 PARAMETER Experiment Name: At_Drought_Soil_Dry_P Parameter: Treatment Value: Drought vs. No Drought
  misc_feature: MA Experiment ID: 20001904 Result: Down-regulated in Transcription
  misc_feature: MA Experiment 20001904 PARAMETER Experiment Name: At_Drought_Reproduction_P Parameter: Age (day) Value: 37
  misc_feature: MA Experiment 20001904 PARAMETER Experiment Name: At_Drought_Reproduction_P Parameter: Organism Value: A. thaliana
  misc_feature: MA Experiment 20001904 PARAMETER Experiment Name: At_Drought_Reproduction_P Parameter: Plant Line Value: WS
  misc_feature: MA Experiment 20001904 PARAMETER Experiment Name: At_Drought_Reproduction_P Parameter: Timepoint (day) Value: 7
  misc_feature: MA Experiment 20001904 PARAMETER Experiment Name: At_Drought_Reproduction_P Parameter: Tissue Value: Rosettes
  misc_feature: MA Experiment 20001904 PARAMETER Experiment Name: At_Drought_Reproduction_P Parameter: Treatment Value: Drought vs. No Drought
atcaagataagcttatagttatcactaagagttttgtctacgtacattttgtgatcaaacaagtaatcaatcaaaagatggaaggcaaaactgtgatctcaagtctgctcataatgagtcttgtcttagcacagattcaagtagaagcaaaaatctgctgtcctaccaaggatgatagatctgtgtattttgtatgcatgctttccgtgtcatcccaattttattgtctattaaagagtaaatgcaaaaatacatctcagacgatatgtcctccgggatatactaatgacattctcgaaaattctggtgatgctgtcaatgaatattgcaagctagggtgtgcatcctctgtgtgtggtgccttgaccactctccaaaactttgacgcaagtaaagtattgagtgaagcggttgaacaatgcaccaaggcatgttcttctgtctgcaccggaggatctaccgccgcagttaaaagtgcctaaacaagtatatttaaaagtgaagggtggtcatcattcagagtggcgtgactgttttcatggaataattgtcgtctatcgatgtatgttgtaaaaaaaaatgctagactatggtgctagtactgtttaataagttgtttccggtttgccaatgtgtcatgagagtttttgatcctagattgtatatcccttctacttgtctttctctaaataaataataatgtgtccttctcgact

SEQ ID NO: 26055 - protein, 159 aa, Arabidopsis thaliana
  peptide (1)..(159): Ceres Seq. ID no. 12421070
  misc_feature (50)..(95): Pfam Name: Plant thionin Pfam Description: Plant thionin
  misc_feature (26)..(159): Homolog of NCBI NO: 21553588 NR Description: thionin Thi2.2 [Arabidopsis thaliana]
  misc_feature (26)..(159): Homolog of NCBI NO: 15239447 NR Description: thionin Thi2.2
  misc_feature (26)..(159): Homolog of NCBI NO: 1076463 NR Description: thionin variant Thi2Ca10 - Abyssinian crambe
  misc_feature (26)..(159): Homolog of NCBI NO: 1076465 NR Description: thionin variant Thi2Ca12 - Abyssinian crambe
  misc_feature (26)..(159): Homolog of NCBI NO: 6650328 NR Description: thionin [Brassica rapa subsp. pekinensis]
  misc_feature (26)..(159): Homolog of NCBI NO: 15218931 NR Description: thionin, putative
  misc_feature (26)..(159): Homolog of NCBI NO: 1076466 NR Description: thionin variant Thi2Ca2 - Abyssinian crambe
  misc_feature (26)..(159): Homolog of NCBI NO: 1076472 NR Description: thionin variant Thi2Ca9 - Abyssinian crambe
  misc_feature (26)..(159): Homolog of NCBI NO: 1076464 NR Description: thionin variant Thi2Ca11 - Abyssinian crambe
  misc_feature (26)..(159): Homolog of NCBI NO: 1181533 NR Description: thionin
QDKLIVITKSFVYVHFVIKQVINQKMEGKTVISSLLIMSLVLAQIQVEAKICCPTKDDRSVYFVCMLSVSSQFYCLLKSKCKNTSQTICPPGYTNDILENSGDAVNEYCKLGCASSVCGALTTLQNFDASKVLSEAVEQCTKACSSVCTGGSTAAVKSA

SEQ ID NO: 26056 - protein, 134 aa, Arabidopsis thaliana
  peptide (1)..(134): Ceres Seq. ID no. 12421071
  misc_feature (25)..(70): Pfam Name: Plant thionin Pfam Description: Plant thionin
  misc_feature (1)..(134): Homolog of NCBI NO: 1076464 NR Description: thionin variant Thi2Ca11 - Abyssinian crambe
  misc_feature (1)..(134): Homolog of NCBI NO: 1076463 NR Description: thionin variant Thi2Ca10 - Abyssinian crambe
  misc_feature (1)..(134): Homolog of NCBI NO: 1076472 NR Description: thionin variant Thi2Ca9 - Abyssinian crambe
  misc_feature (1)..(134): Homolog of NCBI NO: 1076465 NR Description: thionin variant Thi2Ca12 - Abyssinian crambe
  misc_feature (1)..(134): Homolog of NCBI NO: 1076466 NR Description: thionin variant Thi2Ca2 - Abyssinian crambe
  misc_feature (1)..(134): Homolog of NCBI NO: 6650328 NR Description: thionin [Brassica rapa subsp. pekinensis]
  misc_feature (1)..(134): Homolog of NCBI NO: 15218931 NR Description: thionin, putative
  misc_feature (1)..(134): Homolog of NCBI NO: 21553588 NR Description: thionin Thi2.2 [Arabidopsis thaliana]
  misc_feature (1)..(134): Homolog of NCBI NO: 15239447 NR Description: thionin Thi2.2
  misc_feature (1)..(134): Homolog of NCBI NO: 1181533 NR Description: thionin
MEGKTVISSLLIMSLVLAQIQVEAKICCPTKDDRSVYFVCMLSVSSQFYCLLKSKCKNTSQTICPPGYTNDILENSGDAVNEYCKLGCASSVCGALTTLQNFDASKVLSEAVEQCTKACSSVCTGGSTAAVKSA

SEQ ID NO: 26057 - protein, 122 aa, Arabidopsis thaliana
  peptide (1)..(122): Ceres Seq. ID no. 12421072
  misc_feature (13)..(58): Pfam Name: Plant thionin Pfam Description: Plant thionin
  misc_feature (1)..(122): Homolog of NCBI NO: 1076464 NR Description: thionin variant Thi2Ca11 - Abyssinian crambe
  misc_feature (1)..(122): Homolog of NCBI NO: 1076463 NR Description: thionin variant Thi2Ca10 - Abyssinian crambe
  misc_feature (1)..(122): Homolog of NCBI NO: 1076472 NR Description: thionin variant Thi2Ca9 - Abyssinian crambe
  misc_feature (1)..(122): Homolog of NCBI NO: 1076465 NR Description: thionin variant Thi2Ca12 - Abyssinian crambe
  misc_feature (1)..(122): Homolog of NCBI NO: 1076466 NR Description: thionin variant Thi2Ca2 - Abyssinian crambe
  misc_feature (1)..(122): Homolog of NCBI NO: 6650328 NR Description: thionin [Brassica rapa subsp. pekinensis]
  misc_feature (1)..(122): Homolog of NCBI NO: 15218931 NR Description: thionin, putative
  misc_feature (1)..(122): Homolog of NCBI NO: 21553588 NR Description: thionin Thi2.2 [Arabidopsis thaliana]
  misc_feature (1)..(122): Homolog of NCBI NO: 15239447 NR Description: thionin Thi2.2
  misc_feature (1)..(122): Homolog of NCBI NO: 1181533 NR Description: thionin
MSLVLAQIQVEAKICCPTKDDRSVYFVCMLSVSSQFYCLLKSKCKNTSQTICPPGYTNDILENSGDAVNEYCKLGCASSVCGALTTLQNFDASKVLSEAVEQCTKACSSVCTGGSTAAVKSA

SEQ ID NO: 26058 - DNA, 540 bp, Arabidopsis thaliana
  misc_feature (1)..(540): Ceres Seq. ID no. 12599931
  misc_feature: MA Experiment ID: 108595 Result: Up-regulated in Transcription
  misc_feature: MA Experiment 108595 PARAMETER Experiment Name: At_Ler-pi_Ovule_cDNA_P Parameter: Plant Line Value: null
  misc_feature: MA Experiment ID: 20000113 Result: Up-regulated in Transcription
  misc_feature: MA Experiment 20000113 PARAMETER Experiment Name: At_42deg_Heat_cDNA_P Parameter: Temperature (deg C) Value: 42 vs. 22
  misc_feature: MA Experiment 20000113 PARAMETER Experiment Name: At_42deg_Heat_cDNA_P Parameter: Timepoint (hr) Value: 8
  misc_feature: MA Experiment 20000113 PARAMETER Experiment Name: At_42deg_Heat_cDNA_P Parameter: Tissue Value: Aerial
  misc_feature: MA Experiment ID: 20001451 Result: Up-regulated in Transcription
  misc_feature: MA Experiment 20001451 PARAMETER Experiment Name: At_Far-red-induction_P Parameter: Age (day) Value: 7
  misc_feature: MA Experiment 20001451 PARAMETER Experiment Name: At_Far-red-induction_P Parameter: Light Value: Far-red vs. White
  misc_feature: MA Experiment 20001451 PARAMETER Experiment Name: At_Far-red-induction_P Parameter: Organism Value: A. thaliana
  misc_feature: MA Experiment 20001451 PARAMETER Experiment Name: At_Far-red-induction_P Parameter: Plant Line Value: Columbia
  misc_feature: MA Experiment 20001451 PARAMETER Experiment Name: At_Far-red-induction_P Parameter: Timepoint (hr) Value: 24
  misc_feature: MA Experiment 20001451 PARAMETER Experiment Name: At_Far-red-induction_P Parameter: Tissue Value: Whole Plant
aaactttacgttggtattatctggtttcacattttcttaaccctctttggtgaatgcgtcattgaaacgccattatccgccgtgctaatctgatctcctcccccgtcggaaaaaatggccactggtggaaaagtctccttcaaagtcactctgacttcggatcctaagcttcctttcaaagttttcagcgtaccagaaggagctccgttcacggcggttctgaaattcgcagcagaagagttcaaggttcctccacaaaccagcgccatcatcactaatgatgggatcgggatcaatcctcaacagagtgcaggaaacgtttttctgaagcacggatctgaactaagattgatcccgcgtgatagagttggagctgtgtttgtgatggatccatagatgatgtgtaagcaatgattaaaaactcagttccaaaaaaaaaacataataatatactgaaatgcttatgtatcaacttcgttgaataaatatgtaatcgtcacatccttttacggattgaagtgagttgaatttggtcaagtc

SEQ ID NO: 26059 - protein, 93 aa, Arabidopsis thaliana
  peptide (1)..(93): Ceres Seq. ID no. 12599932
  misc_feature (5)..(80): Pfam Name: Uncharacterised protein family (UPF0185) Pfam Description: Uncharacterised protein family (UPF0185)
  misc_feature (5)..(80): Pfam Name: Uncharacterised protein family (UPF0185) Pfam Description: Uncharacterised protein family (UPF0185)
  misc_feature (6)..(80): Homolog of NCBI NO: 1235522 NR Description: ORF is homologous to hypothetical 9.8 kD protein
  misc_feature (6)..(86): Homolog of NCBI NO: 28277496 NR Description: Similar to RIKEN cDNA 1810045K17 gene [Danio
  misc_feature (6)..(86): Homolog of NCBI NO: 37595394 NR Description: hypothetical protein BM-002 [Danio rerio]
  misc_feature (6)..(87): Homolog of NCBI NO: 7705300 NR Description: hypothetical protein BM-002 [Homo sapiens]
  misc_feature (4)..(86): Homolog of NCBI NO: 17557033 NR Description: Eukaryotic protein similar to human bone marrow
  misc_feature (6)..(80): Homolog of NCBI NO: 1235522 NR Description: ORF is homologous to hypothetical 9.8 kD protein
  misc_feature (6)..(86): Homolog of NCBI NO: 37595394 NR Description: hypothetical protein BM-002 [Danio rerio]
  misc_feature (4)..(86): Homolog of NCBI NO: 17557033 NR Description: Eukaryotic protein similar to human bone marrow
  misc_feature (1)..(93): Homolog of NCBI NO: 15217447 NR Description: unknown protein
  misc_feature (2)..(88): Homolog of NCBI NO: 34905822 NR Description: P0483G10.15 [Oryza sativa (japonica
  misc_feature (1)..(88): Homolog of NCBI NO: 20140686 NR Description: Hypothetical protein pr46A
  misc_feature (1)..(87): Homolog of NCBI NO: 40889046 NR Description: Chain A, Solution Structure Of Mouse Hypothetical
  misc_feature (1)..(86): Homolog of NCBI NO: 39589640 NR Description: Hypothetical protein CBG12253 [Caenorhabditis
  misc_feature (6)..(87): Homolog of NCBI NO: 7705300 NR Description: hypothetical protein BM-002 [Homo sapiens]
  misc_feature (6)..(86): Homolog of NCBI NO: 28277496 NR Description: Similar to RIKEN cDNA 1810045K17 gene [Danio
  misc_feature (1)..(86): Homolog of NCBI NO: 39589640 NR Description: Hypothetical protein CBG12253 [Caenorhabditis
  misc_feature (1)..(87): Homolog of NCBI NO: 40889046 NR Description: Chain A, Solution Structure Of Mouse Hypothetical
  misc_feature (1)..(88): Homolog of NCBI NO: 20140686 NR Description: Hypothetical protein pr46A
  misc_feature (2)..(88): Homolog of NCBI NO: 34905822 NR Description: P0483G10.15 [Oryza sativa (japonica
  misc_feature (1)..(93): Homolog of NCBI NO: 15217447 NR Description: unknown protein
MATGGKVSFKVTLTSDPKLPFKVFSVPEGAPFTAVLKFAAEEFKVPPQTSAIITNDGIGINPQQSAGNVFLKHGSELRLIPRDRVGAVFVMDP

SEQ ID NO: 26060 - DNA, 835 bp, Arabidopsis thaliana
  misc_feature (1)..(835): Ceres Seq. ID no. 13504832
  misc_feature: MA Experiment ID: 108461 Result: Down-regulated in Transcription
  misc_feature: MA Experiment 108461 PARAMETER Experiment Name: At_Germinating_Seeds_cDNA_P Parameter: Age (day) Value: 1 vs. 0
  misc_feature: MA Experiment 108461 PARAMETER Experiment Name: At_Germinating_Seeds_cDNA_P Parameter: Tissue Value: Germinating Seeds
  misc_feature: MA Experiment ID: 108462 Result: Down-regulated in Transcription
  misc_feature: MA Experiment 108462 PARAMETER Experiment Name: At_Germinating_Seeds_cDNA_P Parameter: Age (day) Value: 2 vs. 0
  misc_feature: MA Experiment 108462 PARAMETER Experiment Name: At_Germinating_Seeds_cDNA_P Parameter: Tissue Value: Germinating Seeds
  misc_feature: MA Experiment ID: 108474 Result: Down-regulated in Transcription
  misc_feature: MA Experiment 108474 PARAMETER Experiment Name: At_Drought_Flowers_cDNA_P Parameter: Timepoint (hr) Value: null
  misc_feature: MA Experiment 108474 PARAMETER Experiment Name: At_Drought_Flowers_cDNA_P Parameter: Treatment Value: Drought vs. No Drought
  misc_feature: MA Experiment ID: 108501 Result: Down-regulated in Transcription
  misc_feature: MA Experiment 108501 PARAMETER Experiment Name: At_ap2_floral_buds_cDNA_P Parameter: Plant Line Value: ap2 (Ler.)
  misc_feature: MA Experiment 108501 PARAMETER Experiment Name: At_ap2_floral_buds_cDNA_P Parameter: Tissue Value: Closed Flower
  misc_feature: MA Experiment ID: 20000171 Result: Up-regulated in Transcription
  misc_feature: MA Experiment 20000171 PARAMETER Experiment Name: At_42deg_Heat_P Parameter: Age (day) Value: 14
  misc_feature: MA Experiment 20000171 PARAMETER Experiment Name: At_42deg_Heat_P Parameter: Organism Value: A. thaliana
  misc_feature: MA Experiment 20000171 PARAMETER Experiment Name: At_42deg_Heat_P Parameter: Plant Line Value: WS
  misc_feature: MA Experiment 20000171 PARAMETER Experiment Name: At_42deg_Heat_P Parameter: Temperature (deg C) Value: 42 vs. 22
  misc_feature: MA Experiment 20000171 PARAMETER Experiment Name: At_42deg_Heat_P Parameter: Timepoint (hr) Value: 1
  misc_feature: MA Experiment 20000171 PARAMETER Experiment Name: At_42deg_Heat_P Parameter: Tissue Value: Aerial
  misc_feature: MA Experiment ID: 20000286 Result: Up-regulated in Transcription
  misc_feature: MA Experiment 20000286 PARAMETER Experiment Name: At_Open_Flower_P Parameter: Age (day) Value: 21
  misc_feature: MA Experiment 20000286 PARAMETER Experiment Name: At_Open_Flower_P Parameter: Plant Line Value: WS
  misc_feature: MA Experiment 20000286 PARAMETER Experiment Name: At_Open_Flower_P Parameter: Tissue Value: Half Open vs. Whole Plant
  misc_feature: MA Experiment ID: 20000437 Result: Up-regulated in Transcription
  misc_feature: MA Experiment 20000437 PARAMETER Experiment Name: At_Drought_P Parameter: Age (day) Value: 8
  misc_feature: MA Experiment 20000437 PARAMETER Experiment Name: At_Drought_P Parameter: Organism Value: A. thaliana
  misc_feature: MA Experiment 20000437 PARAMETER Experiment Name: At_Drought_P Parameter: Plant Line Value: WS
  misc_feature: MA Experiment 20000437 PARAMETER Experiment Name: At_Drought_P Parameter: Timepoint (hr) Value: 24
  misc_feature: MA Experiment 20000437 PARAMETER Experiment Name: At_Drought_P Parameter: Tissue Value: Whole Plant
  misc_feature: MA Experiment 20000437 PARAMETER Experiment Name: At_Drought_P Parameter: Treatment Value: Drought vs. No Drought
  misc_feature: MA Experiment ID: 20001459 Result: Down-regulated in Transcription
  misc_feature: MA Experiment 20001459 PARAMETER Experiment Name: At_50mM_NH4NO3_L-to-H_P Parameter: Age (day) Value: Undefined
  misc_feature: MA Experiment 20001459 PARAMETER Experiment Name: At_50mM_NH4NO3_L-to-H_P Parameter: Organism Value: Undefined
  misc_feature: MA Experiment 20001459 PARAMETER Experiment Name: At_50mM_NH4NO3_L-to-H_P Parameter: Plant Line Value: Undefined
  misc_feature: MA Experiment 20001459 PARAMETER Experiment Name: At_50mM_NH4NO3_L-to-H_P Parameter: Timepoint (hr) Value: 4
  misc_feature: MA Experiment 20001459 PARAMETER Experiment Name: At_50mM_NH4NO3_L-to-H_P Parameter: Tissue Value: Siliques
  misc_feature: MA Experiment 20001459 PARAMETER Experiment Name: At_50mM_NH4NO3_L-to-H_P Parameter: Treatment Value: 50mM NH4NO3 vs. 100mM Manitol
  misc_feature: MA Experiment ID: 20001905 Result: Up-regulated in Transcription
  misc_feature: MA Experiment 20001905 PARAMETER Experiment Name: At_Drought_Reproduction_P Parameter: Age (day) Value: 40
  misc_feature: MA Experiment 20001905 PARAMETER Experiment Name: At_Drought_Reproduction_P Parameter: Organism Value: A. thaliana
  misc_feature: MA Experiment 20001905 PARAMETER Experiment Name: At_Drought_Reproduction_P Parameter: Plant Line Value: WS
  misc_feature: MA Experiment 20001905 PARAMETER Experiment Name: At_Drought_Reproduction_P Parameter: Timepoint (day) Value: 10
  misc_feature: MA Experiment 20001905 PARAMETER Experiment Name: At_Drought_Reproduction_P Parameter: Tissue Value: Rosettes
  misc_feature: MA Experiment 20001905 PARAMETER Experiment Name: At_Drought_Reproduction_P Parameter: Treatment Value: Drought vs. No Drought
  misc_feature: MA Experiment ID: 20001906 Result: Up-regulated in Transcription
  misc_feature: MA Experiment 20001906 PARAMETER Experiment Name: At_Drought_Reproduction_P Parameter: Age (day) Value: 35
  misc_feature: MA Experiment 20001906 PARAMETER Experiment Name: At_Drought_Reproduction_P Parameter: Organism Value: A. thaliana
  misc_feature: MA Experiment 20001906 PARAMETER Experiment Name: At_Drought_Reproduction_P Parameter: Plant Line Value: WS
  misc_feature: MA Experiment 20001906 PARAMETER Experiment Name: At_Drought_Reproduction_P Parameter: Timepoint (day) Value: 5
  misc_feature: MA Experiment 20001906 PARAMETER Experiment Name: At_Drought_Reproduction_P Parameter: Tissue Value: Siliques
  misc_feature: MA Experiment 20001906 PARAMETER Experiment Name: At_Drought_Reproduction_P Parameter: Treatment Value: Drought vs. No Drought
  misc_feature: MA Experiment ID: 20001908 Result: Up-regulated in Transcription
  misc_feature: MA Experiment 20001908 PARAMETER Experiment Name: At_Drought_Reproduction_P Parameter: Age (day) Value: 40
  misc_feature: MA Experiment 20001908 PARAMETER Experiment Name: At_Drought_Reproduction_P Parameter: Organism Value: A. thaliana
  misc_feature: MA Experiment 20001908 PARAMETER Experiment Name: At_Drought_Reproduction_P Parameter: Plant Line Value: WS
  misc_feature: MA Experiment 20001908 PARAMETER Experiment Name: At_Drought_Reproduction_P Parameter: Timepoint (day) Value: 10
  misc_feature: MA Experiment 20001908 PARAMETER Experiment Name: At_Drought_Reproduction_P Parameter: Tissue Value: Siliques
  misc_feature: MA Experiment 20001908 PARAMETER Experiment Name: At_Drought_Reproduction_P Parameter: Treatment Value: Drought vs. No Drought
  misc_feature: MA Experiment ID: 20001911 Result: Up-regulated in Transcription
  misc_feature: MA Experiment 20001911 PARAMETER Experiment Name: At_Drought_Reproduction_P Parameter: Age (day) Value: 40
  misc_feature: MA Experiment 20001911 PARAMETER Experiment Name: At_Drought_Reproduction_P Parameter: Organism Value: A. thaliana
  misc_feature: MA Experiment 20001911 PARAMETER Experiment Name: At_Drought_Reproduction_P Parameter: Plant Line Value: WS
  misc_feature: MA Experiment 20001911 PARAMETER Experiment Name: At_Drought_Reproduction_P Parameter: Timepoint (day) Value: 10
  misc_feature: MA Experiment 20001911 PARAMETER Experiment Name: At_Drought_Reproduction_P Parameter: Tissue Value: Flowers
  misc_feature: MA Experiment 20001911 PARAMETER Experiment Name: At_Drought_Reproduction_P Parameter: Treatment Value: Drought vs. No Drought
aagatactataaacaaatagagtacaggaccaacaaaattacattctctttgcctttgcctatcgcttaattctgcttttattaccagagaaagcaagaatatataagaatcagaaattgggtgaagaagaatggtcttgattactaagatgtctctctctttctacatcattcatcttctcattttctccttgatttccacttgtgttgtctccaaccaggccgaggataatcttcttcaaggcctaaacagctaccgaactgctcaaagagttcctccatttgccaagaatgagaaggctgattgtgtggctgatgagatcgccgacaagctcgaagatcagccatgcacaaaccacaccacagcgagcacggttactcctggctcggtacctccacggctgacgaactaccaggacattctctctgaatgcaaaatcgacccaaacactacccgtgacggattgatcttacctgtctgtatccctaaccggatcccgactttggctttaactaattacacccaaactggttatgctcggtatcttaatgattcgaggtatgtcggggctggtgttgggtcggagaaagagtggatggtggttgtattgacgacaagtactccaggtggaagctttacagctggtgttgctgctggcaaggcgacgtctgtgagagtaatggctggtttagggctaatggggttgttgtttagttgccttgtgctcttctgagctagtgattgttgtgtttttgtgtgaagactcttttgtatcttttaccctttgtttttaacgaatagtaaaaaaaacacatcataactaaattaagaagt

SEQ ID NO: 26061 - protein, 200 aa, Arabidopsis thaliana
  peptide (1)..(200): Ceres Seq. ID no. 13504833
  misc_feature (16)..(111): Homolog of NCBI NO: 24417290 NR Description: unknown [Arabidopsis thaliana]
  misc_feature (7)..(200): Homolog of NCBI NO: 15239685 NR Description: expressed protein [Arabidopsis thaliana]
  misc_feature (4)..(200): Homolog of NCBI NO: 34395876 NR Description: Putative GPI-anchored protein At5g19240 precursor
  misc_feature (4)..(200): Homolog of NCBI NO: 15239686 NR Description: expressed protein [Arabidopsis thaliana]
  misc_feature (4)..(200): Homolog of NCBI NO: 24417436 NR Description: unknown [Arabidopsis thaliana]
  misc_feature (13)..(199): Homolog of NCBI NO: 34904816 NR Description: contains ESTs
  misc_feature (16)..(200): Homolog of NCBI NO: 21594024 NR Description: unknown [Arabidopsis thaliana]
  misc_feature (16)..(200): Homolog of NCBI NO: 18397452 NR Description: expressed protein [Arabidopsis thaliana]
  misc_feature (7)..(200): Homolog of NCBI NO: 15239687 NR Description: expressed protein [Arabidopsis thaliana]
  misc_feature (1)..(200): Homolog of NCBI NO: 18405086 NR Description: expressed protein [Arabidopsis thaliana]
MVLITKMSLSFYIIHLLIFSLISTCVVSNQAEDNLLQGLNSYRTAQRVPPFAKNEKADCVADEIADKLEDQPCTNHTTASTVTPGSVPPRLTNYQDILSECKIDPNTTRDGLILPVCIPNRIPTLALTNYTQTGYARYLNDSRYVGAGVGSEKEWMVVVLTTSTPGGSFTAGVAAGKATSVRVMAGLGLMGLLFSCLVLF

SEQ ID NO: 26062 - protein, 194 aa, Arabidopsis thaliana
  peptide (1)..(194): Ceres Seq. ID no. 13504834
  misc_feature (10)..(105): Homolog of NCBI NO: 24417290 NR Description: unknown [Arabidopsis thaliana]
  misc_feature (1)..(194): Homolog of NCBI NO: 15239685 NR Description: expressed protein [Arabidopsis thaliana]
  misc_feature (1)..(194): Homolog of NCBI NO: 34395876 NR Description: Putative GPI-anchored protein At5g19240 precursor
  misc_feature (1)..(194): Homolog of NCBI NO: 15239686 NR Description: expressed protein [Arabidopsis thaliana]
  misc_feature (1)..(194): Homolog of NCBI NO: 24417436 NR Description: unknown [Arabidopsis thaliana]
  misc_feature (7)..(193): Homolog of NCBI NO: 34904816 NR Description: contains ESTs
  misc_feature (10)..(194): Homolog of NCBI NO: 21594024 NR Description: unknown [Arabidopsis thaliana]
  misc_feature (10)..(194): Homolog of NCBI NO: 18397452 NR Description: expressed protein [Arabidopsis thaliana]
  misc_feature (1)..(194): Homolog of NCBI NO: 15239687 NR Description: expressed protein [Arabidopsis thaliana]
  misc_feature (1)..(194): Homolog of NCBI NO: 18405086 NR Description: expressed protein [Arabidopsis thaliana]
MSLSFYIIHLLIFSLISTCVVSNQAEDNLLQGLNSYRTAQRVPPFAKNEKADCVADEIADKLEDQPCTNHTTASTVTPGSVPPRLTNYQDILSECKIDPNTTRDGLILPVCIPNRIPTLALTNYTQTGYARYLNDSRYVGAGVGSEKEWMVVVLTTSTPGGSFTAGVAAGKATSVRVMAGLGLMGLLFSCLVLF

SEQ ID NO: 26063 - DNA, 630 bp, Arabidopsis thaliana
  misc_feature (1)..(630): Ceres Seq. ID no. 12389130
  misc_feature: MA Experiment ID: 108461 Result: Up-regulated in Transcription
  misc_feature: MA Experiment 108461 PARAMETER Experiment Name: At_Germinating_Seeds_cDNA_P Parameter: Age (day) Value: 1 vs. 0
  misc_feature: MA Experiment 108461 PARAMETER Experiment Name: At_Germinating_Seeds_cDNA_P Parameter: Tissue Value: Germinating Seeds
  misc_feature: MA Experiment ID: 108462 Result: Up-regulated in Transcription
  misc_feature: MA Experiment 108462 PARAMETER Experiment Name: At_Germinating_Seeds_cDNA_P Parameter: Age (day) Value: 2 vs. 0
  misc_feature: MA Experiment 108462 PARAMETER Experiment Name: At_Germinating_Seeds_cDNA_P Parameter: Tissue Value: Germinating Seeds
  misc_feature: MA Experiment ID: 108463 Result: Up-regulated in Transcription
  misc_feature: MA Experiment 108463 PARAMETER Experiment Name: At_Germinating_Seeds_cDNA_P Parameter: Age (day) Value: 3 vs. 0
  misc_feature: MA Experiment 108463 PARAMETER Experiment Name: At_Germinating_Seeds_cDNA_P Parameter: Tissue Value: Germinating Seeds
  misc_feature: MA Experiment ID: 20000180 Result: Up-regulated in Transcription
  misc_feature: MA Experiment 20000180 PARAMETER Experiment Name: At_Germinating_Seeds_P Parameter: Age (hr) Value: 24 vs. 0
  misc_feature: MA Experiment 20000180 PARAMETER Experiment Name: At_Germinating_Seeds_P Parameter: Tissue Value: Germinating Seeds
  misc_feature: MA Experiment ID: 20000185 Result: Up-regulated in Transcription
  misc_feature: MA Experiment 20000185 PARAMETER Experiment Name: At_Roots__P Parameter: Age (day) Value: 7 vs. 21
  misc_feature: MA Experiment 20000185 PARAMETER Experiment Name: At_Roots__P Parameter: Organism Value: A. thaliana
  misc_feature: MA Experiment 20000185 PARAMETER Experiment Name: At_Roots__P Parameter: Tissue Value: Roots vs. Whole Plant
  misc_feature: MA Experiment ID: 20001557 Result: Down-regulated in Transcription
  misc_feature: MA Experiment 20001557 PARAMETER Experiment Name: At_Drought_Soil_Dry_P Parameter: Age (day) Value: 27
  misc_feature: MA Experiment 20001557 PARAMETER Experiment Name: At_Drought_Soil_Dry_P Parameter: Organism Value: A. thaliana
  misc_feature: MA Experiment 20001557 PARAMETER Experiment Name: At_Drought_Soil_Dry_P Parameter: Plant Line Value: WS
  misc_feature: MA Experiment 20001557 PARAMETER Experiment Name: At_Drought_Soil_Dry_P Parameter: Post Timepoint (hr) Value: 3
  misc_feature: MA Experiment 20001557 PARAMETER Experiment Name: At_Drought_Soil_Dry_P Parameter: Post-Treatment Value: Re-Water vs. No Drought
  misc_feature: MA Experiment 20001557 PARAMETER Experiment Name: At_Drought_Soil_Dry_P Parameter: Timepoint (day) Value: 13
  misc_feature: MA Experiment 20001557 PARAMETER Experiment Name: At_Drought_Soil_Dry_P Parameter: Treatment Value: Drought vs. No Drought
  misc_feature: MA Experiment ID: 20001560 Result: Down-regulated in Transcription
  misc_feature: MA Experiment 20001560 PARAMETER Experiment Name: At_Drought_Soil_Dry_P Parameter: Age (day) Value: 28
  misc_feature: MA Experiment 20001560 PARAMETER Experiment Name: At_Drought_Soil_Dry_P Parameter: Organism Value: A. thaliana
  misc_feature: MA Experiment 20001560 PARAMETER Experiment Name: At_Drought_Soil_Dry_P Parameter: Plant Line Value: WS
  misc_feature: MA Experiment 20001560 PARAMETER Experiment Name: At_Drought_Soil_Dry_P Parameter: Post Timepoint (hr) Value: None
  misc_feature: MA Experiment 20001560 PARAMETER Experiment Name: At_Drought_Soil_Dry_P Parameter: Post-Treatment Value: None
  misc_feature: MA Experiment 20001560 PARAMETER Experiment Name: At_Drought_Soil_Dry_P Parameter: Timepoint (day) Value: 14
  misc_feature: MA Experiment 20001560 PARAMETER Experiment Name: At_Drought_Soil_Dry_P Parameter: Treatment Value: Drought vs. No Drought
  misc_feature: MA Experiment ID: 20001757 Result: Down-regulated in Transcription
  misc_feature: MA Experiment 20001757 PARAMETER Experiment Name: At_50mM_NH4NO3_L-to-H_P Parameter: Timepoint (hr) Value: 6
  misc_feature: MA Experiment 20001757 PARAMETER Experiment Name: At_50mM_NH4NO3_L-to-H_P Parameter: Tissue Value: Leaf
  misc_feature: MA Experiment 20001757 PARAMETER Experiment Name: At_50mM_NH4NO3_L-to-H_P Parameter: Treatment Value: 50mM NH4NO3 vs 100mM Mannitol
agatcaaaatcagaatcagaatcaaatttctcgtcgtgtcggagtaaatcaagccatggattccggaaccaaagtgaagaaaggagccgctggaagaagaagtggtggaggtcctaagaagaaaccggtttcccgttcggttaaatccggtctacagtttcctgtcggtaggatcggtcggtatcttaagaaaggtcgttattcgaagcgtgtcggaaccggagctccggtctatctcgccgccgtcctcgagtatcttgctgctgaggttctcgagcttgctggtaacgctgcaagagataacaaaaagaaccgtattataccacgccatgttctattagcggtgaggaacgacgaggagctagggacactactcaaaggcgtaaccattgcacacggcggtgttttaccaaacataaacccaatactcctcccaaagaagtctgagaaagcagcttcaactacaaaaacacccaaatcaccatcaaaggcaaccaaatcccctaagaaatcttagttcttctttcttcattcctctgtataacctactgtttctatctctctgtacgtttctctgtaaagacagaacagaatatctctttgttgttgtgagaaagcttagtttctctg

SEQ ID NO: 26064 - protein, 171 aa, Arabidopsis thaliana
  peptide (1)..(171): Ceres Seq. ID no. 12389131
  misc_feature (24)..(147): Pfam Name: Core histone H2A/H2B/H3/H4 Pfam Description: Core histone H2A/H2B/H3/H4
  misc_feature (19)..(171): Homolog of NCBI NO: 121982 NR Description: HISTONE H2A.2.2
  misc_feature (19)..(171): Homolog of NCBI NO: 27529852 NR Description: H2A histone [Nicotiana tabacum]
  misc_feature (19)..(171): Homolog of NCBI NO: 121974 NR Description: HISTONE H2A.2.1
  misc_feature (19)..(171): Homolog of NCBI NO: 122007 NR Description: Histone H2A
  misc_feature (21)..(171): Homolog of NCBI NO: 729671 NR Description: Histone H2A
  misc_feature (19)..(171): Homolog of NCBI NO: 729669 NR Description: Histone H2A
  misc_feature (21)..(171): Homolog of NCBI NO: 34914498 NR Description: putative histone H2A [Oryza sativa (japonica
  misc_feature (19)..(171): Homolog of NCBI NO: 122006 NR Description: HISTONE H2A
  misc_feature (19)..(171): Homolog of NCBI NO: 7649159 NR Description: histone H2A [Euphorbia esula]
  misc_feature (19)..(171): Homolog of NCBI NO: 15241857 NR Description: putative protein
DQNQNQNQISRRVGVNQAMDSGTKVKKGAAGRRSGGGPKKKPVSRSVKSGLQFPVGRIGRYLKKGRYSKRVGTGAPVYLAAVLEYLAAEVLELAGNAARDNKKNRIIPRHVLLAVRNDEELGTLLKGVTIAHGGVLPNINPILLPKKSEKAASTTKTPKSPSKATKSPKKS

SEQ ID NO: 26065 - protein, 153 aa, Arabidopsis thaliana
  peptide (1)..(153): Ceres Seq. ID no. 12389132
  misc_feature (6)..(129): Pfam Name: Core histone H2A/H2B/H3/H4 Pfam Description: Core histone H2A/H2B/H3/H4
  misc_feature (1)..(153): Homolog of NCBI NO: 121982 NR Description: HISTONE H2A.2.2
  misc_feature (1)..(153): Homolog of NCBI NO: 27529852 NR Description: H2A histone [Nicotiana tabacum]
  misc_feature (1)..(153): Homolog of NCBI NO: 121974 NR Description: HISTONE H2A.2.1
  misc_feature (1)..(153): Homolog of NCBI NO: 122007 NR Description: Histone H2A
  misc_feature (3)..(153): Homolog of NCBI NO: 729671 NR Description: Histone H2A
  misc_feature (1)..(153): Homolog of NCBI NO: 729669 NR Description: Histone H2A
  misc_feature (3)..(153): Homolog of NCBI NO: 34914498 NR Description: putative histone H2A [Oryza sativa (japonica
  misc_feature (1)..(153): Homolog of NCBI NO: 122006 NR Description: HISTONE H2A
  misc_feature (1)..(153): Homolog of NCBI NO: 7649159 NR Description: histone H2A [Euphorbia esula]
  misc_feature (1)..(153): Homolog of NCBI NO: 15241857 NR Description: putative protein
MDSGTKVKKGAAGRRSGGGPKKKPVSRSVKSGLQFPVGRIGRYLKKGRYSKRVGTGAPVYLAAVLEYLAAEVLELAGNAARDNKKNRIIPRHVLLAVRNDEELGTLLKGVTIAHGGVLPNINPILLPKKSEKAASTTKTPKSPSKATKSPKKS

SEQ ID NO: 26066 - DNA, 879 bp, Arabidopsis thaliana
  misc_feature (1)..(879): Ceres Seq. ID no. 12331390
  misc_feature: MA Experiment ID: 108434 Result: Down-regulated in Transcription
  misc_feature: MA Experiment 108434 PARAMETER Experiment Name: At_Root_Tips_cDNA_P Parameter: Tissue Value: Root Tips
  misc_feature: MA Experiment ID: 108573 Result: Up-regulated in Transcription
  misc_feature: MA Experiment 108573 PARAMETER Experiment Name: At_Drought_cDNA_P Parameter: Timepoint (hr) Value: 6
  misc_feature: MA Experiment 108573 PARAMETER Experiment Name: At_Drought_cDNA_P Parameter: Tissue Value: Aerial
  misc_feature: MA Experiment 108573 PARAMETER Experiment Name: At_Drought_cDNA_P Parameter: Treatment Value: Drought vs. No Drought
  misc_feature: MA Experiment ID: 108579 Result: Up-regulated in Transcription
  misc_feature: MA Experiment 108579 PARAMETER Experiment Name: At_4deg_Cold_cDNA_P Parameter: Temperature (deg C) Value: 4 vs. 22
  misc_feature: MA Experiment 108579 PARAMETER Experiment Name: At_4deg_Cold_cDNA_P Parameter: Timepoint (hr) Value: 6
  misc_feature: MA Experiment 108579 PARAMETER Experiment Name: At_4deg_Cold_cDNA_P Parameter: Tissue Value: Aerial
  misc_feature: MA Experiment ID: 108585 Result: Up-regulated in Transcription
  misc_feature: MA Experiment 108585 PARAMETER Experiment Name: At_5mM_NaNP_cDNA_P Parameter: Timepoint (hr) Value: 6
  misc_feature: MA Experiment 108585 PARAMETER Experiment Name: At_5mM_NaNP_cDNA_P Parameter: Tissue Value: Aerial
  misc_feature: MA Experiment 108585 PARAMETER Experiment Name: At_5mM_NaNP_cDNA_P Parameter: Treatment Value: null
  misc_feature: MA Experiment ID: 108595 Result: Up-regulated in Transcription
  misc_feature: MA Experiment 108595 PARAMETER Experiment Name: At_Ler-pi_Ovule_cDNA_P Parameter: Plant Line Value: null
  misc_feature: MA Experiment ID: 108668 Result: Up-regulated in Transcription
  misc_feature: MA Experiment 108668 PARAMETER Experiment Name: At_2mM_SA_cDNA_P Parameter: Plant Line Value: WS
  misc_feature: MA Experiment 108668 PARAMETER Experiment Name: At_2mM_SA_cDNA_P Parameter: Timepoint (hr) Value: 6
  misc_feature: MA Experiment 108668 PARAMETER Experiment Name: At_2mM_SA_cDNA_P Parameter: Treatment Value: 2mM SA vs. No Treatment
  misc_feature: MA Experiment ID: 20000090 Result: Up-regulated in Transcription
  misc_feature: MA Experiment ID: 20000173 Result: Up-regulated in Transcription
  misc_feature: MA Experiment 20000173 PARAMETER Experiment Name: At_42deg_Heat_P Parameter: Age (day) Value: 14
  misc_feature: MA Experiment 20000173 PARAMETER Experiment Name: At_42deg_Heat_P Parameter: Organism Value: A. thaliana
  misc_feature: MA Experiment 20000173 PARAMETER Experiment Name: At_42deg_Heat_P Parameter: Plant Line Value: WS
  misc_feature: MA Experiment 20000173 PARAMETER Experiment Name: At_42deg_Heat_P Parameter: Temperature (deg C) Value: 42 vs. 22
  misc_feature: MA Experiment 20000173 PARAMETER Experiment Name: At_42deg_Heat_P Parameter: Timepoint (hr) Value: 6
  misc_feature: MA Experiment 20000173 PARAMETER Experiment Name: At_42deg_Heat_P Parameter: Tissue Value: Aerial
  misc_feature: MA Experiment ID: 20000182 Result: Up-regulated in Transcription
  misc_feature: MA Experiment 20000182 PARAMETER Experiment Name: At_2mM_SA_P Parameter: Age (day) Value: 14
  misc_feature: MA Experiment 20000182 PARAMETER Experiment Name: At_2mM_SA_P Parameter: Organism Value: A. thaliana
  misc_feature: MA Experiment 20000182 PARAMETER Experiment Name: At_2mM_SA_P Parameter: Plant Line Value: WS
  misc_feature: MA Experiment 20000182 PARAMETER Experiment Name: At_2mM_SA_P Parameter: Timepoint (hr) Value: 6
  misc_feature: MA Experiment 20000182 PARAMETER Experiment Name: At_2mM_SA_P Parameter: Tissue Value: Aerial
  misc_feature: MA Experiment 20000182 PARAMETER Experiment Name: At_2mM_SA_P Parameter: Treatment Value: 2mM SA vs. No Treatment
  misc_feature: MA Experiment ID: 20000184 Result: Down-regulated in Transcription
  misc_feature: MA Experiment 20000184 PARAMETER Experiment Name: At_Shoots__P Parameter: Age (day) Value: 7
  misc_feature: MA Experiment 20000184 PARAMETER Experiment Name: At_Shoots__P Parameter: Tissue Value: Shoots vs. Whole Plant
  misc_feature: MA Experiment ID: 20000436 Result: Up-regulated in Transcription
  misc_feature: MA Experiment 20000436 PARAMETER Experiment Name: At_Drought_P Parameter: Age (day) Value: 7
  misc_feature: MA Experiment 20000436 PARAMETER Experiment Name: At_Drought_P Parameter: Organism Value: A. thaliana
  misc_feature: MA Experiment 20000436 PARAMETER Experiment Name: At_Drought_P Parameter: Plant Line Value: WS
  misc_feature: MA Experiment 20000436 PARAMETER Experiment Name: At_Drought_P Parameter: Timepoint (hr) Value: 12
  misc_feature: MA Experiment 20000436 PARAMETER Experiment Name: At_Drought_P Parameter: Tissue Value: Whole Plant
  misc_feature: MA Experiment 20000436 PARAMETER Experiment Name: At_Drought_P Parameter: Treatment Value: Drought vs. No Drought
  misc_feature: MA Experiment ID: 20000437 Result: Up-regulated in Transcription
  misc_feature: MA Experiment 20000437 PARAMETER Experiment Name: At_Drought_P Parameter: Age (day) Value: 8
  misc_feature: MA Experiment 20000437 PARAMETER Experiment Name: At_Drought_P Parameter: Organism Value: A. thaliana
  misc_feature: MA Experiment 20000437 PARAMETER Experiment Name: At_Drought_P Parameter: Plant Line Value: WS
  misc_feature: MA Experiment 20000437 PARAMETER Experiment Name: At_Drought_P Parameter: Timepoint (hr) Value: 24
  misc_feature: MA Experiment 20000437 PARAMETER Experiment Name: At_Drought_P Parameter: Tissue Value: Whole Plant
  misc_feature: MA Experiment 20000437 PARAMETER Experiment Name: At_Drought_P Parameter: Treatment Value: Drought vs. No Drought
  misc_feature: MA Experiment ID: 20000438 Result: Down-regulated in Transcription
  misc_feature: MA Experiment 20000438 PARAMETER Experiment Name: At_Shoots__P Parameter: Age (day) Value: 14
  misc_feature: MA Experiment 20000438 PARAMETER Experiment Name: At_Shoots__P Parameter: Tissue Value: Shoots vs. Whole Plant
acacaacaaacaacacgttctctctcatttttcttcttctccgatcaatctagggtttactctcaccggcgacgaacaatgatccacctcctttacacagtgatcttcgccgaaatggcactgatccttctcctcctcttcaaaactcctctccgaaagctaatcatcctcaccttcgatcgaatcaaacgtggccgtggtcccgtcgtcgtcaaaaccataggaaccaccgtattcgtcgttctcttgtcgagtatctacagtttggttaatatccaacgccgatctgaagatggtgctgttcttaatcccactgatcaagtccttgcgtctaagcatcttctcgaagcttctcttatggggtttgtgttgtttctctcgcttatgattgatagactacaccattacattagagagcttcgtttgttgaggaagacaatggagactgcaaagaagcagaacagaggttttgaggatgggaaaaccacaagtggggaggaagtgaaagcgctcggggaagagatcgcggcgttaaaagcgaagataaagacgttagaatcggagagtgaaagtaaaggcaaagaattgaaaggtgcacaaggtgaaacagaggctttgagaaagcaagctgatgggtttcttatggagtatgataggttgcttgaggataatcagaatttgaggaaccagttggagtctattgggcatagtcctgagggaaagaagggtatgtaagagtaaaaactaaggattctgttttgtagagaacaaagtaactataggaaatgtggttttactgatttttgcttcatgtaatatgcaatatcgtctcctcttttgaatgtattttactattatattgcaatctagtaagtttgg

SEQ ID NO: 26067 - protein, 244 aa, Arabidopsis thaliana
  peptide (1)..(244): Ceres Seq. ID no. 12331391
  misc_feature (30)..(218): Pfam Name: B-cell receptor-associated protein 31-like Pfam Description: B-cell receptor-associated protein 31-like
  misc_feature (27)..(155): Homolog of NCBI NO: 18402620 NR Description: expressed protein
  misc_feature (27)..(181): Homolog of NCBI NO: 30682503 NR Description: expressed protein [Arabidopsis thaliana]
  misc_feature (27)..(231): Homolog of NCBI NO: 15231412 NR Description: unknown protein; protein id: At3g07190.1
  misc_feature (27)..(231): Homolog of NCBI NO: 15239667 NR Description: putative protein; protein id: At5g48660.1
  misc_feature (27)..(235): Homolog of NCBI NO: 34897474 NR Description: unknown protein [Oryza sativa (japonica
  misc_feature (27)..(234): Homolog of NCBI NO: 22655198 NR Description: unknown protein [Arabidopsis thaliana]
  misc_feature (27)..(242): Homolog of NCBI NO: 9759015 NR Description: gene_id:K16E1.4~unknown protein [Arabidopsis
  misc_feature (27)..(244): Homolog of NCBI NO: 21553655 NR Description: unknown [Arabidopsis thaliana]
  misc_feature (27)..(244): Homolog of NCBI NO: 18422225 NR Description: expressed protein
TQQTTRSLSFFFFSDQSRVYSHRRRTMIHLLYTVIFAEMALILLLLFKTPLRKLIILTFDRIKRGRGPVVVKTIGTTVFVVLLSSIYSLVNIQRRSEDGAVLNPTDQVLASKHLLEASLMGFVLFLSLMIDRLHHYIRELRLLRKTMETAKKQNRGFEDGKTTSGEEVKALGEEIAALKAKIKTLESESESKGKELKGAQGETEALRKQADGFLMEYDRLLEDNQNLRNQLESIGHSPEGKKGM

SEQ ID NO: 26068 - protein, 218 aa, Arabidopsis thaliana
  peptide (1)..(218): Ceres Seq. ID no. 12331392
  misc_feature (4)..(192): Pfam Name: B-cell receptor-associated protein 31-like Pfam Description: B-cell receptor-associated protein 31-like
  misc_feature (1)..(205): Homolog of NCBI NO: 15239667 NR Description: putative protein; protein id: At5g48660.1
  misc_feature (1)..(209): Homolog of NCBI NO: 34897474 NR Description: unknown protein [Oryza sativa (japonica
  misc_feature (1)..(208): Homolog of NCBI NO: 22655198 NR Description: unknown protein [Arabidopsis thaliana]
  misc_feature (1)..(129): Homolog of NCBI NO: 18402620 NR Description: expressed protein
  misc_feature (1)..(205): Homolog of NCBI NO: 15231412 NR Description: unknown protein; protein id: At3g07190.1
  misc_feature (1)..(155): Homolog of NCBI NO: 30682503 NR Description: expressed protein [Arabidopsis thaliana]
  misc_feature (1)..(216): Homolog of NCBI NO: 9759015 NR Description: gene_id:K16E1.4~unknown protein [Arabidopsis
  misc_feature (1)..(218): Homolog of NCBI NO: 21553655 NR Description: unknown [Arabidopsis thaliana]
  misc_feature (1)..(218): Homolog of NCBI NO: 18422225 NR Description: expressed protein
MIHLLYTVIFAEMALILLLLFKTPLRKLIILTFDRIKRGRGPVVVKTIGTTVFVVLLSSIYSLVNIQRRSEDGAVLNPTDQVLASKHLLEASLMGFVLFLSLMIDRLHHYIRELRLLRKTMETAKKQNRGFEDGKTTSGEEVKALGEEIAALKAKIKTLESESESKGKELKGAQGETEALRKQADGFLMEYDRLLEDNQNLRNQLESIGHSPEGKKGM

SEQ ID NO: 26069 - protein, 206 aa, Arabidopsis thaliana
  peptide (1)..(206): Ceres Seq. ID no. 12331393
  misc_feature (1)..(180): Pfam Name: B-cell receptor-associated protein 31-like Pfam Description: B-cell receptor-associated protein 31-like
  misc_feature (1)..(117): Homolog of NCBI NO: 18402620 NR Description: expressed protein
  misc_feature (1)..(143): Homolog of NCBI NO: 30682503 NR Description: expressed protein [Arabidopsis thaliana]
  misc_feature (1)..(193): Homolog of NCBI NO: 15231412 NR Description: unknown protein; protein id: At3g07190.1
  misc_feature (1)..(193): Homolog of NCBI NO: 15239667 NR Description: putative protein; protein id: At5g48660.1
  misc_feature (1)..(197): Homolog of NCBI NO: 34897474 NR Description: unknown protein [Oryza sativa (japonica
  misc_feature (1)..(196): Homolog of NCBI NO: 22655198 NR Description: unknown protein [Arabidopsis thaliana]
  misc_feature (1)..(204): Homolog of NCBI NO: 9759015 NR Description: gene_id:K16E1.4~unknown protein [Arabidopsis
  misc_feature (1)..(206): Homolog of NCBI NO: 21553655 NR Description: unknown [Arabidopsis thaliana]
  misc_feature (1)..(206): Homolog of NCBI NO: 18422225 NR Description: expressed protein
MALILLLLFKTPLRKLIILTFDRIKRGRGPVVVKTIGTTVFVVLLSSIYSLVNIQRRSEDGAVLNPTDQVLASKHLLEASLMGFVLFLSLMIDRLHHYIRELRLLRKTMETAKKQNRGFEDGKTTSGEEVKALGEEIAALKAKIKTLESESESKGKELKGAQGETEALRKQADGFLMEYDRLLEDNQNLRNQLESIGHSPEGKKGM

SEQ ID NO: 26070 - DNA, 1052 bp, Arabidopsis thaliana
  misc_feature (1)..(1052): Ceres Seq. ID no. 12331426
  misc_feature: MA Experiment ID: 108462 Result: Up-regulated in Transcription
  misc_feature: MA Experiment 108462 PARAMETER Experiment Name: At_Germinating_Seeds_cDNA_P Parameter: Age (day) Value: 2 vs. 0
  misc_feature: MA Experiment 108462 PARAMETER Experiment Name: At_Germinating_Seeds_cDNA_P Parameter: Tissue Value: Germinating Seeds
  misc_feature: MA Experiment ID: 108463 Result: Up-regulated in Transcription
  misc_feature: MA Experiment 108463 PARAMETER Experiment Name: At_Germinating_Seeds_cDNA_P Parameter: Age (day) Value: 3 vs. 0
  misc_feature: MA Experiment 108463 PARAMETER Experiment Name: At_Germinating_Seeds_cDNA_P Parameter: Tissue Value: Germinating Seeds
  misc_feature: MA Experiment ID: 108464 Result: Up-regulated in Transcription
  misc_feature: MA Experiment 108464 PARAMETER Experiment Name: At_Germinating_Seeds_cDNA_P Parameter: Age (day) Value: 4 vs. 0
  misc_feature: MA Experiment 108464 PARAMETER Experiment Name: At_Germinating_Seeds_cDNA_P Parameter: Tissue Value: Germinating Seeds
  misc_feature: MA Experiment ID: 108577 Result: Down-regulated in Transcription
  misc_feature: MA Experiment 108577 PARAMETER Experiment Name: At_42deg_Heat_cDNA_P Parameter: Temperature (deg C) Value: 42 vs. 22
  misc_feature: MA Experiment 108577 PARAMETER Experiment Name: At_42deg_Heat_cDNA_P Parameter: Timepoint (hr) Value: 6
  misc_feature: MA Experiment 108577 PARAMETER Experiment Name: At_42deg_Heat_cDNA_P Parameter: Tissue Value: Aerial
  misc_feature: MA Experiment ID: 108585 Result: Down-regulated in Transcription
  misc_feature: MA Experiment 108585 PARAMETER Experiment Name: At_5mM_NaNP_cDNA_P Parameter: Timepoint (hr) Value: 6
  misc_feature: MA Experiment 108585 PARAMETER Experiment Name: At_5mM_NaNP_cDNA_P Parameter: Tissue Value: Aerial
  misc_feature: MA Experiment 108585 PARAMETER Experiment Name: At_5mM_NaNP_cDNA_P Parameter: Treatment Value: null
  misc_feature: MA Experiment ID: 108594 Result: Down-regulated in Transcription
  misc_feature: MA Experiment 108594 PARAMETER Experiment Name: At_Ler-rhl_Root_cDNA_P Parameter: Plant Line Value: null
  misc_feature: MA Experiment ID: 108595 Result: Down-regulated in Transcription
  misc_feature: MA Experiment 108595 PARAMETER Experiment Name: At_Ler-pi_Ovule_cDNA_P Parameter: Plant Line Value: null
  misc_feature: MA Experiment ID: 20000087 Result: Down-regulated in Transcription
  misc_feature: MA Experiment 20000087 PARAMETER Experiment Name: At_100uM_ABA_Mutants_cDNA_P Parameter: Plant Line Value: WS
  misc_feature: MA Experiment 20000087 PARAMETER Experiment Name: At_100uM_ABA_Mutants_cDNA_P Parameter: Timepoint (hr) Value: 6
  misc_feature: MA Experiment 20000087 PARAMETER Experiment Name: At_100uM_ABA_Mutants_cDNA_P Parameter: Tissue Value: Aerial
  misc_feature: MA Experiment 20000087 PARAMETER Experiment Name: At_100uM_ABA_Mutants_cDNA_P Parameter: Treatment Value: 100uM ABA vs. No Treatment
  misc_feature: MA Experiment ID: 20000112 Result: Down-regulated in Transcription
  misc_feature: MA Experiment 20000112 PARAMETER Experiment Name: At_42deg_Heat_cDNA_P Parameter: Temperature (deg C) Value: 42 vs. 22
  misc_feature: MA Experiment 20000112 PARAMETER Experiment Name: At_42deg_Heat_cDNA_P Parameter: Timepoint (hr) Value: 2
  misc_feature: MA Experiment 20000112 PARAMETER Experiment Name: At_42deg_Heat_cDNA_P Parameter: Tissue Value: Aerial
  misc_feature: MA Experiment ID: 20000171 Result: Down-regulated in Transcription
  misc_feature: MA Experiment 20000171 PARAMETER Experiment Name: At_42deg_Heat_P Parameter: Age (day) Value: 14
  misc_feature: MA Experiment 20000171 PARAMETER Experiment Name: At_42deg_Heat_P Parameter: Organism Value: A. thaliana
  misc_feature: MA Experiment 20000171 PARAMETER Experiment Name: At_42deg_Heat_P Parameter: Plant Line Value: WS
  misc_feature: MA Experiment 20000171 PARAMETER Experiment Name: At_42deg_Heat_P Parameter: Temperature (deg C) Value: 42 vs. 22
  misc_feature: MA Experiment 20000171 PARAMETER Experiment Name: At_42deg_Heat_P Parameter: Timepoint (hr) Value: 1
  misc_feature: MA Experiment 20000171 PARAMETER Experiment Name: At_42deg_Heat_P Parameter: Tissue Value: Aerial
  misc_feature: MA Experiment ID: 20000227 Result: Down-regulated in Transcription
  misc_feature: MA Experiment 20000227 PARAMETER Experiment Name: At_Root-Tips-vs-Tops_P Parameter: Tissue Value: Root Tips vs. Root Tops
  misc_feature: MA Experiment ID: 20000264 Result: Up-regulated in Transcription
  misc_feature: MA Experiment 20000264 PARAMETER Experiment Name: At_Open_Flower_P Parameter: Age (day) Value: 21
  misc_feature: MA Experiment 20000264 PARAMETER Experiment Name: At_Open_Flower_P Parameter: Plant Line Value: WS
  misc_feature: MA Experiment 20000264 PARAMETER Experiment Name: At_Open_Flower_P Parameter: Tissue Value: Open Flower vs. Whole Plant
  misc_feature: MA Experiment ID: 20000436 Result: Down-regulated in Transcription
  misc_feature: MA Experiment 20000436 PARAMETER Experiment Name: At_Drought_P Parameter: Age (day) Value: 7
  misc_feature: MA Experiment 20000436 PARAMETER Experiment Name: At_Drought_P Parameter: Organism Value: A. thaliana
  misc_feature: MA Experiment 20000436 PARAMETER Experiment Name: At_Drought_P Parameter: Plant Line Value: WS
  misc_feature: MA Experiment 20000436 PARAMETER Experiment Name: At_Drought_P Parameter: Timepoint (hr) Value: 12
  misc_feature: MA Experiment 20000436 PARAMETER Experiment Name: At_Drought_P Parameter: Tissue Value: Whole Plant
  misc_feature: MA Experiment 20000436 PARAMETER Experiment Name: At_Drought_P Parameter: Treatment Value: Drought vs. No Drought
  misc_feature: MA Experiment ID: 20000437 Result: Down-regulated in Transcription
  misc_feature: MA Experiment 20000437 PARAMETER Experiment Name: At_Drought_P Parameter: Age (day) Value: 8
  misc_feature: MA Experiment 20000437 PARAMETER Experiment Name: At_Drought_P Parameter: Organism Value: A. thaliana
  misc_feature: MA Experiment 20000437 PARAMETER Experiment Name: At_Drought_P Parameter: Plant Line Value: WS
  misc_feature: MA Experiment 20000437 PARAMETER Experiment Name: At_Drought_P Parameter: Timepoint (hr) Value: 24
  misc_feature: MA Experiment 20000437 PARAMETER Experiment Name: At_Drought_P Parameter: Tissue Value: Whole Plant
  misc_feature: MA Experiment 20000437 PARAMETER Experiment Name: At_Drought_P Parameter: Treatment Value: Drought vs. No Drought
  misc_feature: MA Experiment ID: 20000438 Result: Up-regulated in Transcription
  misc_feature: MA Experiment 20000438 PARAMETER Experiment Name: At_Shoots__P Parameter: Age (day) Value: 14
  misc_feature: MA Experiment 20000438 PARAMETER Experiment Name: At_Shoots__P Parameter: Tissue Value: Shoots vs. Whole Plant
  misc_feature: MA Experiment ID: 20000451 Result: Down-regulated in Transcription
  misc_feature: MA Experiment 20000451 PARAMETER Experiment Name: At_CS6879_Shoots-Roots_P Parameter: Age (day) Value: 14
  misc_feature: MA Experiment 20000451 PARAMETER Experiment Name: At_CS6879_Shoots-Roots_P Parameter: Organism Value: A. thaliana
  misc_feature: MA Experiment 20000451 PARAMETER Experiment Name: At_CS6879_Shoots-Roots_P Parameter: Plant Line Value: CS6879 vs. WS
  misc_feature: MA Experiment 20000451 PARAMETER Experiment Name: At_CS6879_Shoots-Roots_P Parameter: Tissue Value: Roots
  misc_feature: MA Experiment ID: 20000794 Result: Up-regulated in Transcription
  misc_feature: MA Experiment 20000794 PARAMETER Experiment Name: At_Petals_P Parameter: Age (day) Value: 23-25 days
  misc_feature: MA Experiment 20000794 PARAMETER Experiment Name: At_Petals_P Parameter: Plant Line Value: WS
  misc_feature: MA Experiment 20000794 PARAMETER Experiment Name: At_Petals_P Parameter: Tissue Value: Petals vs. Whole plant
  misc_feature: MA Experiment ID: 20001247 Result: Down-regulated in Transcription
  misc_feature: MA Experiment 20001247 PARAMETER Experiment Name: At_Far-red-induction_P Parameter: Age (day) Value: 7
  misc_feature: MA Experiment 20001247 PARAMETER Experiment Name: At_Far-red-induction_P Parameter: Light Value: Far-red vs. White
  misc_feature: MA Experiment 20001247 PARAMETER Experiment Name: At_Far-red-induction_P Parameter: Organism Value: A. thaliana
  misc_feature: MA Experiment 20001247 PARAMETER Experiment Name: At_Far-red-induction_P Parameter: Plant Line Value: Columbia
  misc_feature: MA Experiment 20001247 PARAMETER Experiment Name: At_Far-red-induction_P Parameter: Timepoint (hr) Value: 1
  misc_feature: MA Experiment 20001247 PARAMETER Experiment Name: At_Far-red-induction_P Parameter: Tissue Value: Whole Plant
  misc_feature: MA Experiment ID: 20001248 Result: Down-regulated in Transcription
  misc_feature: MA Experiment 20001248 PARAMETER Experiment Name: At_Far-red-induction_P Parameter: Age (day) Value: 7
  misc_feature: MA Experiment 20001248 PARAMETER Experiment Name: At_Far-red-induction_P Parameter: Light Value: Far-red vs. White
  misc_feature: MA Experiment 20001248 PARAMETER Experiment Name: At_Far-red-induction_P Parameter: Organism Value: A. thaliana
  misc_feature: MA Experiment 20001248 PARAMETER Experiment Name: At_Far-red-induction_P Parameter: Plant Line Value: Columbia
  misc_feature: MA Experiment 20001248 PARAMETER Experiment Name: At_Far-red-induction_P Parameter: Timepoint (hr) Value: 4
  misc_feature: MA Experiment 20001248 PARAMETER Experiment Name: At_Far-red-induction_P Parameter: Tissue Value: Whole Plant
  misc_feature: MA Experiment ID: 20001560 Result: Down-regulated in Transcription
  misc_feature: MA Experiment 20001560 PARAMETER Experiment Name: At_Drought_Soil_Dry_P Parameter: Age (day) Value: 28
  misc_feature: MA Experiment 20001560 PARAMETER Experiment Name: At_Drought_Soil_Dry_P Parameter: Organism Value: A. thaliana
  misc_feature: MA Experiment 20001560 PARAMETER Experiment Name: At_Drought_Soil_Dry_P Parameter: Plant Line Value: WS
  misc_feature: MA Experiment 20001560 PARAMETER Experiment Name: At_Drought_Soil_Dry_P Parameter: Post Timepoint (hr) Value: None
  misc_feature: MA Experiment 20001560 PARAMETER Experiment Name: At_Drought_Soil_Dry_P Parameter: Post-Treatment Value: None
  misc_feature: MA Experiment 20001560 PARAMETER Experiment Name: At_Drought_Soil_Dry_P Parameter: Timepoint (day) Value: 14
  misc_feature: MA Experiment 20001560 PARAMETER Experiment Name: At_Drought_Soil_Dry_P Parameter: Treatment Value: Drought vs. No Drought
  misc_feature: MA Experiment ID: 20001905 Result: Down-regulated in Transcription
  misc_feature: MA Experiment 20001905 PARAMETER Experiment Name: At_Drought_Reproduction_P Parameter: Age (day) Value: 40
  misc_feature: MA Experiment 20001905 PARAMETER Experiment Name: At_Drought_Reproduction_P Parameter: Organism Value: A. thaliana
  misc_feature: MA Experiment 20001905 PARAMETER Experiment Name: At_Drought_Reproduction_P Parameter: Plant Line Value: WS
  misc_feature: MA Experiment 20001905 PARAMETER Experiment Name: At_Drought_Reproduction_P Parameter: Timepoint (day) Value: 10
  misc_feature: MA Experiment 20001905 PARAMETER Experiment Name: At_Drought_Reproduction_P Parameter: Tissue Value: Rosettes
  misc_feature: MA Experiment 20001905 PARAMETER Experiment Name: At_Drought_Reproduction_P Parameter: Treatment Value: Drought vs. No Drought
  misc_feature: MA Experiment ID: 20001906 Result: Down-regulated in Transcription
  misc_feature: MA Experiment 20001906 PARAMETER Experiment Name: At_Drought_Reproduction_P Parameter: Age (day) Value: 35
  misc_feature: MA Experiment 20001906 PARAMETER Experiment Name: At_Drought_Reproduction_P Parameter: Organism Value: A. thaliana
  misc_feature: MA Experiment 20001906 PARAMETER Experiment Name: At_Drought_Reproduction_P Parameter: Plant Line Value: WS
  misc_feature: MA Experiment 20001906 PARAMETER Experiment Name: At_Drought_Reproduction_P Parameter: Timepoint (day) Value: 5
  misc_feature: MA Experiment 20001906 PARAMETER Experiment Name: At_Drought_Reproduction_P Parameter: Tissue Value: Siliques
  misc_feature: MA Experiment 20001906 PARAMETER Experiment Name: At_Drought_Reproduction_P Parameter: Treatment Value: Drought vs. No Drought
attgtatatatagtttgtggcatttctggtatatggtcactagaaaaatggacaaaagattatggagtcttcaaggtatgactgctcttgtgaccggtgcagccagcggaatcggttatgccatagtagaagagttagctggttttggagctaaaatccacatatgtgacatatccaaaactttgctcaatcaaagtttaagcgaatgggaaaataaagggtttcaagtgagtggttcagtatgtgatgtaacctctcatcctgagagagaaaaactgatgcaaaccgtctcctcgattttcgatggcaaactcaacattcttgtaaataacgtgggggtacttcgcggaaagccaacaacagaatatgtggcagacgatttcacttttcatatatcaactaacttggaagctgcttaccatttttgtcaactttcacatcctctcttaaaggcttcaggctatggaagcattgtattcctttcctctgttgctggggttgtatcactaattgactgtggatccatttatggtctaacaaaaggagctctaaatcaattagctagaaacttggcatgtgaatgggcaaaagacggcataagagccaatgctgttgcacctaatgttgtcaagactgctcagtctcaatcgtttcttgaagacgtcagtaaaaaggagggattgttgagtagaactccacttggccgtgttggagagccgaatgaagtttcatcactagtggtcttcttgtgtctacctgcagcttcttatatcacaggtcaaaccatttgtgttgatggaggtctcacggttaacggtttctcctatcaaccacatgcttgagaaatagtcttgtcgctctcaaagttctatatctaataaaagttctcattctatgagtttataaacgtaaacatcaatgagtttgcaattccatattggagatactaatctcgcacatatacaagattcggttacacccgctacgccaacaactcacaccaatgtgatctctcattctctctcataaatgaaatgttatactattttttg

SEQ ID NO: 26071 - protein, 279 aa, Arabidopsis thaliana
  peptide (1)..(279): Ceres Seq. ID no. 12331427
  misc_feature (21)..(277): Homolog of NCBI NO: 25406975 NR Description: protein F22G5.20 [imported] - Arabidopsis
  misc_feature (21)..(277): Homolog of NCBI NO: 15222399 NR Description: tropinone reductase-I, putative
  misc_feature (16)..(277): Homolog of NCBI NO: 15227073 NR Description: putative tropinone reductase; protein id:
  misc_feature (16)..(279): Homolog of NCBI NO: 15224550 NR Description: putative tropinone reductase; protein id:
  misc_feature (16)..(277): Homolog of NCBI NO: 30684202 NR Description: short-chain dehydrogenase/reductase family
  misc_feature (16)..(279): Homolog of NCBI NO: 15227071 NR Description: putative tropinone reductase; protein id:
  misc_feature (16)..(279): Homolog of NCBI NO: 15227070 NR Description: putative tropinone reductase
  misc_feature (16)..(279): Homolog of NCBI NO: 21553753 NR Description: putative tropinone reductase [Arabidopsis
  misc_feature (16)..(279): Homolog of NCBI NO: 15529236 NR Description: At2g29320/F16P2.30 [Arabidopsis thaliana]
  misc_feature (11)..(279): Homolog of NCBI NO: 15227072 NR Description: putative tropinone reductase
CIYSLWHFWYMVTRKMDKRLWSLQGMTALVTGAASGIGYAIVEELAGFGAKIHICDISKTLLNQSLSEWENKGFQVSGSVCDVTSHPEREKLMQTVSSIFDGKLNILVNNVGVLRGKPTTEYVADDFTFHISTNLEAAYHFCQLSHPLLKASGYGSIVFLSSVAGVVSLIDCGSIYGLTKGALNQLARNLACEWAKDGIRANAVAPNVVKTAQSQSFLEDVSKKEGLLSRTPLGRVGEPNEVSSLVVFLCLPAASYITGQTICVDGGLTVNGFSYQPHA

SEQ ID NO: 26072 - protein, 269 aa, Arabidopsis thaliana
  peptide (1)..(269): Ceres Seq. ID no. 12331428
  misc_feature (11)..(267): Homolog of NCBI NO: 25406975 NR Description: protein F22G5.20 [imported] - Arabidopsis
  misc_feature (11)..(267): Homolog of NCBI NO: 15222399 NR Description: tropinone reductase-I, putative
  misc_feature (6)..(267): Homolog of NCBI NO: 15227073 NR Description: putative tropinone reductase; protein id:
  misc_feature (6)..(269): Homolog of NCBI NO: 15224550 NR Description: putative tropinone reductase; protein id:
  misc_feature (6)..(267): Homolog of NCBI NO: 30684202 NR Description: short-chain dehydrogenase/reductase family
  misc_feature (6)..(269): Homolog of NCBI NO: 15227071 NR Description: putative tropinone reductase; protein id:
  misc_feature (6)..(269): Homolog of NCBI NO: 15227070 NR Description: putative tropinone reductase
  misc_feature (6)..(269): Homolog of NCBI NO: 21553753 NR Description: putative tropinone reductase [Arabidopsis
  misc_feature (6)..(269): Homolog of NCBI NO: 15529236 NR Description: At2g29320/F16P2.30 [Arabidopsis thaliana]
  misc_feature (1)..(269): Homolog of NCBI NO: 15227072 NR Description: putative tropinone reductase
MVTRKMDKRLWSLQGMTALVTGAASGIGYAIVEELAGFGAKIHICDISKTLLNQSLSEWENKGFQVSGSVCDVTSHPEREKLMQTVSSIFDGKLNILVNNVGVLRGKPTTEYVADDFTFHISTNLEAAYHFCQLSHPLLKASGYGSIVFLSSVAGVVSLIDCGSIYGLTKGALNQLARNLACEWAKDGIRANAVAPNVVKTAQSQSFLEDVSKKEGLLSRTPLGRVGEPNEVSSLVVFLCLPAASYITGQTICVDGGLTVNGFSYQPHA

SEQ ID NO: 26073 - protein, 264 aa, Arabidopsis thaliana
  peptide (1)..(264): Ceres Seq. ID no. 12331429
  misc_feature (6)..(262): Homolog of NCBI NO: 25406975 NR Description: protein F22G5.20 [imported] - Arabidopsis
  misc_feature (6)..(262): Homolog of NCBI NO: 15222399 NR Description: tropinone reductase-I, putative
  misc_feature (1)..(262): Homolog of NCBI NO: 15227073 NR Description: putative tropinone reductase; protein id:
  misc_feature (1)..(264): Homolog of NCBI NO: 15224550 NR Description: putative tropinone reductase; protein id:
  misc_feature (1)..(262): Homolog of NCBI NO: 30684202 NR Description: short-chain dehydrogenase/reductase family
  misc_feature (1)..(264): Homolog of NCBI NO: 15227071 NR Description: putative tropinone reductase; protein id:
  misc_feature (1)..(264): Homolog of NCBI NO: 15227070 NR Description: putative tropinone reductase
  misc_feature (1)..(264): Homolog of NCBI NO: 21553753 NR Description: putative tropinone reductase [Arabidopsis
  misc_feature (1)..(264): Homolog of NCBI NO: 15529236 NR Description: At2g29320/F16P2.30 [Arabidopsis thaliana]
  misc_feature (1)..(264): Homolog of NCBI NO: 15227072 NR Description: putative tropinone reductase
MDKRLWSLQGMTALVTGAASGIGYAIVEELAGFGAKIHICDISKTLLNQSLSEWENKGFQVSGSVCDVTSHPEREKLMQTVSSIFDGKLNILVNNVGVLRGKPTTEYVADDFTFHISTNLEAAYHFCQLSHPLLKASGYGSIVFLSSVAGVVSLIDCGSIYGLTKGALNQLARNLACEWAKDGIRANAVAPNVVKTAQSQSFLEDVSKKEGLLSRTPLGRVGEPNEVSSLVVFLCLPAASYITGQTICVDGGLTVNGFSYQPHA

SEQ ID NO: 26074 - DNA, 506 bp, Arabidopsis thaliana
  misc_feature (1)..(506): Ceres Seq. ID no. 12394357
  misc_feature: MA Experiment ID: 108434 Result: Up-regulated in Transcription
  misc_feature: MA Experiment 108434 PARAMETER Experiment Name: At_Root_Tips_cDNA_P Parameter: Tissue Value: Root Tips
  misc_feature: MA Experiment ID: 108461 Result: Up-regulated in Transcription
  misc_feature: MA Experiment 108461 PARAMETER Experiment Name: At_Germinating_Seeds_cDNA_P Parameter: Age (day) Value: 1 vs. 0
  misc_feature: MA Experiment 108461 PARAMETER Experiment Name: At_Germinating_Seeds_cDNA_P Parameter: Tissue Value: Germinating Seeds
  misc_feature: MA Experiment ID: 108462 Result: Up-regulated in Transcription
  misc_feature: MA Experiment 108462 PARAMETER Experiment Name: At_Germinating_Seeds_cDNA_P Parameter: Age (day) Value: 2 vs. 0
  misc_feature: MA Experiment 108462 PARAMETER Experiment Name: At_Germinating_Seeds_cDNA_P Parameter: Tissue Value: Germinating Seeds
  misc_feature: MA Experiment ID: 108464 Result: Up-regulated in Transcription
  misc_feature: MA Experiment 108464 PARAMETER Experiment Name: At_Germinating_Seeds_cDNA_P Parameter: Age (day) Value: 4 vs. 0
  misc_feature: MA Experiment 108464 PARAMETER Experiment Name: At_Germinating_Seeds_cDNA_P Parameter: Tissue Value: Germinating Seeds
  misc_feature: MA Experiment ID: 20000179 Result: Up-regulated in Transcription
  misc_feature: MA Experiment 20000179 PARAMETER Experiment Name: At_Germinating_Seeds_P Parameter: Age (hr) Value: 6 vs. 0
  misc_feature: MA Experiment 20000179 PARAMETER Experiment Name: At_Germinating_Seeds_P Parameter: Tissue Value: Germinating Seeds
  misc_feature: MA Experiment ID: 20000180 Result: Up-regulated in Transcription
  misc_feature: MA Experiment 20000180 PARAMETER Experiment Name: At_Germinating_Seeds_P Parameter: Age (hr) Value: 24 vs. 0
  misc_feature: MA Experiment 20000180 PARAMETER Experiment Name: At_Germinating_Seeds_P Parameter: Tissue Value: Germinating Seeds
  misc_feature: MA Experiment ID: 20000214 Result: Down-regulated in Transcription
  misc_feature: MA Experiment 20000214 PARAMETER Experiment Name: At_4deg_Cold_P Parameter: Timepoint (hr) Value: 6
tcattttgatggttatatataggtttatgatgtgacaaagttcttggatgatcatcctggtggtgatgaggttatcttgacttctacagggaaagatgcgaccgatgatttcgaggatgtgggacatagttcgactgcgaaagccatgctagatgagtactatgtgggtgatattgacacagctactgtgccggttaaagctaagtttgtgcctcctacgtcgacgaaagccgtggctactcaggataagagctcggattttgttattaagctccttcagttccttgttccacttctaatcttaggcttggctttcggcattcggtactacactaagaccaaggctccttcttcttgaaagattgaattgtggcctaagtgaattgcttgtgtacgacgtggttaaactctgtctctacctctgtttgtcttgtaagacatcattatattctctattgcaatcaactgatagacctttgatttttaagccatctacctttgttgtc

SEQ ID NO: 26075 - protein, 70 aa, Arabidopsis thaliana
  peptide (1)..(70): Ceres Seq. ID no. 12394358
  misc_feature (1)..(65): Homolog of NCBI NO: 15225731 NR Description: putative cytochrome b5; protein id: At2g32720.1
  misc_feature (1)..(67): Homolog of NCBI NO: 34905998 NR Description: putative cytochrome B5 [Oryza sativa (japonica
  misc_feature (1)..(67): Homolog of NCBI NO: 12229735 NR Description: Cytochrome b5
  misc_feature (1)..(67): Homolog of NCBI NO: 1345881 NR Description: Cytochrome b5
  misc_feature (1)..(67): Homolog of NCBI NO: 14719320 NR Description: cytochrome B5 [Oryza sativa]
  misc_feature (1)..(67): Homolog of NCBI NO: 1345925 NR Description: Cytochrome b5, seed isoform
  misc_feature (1)..(67): Homolog of NCBI NO: 2647949 NR Description: cytochrome b5 [Olea europaea]
  misc_feature (1)..(64): Homolog of NCBI NO: 1345882 NR Description: CYTOCHROME B5
  misc_feature (1)..(64): Homolog of NCBI NO: 1076621 NR Description: cytochrome b5 - common tobacco
  misc_feature (1)..(70): Homolog of NCBI NO: 15239718 NR Description: cytochrome b5 (dbj|BAA74840.1)
MLDEYYVGDIDTATVPVKAKFVPPTSTKAVATQDKSSDFVIKLLQFLVPLLILGLAFGIRYYTKTKAPSS

SEQ ID NO: 26076 - protein, 48 aa, Arabidopsis thaliana
  peptide (1)..(48): Ceres Seq. ID no. 12394359
MSTMWVILTQLLCRLKLSLCLLRRRKPWLLRIRARILLLSSFSSLFHF

SEQ ID NO: 26077 - protein, 45 aa, Arabidopsis thaliana
  peptide (1)..(45): Ceres Seq. ID no. 12394360
MWVILTQLLCRLKLSLCLLRRRKPWLLRIRARILLLSSFSSLFHF

SEQ ID NO: 26078 - DNA, 609 bp, Arabidopsis thaliana
  misc_feature (1)..(609): Ceres Seq. ID no. 12394273
  misc_feature: MA Experiment ID: 108489 Result: Down-regulated in Transcription
  misc_feature: MA Experiment ID: 108576 Result: Up-regulated in Transcription
  misc_feature: MA Experiment 108576 PARAMETER Experiment Name: At_42deg_Heat_cDNA_P Parameter: Temperature (deg C) Value: 42 vs. 22
  misc_feature: MA Experiment 108576 PARAMETER Experiment Name: At_42deg_Heat_cDNA_P Parameter: Timepoint (hr) Value: 1
  misc_feature: MA Experiment 108576 PARAMETER Experiment Name: At_42deg_Heat_cDNA_P Parameter: Tissue Value: Aerial
  misc_feature: MA Experiment ID: 20000264 Result: Up-regulated in Transcription
  misc_feature: MA Experiment 20000264 PARAMETER Experiment Name: At_Open_Flower_P Parameter: Age (day) Value: 21
  misc_feature: MA Experiment 20000264 PARAMETER Experiment Name: At_Open_Flower_P Parameter: Plant Line Value: WS
  misc_feature: MA Experiment 20000264 PARAMETER Experiment Name: At_Open_Flower_P Parameter: Tissue Value: Open Flower vs. Whole Plant
  misc_feature: MA Experiment ID: 20000438 Result: Down-regulated in Transcription
  misc_feature: MA Experiment 20000438 PARAMETER Experiment Name: At_Shoots__P Parameter: Age (day) Value: 14
  misc_feature: MA Experiment 20000438 PARAMETER Experiment Name: At_Shoots__P Parameter: Tissue Value: Shoots vs. Whole Plant
  misc_feature: MA Experiment ID: 20000440 Result: Up-regulated in Transcription
  misc_feature: MA Experiment 20000440 PARAMETER Experiment Name: At_Closed-Flower__Sub_P Parameter: Tissue Value: Closed Flower vs. Whole Plant
  misc_feature: MA Experiment ID: 20000794 Result: Up-regulated in Transcription
  misc_feature: MA Experiment 20000794 PARAMETER Experiment Name: At_Petals_P Parameter: Age (day) Value: 23-25 days
  misc_feature: MA Experiment 20000794 PARAMETER Experiment Name: At_Petals_P Parameter: Plant Line Value: WS
  misc_feature: MA Experiment 20000794 PARAMETER Experiment Name: At_Petals_P Parameter: Tissue Value: Petals vs. Whole plant
  misc_feature: MA Experiment ID: 20001757 Result: Down-regulated in Transcription
  misc_feature: MA Experiment 20001757 PARAMETER Experiment Name: At_50mM_NH4NO3_L-to-H_P Parameter: Timepoint (hr) Value: 6
  misc_feature: MA Experiment 20001757 PARAMETER Experiment Name: At_50mM_NH4NO3_L-to-H_P Parameter: Tissue Value: Leaf
  misc_feature: MA Experiment 20001757 PARAMETER Experiment Name: At_50mM_NH4NO3_L-to-H_P Parameter: Treatment Value: 50mM NH4NO3 vs 100mM Mannitol
  misc_feature: MA Experiment ID: 20001911 Result: Down-regulated in Transcription
  misc_feature: MA Experiment 20001911 PARAMETER Experiment Name: At_Drought_Reproduction_P Parameter: Age (day) Value: 40
  misc_feature: MA Experiment 20001911 PARAMETER Experiment Name: At_Drought_Reproduction_P Parameter: Organism Value: A. thaliana
  misc_feature: MA Experiment 20001911 PARAMETER Experiment Name: At_Drought_Reproduction_P Parameter: Plant Line Value: WS
  misc_feature: MA Experiment 20001911 PARAMETER Experiment Name: At_Drought_Reproduction_P Parameter: Timepoint (day) Value: 10
  misc_feature: MA Experiment 20001911 PARAMETER Experiment Name: At_Drought_Reproduction_P Parameter: Tissue Value: Flowers
  misc_feature: MA Experiment 20001911 PARAMETER Experiment Name: At_Drought_Reproduction_P Parameter: Treatment Value: Drought vs. No Drought
aaaagattgtgaagatatatcatggagagagtgtgttgcatgtgcggtgatgtcggtttctccgacaagctcttcagctgcggtcactgccgctgccgcttccaacactcttattgtagcaactactacggccagtttgcggagcctaccgagatttgcgactggtgccgcagcgacgaccggaagctgagcaacgttgctagacatggcggttcttcttcaaagaagccttcttcttcggttaaatatgaaaatgacttctcaaacagatcggaatattcgcccggccaccggatcaagcataacaataaccgtcacgatcaagtagccaagggcgttgctggagatggaggcggagttacgtcgcctaagacggccacacgaaggtacaagcttctcaaagatgtcatgtgttagttccacctaaacgagaggtattagaagacttactataatcatactactctttcgagactgtgtgattaaattatgtataattagccactacggagagagcaaattaaaaaagaaaacgtcgttgtttgttttcatcctttttctcctttttacttttgtgtttatatatatgaaatgaatgtgtgtttggcc

SEQ ID NO: 26079 - protein, 131 aa, Arabidopsis thaliana
  peptide (1)..(131): Ceres Seq. ID no. 12394274
  misc_feature (4)..(49): Homolog of NCBI NO: 21740708 NR Description: OSJNBa0086B14.1 [Oryza sativa (japonica
  misc_feature (4)..(131): Homolog of NCBI NO: 21742342 NR Description: OSJNBb0034G17.21 [Oryza sativa (japonica
  misc_feature (4)..(131): Homolog of NCBI NO: 38345466 NR Description: OSJNBa0010H02.4 [Oryza sativa (japonica
  misc_feature (7)..(131): Homolog of NCBI NO: 21554245 NR Description: unknown [Arabidopsis thaliana]
  misc_feature (3)..(131): Homolog of NCBI NO: 15232353 NR Description: putative protein
  misc_feature (7)..(131): Homolog of NCBI NO: 21553800 NR Description: unknown [Arabidopsis thaliana]
  misc_feature (1)..(131): Homolog of NCBI NO: 18378917 NR Description: hypothetical protein    predicted by genefinder
MERVCCMCGDVGFSDKLFSCGHCRCRFQHSYCSNYYGQFAEPTEICDWCRSDDRKLSNVARHGGSSSKKPSSSVKYENDFSNRSEYSPGHRIKHNNNRHDQVAKGVAGDGGGVTSPKTATRRYKLLKDVMC

SEQ ID NO: 26080 - protein, 125 aa, Arabidopsis thaliana
  peptide (1)..(125): Ceres Seq. ID no. 12394275
  misc_feature (1)..(43): Homolog of NCBI NO: 21740708 NR Description: OSJNBa0086B14.1 [Oryza sativa (japonica
  misc_feature (1)..(125): Homolog of NCBI NO: 21742342 NR Description: OSJNBb0034G17.21 [Oryza sativa (japonica
  misc_feature (1)..(125): Homolog of NCBI NO: 38345466 NR Description: OSJNBa0010H02.4 [Oryza sativa (japonica
  misc_feature (1)..(125): Homolog of NCBI NO: 21554245 NR Description: unknown [Arabidopsis thaliana]
  misc_feature (1)..(125): Homolog of NCBI NO: 15232353 NR Description: putative protein
  misc_feature (1)..(125): Homolog of NCBI NO: 21553800 NR Description: unknown [Arabidopsis thaliana]
  misc_feature (1)..(125): Homolog of NCBI NO: 18378917 NR Description: hypothetical protein    predicted by genefinder
MCGDVGFSDKLFSCGHCRCRFQHSYCSNYYGQFAEPTEICDWCRSDDRKLSNVARHGGSSSKKPSSSVKYENDFSNRSEYSPGHRIKHNNNRHDQVAKGVAGDGGGVTSPKTATRRYKLLKDVMC

SEQ ID NO: 26081 - DNA, 801 bp, Arabidopsis thaliana
  misc_feature (1)..(801): Ceres Seq. ID no. 12370181
  misc_feature: MA Experiment ID: 108434 Result: Up-regulated in Transcription
  misc_feature: MA Experiment 108434 PARAMETER Experiment Name: At_Root_Tips_cDNA_P Parameter: Tissue Value: Root Tips
  misc_feature: MA Experiment ID: 108572 Result: Down-regulated in Transcription
  misc_feature: MA Experiment 108572 PARAMETER Experiment Name: At_Drought_cDNA_P Parameter: Timepoint (hr) Value: 1
  misc_feature: MA Experiment 108572 PARAMETER Experiment Name: At_Drought_cDNA_P Parameter: Tissue Value: Aerial
  misc_feature: MA Experiment 108572 PARAMETER Experiment Name: At_Drought_cDNA_P Parameter: Treatment Value: Drought vs. No Drought
  misc_feature: MA Experiment ID: 108573 Result: Down-regulated in Transcription
  misc_feature: MA Experiment 108573 PARAMETER Experiment Name: At_Drought_cDNA_P Parameter: Timepoint (hr) Value: 6
  misc_feature: MA Experiment 108573 PARAMETER Experiment Name: At_Drought_cDNA_P Parameter: Tissue Value: Aerial
  misc_feature: MA Experiment 108573 PARAMETER Experiment Name: At_Drought_cDNA_P Parameter: Treatment Value: Drought vs. No Drought
  misc_feature: MA Experiment ID: 108595 Result: Down-regulated in Transcription
  misc_feature: MA Experiment 108595 PARAMETER Experiment Name: At_Ler-pi_Ovule_cDNA_P Parameter: Plant Line Value: null
  misc_feature: MA Experiment ID: 108605 Result: Down-regulated in Transcription
  misc_feature: MA Experiment 108605 PARAMETER Experiment Name: At_100uM_ABA_cDNA_P Parameter: Timepoint (hr) Value: 6
  misc_feature: MA Experiment 108605 PARAMETER Experiment Name: At_100uM_ABA_cDNA_P Parameter: Tissue Value: Aerial
  misc_feature: MA Experiment 108605 PARAMETER Experiment Name: At_100uM_ABA_cDNA_P Parameter: Treatment Value: 100uM ABA vs. No Treatment
  misc_feature: MA Experiment ID: 20000070 Result: Down-regulated in Transcription
  misc_feature: MA Experiment 20000070 PARAMETER Experiment Name: At_100uM_ABA_Mutants_cDNA_P Parameter: Plant Line Value: CS24
  misc_feature: MA Experiment 20000070 PARAMETER Experiment Name: At_100uM_ABA_Mutants_cDNA_P Parameter: Timepoint (hr) Value: 6
  misc_feature: MA Experiment 20000070 PARAMETER Experiment Name: At_100uM_ABA_Mutants_cDNA_P Parameter: Tissue Value: Aerial
  misc_feature: MA Experiment 20000070 PARAMETER Experiment Name: At_100uM_ABA_Mutants_cDNA_P Parameter: Treatment Value: 100uM ABA vs. No Treatment
  misc_feature: MA Experiment ID: 20000071 Result: Down-regulated in Transcription
  misc_feature: MA Experiment 20000071 PARAMETER Experiment Name: At_100uM_ABA_Mutants_cDNA_P Parameter: Plant Line Value: CS8104
  misc_feature: MA Experiment 20000071 PARAMETER Experiment Name: At_100uM_ABA_Mutants_cDNA_P Parameter: Timepoint (hr) Value: 6
  misc_feature: MA Experiment 20000071 PARAMETER Experiment Name: At_100uM_ABA_Mutants_cDNA_P Parameter: Tissue Value: Aerial
  misc_feature: MA Experiment 20000071 PARAMETER Experiment Name: At_100uM_ABA_Mutants_cDNA_P Parameter: Treatment Value: 100uM ABA vs. No Treatment
  misc_feature: MA Experiment ID: 20000087 Result: Down-regulated in Transcription
  misc_feature: MA Experiment 20000087 PARAMETER Experiment Name: At_100uM_ABA_Mutants_cDNA_P Parameter: Plant Line Value: WS
  misc_feature: MA Experiment 20000087 PARAMETER Experiment Name: At_100uM_ABA_Mutants_cDNA_P Parameter: Timepoint (hr) Value: 6
  misc_feature: MA Experiment 20000087 PARAMETER Experiment Name: At_100uM_ABA_Mutants_cDNA_P Parameter: Tissue Value: Aerial
  misc_feature: MA Experiment 20000087 PARAMETER Experiment Name: At_100uM_ABA_Mutants_cDNA_P Parameter: Treatment Value: 100uM ABA vs. No Treatment
  misc_feature: MA Experiment ID: 20000117 Result: Down-regulated in Transcription
  misc_feature: MA Experiment 20000117 PARAMETER Experiment Name: At_100uM_ABA_Mutants_cDNA_P Parameter: Plant Line Value: Columbia
  misc_feature: MA Experiment 20000117 PARAMETER Experiment Name: At_100uM_ABA_Mutants_cDNA_P Parameter: Timepoint (hr) Value: 6
  misc_feature: MA Experiment 20000117 PARAMETER Experiment Name: At_100uM_ABA_Mutants_cDNA_P Parameter: Tissue Value: Aerial
  misc_feature: MA Experiment 20000117 PARAMETER Experiment Name: At_100uM_ABA_Mutants_cDNA_P Parameter: Treatment Value: 100uM ABA vs. No Treatment
  misc_feature: MA Experiment ID: 20000227 Result: Up-regulated in Transcription
  misc_feature: MA Experiment 20000227 PARAMETER Experiment Name: At_Root-Tips-vs-Tops_P Parameter: Tissue Value: Root Tips vs. Root Tops
  misc_feature: MA Experiment ID: 20000436 Result: Down-regulated in Transcription
  misc_feature: MA Experiment 20000436 PARAMETER Experiment Name: At_Drought_P Parameter: Age (day) Value: 7
  misc_feature: MA Experiment 20000436 PARAMETER Experiment Name: At_Drought_P Parameter: Organism Value: A. thaliana
  misc_feature: MA Experiment 20000436 PARAMETER Experiment Name: At_Drought_P Parameter: Plant Line Value: WS
  misc_feature: MA Experiment 20000436 PARAMETER Experiment Name: At_Drought_P Parameter: Timepoint (hr) Value: 12
  misc_feature: MA Experiment 20000436 PARAMETER Experiment Name: At_Drought_P Parameter: Tissue Value: Whole Plant
  misc_feature: MA Experiment 20000436 PARAMETER Experiment Name: At_Drought_P Parameter: Treatment Value: Drought vs. No Drought
  misc_feature: MA Experiment ID: 20000437 Result: Down-regulated in Transcription
  misc_feature: MA Experiment 20000437 PARAMETER Experiment Name: At_Drought_P Parameter: Age (day) Value: 8
  misc_feature: MA Experiment 20000437 PARAMETER Experiment Name: At_Drought_P Parameter: Organism Value: A. thaliana
  misc_feature: MA Experiment 20000437 PARAMETER Experiment Name: At_Drought_P Parameter: Plant Line Value: WS
  misc_feature: MA Experiment 20000437 PARAMETER Experiment Name: At_Drought_P Parameter: Timepoint (hr) Value: 24
  misc_feature: MA Experiment 20000437 PARAMETER Experiment Name: At_Drought_P Parameter: Tissue Value: Whole Plant
  misc_feature: MA Experiment 20000437 PARAMETER Experiment Name: At_Drought_P Parameter: Treatment Value: Drought vs. No Drought
  misc_feature: MA Experiment ID: 20000794 Result: Down-regulated in Transcription
  misc_feature: MA Experiment 20000794 PARAMETER Experiment Name: At_Petals_P Parameter: Age (day) Value: 23-25 days
  misc_feature: MA Experiment 20000794 PARAMETER Experiment Name: At_Petals_P Parameter: Plant Line Value: WS
  misc_feature: MA Experiment 20000794 PARAMETER Experiment Name: At_Petals_P Parameter: Tissue Value: Petals vs. Whole plant
  misc_feature: MA Experiment ID: 20001554 Result: Down-regulated in Transcription
  misc_feature: MA Experiment 20001554 PARAMETER Experiment Name: At_Drought_Soil_Dry_P Parameter: Age (day) Value: 21
  misc_feature: MA Experiment 20001554 PARAMETER Experiment Name: At_Drought_Soil_Dry_P Parameter: Organism Value: A. thaliana
  misc_feature: MA Experiment 20001554 PARAMETER Experiment Name: At_Drought_Soil_Dry_P Parameter: Plant Line Value: WS
  misc_feature: MA Experiment 20001554 PARAMETER Experiment Name: At_Drought_Soil_Dry_P Parameter: Post Timepoint (hr) Value: None
  misc_feature: MA Experiment 20001554 PARAMETER Experiment Name: At_Drought_Soil_Dry_P Parameter: Post-Treatment Value: None
  misc_feature: MA Experiment 20001554 PARAMETER Experiment Name: At_Drought_Soil_Dry_P Parameter: Timepoint (day) Value: 7
  misc_feature: MA Experiment 20001554 PARAMETER Experiment Name: At_Drought_Soil_Dry_P Parameter: Treatment Value: Drought vs. No Drought
  misc_feature: MA Experiment ID: 20001555 Result: Down-regulated in Transcription
  misc_feature: MA Experiment 20001555 PARAMETER Experiment Name: At_Drought_Soil_Dry_P Parameter: Age (day) Value: 24
  misc_feature: MA Experiment 20001555 PARAMETER Experiment Name: At_Drought_Soil_Dry_P Parameter: Organism Value: A. thaliana
  misc_feature: MA Experiment 20001555 PARAMETER Experiment Name: At_Drought_Soil_Dry_P Parameter: Plant Line Value: WS
  misc_feature: MA Experiment 20001555 PARAMETER Experiment Name: At_Drought_Soil_Dry_P Parameter: Post Timepoint (hr) Value: None
  misc_feature: MA Experiment 20001555 PARAMETER Experiment Name: At_Drought_Soil_Dry_P Parameter: Post-Treatment Value: None
  misc_feature: MA Experiment 20001555 PARAMETER Experiment Name: At_Drought_Soil_Dry_P Parameter: Timepoint (day) Value: 10
  misc_feature: MA Experiment 20001555 PARAMETER Experiment Name: At_Drought_Soil_Dry_P Parameter: Treatment Value: Drought vs. No Drought
  misc_feature: MA Experiment ID: 20001558 Result: Up-regulated in Transcription
  misc_feature: MA Experiment 20001558 PARAMETER Experiment Name: At_Drought_Soil_Dry_P Parameter: Age (day) Value: 27
  misc_feature: MA Experiment 20001558 PARAMETER Experiment Name: At_Drought_Soil_Dry_P Parameter: Organism Value: A. thaliana
  misc_feature: MA Experiment 20001558 PARAMETER Experiment Name: At_Drought_Soil_Dry_P Parameter: Plant Line Value: WS
  misc_feature: MA Experiment 20001558 PARAMETER Experiment Name: At_Drought_Soil_Dry_P Parameter: Post Timepoint (hr) Value: 6
  misc_feature: MA Experiment 20001558 PARAMETER Experiment Name: At_Drought_Soil_Dry_P Parameter: Post-Treatment Value: Re-Water vs. No Drought
  misc_feature: MA Experiment 20001558 PARAMETER Experiment Name: At_Drought_Soil_Dry_P Parameter: Timepoint (day) Value: 13
  misc_feature: MA Experiment 20001558 PARAMETER Experiment Name: At_Drought_Soil_Dry_P Parameter: Treatment Value: Drought vs. No Drought
  misc_feature: MA Experiment ID: 20001560 Result: Up-regulated in Transcription
  misc_feature: MA Experiment 20001560 PARAMETER Experiment Name: At_Drought_Soil_Dry_P Parameter: Age (day) Value: 28
  misc_feature: MA Experiment 20001560 PARAMETER Experiment Name: At_Drought_Soil_Dry_P Parameter: Organism Value: A. thaliana
  misc_feature: MA Experiment 20001560 PARAMETER Experiment Name: At_Drought_Soil_Dry_P Parameter: Plant Line Value: WS
  misc_feature: MA Experiment 20001560 PARAMETER Experiment Name: At_Drought_Soil_Dry_P Parameter: Post Timepoint (hr) Value: None
  misc_feature: MA Experiment 20001560 PARAMETER Experiment Name: At_Drought_Soil_Dry_P Parameter: Post-Treatment Value: None
  misc_feature: MA Experiment 20001560 PARAMETER Experiment Name: At_Drought_Soil_Dry_P Parameter: Timepoint (day) Value: 14
  misc_feature: MA Experiment 20001560 PARAMETER Experiment Name: At_Drought_Soil_Dry_P Parameter: Treatment Value: Drought vs. No Drought
  misc_feature: MA Experiment ID: 20001904 Result: Down-regulated in Transcription
  misc_feature: MA Experiment 20001904 PARAMETER Experiment Name: At_Drought_Reproduction_P Parameter: Age (day) Value: 37
  misc_feature: MA Experiment 20001904 PARAMETER Experiment Name: At_Drought_Reproduction_P Parameter: Organism Value: A. thaliana
  misc_feature: MA Experiment 20001904 PARAMETER Experiment Name: At_Drought_Reproduction_P Parameter: Plant Line Value: WS
  misc_feature: MA Experiment 20001904 PARAMETER Experiment Name: At_Drought_Reproduction_P Parameter: Timepoint (day) Value: 7
  misc_feature: MA Experiment 20001904 PARAMETER Experiment Name: At_Drought_Reproduction_P Parameter: Tissue Value: Rosettes
  misc_feature: MA Experiment 20001904 PARAMETER Experiment Name: At_Drought_Reproduction_P Parameter: Treatment Value: Drought vs. No Drought
  misc_feature: MA Experiment ID: 20001905 Result: Down-regulated in Transcription
  misc_feature: MA Experiment 20001905 PARAMETER Experiment Name: At_Drought_Reproduction_P Parameter: Age (day) Value: 40
  misc_feature: MA Experiment 20001905 PARAMETER Experiment Name: At_Drought_Reproduction_P Parameter: Organism Value: A. thaliana
  misc_feature: MA Experiment 20001905 PARAMETER Experiment Name: At_Drought_Reproduction_P Parameter: Plant Line Value: WS
  misc_feature: MA Experiment 20001905 PARAMETER Experiment Name: At_Drought_Reproduction_P Parameter: Timepoint (day) Value: 10
  misc_feature: MA Experiment 20001905 PARAMETER Experiment Name: At_Drought_Reproduction_P Parameter: Tissue Value: Rosettes
  misc_feature: MA Experiment 20001905 PARAMETER Experiment Name: At_Drought_Reproduction_P Parameter: Treatment Value: Drought vs. No Drought
aaaaagaaaaattgagagtcgccgcagctatcactctgctctgtcactttgtcttttactcagagaatcagagacagagagagaaagagagagagagcgaggggaagggaaatggagaaggcattaacgaaagtgacgagctttaaagtgggaagttcatggatctctaagaaagctaaagaagagctctcaaacatcaccaatgacctcacaacattctccagtactgttgaagagaaagcaaaatgggttttcaacaagcttaaaggaaaaccactgaaaagcttaccagacctcctcaaagaatacaacttaccaccaggactcttcccacaaaacataatctgctacgaattcgatgagacgaagaacaaactcactgtcttcttctcttcaccatgtgaagtcacattcaaagatggatcagcgataagatatgcaacgtgtgtgaaagggattttgcttagagggaagctgatgggtgtggaaggaatgaagacaaaagtgttggtgtgggttaaagtcacaacaatctcagtcgagagctccaagtctgacaaactctggttcactgctggtgtcaagaaatctcgatctaaggatgtttatgacacacctcatgatgctatcaaagtcattggagagttctaaggatttttttcacaattggttattatcatatttgattcatgaatttatttggggttatttgcattttgggaagaggtatacttaaaggaaatgtgtttatataactctcattttcctcctttatatgcaagaaatcacaaatctttatcg

SEQ ID NO: 26082 - protein, 179 aa, Arabidopsis thaliana
  peptide (1)..(179): Ceres Seq. ID no. 12370182
  misc_feature (37)..(177): Pfam Name: Protein of unknown function, DUF538 Pfam Description: Protein of unknown function, DUF538
  misc_feature (61)..(157): Homolog of NCBI NO: 15235335 NR Description: putative protein; protein id: At4g02360.1
  misc_feature (58)..(171): Homolog of NCBI NO: 34898576 NR Description: P0534A03.14 [Oryza sativa (japonica
  misc_feature (12)..(175): Homolog of NCBI NO: 40642817 NR Description: cp protein [Celosia cristata]
  misc_feature (12)..(175): Homolog of NCBI NO: 34914210 NR Description: OSJNBb0049O23.18 [Oryza sativa (japonica
  misc_feature (12)..(175): Homolog of NCBI NO: 28466909 NR Description: At5g01610 [Arabidopsis thaliana]
  misc_feature (12)..(175): Homolog of NCBI NO: 15241019 NR Description: putative protein
  misc_feature (12)..(175): Homolog of NCBI NO: 15240103 NR Description: putative protein; protein id: At5g37070.1
  misc_feature (12)..(175): Homolog of NCBI NO: 18398279 NR Description: expressed protein
  misc_feature (1)..(179): Homolog of NCBI NO: 18395537 NR Description: expressed protein
  misc_feature (1)..(179): Homolog of NCBI NO: 21553803 NR Description: unknown [Arabidopsis thaliana]
MEKALTKVTSFKVGSSWISKKAKEELSNITNDLTTFSSTVEEKAKWVFNKLKGKPLKSLPDLLKEYNLPPGLFPQNIICYEFDETKNKLTVFFSSPCEVTFKDGSAIRYATCVKGILLRGKLMGVEGMKTKVLVWVKVTTISVESSKSDKLWFTAGVKKSRSKDVYDTPHDAIKVIGEF

SEQ ID NO: 26083 - DNA, 783 bp, Arabidopsis thaliana
  misc_feature (1)..(783): Ceres Seq. ID no. 13487371
  misc_feature: MA Experiment ID: 108435 Result: Up-regulated in Transcription
  misc_feature: MA Experiment 108435 PARAMETER Experiment Name: At_stm_Mutants_cDNA_P Parameter: Plant Line Value: wt Landsburg vs stm
  misc_feature: MA Experiment 108435 PARAMETER Experiment Name: At_stm_Mutants_cDNA_P Parameter: Tissue Value: Shoot Apical Meristem Region
  misc_feature: MA Experiment ID: 108461 Result: Up-regulated in Transcription
  misc_feature: MA Experiment 108461 PARAMETER Experiment Name: At_Germinating_Seeds_cDNA_P Parameter: Age (day) Value: 1 vs. 0
  misc_feature: MA Experiment 108461 PARAMETER Experiment Name: At_Germinating_Seeds_cDNA_P Parameter: Tissue Value: Germinating Seeds
  misc_feature: MA Experiment ID: 108462 Result: Up-regulated in Transcription
  misc_feature: MA Experiment 108462 PARAMETER Experiment Name: At_Germinating_Seeds_cDNA_P Parameter: Age (day) Value: 2 vs. 0
  misc_feature: MA Experiment 108462 PARAMETER Experiment Name: At_Germinating_Seeds_cDNA_P Parameter: Tissue Value: Germinating Seeds
  misc_feature: MA Experiment ID: 108473 Result: Down-regulated in Transcription
  misc_feature: MA Experiment 108473 PARAMETER Experiment Name: At_Drought_Flowers_cDNA_P Parameter: Timepoint (hr) Value: 7 d
  misc_feature: MA Experiment 108473 PARAMETER Experiment Name: At_Drought_Flowers_cDNA_P Parameter: Tissue Value: Flower
  misc_feature: MA Experiment 108473 PARAMETER Experiment Name: At_Drought_Flowers_cDNA_P Parameter: Treatment Value: Drought vs. No Drought
  misc_feature: MA Experiment ID: 108595 Result: Up-regulated in Transcription
  misc_feature: MA Experiment 108595 PARAMETER Experiment Name: At_Ler-pi_Ovule_cDNA_P Parameter: Plant Line Value: null
  misc_feature: MA Experiment ID: 108668 Result: Down-regulated in Transcription
  misc_feature: MA Experiment 108668 PARAMETER Experiment Name: At_2mM_SA_cDNA_P Parameter: Plant Line Value: WS
  misc_feature: MA Experiment 108668 PARAMETER Experiment Name: At_2mM_SA_cDNA_P Parameter: Timepoint (hr) Value: 6
  misc_feature: MA Experiment 108668 PARAMETER Experiment Name: At_2mM_SA_cDNA_P Parameter: Treatment Value: 2mM SA vs. No Treatment
  misc_feature: MA Experiment ID: 20000113 Result: Down-regulated in Transcription
  misc_feature: MA Experiment 20000113 PARAMETER Experiment Name: At_42deg_Heat_cDNA_P Parameter: Temperature (deg C) Value: 42 vs. 22
  misc_feature: MA Experiment 20000113 PARAMETER Experiment Name: At_42deg_Heat_cDNA_P Parameter: Timepoint (hr) Value: 8
  misc_feature: MA Experiment 20000113 PARAMETER Experiment Name: At_42deg_Heat_cDNA_P Parameter: Tissue Value: Aerial
  misc_feature: MA Experiment ID: 20000180 Result: Up-regulated in Transcription
  misc_feature: MA Experiment 20000180 PARAMETER Experiment Name: At_Germinating_Seeds_P Parameter: Age (hr) Value: 24 vs. 0
  misc_feature: MA Experiment 20000180 PARAMETER Experiment Name: At_Germinating_Seeds_P Parameter: Tissue Value: Germinating Seeds
  misc_feature: MA Experiment ID: 20000185 Result: Down-regulated in Transcription
  misc_feature: MA Experiment 20000185 PARAMETER Experiment Name: At_Roots__P Parameter: Age (day) Value: 7 vs. 21
  misc_feature: MA Experiment 20000185 PARAMETER Experiment Name: At_Roots__P Parameter: Organism Value: A. thaliana
  misc_feature: MA Experiment 20000185 PARAMETER Experiment Name: At_Roots__P Parameter: Tissue Value: Roots vs. Whole Plant
  misc_feature: MA Experiment ID: 20000224 Result: Down-regulated in Transcription
  misc_feature: MA Experiment ID: 20000265 Result: Up-regulated in Transcription
  misc_feature: MA Experiment 20000265 PARAMETER Experiment Name: At_Open_Flower_P Parameter: Age (day) Value: 21
  misc_feature: MA Experiment 20000265 PARAMETER Experiment Name: At_Open_Flower_P Parameter: Plant Line Value: WS
  misc_feature: MA Experiment 20000265 PARAMETER Experiment Name: At_Open_Flower_P Parameter: Tissue Value: Closed Flower vs. Whole Plant
  misc_feature: MA Experiment ID: 20000439 Result: Down-regulated in Transcription
  misc_feature: MA Experiment 20000439 PARAMETER Experiment Name: At_Roots__P Parameter: Age (day) Value: 14 vs. 21
  misc_feature: MA Experiment 20000439 PARAMETER Experiment Name: At_Roots__P Parameter: Organism Value: A. thaliana
  misc_feature: MA Experiment 20000439 PARAMETER Experiment Name: At_Roots__P Parameter: Tissue Value: Roots vs. Whole Plant
  misc_feature: MA Experiment ID: 20000445 Result: Down-regulated in Transcription
  misc_feature: MA Experiment 20000445 PARAMETER Experiment Name: At_100uM_NAA__P Parameter: Age (day) Value: 14
  misc_feature: MA Experiment 20000445 PARAMETER Experiment Name: At_100uM_NAA__P Parameter: Organism Value: A. thaliana
  misc_feature: MA Experiment 20000445 PARAMETER Experiment Name: At_100uM_NAA__P Parameter: Plant Line Value: WS
  misc_feature: MA Experiment 20000445 PARAMETER Experiment Name: At_100uM_NAA__P Parameter: Timepoint (hr) Value: 6
  misc_feature: MA Experiment 20000445 PARAMETER Experiment Name: At_100uM_NAA__P Parameter: Tissue Value: Aerial
  misc_feature: MA Experiment 20000445 PARAMETER Experiment Name: At_100uM_NAA__P Parameter: Treatment Value: 100uM NAA vs. No Treatment
  misc_feature: MA Experiment ID: 20001248 Result: Down-regulated in Transcription
  misc_feature: MA Experiment 20001248 PARAMETER Experiment Name: At_Far-red-induction_P Parameter: Age (day) Value: 7
  misc_feature: MA Experiment 20001248 PARAMETER Experiment Name: At_Far-red-induction_P Parameter: Light Value: Far-red vs. White
  misc_feature: MA Experiment 20001248 PARAMETER Experiment Name: At_Far-red-induction_P Parameter: Organism Value: A. thaliana
  misc_feature: MA Experiment 20001248 PARAMETER Experiment Name: At_Far-red-induction_P Parameter: Plant Line Value: Columbia
  misc_feature: MA Experiment 20001248 PARAMETER Experiment Name: At_Far-red-induction_P Parameter: Timepoint (hr) Value: 4
  misc_feature: MA Experiment 20001248 PARAMETER Experiment Name: At_Far-red-induction_P Parameter: Tissue Value: Whole Plant
  misc_feature: MA Experiment ID: 20001555 Result: Down-regulated in Transcription
  misc_feature: MA Experiment 20001555 PARAMETER Experiment Name: At_Drought_Soil_Dry_P Parameter: Age (day) Value: 24
  misc_feature: MA Experiment 20001555 PARAMETER Experiment Name: At_Drought_Soil_Dry_P Parameter: Organism Value: A. thaliana
  misc_feature: MA Experiment 20001555 PARAMETER Experiment Name: At_Drought_Soil_Dry_P Parameter: Plant Line Value: WS
  misc_feature: MA Experiment 20001555 PARAMETER Experiment Name: At_Drought_Soil_Dry_P Parameter: Post Timepoint (hr) Value: None
  misc_feature: MA Experiment 20001555 PARAMETER Experiment Name: At_Drought_Soil_Dry_P Parameter: Post-Treatment Value: None
  misc_feature: MA Experiment 20001555 PARAMETER Experiment Name: At_Drought_Soil_Dry_P Parameter: Timepoint (day) Value: 10
  misc_feature: MA Experiment 20001555 PARAMETER Experiment Name: At_Drought_Soil_Dry_P Parameter: Treatment Value: Drought vs. No Drought
  misc_feature: MA Experiment ID: 20001556 Result: Down-regulated in Transcription
  misc_feature: MA Experiment 20001556 PARAMETER Experiment Name: At_Drought_Soil_Dry_P Parameter: Age (day) Value: 26
  misc_feature: MA Experiment 20001556 PARAMETER Experiment Name: At_Drought_Soil_Dry_P Parameter: Organism Value: A. thaliana
  misc_feature: MA Experiment 20001556 PARAMETER Experiment Name: At_Drought_Soil_Dry_P Parameter: Plant Line Value: WS
  misc_feature: MA Experiment 20001556 PARAMETER Experiment Name: At_Drought_Soil_Dry_P Parameter: Post Timepoint (hr) Value: None
  misc_feature: MA Experiment 20001556 PARAMETER Experiment Name: At_Drought_Soil_Dry_P Parameter: Post-Treatment Value: None
  misc_feature: MA Experiment 20001556 PARAMETER Experiment Name: At_Drought_Soil_Dry_P Parameter: Timepoint (day) Value: 12
  misc_feature: MA Experiment 20001556 PARAMETER Experiment Name: At_Drought_Soil_Dry_P Parameter: Treatment Value: Drought vs. No Drought
  misc_feature: MA Experiment ID: 20001559 Result: Down-regulated in Transcription
  misc_feature: MA Experiment 20001559 PARAMETER Experiment Name: At_Drought_Soil_Dry_P Parameter: Age (day) Value: 28
  misc_feature: MA Experiment 20001559 PARAMETER Experiment Name: At_Drought_Soil_Dry_P Parameter: Organism Value: A. thaliana
  misc_feature: MA Experiment 20001559 PARAMETER Experiment Name: At_Drought_Soil_Dry_P Parameter: Plant Line Value: WS
  misc_feature: MA Experiment 20001559 PARAMETER Experiment Name: At_Drought_Soil_Dry_P Parameter: Post Timepoint (hr) Value: 29
  misc_feature: MA Experiment 20001559 PARAMETER Experiment Name: At_Drought_Soil_Dry_P Parameter: Post-Treatment Value: Re-Water vs. No Drought
  misc_feature: MA Experiment 20001559 PARAMETER Experiment Name: At_Drought_Soil_Dry_P Parameter: Timepoint (day) Value: 14
  misc_feature: MA Experiment 20001559 PARAMETER Experiment Name: At_Drought_Soil_Dry_P Parameter: Treatment Value: Drought vs. No Drought
  misc_feature: MA Experiment ID: 20001906 Result: Down-regulated in Transcription
  misc_feature: MA Experiment 20001906 PARAMETER Experiment Name: At_Drought_Reproduction_P Parameter: Age (day) Value: 35
  misc_feature: MA Experiment 20001906 PARAMETER Experiment Name: At_Drought_Reproduction_P Parameter: Organism Value: A. thaliana
  misc_feature: MA Experiment 20001906 PARAMETER Experiment Name: At_Drought_Reproduction_P Parameter: Plant Line Value: WS
  misc_feature: MA Experiment 20001906 PARAMETER Experiment Name: At_Drought_Reproduction_P Parameter: Timepoint (day) Value: 5
  misc_feature: MA Experiment 20001906 PARAMETER Experiment Name: At_Drought_Reproduction_P Parameter: Tissue Value: Siliques
  misc_feature: MA Experiment 20001906 PARAMETER Experiment Name: At_Drought_Reproduction_P Parameter: Treatment Value: Drought vs. No Drought
  misc_feature: MA Experiment ID: 20001908 Result: Down-regulated in Transcription
  misc_feature: MA Experiment 20001908 PARAMETER Experiment Name: At_Drought_Reproduction_P Parameter: Age (day) Value: 40
  misc_feature: MA Experiment 20001908 PARAMETER Experiment Name: At_Drought_Reproduction_P Parameter: Organism Value: A. thaliana
  misc_feature: MA Experiment 20001908 PARAMETER Experiment Name: At_Drought_Reproduction_P Parameter: Plant Line Value: WS
  misc_feature: MA Experiment 20001908 PARAMETER Experiment Name: At_Drought_Reproduction_P Parameter: Timepoint (day) Value: 10
  misc_feature: MA Experiment 20001908 PARAMETER Experiment Name: At_Drought_Reproduction_P Parameter: Tissue Value: Siliques
  misc_feature: MA Experiment 20001908 PARAMETER Experiment Name: At_Drought_Reproduction_P Parameter: Treatment Value: Drought vs. No Drought
  misc_feature: MA Experiment ID: 20001911 Result: Down-regulated in Transcription
  misc_feature: MA Experiment 20001911 PARAMETER Experiment Name: At_Drought_Reproduction_P Parameter: Age (day) Value: 40
  misc_feature: MA Experiment 20001911 PARAMETER Experiment Name: At_Drought_Reproduction_P Parameter: Organism Value: A. thaliana
  misc_feature: MA Experiment 20001911 PARAMETER Experiment Name: At_Drought_Reproduction_P Parameter: Plant Line Value: WS
  misc_feature: MA Experiment 20001911 PARAMETER Experiment Name: At_Drought_Reproduction_P Parameter: Timepoint (day) Value: 10
  misc_feature: MA Experiment 20001911 PARAMETER Experiment Name: At_Drought_Reproduction_P Parameter: Tissue Value: Flowers
  misc_feature: MA Experiment 20001911 PARAMETER Experiment Name: At_Drought_Reproduction_P Parameter: Treatment Value: Drought vs. No Drought
attttgcacacataaccctaatttggtctcttactctaacccgagagataatggctcctacacaaaatctcttccttgtcgctattgccttcgccgtcattttcaccgcctccaccgtacatggtcgtcataatggtgcagaagatatcgtgcattcctcctgcgaacacgcgagctatccatcactatgcgtccgtactctttcgtcatactccggtccaaccatcaccaaccgccgcgatctagctcaagccgccataaaaatcagcctctcccacgctcaaagcgccgcgaagaaactcgcggtggtgcgagactcggtggggaagaagaagcaagagaaagcggcgcttgtggactgtgtggagatgattggagactctgtggacgagctaagccgtacgctcggcgttttgaagcacctccgtgtctctggcggttcagctaaagagttccggtggcagatgagcaatgcacagacgtgggctagcgcggcacttacggatgacgacacgtgtctcgatgggtttcaagggatggacgacggtgaaatcaaaacggaggtgaagcagtggatgacgaaagtggccagggttacgagcaacgcgctttacatggtcaaccagctagatgagacacgtggcaaaccccacgacgtacatctttgatgttaatgcactagatcgttttaatggacggtctttattgtgtgtgttggtttttcgttcatgtgttttaagtgtgagattatctatcgctacgatatatagaaatgagtttttg

SEQ ID NO: 26084 - protein, 221 aa, Arabidopsis thaliana
  peptide (1)..(221): Ceres Seq. ID no. 13487372
  misc_feature (25)..(207): Homolog of NCBI NO: 112717 NR Description: 21 KD PROTEIN PRECURSOR (1.2 PROTEIN)
  misc_feature (48)..(208): Homolog of NCBI NO: 7488727 NR Description: 21K protein precursor - alfalfa
  misc_feature (35)..(212): Homolog of NCBI NO: 15241799 NR Description: pectinesterase family [Arabidopsis thaliana]
  misc_feature (21)..(212): Homolog of NCBI NO: 21618088 NR Description: ripening-related protein-like [Arabidopsis
  misc_feature (23)..(207): Homolog of NCBI NO: 15234982 NR Description: pectinesterase - related [Arabidopsis thaliana]
  misc_feature (23)..(213): Homolog of NCBI NO: 21618013 NR Description: putative ripening-related protein [Arabidopsis
  misc_feature (23)..(213): Homolog of NCBI NO: 18407657 NR Description: pectinesterase family [Arabidopsis thaliana]
  misc_feature (17)..(208): Homolog of NCBI NO: 7406663 NR Description: putative ripening-related protein [Vitis vinifera]
  misc_feature (17)..(221): Homolog of NCBI NO: 21553812 NR Description: ripening-related protein-like [Arabidopsis
  misc_feature (17)..(221): Homolog of NCBI NO: 15242049 NR Description: pectinesterase - related [Arabidopsis thaliana]
FAHITLIWSLTLTREIMAPTQNLFLVAIAFAVIFTASTVHGRHNGAEDIVHSSCEHASYPSLCVRTLSSYSGPTITNRRDLAQAAIKISLSHAQSAAKKLAVVRDSVGKKKQEKAALVDCVEMIGDSVDELSRTLGVLKHLRVSGGSAKEFRWQMSNAQTWASAALTDDDTCLDGFQGMDDGEIKTEVKQWMTKVARVTSNALYMVNQLDETRGKPHDVHL

SEQ ID NO: 26085 - protein, 205 aa, Arabidopsis thaliana
  peptide (1)..(205): Ceres Seq. ID no. 13487373
  misc_feature (9)..(191): Homolog of NCBI NO: 112717 NR Description: 21 KD PROTEIN PRECURSOR (1.2 PROTEIN)
  misc_feature (32)..(192): Homolog of NCBI NO: 7488727 NR Description: 21K protein precursor - alfalfa
  misc_feature (19)..(196): Homolog of NCBI NO: 15241799 NR Description: pectinesterase family [Arabidopsis thaliana]
  misc_feature (5)..(196): Homolog of NCBI NO: 21618088 NR Description: ripening-related protein-like [Arabidopsis
  misc_feature (7)..(191): Homolog of NCBI NO: 15234982 NR Description: pectinesterase - related [Arabidopsis thaliana]
  misc_feature (7)..(197): Homolog of NCBI NO: 21618013 NR Description: putative ripening-related protein [Arabidopsis
  misc_feature (7)..(197): Homolog of NCBI NO: 18407657 NR Description: pectinesterase family [Arabidopsis thaliana]
  misc_feature (1)..(192): Homolog of NCBI NO: 7406663 NR Description: putative ripening-related protein [Vitis vinifera]
  misc_feature (1)..(205): Homolog of NCBI NO: 21553812 NR Description: ripening-related protein-like [Arabidopsis
  misc_feature (1)..(205): Homolog of NCBI NO: 15242049 NR Description: pectinesterase - related [Arabidopsis thaliana]
MAPTQNLFLVAIAFAVIFTASTVHGRHNGAEDIVHSSCEHASYPSLCVRTLSSYSGPTITNRRDLAQAAIKISLSHAQSAAKKLAVVRDSVGKKKQEKAALVDCVEMIGDSVDELSRTLGVLKHLRVSGGSAKEFRWQMSNAQTWASAALTDDDTCLDGFQGMDDGEIKTEVKQWMTKVARVTSNALYMVNQLDETRGKPHDVHL

SEQ ID NO: 26086 - DNA, 964 bp, Arabidopsis thaliana; identical to SEQ ID NO: 25580
  misc_feature (1)..(964): Ceres Seq. ID no. 12327196
  misc_feature: MA Experiment ID: 108434 Result: Down-regulated in Transcription
  misc_feature: MA Experiment 108434 PARAMETER Experiment Name: At_Root_Tips_cDNA_P Parameter: Tissue Value: Root Tips
  misc_feature: MA Experiment ID: 108464 Result: Down-regulated in Transcription
  misc_feature: MA Experiment 108464 PARAMETER Experiment Name: At_Germinating_Seeds_cDNA_P Parameter: Age (day) Value: 4 vs. 0
  misc_feature: MA Experiment 108464 PARAMETER Experiment Name: At_Germinating_Seeds_cDNA_P Parameter: Tissue Value: Germinating Seeds
  misc_feature: MA Experiment ID: 108573 Result: Down-regulated in Transcription
  misc_feature: MA Experiment 108573 PARAMETER Experiment Name: At_Drought_cDNA_P Parameter: Timepoint (hr) Value: 6
  misc_feature: MA Experiment 108573 PARAMETER Experiment Name: At_Drought_cDNA_P Parameter: Tissue Value: Aerial
  misc_feature: MA Experiment 108573 PARAMETER Experiment Name: At_Drought_cDNA_P Parameter: Treatment Value: Drought vs. No Drought
  misc_feature: MA Experiment ID: 20000069 Result: Up-regulated in Transcription
  misc_feature: MA Experiment 20000069 PARAMETER Experiment Name: At_100uM_ABA_Mutants_cDNA_P Parameter: Plant Line Value: CS23
  misc_feature: MA Experiment 20000069 PARAMETER Experiment Name: At_100uM_ABA_Mutants_cDNA_P Parameter: Timepoint (hr) Value: 6
  misc_feature: MA Experiment 20000069 PARAMETER Experiment Name: At_100uM_ABA_Mutants_cDNA_P Parameter: Tissue Value: Aerial
  misc_feature: MA Experiment 20000069 PARAMETER Experiment Name: At_100uM_ABA_Mutants_cDNA_P Parameter: Treatment Value: 100uM ABA vs. No Treatment
  misc_feature: MA Experiment ID: 20000070 Result: Up-regulated in Transcription
  misc_feature: MA Experiment 20000070 PARAMETER Experiment Name: At_100uM_ABA_Mutants_cDNA_P Parameter: Plant Line Value: CS24
  misc_feature: MA Experiment 20000070 PARAMETER Experiment Name: At_100uM_ABA_Mutants_cDNA_P Parameter: Timepoint (hr) Value: 6
  misc_feature: MA Experiment 20000070 PARAMETER Experiment Name: At_100uM_ABA_Mutants_cDNA_P Parameter: Tissue Value: Aerial
  misc_feature: MA Experiment 20000070 PARAMETER Experiment Name: At_100uM_ABA_Mutants_cDNA_P Parameter: Treatment Value: 100uM ABA vs. No Treatment
  misc_feature: MA Experiment ID: 20000071 Result: Up-regulated in Transcription
  misc_feature: MA Experiment 20000071 PARAMETER Experiment Name: At_100uM_ABA_Mutants_cDNA_P Parameter: Plant Line Value: CS8104
  misc_feature: MA Experiment 20000071 PARAMETER Experiment Name: At_100uM_ABA_Mutants_cDNA_P Parameter: Timepoint (hr) Value: 6
  misc_feature: MA Experiment 20000071 PARAMETER Experiment Name: At_100uM_ABA_Mutants_cDNA_P Parameter: Tissue Value: Aerial
  misc_feature: MA Experiment 20000071 PARAMETER Experiment Name: At_100uM_ABA_Mutants_cDNA_P Parameter: Treatment Value: 100uM ABA vs. No Treatment
  misc_feature: MA Experiment ID: 20000072 Result: Up-regulated in Transcription
  misc_feature: MA Experiment 20000072 PARAMETER Experiment Name: At_100uM_ABA_Mutants_cDNA_P Parameter: Plant Line Value: CS8105
  misc_feature: MA Experiment 20000072 PARAMETER Experiment Name: At_100uM_ABA_Mutants_cDNA_P Parameter: Timepoint (hr) Value: 6
  misc_feature: MA Experiment 20000072 PARAMETER Experiment Name: At_100uM_ABA_Mutants_cDNA_P Parameter: Tissue Value: Aerial
  misc_feature: MA Experiment 20000072 PARAMETER Experiment Name: At_100uM_ABA_Mutants_cDNA_P Parameter: Treatment Value: 100uM ABA vs. No Treatment
  misc_feature: MA Experiment ID: 20000086 Result: Up-regulated in Transcription
  misc_feature: MA Experiment 20000086 PARAMETER Experiment Name: At_100uM_ABA_Mutants_cDNA_P Parameter: Plant Line Value: CS22
  misc_feature: MA Experiment 20000086 PARAMETER Experiment Name: At_100uM_ABA_Mutants_cDNA_P Parameter: Timepoint (hr) Value: 6
  misc_feature: MA Experiment 20000086 PARAMETER Experiment Name: At_100uM_ABA_Mutants_cDNA_P Parameter: Tissue Value: Aerial
  misc_feature: MA Experiment 20000086 PARAMETER Experiment Name: At_100uM_ABA_Mutants_cDNA_P Parameter: Treatment Value: 100uM ABA vs. No Treatment
  misc_feature: MA Experiment ID: 20000087 Result: Up-regulated in Transcription
  misc_feature: MA Experiment 20000087 PARAMETER Experiment Name: At_100uM_ABA_Mutants_cDNA_P Parameter: Plant Line Value: WS
  misc_feature: MA Experiment 20000087 PARAMETER Experiment Name: At_100uM_ABA_Mutants_cDNA_P Parameter: Timepoint (hr) Value: 6
  misc_feature: MA Experiment 20000087 PARAMETER Experiment Name: At_100uM_ABA_Mutants_cDNA_P Parameter: Tissue Value: Aerial
  misc_feature: MA Experiment 20000087 PARAMETER Experiment Name: At_100uM_ABA_Mutants_cDNA_P Parameter: Treatment Value: 100uM ABA vs. No Treatment
  misc_feature: MA Experiment ID: 20000088 Result: Up-regulated in Transcription
  misc_feature: MA Experiment 20000088 PARAMETER Experiment Name: At_100uM_ABA_Mutants_cDNA_P Parameter: Plant Line Value: Landsberg
  misc_feature: MA Experiment 20000088 PARAMETER Experiment Name: At_100uM_ABA_Mutants_cDNA_P Parameter: Timepoint (hr) Value: 6
  misc_feature: MA Experiment 20000088 PARAMETER Experiment Name: At_100uM_ABA_Mutants_cDNA_P Parameter: Tissue Value: Aerial
  misc_feature: MA Experiment 20000088 PARAMETER Experiment Name: At_100uM_ABA_Mutants_cDNA_P Parameter: Treatment Value: 100uM ABA vs. No Treatment
  misc_feature: MA Experiment ID: 20000117 Result: Up-regulated in Transcription
  misc_feature: MA Experiment 20000117 PARAMETER Experiment Name: At_100uM_ABA_Mutants_cDNA_P Parameter: Plant Line Value: Columbia
  misc_feature: MA Experiment 20000117 PARAMETER Experiment Name: At_100uM_ABA_Mutants_cDNA_P Parameter: Timepoint (hr) Value: 6
  misc_feature: MA Experiment 20000117 PARAMETER Experiment Name: At_100uM_ABA_Mutants_cDNA_P Parameter: Tissue Value: Aerial
  misc_feature: MA Experiment 20000117 PARAMETER Experiment Name: At_100uM_ABA_Mutants_cDNA_P Parameter: Treatment Value: 100uM ABA vs. No Treatment
  misc_feature: MA Experiment ID: 20000185 Result: Down-regulated in Transcription
  misc_feature: MA Experiment 20000185 PARAMETER Experiment Name: At_Roots__P Parameter: Age (day) Value: 7 vs. 21
  misc_feature: MA Experiment 20000185 PARAMETER Experiment Name: At_Roots__P Parameter: Organism Value: A. thaliana
  misc_feature: MA Experiment 20000185 PARAMETER Experiment Name: At_Roots__P Parameter: Tissue Value: Roots vs. Whole Plant
  misc_feature: MA Experiment ID: 20000224 Result: Up-regulated in Transcription
  misc_feature: MA Experiment ID: 20000439 Result: Down-regulated in Transcription
  misc_feature: MA Experiment 20000439 PARAMETER Experiment Name: At_Roots__P Parameter: Age (day) Value: 14 vs. 21
  misc_feature: MA Experiment 20000439 PARAMETER Experiment Name: At_Roots__P Parameter: Organism Value: A. thaliana
  misc_feature: MA Experiment 20000439 PARAMETER Experiment Name: At_Roots__P Parameter: Tissue Value: Roots vs. Whole Plant

SEQ ID NO: 26087 - protein, 253 aa, Arabidopsis thaliana; identical to SEQ ID NO: 25581
  peptide (1)..(253): Ceres Seq. ID no. 12327197
  misc_feature (7)..(81): Pfam Name: Isoflavone reductase Pfam Description: Isoflavone reductase
  misc_feature (7)..(81): Pfam Name: Isoflavone reductase Pfam Description: Isoflavone reductase
  misc_feature (1)..(252): Homolog of NCBI NO: 30689062 NR Description: expressed protein [Arabidopsis thaliana]
  misc_feature (92)..(248): Homolog of NCBI NO: 17230243 NR Description: hypothetical protein [Nostoc sp. PCC 7120]
  misc_feature (92)..(249): Homolog of NCBI NO: 23130188 NR Description: hypothetical protein [Nostoc punctiforme]
  misc_feature (92)..(249): Homolog of NCBI NO: 16330694 NR Description: hypothetical protein [Synechocystis sp. PCC 6803]
  misc_feature (1)..(253): Homolog of NCBI NO: 7485430 NR Description: hypothetical protein At2g37660 [imported] -
  misc_feature (1)..(252): Homolog of NCBI NO: 30689062 NR Description: expressed protein [Arabidopsis thaliana]
  misc_feature (92)..(249): Homolog of NCBI NO: 23130188 NR Description: hypothetical protein [Nostoc punctiforme]
  misc_feature (1)..(253): Homolog of NCBI NO: 7485430 NR Description: hypothetical protein At2g37660 [imported] -
  misc_feature (1)..(253): Homolog of NCBI NO: 18413869 NR Description: putative protein
  misc_feature (1)..(248): Homolog of NCBI NO: 11358410 NR Description: hypothetical protein T7H20.290 - Arabidopsis
  misc_feature (1)..(253): Homolog of NCBI NO: 34897418 NR Description: unknown protein [Oryza sativa (japonica
  misc_feature (1)..(253): Homolog of NCBI NO: 14719331 NR Description: putative 3-beta hydroxysteroid
  misc_feature (1)..(253): Homolog of NCBI NO: 18404496 NR Description: expressed protein
  misc_feature (92)..(249): Homolog of NCBI NO: 16330694 NR Description: hypothetical protein [Synechocystis sp. PCC 6803]
  misc_feature (92)..(248): Homolog of NCBI NO: 17230243 NR Description: hypothetical protein [Nostoc sp. PCC 7120]
  misc_feature (1)..(253): Homolog of NCBI NO: 18404496 NR Description: expressed protein
  misc_feature (1)..(253): Homolog of NCBI NO: 14719331 NR Description: putative 3-beta hydroxysteroid
  misc_feature (1)..(253): Homolog of NCBI NO: 34897418 NR Description: unknown protein [Oryza sativa (japonica
  misc_feature (1)..(248): Homolog of NCBI NO: 11358410 NR Description: hypothetical protein T7H20.290 - Arabidopsis
  misc_feature (1)..(253): Homolog of NCBI NO: 18413869 NR Description: putative protein

SEQ ID NO: 26088 - protein, 171 aa, Arabidopsis thaliana; identical to SEQ ID NO: 25582
  peptide (1)..(171): Ceres Seq. ID no. 12327198
  misc_feature (24)..(149): Pfam Name: Isoflavone reductase Pfam Description: Isoflavone reductase
  misc_feature (24)..(149): Pfam Name: Isoflavone reductase Pfam Description: Isoflavone reductase
  misc_feature (1)..(170): Homolog of NCBI NO: 30689062 NR Description: expressed protein [Arabidopsis thaliana]
  misc_feature (10)..(166): Homolog of NCBI NO: 17230243 NR Description: hypothetical protein [Nostoc sp. PCC 7120]
  misc_feature (10)..(167): Homolog of NCBI NO: 23130188 NR Description: hypothetical protein [Nostoc punctiforme]
  misc_feature (10)..(167): Homolog of NCBI NO: 16330694 NR Description: hypothetical protein [Synechocystis sp. PCC 6803]
  misc_feature (1)..(171): Homolog of NCBI NO: 7485430 NR Description: hypothetical protein At2g37660 [imported] -
  misc_feature (1)..(170): Homolog of NCBI NO: 30689062 NR Description: expressed protein [Arabidopsis thaliana]
  misc_feature (10)..(167): Homolog of NCBI NO: 23130188 NR Description: hypothetical protein [Nostoc punctiforme]
  misc_feature (1)..(171): Homolog of NCBI NO: 7485430 NR Description: hypothetical protein At2g37660 [imported] -
  misc_feature (1)..(171): Homolog of NCBI NO: 18413869 NR Description: putative protein
  misc_feature (1)..(166): Homolog of NCBI NO: 11358410 NR Description: hypothetical protein T7H20.290 - Arabidopsis
  misc_feature (1)..(171): Homolog of NCBI NO: 34897418 NR Description: unknown protein [Oryza sativa (japonica
  misc_feature (1)..(171): Homolog of NCBI NO: 14719331 NR Description: putative 3-beta hydroxysteroid
  misc_feature (1)..(171): Homolog of NCBI NO: 18404496 NR Description: expressed protein
  misc_feature (10)..(167): Homolog of NCBI NO: 16330694 NR Description: hypothetical protein [Synechocystis sp. PCC 6803]
  misc_feature (10)..(166): Homolog of NCBI NO: 17230243 NR Description: hypothetical protein [Nostoc sp. PCC 7120]
  misc_feature (1)..(171): Homolog of NCBI NO: 18404496 NR Description: expressed protein
  misc_feature (1)..(171): Homolog of NCBI NO: 14719331 NR Description: putative 3-beta hydroxysteroid
  misc_feature (1)..(171): Homolog of NCBI NO: 34897418 NR Description: unknown protein [Oryza sativa (japonica
  misc_feature (1)..(166): Homolog of NCBI NO: 11358410 NR Description: hypothetical protein T7H20.290 - Arabidopsis
  misc_feature (1)..(171): Homolog of NCBI NO: 18413869 NR Description: putative protein

SEQ ID NO: 26089 - DNA, 723 bp, Arabidopsis thaliana
  misc_feature (1)..(723): Ceres Seq. ID no. 13487374
  misc_feature: MA Experiment ID: 108488 Result: Down-regulated in Transcription
  misc_feature: MA Experiment ID: 20000496 Result: Up-regulated in Transcription
  misc_feature: MA Experiment 20000496 PARAMETER Experiment Name: At_Guard_Cells_P Parameter: Harvest Date Value: 7/19/2002
  misc_feature: MA Experiment 20000496 PARAMETER Experiment Name: At_Guard_Cells_P Parameter: Organism Value: Canola
  misc_feature: MA Experiment 20000496 PARAMETER Experiment Name: At_Guard_Cells_P Parameter: Tissue Value: Guard Cells vs. Leaves
  misc_feature: MA Experiment ID: 20000794 Result: Up-regulated in Transcription
  misc_feature: MA Experiment 20000794 PARAMETER Experiment Name: At_Petals_P Parameter: Age (day) Value: 23-25 days
  misc_feature: MA Experiment 20000794 PARAMETER Experiment Name: At_Petals_P Parameter: Plant Line Value: WS
  misc_feature: MA Experiment 20000794 PARAMETER Experiment Name: At_Petals_P Parameter: Tissue Value: Petals vs. Whole plant
gatcgacaaatagggtttagaatccacacacccaaatcggaaggcgaagaaaatggaaggatgggatccgaacacgaagtcgacgttaacgcgaataccgcttctgacgacaaaggcgggtccaagagacggcgcggcatggacgcagaggctgaaagaggagtacaagtctctgattgcgtatacccaaatgaacaagtccaacgacaatgactggttccgtatctccgcttccaatcctgagggcacgcgttggactggcaagtgttggtatgttcacaaccttctcaaatacgaattcgatctccagttcgatatcccgattacctatccagccactgctcctgagcttgagctgcctgagattgacggcaagactcaaaagatgtatcgaggtgggaagatatgtttgactgtgcatttcaagcctctatgggccaaaaactgtcctcggtttggtatagcacatgcactttgtttggggctcgctccgtggttagctgcagagattccaattcttgtggactccggcgcgattaagcacaaagatgacgcagccacatctgcggaatcttaaatctatgtaacctttctatcaatctcagaaatgttgaggtgtttatcagtaatagctgaactcagaaatgactgaggtggatgcgtctaccctataaatacacttacatgaaacccaataaagatttaagctattgcaatgttttt

SEQ ID NO: 26090 - protein, 174 aa, Arabidopsis thaliana
  peptide (1)..(174): Ceres Seq. ID no. 13487375
  misc_feature (5)..(165): Homolog of NCBI NO: 39590862 NR Description: Hypothetical protein CBG10119 [Caenorhabditis
  misc_feature (5)..(166): Homolog of NCBI NO: 13528771 NR Description: Similar to hypothetical protein [Homo sapiens]
  misc_feature (5)..(166): Homolog of NCBI NO: 13384768 NR Description: RIKEN cDNA 1110021H02; EST AA062310 [Mus
  misc_feature (5)..(170): Homolog of NCBI NO: 31223805 NR Description: ENSANGP00000010523 [Anopheles gambiae]
  misc_feature (5)..(166): Homolog of NCBI NO: 7705481 NR Description: hypothetical protein HSPC155 [Homo sapiens]
  misc_feature (5)..(166): Homolog of NCBI NO: 19922352 NR Description: CG8386-PA [Drosophila melanogaster]
  misc_feature (5)..(166): Homolog of NCBI NO: 6831734 NR Description: Protein CGI-126 (Protein HSPC155)
  misc_feature (1)..(174): Homolog of NCBI NO: 37532272 NR Description: unknown protein [Oryza sativa (japonica
  misc_feature (1)..(174): Homolog of NCBI NO: 24899705 NR Description: Similar to CGI-126 protein [Arabidopsis thaliana]
  misc_feature (1)..(174): Homolog of NCBI NO: 18396376 NR Description: expressed protein [Arabidopsis thaliana]
MEGWDPNTKSTLTRIPLLTTKAGPRDGAAWTQRLKEEYKSLIAYTQMNKSNDNDWFRISASNPEGTRWTGKCWYVHNLLKYEFDLQFDIPITYPATAPELELPEIDGKTQKMYRGGKICLTVHFKPLWAKNCPRFGIAHALCLGLAPWLAAEIPILVDSGAIKHKDDAATSAES

SEQ ID NO: 26091 - protein, 128 aa, Arabidopsis thaliana
  peptide (1)..(128): Ceres Seq. ID no. 13487376
  misc_feature (1)..(119): Homolog of NCBI NO: 39590862 NR Description: Hypothetical protein CBG10119 [Caenorhabditis
  misc_feature (1)..(120): Homolog of NCBI NO: 13528771 NR Description: Similar to hypothetical protein [Homo sapiens]
  misc_feature (1)..(120): Homolog of NCBI NO: 13384768 NR Description: RIKEN cDNA 1110021H02; EST AA062310 [Mus
  misc_feature (1)..(124): Homolog of NCBI NO: 31223805 NR Description: ENSANGP00000010523 [Anopheles gambiae]
  misc_feature (1)..(120): Homolog of NCBI NO: 7705481 NR Description: hypothetical protein HSPC155 [Homo sapiens]
  misc_feature (1)..(120): Homolog of NCBI NO: 19922352 NR Description: CG8386-PA [Drosophila melanogaster]
  misc_feature (1)..(120): Homolog of NCBI NO: 6831734 NR Description: Protein CGI-126 (Protein HSPC155)
  misc_feature (1)..(128): Homolog of NCBI NO: 37532272 NR Description: unknown protein [Oryza sativa (japonica
  misc_feature (1)..(128): Homolog of NCBI NO: 24899705 NR Description: Similar to CGI-126 protein [Arabidopsis thaliana]
  misc_feature (1)..(128): Homolog of NCBI NO: 18396376 NR Description: expressed protein [Arabidopsis thaliana]
MNKSNDNDWFRISASNPEGTRWTGKCWYVHNLLKYEFDLQFDIPITYPATAPELELPEIDGKTQKMYRGGKICLTVHFKPLWAKNCPRFGIAHALCLGLAPWLAAEIPILVDSGAIKHKDDAATSAES

SEQ ID NO: 26092 - DNA, 771 bp, Arabidopsis thaliana
  misc_feature (1)..(771): Ceres Seq. ID no. 12394354
  misc_feature: MA Experiment ID: 20000794 Result: Down-regulated in Transcription
  misc_feature: MA Experiment 20000794 PARAMETER Experiment Name: At_Petals_P Parameter: Age (day) Value: 23-25 days
  misc_feature: MA Experiment 20000794 PARAMETER Experiment Name: At_Petals_P Parameter: Plant Line Value: WS
  misc_feature: MA Experiment 20000794 PARAMETER Experiment Name: At_Petals_P Parameter: Tissue Value: Petals vs. Whole plant
  misc_feature: MA Experiment ID: 20001558 Result: Up-regulated in Transcription
  misc_feature: MA Experiment 20001558 PARAMETER Experiment Name: At_Drought_Soil_Dry_P Parameter: Age (day) Value: 27
  misc_feature: MA Experiment 20001558 PARAMETER Experiment Name: At_Drought_Soil_Dry_P Parameter: Organism Value: A. thaliana
  misc_feature: MA Experiment 20001558 PARAMETER Experiment Name: At_Drought_Soil_Dry_P Parameter: Plant Line Value: WS
  misc_feature: MA Experiment 20001558 PARAMETER Experiment Name: At_Drought_Soil_Dry_P Parameter: Post Timepoint (hr) Value: 6
  misc_feature: MA Experiment 20001558 PARAMETER Experiment Name: At_Drought_Soil_Dry_P Parameter: Post-Treatment Value: Re-Water vs. No Drought
  misc_feature: MA Experiment 20001558 PARAMETER Experiment Name: At_Drought_Soil_Dry_P Parameter: Timepoint (day) Value: 13
  misc_feature: MA Experiment 20001558 PARAMETER Experiment Name: At_Drought_Soil_Dry_P Parameter: Treatment Value: Drought vs. No Drought
  misc_feature: MA Experiment ID: 20001560 Result: Up-regulated in Transcription
  misc_feature: MA Experiment 20001560 PARAMETER Experiment Name: At_Drought_Soil_Dry_P Parameter: Age (day) Value: 28
  misc_feature: MA Experiment 20001560 PARAMETER Experiment Name: At_Drought_Soil_Dry_P Parameter: Organism Value: A. thaliana
  misc_feature: MA Experiment 20001560 PARAMETER Experiment Name: At_Drought_Soil_Dry_P Parameter: Plant Line Value: WS
  misc_feature: MA Experiment 20001560 PARAMETER Experiment Name: At_Drought_Soil_Dry_P Parameter: Post Timepoint (hr) Value: None
  misc_feature: MA Experiment 20001560 PARAMETER Experiment Name: At_Drought_Soil_Dry_P Parameter: Post-Treatment Value: None
  misc_feature: MA Experiment 20001560 PARAMETER Experiment Name: At_Drought_Soil_Dry_P Parameter: Timepoint (day) Value: 14
  misc_feature: MA Experiment 20001560 PARAMETER Experiment Name: At_Drought_Soil_Dry_P Parameter: Treatment Value: Drought vs. No Drought
  misc_feature: MA Experiment ID: 20001911 Result: Down-regulated in Transcription
  misc_feature: MA Experiment 20001911 PARAMETER Experiment Name: At_Drought_Reproduction_P Parameter: Age (day) Value: 40
  misc_feature: MA Experiment 20001911 PARAMETER Experiment Name: At_Drought_Reproduction_P Parameter: Organism Value: A. thaliana
  misc_feature: MA Experiment 20001911 PARAMETER Experiment Name: At_Drought_Reproduction_P Parameter: Plant Line Value: WS
  misc_feature: MA Experiment 20001911 PARAMETER Experiment Name: At_Drought_Reproduction_P Parameter: Timepoint (day) Value: 10
  misc_feature: MA Experiment 20001911 PARAMETER Experiment Name: At_Drought_Reproduction_P Parameter: Tissue Value: Flowers
  misc_feature: MA Experiment 20001911 PARAMETER Experiment Name: At_Drought_Reproduction_P Parameter: Treatment Value: Drought vs. No Drought
gacccaaatctgacgcttctctctctctttctggtatctgcgtttgattcggagaagaaaaaaaaaaaaaaggcaaagagagagcttcaatggagttagcttctttccttggtagagctctgtttgtttccgtatttcttctctccgcatggcaagagttcaatgattttggtgaagatggtggccgatcagctaaatctttgaaaccaaaattcaatgcctttgtaaaccatgtgacaactcacactggccagcaattgccaccagtcgatatgaagattcttgttgctgctgctatagccttgaagggtattgggggactattgtttgtctttggcagctcattgggagcttatctcttgcttctgcatcaagccgttgccaccccaattctgtatgatttctacaactacgatgttgacagaaaggaattcggccaactattttcaaaatttacacagagcttggctcttcttggaggactgctcttcttcattggaatgaaaaactcaaggaaacacggtaggcaactcaggaaaaaggctccaaaggcaaaagcaaactgaagaagccatatctttcatcggttttattcggtctgtattttattttcattttggaatccaggatgggtttaaagagtctatctgatgaggccattgaaaggcaaaatctctgcaaatcattttgcttacttcaagaagcttttatgacacttttttgtagaaatatttatggattattgtttcttagagacaccacttcaatgtc

SEQ ID NO: 26093 - protein, 158 aa, Arabidopsis thaliana
  peptide (1)..(158): Ceres Seq. ID no. 12394355
  misc_feature (1)..(138): Pfam Name: HR-like lesion-inducing Pfam Description: HR-like lesion-inducing
  misc_feature (1)..(156): Homolog of NCBI NO: 40287494 NR Description: putative lesion-inducing protein [Capsicum annuum]
  misc_feature (1)..(157): Homolog of NCBI NO: 15239873 NR Description: Nicotiana lesion-inducing like
  misc_feature (24)..(157): Homolog of NCBI NO: 37534824 NR Description: putative RNA-binding protein
  misc_feature (1)..(157): Homolog of NCBI NO: 21592798 NR Description: Nicotiana lesion-inducing like [Arabidopsis
  misc_feature (1)..(157): Homolog of NCBI NO: 15219714 NR Description: unknown protein
  misc_feature (1)..(158): Homolog of NCBI NO: 38346190 NR Description: OSJNBa0027O01.6 [Oryza sativa (japonica
  misc_feature (1)..(128): Homolog of NCBI NO: 7489143 NR Description: hypothetical protein (clone ND1) - common tobacco
  misc_feature (1)..(158): Homolog of NCBI NO: 27261473 NR Description: Unknown protein [Oryza sativa (japonica
  misc_feature (1)..(158): Homolog of NCBI NO: 7489144 NR Description: hypothetical protein (clone NF22) - common
  misc_feature (1)..(158): Homolog of NCBI NO: 15236497 NR Description: elicitor like protein
MELASFLGRALFVSVFLLSAWQEFNDFGEDGGRSAKSLKPKFNAFVNHVTTHTGQQLPPVDMKILVAAAIALKGIGGLLFVFGSSLGAYLLLLHQAVATPILYDFYNYDVDRKEFGQLFSKFTQSLALLGGLLFFIGMKNSRKHGRQLRKKAPKAKAN

SEQ ID NO: 26094 - protein, 97 aa, Arabidopsis thaliana
  peptide (1)..(97): Ceres Seq. ID no. 12394356
  misc_feature (1)..(77): Pfam Name: HR-like lesion-inducing Pfam Description: HR-like lesion-inducing
  misc_feature (1)..(95): Homolog of NCBI NO: 40287494 NR Description: putative lesion-inducing protein [Capsicum annuum]
  misc_feature (1)..(96): Homolog of NCBI NO: 15239873 NR Description: Nicotiana lesion-inducing like
  misc_feature (1)..(96): Homolog of NCBI NO: 37534824 NR Description: putative RNA-binding protein
  misc_feature (1)..(96): Homolog of NCBI NO: 21592798 NR Description: Nicotiana lesion-inducing like [Arabidopsis
  misc_feature (1)..(96): Homolog of NCBI NO: 15219714 NR Description: unknown protein
  misc_feature (1)..(97): Homolog of NCBI NO: 38346190 NR Description: OSJNBa0027O01.6 [Oryza sativa (japonica
  misc_feature (1)..(67): Homolog of NCBI NO: 7489143 NR Description: hypothetical protein (clone ND1) - common tobacco
  misc_feature (1)..(97): Homolog of NCBI NO: 27261473 NR Description: Unknown protein [Oryza sativa (japonica
  misc_feature (1)..(97): Homolog of NCBI NO: 7489144 NR Description: hypothetical protein (clone NF22) - common
  misc_feature (1)..(97): Homolog of NCBI NO: 15236497 NR Description: elicitor like protein
MKILVAAAIALKGIGGLLFVFGSSLGAYLLLLHQAVATPILYDFYNYDVDRKEFGQLFSKFTQSLALLGGLLFFIGMKNSRKHGRQLRKKAPKAKAN

SEQ ID NO: 26095 - DNA, 1208 bp, Arabidopsis thaliana
  misc_feature (1)..(1208): Ceres Seq. ID no. 12323550
  misc_feature: MA Experiment ID: 108461 Result: Up-regulated in Transcription
  misc_feature: MA Experiment 108461 PARAMETER Experiment Name: At_Germinating_Seeds_cDNA_P Parameter: Age (day) Value: 1 vs. 0
  misc_feature: MA Experiment 108461 PARAMETER Experiment Name: At_Germinating_Seeds_cDNA_P Parameter: Tissue Value: Germinating Seeds
  misc_feature: MA Experiment ID: 108462 Result: Up-regulated in Transcription
  misc_feature: MA Experiment 108462 PARAMETER Experiment Name: At_Germinating_Seeds_cDNA_P Parameter: Age (day) Value: 2 vs. 0
  misc_feature: MA Experiment 108462 PARAMETER Experiment Name: At_Germinating_Seeds_cDNA_P Parameter: Tissue Value: Germinating Seeds
  misc_feature: MA Experiment ID: 108463 Result: Up-regulated in Transcription
  misc_feature: MA Experiment 108463 PARAMETER Experiment Name: At_Germinating_Seeds_cDNA_P Parameter: Age (day) Value: 3 vs. 0
  misc_feature: MA Experiment 108463 PARAMETER Experiment Name: At_Germinating_Seeds_cDNA_P Parameter: Tissue Value: Germinating Seeds
  misc_feature: MA Experiment ID: 108464 Result: Up-regulated in Transcription
  misc_feature: MA Experiment 108464 PARAMETER Experiment Name: At_Germinating_Seeds_cDNA_P Parameter: Age (day) Value: 4 vs. 0
  misc_feature: MA Experiment 108464 PARAMETER Experiment Name: At_Germinating_Seeds_cDNA_P Parameter: Tissue Value: Germinating Seeds
  misc_feature: MA Experiment ID: 108501 Result: Up-regulated in Transcription
  misc_feature: MA Experiment 108501 PARAMETER Experiment Name: At_ap2_floral_buds_cDNA_P Parameter: Plant Line Value: ap2 (Ler.)
  misc_feature: MA Experiment 108501 PARAMETER Experiment Name: At_ap2_floral_buds_cDNA_P Parameter: Tissue Value: Closed Flower
  misc_feature: MA Experiment ID: 108577 Result: Down-regulated in Transcription
  misc_feature: MA Experiment 108577 PARAMETER Experiment Name: At_42deg_Heat_cDNA_P Parameter: Temperature (deg C) Value: 42 vs. 22
  misc_feature: MA Experiment 108577 PARAMETER Experiment Name: At_42deg_Heat_cDNA_P Parameter: Timepoint (hr) Value: 6
  misc_feature: MA Experiment 108577 PARAMETER Experiment Name: At_42deg_Heat_cDNA_P Parameter: Tissue Value: Aerial
  misc_feature: MA Experiment ID: 20000072 Result: Down-regulated in Transcription
  misc_feature: MA Experiment 20000072 PARAMETER Experiment Name: At_100uM_ABA_Mutants_cDNA_P Parameter: Plant Line Value: CS8105
  misc_feature: MA Experiment 20000072 PARAMETER Experiment Name: At_100uM_ABA_Mutants_cDNA_P Parameter: Timepoint (hr) Value: 6
  misc_feature: MA Experiment 20000072 PARAMETER Experiment Name: At_100uM_ABA_Mutants_cDNA_P Parameter: Tissue Value: Aerial
  misc_feature: MA Experiment 20000072 PARAMETER Experiment Name: At_100uM_ABA_Mutants_cDNA_P Parameter: Treatment Value: 100uM ABA vs. No Treatment
  misc_feature: MA Experiment ID: 20000090 Result: Down-regulated in Transcription
  misc_feature: MA Experiment ID: 20000111 Result: Down-regulated in Transcription
  misc_feature: MA Experiment 20000111 PARAMETER Experiment Name: At_42deg_Heat_cDNA_P Parameter: Temperature (deg C) Value: 42 vs. 22
  misc_feature: MA Experiment 20000111 PARAMETER Experiment Name: At_42deg_Heat_cDNA_P Parameter: Timepoint (hr) Value: 6
  misc_feature: MA Experiment 20000111 PARAMETER Experiment Name: At_42deg_Heat_cDNA_P Parameter: Tissue Value: Aerial
  misc_feature: MA Experiment ID: 20000112 Result: Down-regulated in Transcription
  misc_feature: MA Experiment 20000112 PARAMETER Experiment Name: At_42deg_Heat_cDNA_P Parameter: Temperature (deg C) Value: 42 vs. 22
  misc_feature: MA Experiment 20000112 PARAMETER Experiment Name: At_42deg_Heat_cDNA_P Parameter: Timepoint (hr) Value: 2
  misc_feature: MA Experiment 20000112 PARAMETER Experiment Name: At_42deg_Heat_cDNA_P Parameter: Tissue Value: Aerial
  misc_feature: MA Experiment ID: 20000113 Result: Down-regulated in Transcription
  misc_feature: MA Experiment 20000113 PARAMETER Experiment Name: At_42deg_Heat_cDNA_P Parameter: Temperature (deg C) Value: 42 vs. 22
  misc_feature: MA Experiment 20000113 PARAMETER Experiment Name: At_42deg_Heat_cDNA_P Parameter: Timepoint (hr) Value: 8
  misc_feature: MA Experiment 20000113 PARAMETER Experiment Name: At_42deg_Heat_cDNA_P Parameter: Tissue Value: Aerial
  misc_feature: MA Experiment ID: 20000224 Result: Up-regulated in Transcription
  misc_feature: MA Experiment ID: 20000307 Result: Up-regulated in Transcription
  misc_feature: MA Experiment 20000307 PARAMETER Experiment Name: At_Germinating_Seeds_Sub_P Parameter: Age (hr) Value: 24 vs. 0
  misc_feature: MA Experiment 20000307 PARAMETER Experiment Name: At_Germinating_Seeds_Sub_P Parameter: Organism Value: A. thaliana
  misc_feature: MA Experiment 20000307 PARAMETER Experiment Name: At_Germinating_Seeds_Sub_P Parameter: Plant Line Value: WS
  misc_feature: MA Experiment 20000307 PARAMETER Experiment Name: At_Germinating_Seeds_Sub_P Parameter: Tissue Value: Germinating Seeds
  misc_feature: MA Experiment ID: 20000314 Result: Up-regulated in Transcription
  misc_feature: MA Experiment 20000314 PARAMETER Experiment Name: At_14day_Shoots-Roots_Sub_P Parameter: Age (day) Value: 14
  misc_feature: MA Experiment 20000314 PARAMETER Experiment Name: At_14day_Shoots-Roots_Sub_P Parameter: Organism Value: A. thaliana
  misc_feature: MA Experiment 20000314 PARAMETER Experiment Name: At_14day_Shoots-Roots_Sub_P Parameter: Plant Line Value: WS
  misc_feature: MA Experiment 20000314 PARAMETER Experiment Name: At_14day_Shoots-Roots_Sub_P Parameter: Tissue Value: Roots vs. Whole Plant
  misc_feature: MA Experiment ID: 20000328 Result: Down-regulated in Transcription
  misc_feature: MA Experiment 20000328 PARAMETER Experiment Name: At_42deg_Heat_Sub_P Parameter: Age (day) Value: 14
  misc_feature: MA Experiment 20000328 PARAMETER Experiment Name: At_42deg_Heat_Sub_P Parameter: Organism Value: A. thaliana
  misc_feature: MA Experiment 20000328 PARAMETER Experiment Name: At_42deg_Heat_Sub_P Parameter: Plant Line Value: WS
  misc_feature: MA Experiment 20000328 PARAMETER Experiment Name: At_42deg_Heat_Sub_P Parameter: Temperature (deg C) Value: 42 vs. 22
  misc_feature: MA Experiment 20000328 PARAMETER Experiment Name: At_42deg_Heat_Sub_P Parameter: Timepoint (hr) Value: 6
  misc_feature: MA Experiment 20000328 PARAMETER Experiment Name: At_42deg_Heat_Sub_P Parameter: Tissue Value: Aerial
  misc_feature: MA Experiment ID: 20000355 Result: Up-regulated in Transcription
  misc_feature: MA Experiment 20000355 PARAMETER Experiment Name: At_Siliques_Sub_P Parameter: Age (day) Value: 21
  misc_feature: MA Experiment 20000355 PARAMETER Experiment Name: At_Siliques_Sub_P Parameter: Organism Value: A. thaliana
  misc_feature: MA Experiment 20000355 PARAMETER Experiment Name: At_Siliques_Sub_P Parameter: Plant Line Value: WS
  misc_feature: MA Experiment 20000355 PARAMETER Experiment Name: At_Siliques_Sub_P Parameter: Tissue Value: Less Than 5mm Siliques vs. Whole Plant
  misc_feature: MA Experiment ID: 20000440 Result: Up-regulated in Transcription
  misc_feature: MA Experiment 20000440 PARAMETER Experiment Name: At_Closed-Flower__Sub_P Parameter: Tissue Value: Closed Flower vs. Whole Plant
aagtaggacgacgtgcgtctgcttcgtctcattacaaagcagaagaaacacaaacagaggcagagatcttaagagttaaagactaatcccaacaatggcgtctctcaaagtcccaagcaatgttcctcttcccgaagatgacgccgagcaactccacaaggctttttcaggatggggtaccaacgagaagctgatcatatcaatactagctcacaggaacgcagcacaacgcagcttgatccgcagcgtttatgcagctacctacaatgaggatcttctcaaagcattagacaaagagctttctagcgactttgagagagctgtgatgttgtggactcttgatccaccagagagagatgcttatttggctaaagaatccaccaagatgttcaccaagaacaattgggttcttgttgaaatcgcttgcacaaggcctgctcttgagcttatcaaggtcaagcaagcttaccaagctcgatacaagaaatcaatcgaggaagatgtcgcgcaacacacatctggtgaccttcgtaagctcttgcttcctcttgtgagcactttcaggtatgaaggagatgatgtgaacatgatgcttgcaagatctgaagctaagatacttcacgagaaggtctcagagaaatcttacagtgacgatgacttcatcagaatcttgacaacaagaagcaaagcacagctcggtgcaacactcaaccactacaacaacgagtatggaaacgccattaacaagaacttgaaggaagagtcggacgacaatgactacatgaaactactaagagctgtaatcacatgtttgacataccctgagaagcattttgagaaggttcttcgtctatcaatcaacaaaatgggaacagacgaatggggactaacccgagtcgtgactacacgaactgaagttgacatggaacgcatcaaagaggaatatcagcgaagaaacagcattcctttggaccgtgctatcgccaaagacacttctggtgactatgaggacatgcttgttgctcttctcggacatggcgatgcttgaaactgtttcaactttcgagttcctcctttctcttactgcatggtttgttttaaataaaagagttgtgaaactggttctgcaactatttatcaatgatcgtttgagtttgttaaatttgaatcaaaatctgtttttctttcttttaaatacaatctaaagc

SEQ ID NO: 26096 - protein, 317 aa, Arabidopsis thaliana
  peptide (1)..(317): Ceres Seq. ID no. 12323551
  misc_feature (168)..(236): Pfam Name: Annexin Pfam Description: Annexin
  misc_feature (1)..(317): Homolog of NCBI NO: 15238105 NR Description: annexin -like protein
  misc_feature (1)..(317): Homolog of NCBI NO: 15238094 NR Description: annexin -like protein
  misc_feature (1)..(317): Homolog of NCBI NO: 7441508 NR Description: annexin, isoform P35 - tomato
  misc_feature (8)..(316): Homolog of NCBI NO: 7441509 NR Description: annexin - alfalfa (fragment)
  misc_feature (1)..(317): Homolog of NCBI NO: 4580920 NR Description: vacuole-associated annexin VCaB42 [Nicotiana
  misc_feature (1)..(317): Homolog of NCBI NO: 12667518 NR Description: calcium-binding protein annexin 6 [Arabidopsis
  misc_feature (3)..(317): Homolog of NCBI NO: 7441511 NR Description: annexin 2 - upland cotton (fragment)
  misc_feature (1)..(317): Homolog of NCBI NO: 3928134 NR Description: annexin P38 [Capsicum annuum]
  misc_feature (1)..(317): Homolog of NCBI NO: 12667522 NR Description: calcium-binding protein annexin 7 [Arabidopsis
  misc_feature (1)..(317): Homolog of NCBI NO: 15238320 NR Description: annexin
MASLKVPSNVPLPEDDAEQLHKAFSGWGTNEKLIISILAHRNAAQRSLIRSVYAATYNEDLLKALDKELSSDFERAVMLWTLDPPERDAYLAKESTKMFTKNNWVLVEIACTRPALELIKVKQAYQARYKKSIEEDVAQHTSGDLRKLLLPLVSTFRYEGDDVNMMLARSEAKILHEKVSEKSYSDDDFIRILTTRSKAQLGATLNHYNNEYGNAINKNLKEESDDNDYMKLLRAVITCLTYPEKHFEKVLRLSINKMGTDEWGLTRVVTTRTEVDMERIKEEYQRRNSIPLDRAIAKDTSGDYEDMLVALLGHGDA

SEQ ID NO: 26097 - protein, 240 aa, Arabidopsis thaliana
  peptide (1)..(240): Ceres Seq. ID no. 12323552
  misc_feature (91)..(159): Pfam Name: Annexin Pfam Description: Annexin
  misc_feature (1)..(240): Homolog of NCBI NO: 7441508 NR Description: annexin, isoform P35 - tomato
  misc_feature (1)..(240): Homolog of NCBI NO: 3928134 NR Description: annexin P38 [Capsicum annuum]
  misc_feature (1)..(239): Homolog of NCBI NO: 7441509 NR Description: annexin - alfalfa (fragment)
  misc_feature (1)..(240): Homolog of NCBI NO: 7441511 NR Description: annexin 2 - upland cotton (fragment)
  misc_feature (1)..(240): Homolog of NCBI NO: 4580920 NR Description: vacuole-associated annexin VCaB42 [Nicotiana
  misc_feature (1)..(240): Homolog of NCBI NO: 12667518 NR Description: calcium-binding protein annexin 6 [Arabidopsis
  misc_feature (1)..(240): Homolog of NCBI NO: 15238094 NR Description: annexin -like protein
  misc_feature (1)..(240): Homolog of NCBI NO: 12667522 NR Description: calcium-binding protein annexin 7 [Arabidopsis
  misc_feature (1)..(240): Homolog of NCBI NO: 15238105 NR Description: annexin -like protein
  misc_feature (1)..(240): Homolog of NCBI NO: 15238320 NR Description: annexin
MLWTLDPPERDAYLAKESTKMFTKNNWVLVEIACTRPALELIKVKQAYQARYKKSIEEDVAQHTSGDLRKLLLPLVSTFRYEGDDVNMMLARSEAKILHEKVSEKSYSDDDFIRILTTRSKAQLGATLNHYNNEYGNAINKNLKEESDDNDYMKLLRAVITCLTYPEKHFEKVLRLSINKMGTDEWGLTRVVTTRTEVDMERIKEEYQRRNSIPLDRAIAKDTSGDYEDMLVALLGHGDA

SEQ ID NO: 26098 - protein, 220 aa, Arabidopsis thaliana
  peptide (1)..(220): Ceres Seq. ID no. 12323553
  misc_feature (71)..(139): Pfam Name: Annexin Pfam Description: Annexin
  misc_feature (1)..(220): Homolog of NCBI NO: 7441508 NR Description: annexin, isoform P35 - tomato
  misc_feature (1)..(220): Homolog of NCBI NO: 3928134 NR Description: annexin P38 [Capsicum annuum]
  misc_feature (1)..(219): Homolog of NCBI NO: 7441509 NR Description: annexin - alfalfa (fragment)
  misc_feature (1)..(220): Homolog of NCBI NO: 7441511 NR Description: annexin 2 - upland cotton (fragment)
  misc_feature (1)..(220): Homolog of NCBI NO: 4580920 NR Description: vacuole-associated annexin VCaB42 [Nicotiana
  misc_feature (1)..(220): Homolog of NCBI NO: 12667518 NR Description: calcium-binding protein annexin 6 [Arabidopsis
  misc_feature (1)..(220): Homolog of NCBI NO: 15238094 NR Description: annexin -like protein
  misc_feature (1)..(220): Homolog of NCBI NO: 12667522 NR Description: calcium-binding protein annexin 7 [Arabidopsis
  misc_feature (1)..(220): Homolog of NCBI NO: 15238105 NR Description: annexin -like protein
  misc_feature (1)..(220): Homolog of NCBI NO: 15238320 NR Description: annexin
MFTKNNWVLVEIACTRPALELIKVKQAYQARYKKSIEEDVAQHTSGDLRKLLLPLVSTFRYEGDDVNMMLARSEAKILHEKVSEKSYSDDDFIRILTTRSKAQLGATLNHYNNEYGNAINKNLKEESDDNDYMKLLRAVITCLTYPEKHFEKVLRLSINKMGTDEWGLTRVVTTRTEVDMERIKEEYQRRNSIPLDRAIAKDTSGDYEDMLVALLGHGDA

SEQ ID NO: 26099 - DNA, 678 bp, Arabidopsis thaliana
  misc_feature (1)..(678): Ceres Seq. ID no. 12337775
  misc_feature: MA Experiment ID: 108462 Result: Down-regulated in Transcription
  misc_feature: MA Experiment 108462 PARAMETER Experiment Name: At_Germinating_Seeds_cDNA_P Parameter: Age (day) Value: 2 vs. 0
  misc_feature: MA Experiment 108462 PARAMETER Experiment Name: At_Germinating_Seeds_cDNA_P Parameter: Tissue Value: Germinating Seeds
  misc_feature: MA Experiment ID: 108463 Result: Down-regulated in Transcription
  misc_feature: MA Experiment 108463 PARAMETER Experiment Name: At_Germinating_Seeds_cDNA_P Parameter: Age (day) Value: 3 vs. 0
  misc_feature: MA Experiment 108463 PARAMETER Experiment Name: At_Germinating_Seeds_cDNA_P Parameter: Tissue Value: Germinating Seeds
  misc_feature: MA Experiment ID: 108561 Result: Up-regulated in Transcription
  misc_feature: MA Experiment 108561 PARAMETER Experiment Name: At_100uM_ABA_cDNA_P Parameter: Timepoint (hr) Value: 6
  misc_feature: MA Experiment 108561 PARAMETER Experiment Name: At_100uM_ABA_cDNA_P Parameter: Tissue Value: Aerial
  misc_feature: MA Experiment 108561 PARAMETER Experiment Name: At_100uM_ABA_cDNA_P Parameter: Treatment Value: 100uM ABA vs. No Treatment
  misc_feature: MA Experiment ID: 108576 Result: Up-regulated in Transcription
  misc_feature: MA Experiment 108576 PARAMETER Experiment Name: At_42deg_Heat_cDNA_P Parameter: Temperature (deg C) Value: 42 vs. 22
  misc_feature: MA Experiment 108576 PARAMETER Experiment Name: At_42deg_Heat_cDNA_P Parameter: Timepoint (hr) Value: 1
  misc_feature: MA Experiment 108576 PARAMETER Experiment Name: At_42deg_Heat_cDNA_P Parameter: Tissue Value: Aerial
  misc_feature: MA Experiment ID: 108577 Result: Up-regulated in Transcription
  misc_feature: MA Experiment 108577 PARAMETER Experiment Name: At_42deg_Heat_cDNA_P Parameter: Temperature (deg C) Value: 42 vs. 22
  misc_feature: MA Experiment 108577 PARAMETER Experiment Name: At_42deg_Heat_cDNA_P Parameter: Timepoint (hr) Value: 6
  misc_feature: MA Experiment 108577 PARAMETER Experiment Name: At_42deg_Heat_cDNA_P Parameter: Tissue Value: Aerial
  misc_feature: MA Experiment ID: 108594 Result: Down-regulated in Transcription
  misc_feature: MA Experiment 108594 PARAMETER Experiment Name: At_Ler-rhl_Root_cDNA_P Parameter: Plant Line Value: null
  misc_feature: MA Experiment ID: 108595 Result: Up-regulated in Transcription
  misc_feature: MA Experiment 108595 PARAMETER Experiment Name: At_Ler-pi_Ovule_cDNA_P Parameter: Plant Line Value: null
  misc_feature: MA Experiment ID: 20000069 Result: Up-regulated in Transcription
  misc_feature: MA Experiment 20000069 PARAMETER Experiment Name: At_100uM_ABA_Mutants_cDNA_P Parameter: Plant Line Value: CS23
  misc_feature: MA Experiment 20000069 PARAMETER Experiment Name: At_100uM_ABA_Mutants_cDNA_P Parameter: Timepoint (hr) Value: 6
  misc_feature: MA Experiment 20000069 PARAMETER Experiment Name: At_100uM_ABA_Mutants_cDNA_P Parameter: Tissue Value: Aerial
  misc_feature: MA Experiment 20000069 PARAMETER Experiment Name: At_100uM_ABA_Mutants_cDNA_P Parameter: Treatment Value: 100uM ABA vs. No Treatment
  misc_feature: MA Experiment ID: 20000093 Result: Up-regulated in Transcription
  misc_feature: MA Experiment 20000093 PARAMETER Experiment Name: At_42deg_Heat_cDNA_P Parameter: Temperature (deg C) Value: 42 vs. 22
  misc_feature: MA Experiment 20000093 PARAMETER Experiment Name: At_42deg_Heat_cDNA_P Parameter: Timepoint (hr) Value: 0.5
  misc_feature: MA Experiment 20000093 PARAMETER Experiment Name: At_42deg_Heat_cDNA_P Parameter: Tissue Value: Aerial
  misc_feature: MA Experiment ID: 20000112 Result: Up-regulated in Transcription
  misc_feature: MA Experiment 20000112 PARAMETER Experiment Name: At_42deg_Heat_cDNA_P Parameter: Temperature (deg C) Value: 42 vs. 22
  misc_feature: MA Experiment 20000112 PARAMETER Experiment Name: At_42deg_Heat_cDNA_P Parameter: Timepoint (hr) Value: 2
  misc_feature: MA Experiment 20000112 PARAMETER Experiment Name: At_42deg_Heat_cDNA_P Parameter: Tissue Value: Aerial
  misc_feature: MA Experiment ID: 20000113 Result: Up-regulated in Transcription
  misc_feature: MA Experiment 20000113 PARAMETER Experiment Name: At_42deg_Heat_cDNA_P Parameter: Temperature (deg C) Value: 42 vs. 22
  misc_feature: MA Experiment 20000113 PARAMETER Experiment Name: At_42deg_Heat_cDNA_P Parameter: Timepoint (hr) Value: 8
  misc_feature: MA Experiment 20000113 PARAMETER Experiment Name: At_42deg_Heat_cDNA_P Parameter: Tissue Value: Aerial
  misc_feature: MA Experiment ID: 20000117 Result: Up-regulated in Transcription
  misc_feature: MA Experiment 20000117 PARAMETER Experiment Name: At_100uM_ABA_Mutants_cDNA_P Parameter: Plant Line Value: Columbia
  misc_feature: MA Experiment 20000117 PARAMETER Experiment Name: At_100uM_ABA_Mutants_cDNA_P Parameter: Timepoint (hr) Value: 6
  misc_feature: MA Experiment 20000117 PARAMETER Experiment Name: At_100uM_ABA_Mutants_cDNA_P Parameter: Tissue Value: Aerial
  misc_feature: MA Experiment 20000117 PARAMETER Experiment Name: At_100uM_ABA_Mutants_cDNA_P Parameter: Treatment Value: 100uM ABA vs. No Treatment
  misc_feature: MA Experiment ID: 20000144 Result: Up-regulated in Transcription
  misc_feature: MA Experiment 20000144 PARAMETER Experiment Name: At_42deg_Heat_cDNA_P Parameter: Temperature (deg C) Value: 42 vs. 22
  misc_feature: MA Experiment 20000144 PARAMETER Experiment Name: At_42deg_Heat_cDNA_P Parameter: Timepoint (hr) Value: 1
  misc_feature: MA Experiment 20000144 PARAMETER Experiment Name: At_42deg_Heat_cDNA_P Parameter: Tissue Value: Aerial
  misc_feature: MA Experiment ID: 20000314 Result: Up-regulated in Transcription
  misc_feature: MA Experiment 20000314 PARAMETER Experiment Name: At_14day_Shoots-Roots_Sub_P Parameter: Age (day) Value: 14
  misc_feature: MA Experiment 20000314 PARAMETER Experiment Name: At_14day_Shoots-Roots_Sub_P Parameter: Organism Value: A. thaliana
  misc_feature: MA Experiment 20000314 PARAMETER Experiment Name: At_14day_Shoots-Roots_Sub_P Parameter: Plant Line Value: WS
  misc_feature: MA Experiment 20000314 PARAMETER Experiment Name: At_14day_Shoots-Roots_Sub_P Parameter: Tissue Value: Roots vs. Whole Plant
  misc_feature: MA Experiment ID: 20000327 Result: Up-regulated in Transcription
  misc_feature: MA Experiment 20000327 PARAMETER Experiment Name: At_42deg_Heat_Sub_P Parameter: Age (day) Value: 14
  misc_feature: MA Experiment 20000327 PARAMETER Experiment Name: At_42deg_Heat_Sub_P Parameter: Organism Value: A. thaliana
  misc_feature: MA Experiment 20000327 PARAMETER Experiment Name: At_42deg_Heat_Sub_P Parameter: Plant Line Value: WS
  misc_feature: MA Experiment 20000327 PARAMETER Experiment Name: At_42deg_Heat_Sub_P Parameter: Temperature (deg C) Value: 42 vs. 22
  misc_feature: MA Experiment 20000327 PARAMETER Experiment Name: At_42deg_Heat_Sub_P Parameter: Timepoint (hr) Value: 1
  misc_feature: MA Experiment 20000327 PARAMETER Experiment Name: At_42deg_Heat_Sub_P Parameter: Tissue Value: Aerial
  misc_feature: MA Experiment ID: 20000328 Result: Up-regulated in Transcription
  misc_feature: MA Experiment 20000328 PARAMETER Experiment Name: At_42deg_Heat_Sub_P Parameter: Age (day) Value: 14
  misc_feature: MA Experiment 20000328 PARAMETER Experiment Name: At_42deg_Heat_Sub_P Parameter: Organism Value: A. thaliana
  misc_feature: MA Experiment 20000328 PARAMETER Experiment Name: At_42deg_Heat_Sub_P Parameter: Plant Line Value: WS
  misc_feature: MA Experiment 20000328 PARAMETER Experiment Name: At_42deg_Heat_Sub_P Parameter: Temperature (deg C) Value: 42 vs. 22
  misc_feature: MA Experiment 20000328 PARAMETER Experiment Name: At_42deg_Heat_Sub_P Parameter: Timepoint (hr) Value: 6
  misc_feature: MA Experiment 20000328 PARAMETER Experiment Name: At_42deg_Heat_Sub_P Parameter: Tissue Value: Aerial
  misc_feature: MA Experiment ID: 20000329 Result: Down-regulated in Transcription
  misc_feature: MA Experiment 20000329 PARAMETER Experiment Name: At_4deg_Cold_Sub_P Parameter: Age (day) Value: 14
  misc_feature: MA Experiment 20000329 PARAMETER Experiment Name: At_4deg_Cold_Sub_P Parameter: Organism Value: A. thaliana
  misc_feature: MA Experiment 20000329 PARAMETER Experiment Name: At_4deg_Cold_Sub_P Parameter: Plant Line Value: WS
  misc_feature: MA Experiment 20000329 PARAMETER Experiment Name: At_4deg_Cold_Sub_P Parameter: Temperature (deg C) Value: 4 vs. 22
  misc_feature: MA Experiment 20000329 PARAMETER Experiment Name: At_4deg_Cold_Sub_P Parameter: Timepoint (hr) Value: 6
  misc_feature: MA Experiment 20000329 PARAMETER Experiment Name: At_4deg_Cold_Sub_P Parameter: Tissue Value: Aerial
  misc_feature: MA Experiment ID: 20000347 Result: Up-regulated in Transcription
  misc_feature: MA Experiment 20000347 PARAMETER Experiment Name: At_2mM_SA_Sub_P Parameter: Age (day) Value: 14
  misc_feature: MA Experiment 20000347 PARAMETER Experiment Name: At_2mM_SA_Sub_P Parameter: Organism Value: A. thaliana
  misc_feature: MA Experiment 20000347 PARAMETER Experiment Name: At_2mM_SA_Sub_P Parameter: Plant Line Value: WS
  misc_feature: MA Experiment 20000347 PARAMETER Experiment Name: At_2mM_SA_Sub_P Parameter: Timepoint (hr) Value: 6
  misc_feature: MA Experiment 20000347 PARAMETER Experiment Name: At_2mM_SA_Sub_P Parameter: Tissue Value: Aerial
  misc_feature: MA Experiment 20000347 PARAMETER Experiment Name: At_2mM_SA_Sub_P Parameter: Treatment Value: 2mM SA vs. No Treatment
  misc_feature: MA Experiment ID: 20000355 Result: Up-regulated in Transcription
  misc_feature: MA Experiment 20000355 PARAMETER Experiment Name: At_Siliques_Sub_P Parameter: Age (day) Value: 21
  misc_feature: MA Experiment 20000355 PARAMETER Experiment Name: At_Siliques_Sub_P Parameter: Organism Value: A. thaliana
  misc_feature: MA Experiment 20000355 PARAMETER Experiment Name: At_Siliques_Sub_P Parameter: Plant Line Value: WS
  misc_feature: MA Experiment 20000355 PARAMETER Experiment Name: At_Siliques_Sub_P Parameter: Tissue Value: Less Than 5mm Siliques vs. Whole Plant
  misc_feature: MA Experiment ID: 20001807 Result: Down-regulated in Transcription
  misc_feature: MA Experiment 20001807 PARAMETER Experiment Name: At_50mM_NH4NO3_L-to-H_Sub_P Parameter: Timepoint (hr) Value: 6
  misc_feature: MA Experiment 20001807 PARAMETER Experiment Name: At_50mM_NH4NO3_L-to-H_Sub_P Parameter: Tissue Value: Leaf
  misc_feature: MA Experiment 20001807 PARAMETER Experiment Name: At_50mM_NH4NO3_L-to-H_Sub_P Parameter: Treatment Value: 50mM NH4NO3 vs 100mM Mannitol
aaagtcaaaactaacctattttcccttgtcttcatatccaacagagatctcttcatggctccaattactgtcggcgatgttgtaccagacggaactatctctttcttcgatgaaaatgatcagcttcagaccgtctccgttcactctatcgccgccggtaaaaaagtcattctctttggtgttcctggtgctttcactcccacatgcagcatgagccatgtgcctggattcattgggaaagcagaggagctgaagtcaaaggttatcgatgagatcatttgctttagtgtgaatgatccatttgtgatgaaggcatgggggaaaacatacacagagaacaagcatgtgaagtttgtagcagatggatctggagaatacacacatcttcttggacttgagcttgatctcaaggacaagggtcttggtattaggtcaaggagatttgctctgttgcttgataaccttaaggtgactgtagctaatgtcgaaaatggtggcgagttcacggtttccagcgcagaggatatcctcaaggctctctaagaaactttattattcgcttgttgtattgtgaatctaaaccgctgtatgtgaagaagagaattatatagcctgatttcaatcaacaagcaagtgtattgacttgcttggcataataaagtatttggttttaatgtc

SEQ ID NO: 26100 - protein, 180 aa, Arabidopsis thaliana
  peptide (1)..(180): Ceres Seq. ID no. 12337776
  misc_feature (24)..(178): Pfam Name: AhpC/TSA family Pfam Description: AhpC/TSA family
  misc_feature (19)..(180): Homolog of NCBI NO: 18654477 NR Description: thioredoxin peroxidase [Capsicum annuum]
  misc_feature (19)..(180): Homolog of NCBI NO: 30841938 NR Description: thioredoxin peroxidase 1 [Lycopersicon esculentum]
  misc_feature (19)..(180): Homolog of NCBI NO: 3913633 NR Description: Hypothetical protein At1g60740
  misc_feature (19)..(180): Homolog of NCBI NO: 21593881 NR Description: type 2 peroxiredoxin, putative [Arabidopsis
  misc_feature (19)..(180): Homolog of NCBI NO: 4928472 NR Description: type 2 peroxiredoxin [Brassica rapa subsp.
  misc_feature (19)..(180): Homolog of NCBI NO: 15218877 NR Description: type 2 peroxiredoxin, putative
  misc_feature (19)..(180): Homolog of NCBI NO: 4704732 NR Description: peroxiredoxin TPx2 [Arabidopsis thaliana]
  misc_feature (19)..(180): Homolog of NCBI NO: 15218876 NR Description: type 2 peroxiredoxin, putative
  misc_feature (19)..(180): Homolog of NCBI NO: 18406870 NR Description: peroxiredoxin, putative
  misc_feature (19)..(180): Homolog of NCBI NO: 21553913 NR Description: peroxiredoxin, putative [Arabidopsis thaliana]
KVKTNLFSLVFISNRDLFMAPITVGDVVPDGTISFFDENDQLQTVSVHSIAAGKKVILFGVPGAFTPTCSMSHVPGFIGKAEELKSKVIDEIICFSVNDPFVMKAWGKTYTENKHVKFVADGSGEYTHLLGLELDLKDKGLGIRSRRFALLLDNLKVTVANVENGGEFTVSSAEDILKAL

SEQ ID NO: 26101 - protein, 162 aa, Arabidopsis thaliana
  peptide (1)..(162): Ceres Seq. ID no. 12337777
  misc_feature (6)..(160): Pfam Name: AhpC/TSA family Pfam Description: AhpC/TSA family
  misc_feature (1)..(162): Homolog of NCBI NO: 18654477 NR Description: thioredoxin peroxidase [Capsicum annuum]
  misc_feature (1)..(162): Homolog of NCBI NO: 30841938 NR Description: thioredoxin peroxidase 1 [Lycopersicon esculentum]
  misc_feature (1)..(162): Homolog of NCBI NO: 3913633 NR Description: Hypothetical protein At1g60740
  misc_feature (1)..(162): Homolog of NCBI NO: 21593881 NR Description: type 2 peroxiredoxin, putative [Arabidopsis
  misc_feature (1)..(162): Homolog of NCBI NO: 4928472 NR Description: type 2 peroxiredoxin [Brassica rapa subsp.
  misc_feature (1)..(162): Homolog of NCBI NO: 15218877 NR Description: type 2 peroxiredoxin, putative
  misc_feature (1)..(162): Homolog of NCBI NO: 4704732 NR Description: peroxiredoxin TPx2 [Arabidopsis thaliana]
  misc_feature (1)..(162): Homolog of NCBI NO: 15218876 NR Description: type 2 peroxiredoxin, putative
  misc_feature (1)..(162): Homolog of NCBI NO: 18406870 NR Description: peroxiredoxin, putative
  misc_feature (1)..(162): Homolog of NCBI NO: 21553913 NR Description: peroxiredoxin, putative [Arabidopsis thaliana]
MAPITVGDVVPDGTISFFDENDQLQTVSVHSIAAGKKVILFGVPGAFTPTCSMSHVPGFIGKAEELKSKVIDEIICFSVNDPFVMKAWGKTYTENKHVKFVADGSGEYTHLLGLELDLKDKGLGIRSRRFALLLDNLKVTVANVENGGEFTVSSAEDILKAL

SEQ ID NO: 26102 - protein, 110 aa, Arabidopsis thaliana
  peptide (1)..(110): Ceres Seq. ID no. 12337778
  misc_feature (1)..(108): Pfam Name: AhpC/TSA family Pfam Description: AhpC/TSA family
  misc_feature (1)..(110): Homolog of NCBI NO: 18654477 NR Description: thioredoxin peroxidase [Capsicum annuum]
  misc_feature (1)..(110): Homolog of NCBI NO: 30841938 NR Description: thioredoxin peroxidase 1 [Lycopersicon esculentum]
  misc_feature (1)..(110): Homolog of NCBI NO: 3913633 NR Description: Hypothetical protein At1g60740
  misc_feature (1)..(110): Homolog of NCBI NO: 21593881 NR Description: type 2 peroxiredoxin, putative [Arabidopsis
  misc_feature (1)..(110): Homolog of NCBI NO: 4928472 NR Description: type 2 peroxiredoxin [Brassica rapa subsp.
  misc_feature (1)..(110): Homolog of NCBI NO: 15218877 NR Description: type 2 peroxiredoxin, putative
  misc_feature (1)..(110): Homolog of NCBI NO: 4704732 NR Description: peroxiredoxin TPx2 [Arabidopsis thaliana]
  misc_feature (1)..(110): Homolog of NCBI NO: 15218876 NR Description: type 2 peroxiredoxin, putative
  misc_feature (1)..(110): Homolog of NCBI NO: 18406870 NR Description: peroxiredoxin, putative
  misc_feature (1)..(110): Homolog of NCBI NO: 21553913 NR Description: peroxiredoxin, putative [Arabidopsis thaliana]
MSHVPGFIGKAEELKSKVIDEIICFSVNDPFVMKAWGKTYTENKHVKFVADGSGEYTHLLGLELDLKDKGLGIRSRRFALLLDNLKVTVANVENGGEFTVSSAEDILKAL

SEQ ID NO: 26103 - DNA, 660 bp, Arabidopsis thaliana
  misc_feature (1)..(660): Ceres Seq. ID no. 12394180
  misc_feature: MA Experiment ID: 108461 Result: Down-regulated in Transcription
  misc_feature: MA Experiment 108461 PARAMETER Experiment Name: At_Germinating_Seeds_cDNA_P Parameter: Age (day) Value: 1 vs. 0
  misc_feature: MA Experiment 108461 PARAMETER Experiment Name: At_Germinating_Seeds_cDNA_P Parameter: Tissue Value: Germinating Seeds
  misc_feature: MA Experiment ID: 108462 Result: Down-regulated in Transcription
  misc_feature: MA Experiment 108462 PARAMETER Experiment Name: At_Germinating_Seeds_cDNA_P Parameter: Age (day) Value: 2 vs. 0
  misc_feature: MA Experiment 108462 PARAMETER Experiment Name: At_Germinating_Seeds_cDNA_P Parameter: Tissue Value: Germinating Seeds
  misc_feature: MA Experiment ID: 108463 Result: Down-regulated in Transcription
  misc_feature: MA Experiment 108463 PARAMETER Experiment Name: At_Germinating_Seeds_cDNA_P Parameter: Age (day) Value: 3 vs. 0
  misc_feature: MA Experiment 108463 PARAMETER Experiment Name: At_Germinating_Seeds_cDNA_P Parameter: Tissue Value: Germinating Seeds
  misc_feature: MA Experiment ID: 108464 Result: Down-regulated in Transcription
  misc_feature: MA Experiment 108464 PARAMETER Experiment Name: At_Germinating_Seeds_cDNA_P Parameter: Age (day) Value: 4 vs. 0
  misc_feature: MA Experiment 108464 PARAMETER Experiment Name: At_Germinating_Seeds_cDNA_P Parameter: Tissue Value: Germinating Seeds
  misc_feature: MA Experiment ID: 20000180 Result: Down-regulated in Transcription
  misc_feature: MA Experiment 20000180 PARAMETER Experiment Name: At_Germinating_Seeds_P Parameter: Age (hr) Value: 24 vs. 0
  misc_feature: MA Experiment 20000180 PARAMETER Experiment Name: At_Germinating_Seeds_P Parameter: Tissue Value: Germinating Seeds
aaaaccctacgacccaaaaacaaaagagacgaaacaaaacaaaacaaaaagtctggtttgggtttctcgagctcttcttcttcttacaaagaaaatgactgattctgggcatgatattgaaatcagatgccatcactgcacaggccctcttaccagaaatttggaaaccagtaaatggactgttgatccgttcatcagggatagcttttctatgattggatcagctgttggaggtactgcaagtgcattcattggatttaaccatgcaatgccaattgtacgcaagtggatcaaaggacccatgtggttacattttcttgttggggcaccacctgttatagttctttcatcagcatgtgctggactagcaggtggcactgtaccggcactggcacagctcgcttcatcttcataccgagctgcagtccattcgtctcagccaccacaagcacaaaaggataacaaaatgcagaagtctacgacttctcctttgtaaacgacacacacagcacagctctctcttttgttcttatttatttctcttcattttgtatgtcaaatcttttctttgaaagagagagcttcttggtgtaaattcttcttatcttatacaactatctggtgctaaagaaagcttaatccgtgtcacgggctttatgt

SEQ ID NO: 26104 - protein, 164 aa, Arabidopsis thaliana
  peptide (1)..(164): Ceres Seq. ID no. 12394181
  misc_feature (42)..(159): Homolog of NCBI NO: 18390108 NR Description: gb protein [Sorghum bicolor]
  misc_feature (32)..(164): Homolog of NCBI NO: 15229213 NR Description: hypothetical protein; protein id: At3g04040.1
  misc_feature (38)..(162): Homolog of NCBI NO: 34903072 NR Description: unnamed protein product [Oryza sativa (japonica
  misc_feature (28)..(164): Homolog of NCBI NO: 38566566 NR Description: At3g04040 [Arabidopsis thaliana]
  misc_feature (32)..(164): Homolog of NCBI NO: 15238771 NR Description: putative protein
  misc_feature (32)..(164): Homolog of NCBI NO: 21553919 NR Description: unknown [Arabidopsis thaliana]
KPYDPKTKETKQNKTKSLVWVSRALLLLTKKMTDSGHDIEIRCHHCTGPLTRNLETSKWTVDPFIRDSFSMIGSAVGGTASAFIGFNHAMPIVRKWIKGPMWLHFLVGAPPVIVLSSACAGLAGGTVPALAQLASSSYRAAVHSSQPPQAQKDNKMQKSTTSPL

SEQ ID NO: 26105 - protein, 133 aa, Arabidopsis thaliana
  peptide (1)..(133): Ceres Seq. ID no. 12394182
  misc_feature (11)..(128): Homolog of NCBI NO: 18390108 NR Description: gb protein [Sorghum bicolor]
  misc_feature (1)..(133): Homolog of NCBI NO: 15229213 NR Description: hypothetical protein; protein id: At3g04040.1
  misc_feature (7)..(131): Homolog of NCBI NO: 34903072 NR Description: unnamed protein product [Oryza sativa (japonica
  misc_feature (1)..(133): Homolog of NCBI NO: 38566566 NR Description: At3g04040 [Arabidopsis thaliana]
  misc_feature (1)..(133): Homolog of NCBI NO: 15238771 NR Description: putative protein
  misc_feature (1)..(133): Homolog of NCBI NO: 21553919 NR Description: unknown [Arabidopsis thaliana]
MTDSGHDIEIRCHHCTGPLTRNLETSKWTVDPFIRDSFSMIGSAVGGTASAFIGFNHAMPIVRKWIKGPMWLHFLVGAPPVIVLSSACAGLAGGTVPALAQLASSSYRAAVHSSQPPQAQKDNKMQKSTTSPL

SEQ ID NO: 26106 - protein, 94 aa, Arabidopsis thaliana
  peptide (1)..(94): Ceres Seq. ID no. 12394183
  misc_feature (1)..(89): Homolog of NCBI NO: 18390108 NR Description: gb protein [Sorghum bicolor]
  misc_feature (1)..(94): Homolog of NCBI NO: 15229213 NR Description: hypothetical protein; protein id: At3g04040.1
  misc_feature (1)..(92): Homolog of NCBI NO: 34903072 NR Description: unnamed protein product [Oryza sativa (japonica
  misc_feature (1)..(94): Homolog of NCBI NO: 38566566 NR Description: At3g04040 [Arabidopsis thaliana]
  misc_feature (1)..(94): Homolog of NCBI NO: 15238771 NR Description: putative protein
  misc_feature (1)..(94): Homolog of NCBI NO: 21553919 NR Description: unknown [Arabidopsis thaliana]
MIGSAVGGTASAFIGFNHAMPIVRKWIKGPMWLHFLVGAPPVIVLSSACAGLAGGTVPALAQLASSSYRAAVHSSQPPQAQKDNKMQKSTTSPL

SEQ ID NO: 26107 - DNA, 1141 bp, Arabidopsis thaliana
  misc_feature (1)..(1141): Ceres Seq. ID no. 12325551
  misc_feature: MA Experiment ID: 108434 Result: Up-regulated in Transcription
  misc_feature: MA Experiment 108434 PARAMETER Experiment Name: At_Root_Tips_cDNA_P Parameter: Tissue Value: Root Tips
  misc_feature: MA Experiment ID: 108461 Result: Up-regulated in Transcription
  misc_feature: MA Experiment 108461 PARAMETER Experiment Name: At_Germinating_Seeds_cDNA_P Parameter: Age (day) Value: 1 vs. 0
  misc_feature: MA Experiment 108461 PARAMETER Experiment Name: At_Germinating_Seeds_cDNA_P Parameter: Tissue Value: Germinating Seeds
  misc_feature: MA Experiment ID: 108462 Result: Up-regulated in Transcription
  misc_feature: MA Experiment 108462 PARAMETER Experiment Name: At_Germinating_Seeds_cDNA_P Parameter: Age (day) Value: 2 vs. 0
  misc_feature: MA Experiment 108462 PARAMETER Experiment Name: At_Germinating_Seeds_cDNA_P Parameter: Tissue Value: Germinating Seeds
  misc_feature: MA Experiment ID: 108463 Result: Up-regulated in Transcription
  misc_feature: MA Experiment 108463 PARAMETER Experiment Name: At_Germinating_Seeds_cDNA_P Parameter: Age (day) Value: 3 vs. 0
  misc_feature: MA Experiment 108463 PARAMETER Experiment Name: At_Germinating_Seeds_cDNA_P Parameter: Tissue Value: Germinating Seeds
  misc_feature: MA Experiment ID: 108464 Result: Up-regulated in Transcription
  misc_feature: MA Experiment 108464 PARAMETER Experiment Name: At_Germinating_Seeds_cDNA_P Parameter: Age (day) Value: 4 vs. 0
  misc_feature: MA Experiment 108464 PARAMETER Experiment Name: At_Germinating_Seeds_cDNA_P Parameter: Tissue Value: Germinating Seeds
  misc_feature: MA Experiment ID: 108488 Result: Down-regulated in Transcription
  misc_feature: MA Experiment ID: 108572 Result: Down-regulated in Transcription
  misc_feature: MA Experiment 108572 PARAMETER Experiment Name: At_Drought_cDNA_P Parameter: Timepoint (hr) Value: 1
  misc_feature: MA Experiment 108572 PARAMETER Experiment Name: At_Drought_cDNA_P Parameter: Tissue Value: Aerial
  misc_feature: MA Experiment 108572 PARAMETER Experiment Name: At_Drought_cDNA_P Parameter: Treatment Value: Drought vs. No Drought
  misc_feature: MA Experiment ID: 108573 Result: Down-regulated in Transcription
  misc_feature: MA Experiment 108573 PARAMETER Experiment Name: At_Drought_cDNA_P Parameter: Timepoint (hr) Value: 6
  misc_feature: MA Experiment 108573 PARAMETER Experiment Name: At_Drought_cDNA_P Parameter: Tissue Value: Aerial
  misc_feature: MA Experiment 108573 PARAMETER Experiment Name: At_Drought_cDNA_P Parameter: Treatment Value: Drought vs. No Drought
  misc_feature: MA Experiment ID: 108576 Result: Down-regulated in Transcription
  misc_feature: MA Experiment 108576 PARAMETER Experiment Name: At_42deg_Heat_cDNA_P Parameter: Temperature (deg C) Value: 42 vs. 22
  misc_feature: MA Experiment 108576 PARAMETER Experiment Name: At_42deg_Heat_cDNA_P Parameter: Timepoint (hr) Value: 1
  misc_feature: MA Experiment 108576 PARAMETER Experiment Name: At_42deg_Heat_cDNA_P Parameter: Tissue Value: Aerial
  misc_feature: MA Experiment ID: 108577 Result: Down-regulated in Transcription
  misc_feature: MA Experiment 108577 PARAMETER Experiment Name: At_42deg_Heat_cDNA_P Parameter: Temperature (deg C) Value: 42 vs. 22
  misc_feature: MA Experiment 108577 PARAMETER Experiment Name: At_42deg_Heat_cDNA_P Parameter: Timepoint (hr) Value: 6
  misc_feature: MA Experiment 108577 PARAMETER Experiment Name: At_42deg_Heat_cDNA_P Parameter: Tissue Value: Aerial
  misc_feature: MA Experiment ID: 108579 Result: Down-regulated in Transcription
  misc_feature: MA Experiment 108579 PARAMETER Experiment Name: At_4deg_Cold_cDNA_P Parameter: Temperature (deg C) Value: 4 vs. 22
  misc_feature: MA Experiment 108579 PARAMETER Experiment Name: At_4deg_Cold_cDNA_P Parameter: Timepoint (hr) Value: 6
  misc_feature: MA Experiment 108579 PARAMETER Experiment Name: At_4deg_Cold_cDNA_P Parameter: Tissue Value: Aerial
  misc_feature: MA Experiment ID: 108595 Result: Down-regulated in Transcription
  misc_feature: MA Experiment 108595 PARAMETER Experiment Name: At_Ler-pi_Ovule_cDNA_P Parameter: Plant Line Value: null
  misc_feature: MA Experiment ID: 20000093 Result: Down-regulated in Transcription
  misc_feature: MA Experiment 20000093 PARAMETER Experiment Name: At_42deg_Heat_cDNA_P Parameter: Temperature (deg C) Value: 42 vs. 22
  misc_feature: MA Experiment 20000093 PARAMETER Experiment Name: At_42deg_Heat_cDNA_P Parameter: Timepoint (hr) Value: 0.5
  misc_feature: MA Experiment 20000093 PARAMETER Experiment Name: At_42deg_Heat_cDNA_P Parameter: Tissue Value: Aerial
  misc_feature: MA Experiment ID: 20000112 Result: Down-regulated in Transcription
  misc_feature: MA Experiment 20000112 PARAMETER Experiment Name: At_42deg_Heat_cDNA_P Parameter: Temperature (deg C) Value: 42 vs. 22
  misc_feature: MA Experiment 20000112 PARAMETER Experiment Name: At_42deg_Heat_cDNA_P Parameter: Timepoint (hr) Value: 2
  misc_feature: MA Experiment 20000112 PARAMETER Experiment Name: At_42deg_Heat_cDNA_P Parameter: Tissue Value: Aerial
  misc_feature: MA Experiment ID: 20000113 Result: Down-regulated in Transcription
  misc_feature: MA Experiment 20000113 PARAMETER Experiment Name: At_42deg_Heat_cDNA_P Parameter: Temperature (deg C) Value: 42 vs. 22
  misc_feature: MA Experiment 20000113 PARAMETER Experiment Name: At_42deg_Heat_cDNA_P Parameter: Timepoint (hr) Value: 8
  misc_feature: MA Experiment 20000113 PARAMETER Experiment Name: At_42deg_Heat_cDNA_P Parameter: Tissue Value: Aerial
  misc_feature: MA Experiment ID: 20000171 Result: Down-regulated in Transcription
  misc_feature: MA Experiment 20000171 PARAMETER Experiment Name: At_42deg_Heat_P Parameter: Age (day) Value: 14
  misc_feature: MA Experiment 20000171 PARAMETER Experiment Name: At_42deg_Heat_P Parameter: Organism Value: A. thaliana
  misc_feature: MA Experiment 20000171 PARAMETER Experiment Name: At_42deg_Heat_P Parameter: Plant Line Value: WS
  misc_feature: MA Experiment 20000171 PARAMETER Experiment Name: At_42deg_Heat_P Parameter: Temperature (deg C) Value: 42 vs. 22
  misc_feature: MA Experiment 20000171 PARAMETER Experiment Name: At_42deg_Heat_P Parameter: Timepoint (hr) Value: 1
  misc_feature: MA Experiment 20000171 PARAMETER Experiment Name: At_42deg_Heat_P Parameter: Tissue Value: Aerial
  misc_feature: MA Experiment ID: 20000173 Result: Down-regulated in Transcription
  misc_feature: MA Experiment 20000173 PARAMETER Experiment Name: At_42deg_Heat_P Parameter: Age (day) Value: 14
  misc_feature: MA Experiment 20000173 PARAMETER Experiment Name: At_42deg_Heat_P Parameter: Organism Value: A. thaliana
  misc_feature: MA Experiment 20000173 PARAMETER Experiment Name: At_42deg_Heat_P Parameter: Plant Line Value: WS
  misc_feature: MA Experiment 20000173 PARAMETER Experiment Name: At_42deg_Heat_P Parameter: Temperature (deg C) Value: 42 vs. 22
  misc_feature: MA Experiment 20000173 PARAMETER Experiment Name: At_42deg_Heat_P Parameter: Timepoint (hr) Value: 6
  misc_feature: MA Experiment 20000173 PARAMETER Experiment Name: At_42deg_Heat_P Parameter: Tissue Value: Aerial
  misc_feature: MA Experiment ID: 20000224 Result: Down-regulated in Transcription
  misc_feature: MA Experiment ID: 20000496 Result: Up-regulated in Transcription
  misc_feature: MA Experiment 20000496 PARAMETER Experiment Name: At_Guard_Cells_P Parameter: Harvest Date Value: 7/19/2002
  misc_feature: MA Experiment 20000496 PARAMETER Experiment Name: At_Guard_Cells_P Parameter: Organism Value: Canola
  misc_feature: MA Experiment 20000496 PARAMETER Experiment Name: At_Guard_Cells_P Parameter: Tissue Value: Guard Cells vs. Leaves
  misc_feature: MA Experiment ID: 20000794 Result: Up-regulated in Transcription
  misc_feature: MA Experiment 20000794 PARAMETER Experiment Name: At_Petals_P Parameter: Age (day) Value: 23-25 days
  misc_feature: MA Experiment 20000794 PARAMETER Experiment Name: At_Petals_P Parameter: Plant Line Value: WS
  misc_feature: MA Experiment 20000794 PARAMETER Experiment Name: At_Petals_P Parameter: Tissue Value: Petals vs. Whole plant
  misc_feature: MA Experiment ID: 20001248 Result: Up-regulated in Transcription
  misc_feature: MA Experiment 20001248 PARAMETER Experiment Name: At_Far-red-induction_P Parameter: Age (day) Value: 7
  misc_feature: MA Experiment 20001248 PARAMETER Experiment Name: At_Far-red-induction_P Parameter: Light Value: Far-red vs. White
  misc_feature: MA Experiment 20001248 PARAMETER Experiment Name: At_Far-red-induction_P Parameter: Organism Value: A. thaliana
  misc_feature: MA Experiment 20001248 PARAMETER Experiment Name: At_Far-red-induction_P Parameter: Plant Line Value: Columbia
  misc_feature: MA Experiment 20001248 PARAMETER Experiment Name: At_Far-red-induction_P Parameter: Timepoint (hr) Value: 4
  misc_feature: MA Experiment 20001248 PARAMETER Experiment Name: At_Far-red-induction_P Parameter: Tissue Value: Whole Plant
  misc_feature: MA Experiment ID: 20001556 Result: Down-regulated in Transcription
  misc_feature: MA Experiment 20001556 PARAMETER Experiment Name: At_Drought_Soil_Dry_P Parameter: Age (day) Value: 26
  misc_feature: MA Experiment 20001556 PARAMETER Experiment Name: At_Drought_Soil_Dry_P Parameter: Organism Value: A. thaliana
  misc_feature: MA Experiment 20001556 PARAMETER Experiment Name: At_Drought_Soil_Dry_P Parameter: Plant Line Value: WS
  misc_feature: MA Experiment 20001556 PARAMETER Experiment Name: At_Drought_Soil_Dry_P Parameter: Post Timepoint (hr) Value: None
  misc_feature: MA Experiment 20001556 PARAMETER Experiment Name: At_Drought_Soil_Dry_P Parameter: Post-Treatment Value: None
  misc_feature: MA Experiment 20001556 PARAMETER Experiment Name: At_Drought_Soil_Dry_P Parameter: Timepoint (day) Value: 12
  misc_feature: MA Experiment 20001556 PARAMETER Experiment Name: At_Drought_Soil_Dry_P Parameter: Treatment Value: Drought vs. No Drought
  misc_feature: MA Experiment ID: 20001558 Result: Down-regulated in Transcription
  misc_feature: MA Experiment 20001558 PARAMETER Experiment Name: At_Drought_Soil_Dry_P Parameter: Age (day) Value: 27
  misc_feature: MA Experiment 20001558 PARAMETER Experiment Name: At_Drought_Soil_Dry_P Parameter: Organism Value: A. thaliana
  misc_feature: MA Experiment 20001558 PARAMETER Experiment Name: At_Drought_Soil_Dry_P Parameter: Plant Line Value: WS
  misc_feature: MA Experiment 20001558 PARAMETER Experiment Name: At_Drought_Soil_Dry_P Parameter: Post Timepoint (hr) Value: 6
  misc_feature: MA Experiment 20001558 PARAMETER Experiment Name: At_Drought_Soil_Dry_P Parameter: Post-Treatment Value: Re-Water vs. No Drought
  misc_feature: MA Experiment 20001558 PARAMETER Experiment Name: At_Drought_Soil_Dry_P Parameter: Timepoint (day) Value: 13
  misc_feature: MA Experiment 20001558 PARAMETER Experiment Name: At_Drought_Soil_Dry_P Parameter: Treatment Value: Drought vs. No Drought
cttctcctcatcacaaaattctccgacgcattacattttcttccgatcaatacagagagatcagtttctgagagagaagaagatgtctatagaggaagaaaacgttccaacgactgttgactcaggagctgccgatacaacggtgaaatctccggagaagaaaccggcggcgaaaggtggtaaatctaagaagacgacgacggctaaagcaacgaagaagcctgtgaaagctgctgctccaacgaagaagaaaacaacttcctctcaccctacctatgaagagatgattaaagatgcgattgtaacgttgaaggagagaactggatctagtcaatacgcgattcagaaattcatagaggagaaacataaatcactgcctcctacttttaggaagcttttgcttgtgaatctcaagagacttgttgcttctgagaaattggttaaagtcaaagcttcttttaagattccttctgctagatccgcagcaacacctaaaccggctgctccggttaagaagaaggcaactgtagtagctaaacctaagggtaaggttgctgctgctgttgctcctgctaaagctaaagcggcggctaaaggaactaagaagcctgcggctaaagttgttgctaaggctaaggttactgctaaacctaaggctaaggttactgctgctaaacctaagtctaagtctgttgctgctgtttccaagactaaagctgttgctgctaagcctaaggctaaggagagaccagctaaagcttctaggacttcgactagaacatctccagggaaaaaagttgctgctcctgctaagaaagtggctgtgactaagaaggctccggctaagagtgtgaaggtgaagtctccggcgaagagagcttcgactaggaaggctaagaagtgaagaagattggtttaggataggttttggggggagattgaatacatggtggtggttagcttctatagggtagtcttgtataattgaatcatccttgaaggagcttgctttccaaagttttttacttgtttctttggtttcttcttgaaacttttttttttcttctttgtaagttttggtttgtttgaattttaagctttttgatcaatagctataatgtgatggtttcttcactctttt

SEQ ID NO: 26108 - protein, 300 aa, Arabidopsis thaliana
  peptide (1)..(300): Ceres Seq. ID no. 12325552
  misc_feature (88)..(157): Pfam Name: linker histone H1 and H5 family Pfam Description: linker histone H1 and H5 family
  misc_feature (25)..(300): Homolog of NCBI NO: 7439662 NR Description: histone H1 - tomato
  misc_feature (25)..(300): Homolog of NCBI NO: 30420970 NR Description: histone H1 [Vicia faba]
  misc_feature (25)..(300): Homolog of NCBI NO: 13540401 NR Description: histone H1 [Lens culinaris]
  misc_feature (32)..(299): Homolog of NCBI NO: 2623960 NR Description: histone H1 [Apium graveolens]
  misc_feature (28)..(300): Homolog of NCBI NO: 6681423 NR Description: histone H1 [Nicotiana tabacum]
  misc_feature (28)..(300): Homolog of NCBI NO: 1084419 NR Description: histone H1 - common tobacco
  misc_feature (28)..(300): Homolog of NCBI NO: 585241 NR Description: HISTONE H1
  misc_feature (57)..(299): Homolog of NCBI NO: 16314 NR Description: histone H1-1 [Arabidopsis thaliana]
  misc_feature (30)..(299): Homolog of NCBI NO: 15222199 NR Description: histone H1, putative
  misc_feature (28)..(300): Homolog of NCBI NO: 15224536 NR Description: histone H1
FSSSQNSPTHYIFFRSIQRDQFLREKKMSIEEENVPTTVDSGAADTTVKSPEKKPAAKGGKSKKTTTAKATKKPVKAAAPTKKKTTSSHPTYEEMIKDAIVTLKERTGSSQYAIQKFIEEKHKSLPPTFRKLLLVNLKRLVASEKLVKVKASFKIPSARSAATPKPAAPVKKKATVVAKPKGKVAAAVAPAKAKAAAKGTKKPAAKVVAKAKVTAKPKAKVTAAKPKSKSVAAVSKTKAVAAKPKAKERPAKASRTSTRTSPGKKVAAPAKKVAVTKKAPAKSVKVKSPAKRASTRKAKK

SEQ ID NO: 26109 - protein, 273 aa, Arabidopsis thaliana
  peptide (1)..(273): Ceres Seq. ID no. 12325553
  misc_feature (61)..(130): Pfam Name: linker histone H1 and H5 family Pfam Description: linker histone H1 and H5 family
  misc_feature (1)..(273): Homolog of NCBI NO: 7439662 NR Description: histone H1 - tomato
  misc_feature (1)..(273): Homolog of NCBI NO: 30420970 NR Description: histone H1 [Vicia faba]
  misc_feature (1)..(273): Homolog of NCBI NO: 13540401 NR Description: histone H1 [Lens culinaris]
  misc_feature (5)..(272): Homolog of NCBI NO: 2623960 NR Description: histone H1 [Apium graveolens]
  misc_feature (1)..(273): Homolog of NCBI NO: 6681423 NR Description: histone H1 [Nicotiana tabacum]
  misc_feature (1)..(273): Homolog of NCBI NO: 1084419 NR Description: histone H1 - common tobacco
  misc_feature (1)..(273): Homolog of NCBI NO: 585241 NR Description: HISTONE H1
  misc_feature (30)..(272): Homolog of NCBI NO: 16314 NR Description: histone H1-1 [Arabidopsis thaliana]
  misc_feature (3)..(272): Homolog of NCBI NO: 15222199 NR Description: histone H1, putative
  misc_feature (1)..(273): Homolog of NCBI NO: 15224536 NR Description: histone H1
MSIEEENVPTTVDSGAADTTVKSPEKKPAAKGGKSKKTTTAKATKKPVKAAAPTKKKTTSSHPTYEEMIKDAIVTLKERTGSSQYAIQKFIEEKHKSLPPTFRKLLLVNLKRLVASEKLVKVKASFKIPSARSAATPKPAAPVKKKATVVAKPKGKVAAAVAPAKAKAAAKGTKKPAAKVVAKAKVTAKPKAKVTAAKPKSKSVAAVSKTKAVAAKPKAKERPAKASRTSTRTSPGKKVAAPAKKVAVTKKAPAKSVKVKSPAKRASTRKAKK

SEQ ID NO: 26110 - protein, 206 aa, Arabidopsis thaliana
  peptide (1)..(206): Ceres Seq. ID no. 12325554
  misc_feature (1)..(63): Pfam Name: linker histone H1 and H5 family Pfam Description: linker histone H1 and H5 family
  misc_feature (1)..(205): Homolog of NCBI NO: 16314 NR Description: histone H1-1 [Arabidopsis thaliana]
  misc_feature (1)..(205): Homolog of NCBI NO: 15222199 NR Description: histone H1, putative
  misc_feature (1)..(206): Homolog of NCBI NO: 30420970 NR Description: histone H1 [Vicia faba]
  misc_feature (1)..(205): Homolog of NCBI NO: 2623960 NR Description: histone H1 [Apium graveolens]
  misc_feature (1)..(206): Homolog of NCBI NO: 1084419 NR Description: histone H1 - common tobacco
  misc_feature (1)..(206): Homolog of NCBI NO: 585241 NR Description: HISTONE H1
  misc_feature (1)..(206): Homolog of NCBI NO: 6681423 NR Description: histone H1 [Nicotiana tabacum]
  misc_feature (1)..(206): Homolog of NCBI NO: 13540401 NR Description: histone H1 [Lens culinaris]
  misc_feature (1)..(206): Homolog of NCBI NO: 7439662 NR Description: histone H1 - tomato
  misc_feature (1)..(206): Homolog of NCBI NO: 15224536 NR Description: histone H1
MIKDAIVTLKERTGSSQYAIQKFIEEKHKSLPPTFRKLLLVNLKRLVASEKLVKVKASFKIPSARSAATPKPAAPVKKKATVVAKPKGKVAAAVAPAKAKAAAKGTKKPAAKVVAKAKVTAKPKAKVTAAKPKSKSVAAVSKTKAVAAKPKAKERPAKASRTSTRTSPGKKVAAPAKKVAVTKKAPAKSVKVKSPAKRASTRKAKK

SEQ ID NO: 26111 - DNA, 692 bp, Arabidopsis thaliana
  misc_feature (1)..(692): Ceres Seq. ID no. 12323805
  misc_feature: MA Experiment ID: 20000227 Result: Up-regulated in Transcription
  misc_feature: MA Experiment 20000227 PARAMETER Experiment Name: At_Root-Tips-vs-Tops_P Parameter: Tissue Value: Root Tips vs. Root Tops
  misc_feature: MA Experiment ID: 20001451 Result: Up-regulated in Transcription
  misc_feature: MA Experiment 20001451 PARAMETER Experiment Name: At_Far-red-induction_P Parameter: Age (day) Value: 7
  misc_feature: MA Experiment 20001451 PARAMETER Experiment Name: At_Far-red-induction_P Parameter: Light Value: Far-red vs. White
  misc_feature: MA Experiment 20001451 PARAMETER Experiment Name: At_Far-red-induction_P Parameter: Organism Value: A. thaliana
  misc_feature: MA Experiment 20001451 PARAMETER Experiment Name: At_Far-red-induction_P Parameter: Plant Line Value: Columbia
  misc_feature: MA Experiment 20001451 PARAMETER Experiment Name: At_Far-red-induction_P Parameter: Timepoint (hr) Value: 24
  misc_feature: MA Experiment 20001451 PARAMETER Experiment Name: At_Far-red-induction_P Parameter: Tissue Value: Whole Plant
  misc_feature: MA Experiment ID: 20001905 Result: Down-regulated in Transcription
  misc_feature: MA Experiment 20001905 PARAMETER Experiment Name: At_Drought_Reproduction_P Parameter: Age (day) Value: 40
  misc_feature: MA Experiment 20001905 PARAMETER Experiment Name: At_Drought_Reproduction_P Parameter: Organism Value: A. thaliana
  misc_feature: MA Experiment 20001905 PARAMETER Experiment Name: At_Drought_Reproduction_P Parameter: Plant Line Value: WS
  misc_feature: MA Experiment 20001905 PARAMETER Experiment Name: At_Drought_Reproduction_P Parameter: Timepoint (day) Value: 10
  misc_feature: MA Experiment 20001905 PARAMETER Experiment Name: At_Drought_Reproduction_P Parameter: Tissue Value: Rosettes
  misc_feature: MA Experiment 20001905 PARAMETER Experiment Name: At_Drought_Reproduction_P Parameter: Treatment Value: Drought vs. No Drought
gaaagcaaaggaaaaagaagaaatcgaaatcggaaactgtatattgttgttcttcgattcctcctcgctctacgccgcgtcctctctctcaaattcatcggaagcaaccttcttctcccatcatcgcctgaatccaatggcaacgataaggaacttgaagataaaaacatcaacatgtaaaaggattgtgaaagagcttcactcttatgagaaagaagttgagagagaagcggctaagactgctgatatgaaggacaaaggtgctgatccctacgaccttaaacaacaggaaaatgtgttgggtgagtctaggatgatgattccggattgccacaaacgtctcgagtctgcattggctgacctcaagtccactttggcggaattggaagagacggatgagaaggaaggtccagagatcgaagatgcaaagaagacagtcgcggatgtggagaagcagtttcccactgaagatgcctgatttagccagcgatgagtgttaaatctgtattctgagaatggttaatcatctgtaagaatctttatatctaaggttgcttgtcgactgtatacactaaaaatatctttctttaacattttggtgattgttctttcattcaatatctttgaaatggcacacttgctataatgtgttgtaagctgcaacttaacgattgataattgatataactttg

SEQ ID NO: 26112 - protein, 158 aa, Arabidopsis thaliana
  peptide (1)..(158): Ceres Seq. ID no. 12323806
  misc_feature (51)..(145): Pfam Name: Tubulin binding cofactor A Pfam Description: Tubulin binding cofactor A
  misc_feature (49)..(151): Homolog of NCBI NO: 28278465 NR Description: Unknown (protein for MGC:56262) [Danio rerio]
  misc_feature (49)..(147): Homolog of NCBI NO: 28461233 NR Description: tubulin cofactor a [Bos taurus]
  misc_feature (49)..(147): Homolog of NCBI NO: 1711661 NR Description: TUBULIN-SPECIFIC CHAPERONE A (TUBULIN-FOLDING
  misc_feature (49)..(147): Homolog of NCBI NO: 21706425 NR Description: Unknown (protein for IMAGE:4209187) [Mus musculus]
  misc_feature (49)..(147): Homolog of NCBI NO: 6678225 NR Description: tubulin cofactor a
  misc_feature (49)..(147): Homolog of NCBI NO: 1711660 NR Description: TUBULIN-SPECIFIC CHAPERONE A (TUBULIN-FOLDING
  misc_feature (49)..(147): Homolog of NCBI NO: 30585151 NR Description: Homo sapiens tubulin-specific chaperone a
  misc_feature (49)..(147): Homolog of NCBI NO: 4759212 NR Description: beta-tubulin cofactor A [Homo sapiens]
  misc_feature (46)..(125): Homolog of NCBI NO: 25408070 NR Description: probable TCP1-chaperonin cofactor A
  misc_feature (46)..(158): Homolog of NCBI NO: 18402340 NR Description: TCP1-chaperonin cofactor A isolog
KAKEKEEIEIGNCILLFFDSSSLYAASSLSNSSEATFFSHHRLNPMATIRNLKIKTSTCKRIVKELHSYEKEVEREAAKTADMKDKGADPYDLKQQENVLGESRMMIPDCHKRLESALADLKSTLAELEETDEKEGPEIEDAKKTVADVEKQFPTEDA

SEQ ID NO: 26113 - protein, 113 aa, Arabidopsis thaliana
  peptide (1)..(113): Ceres Seq. ID no. 12323807
  misc_feature (6)..(100): Pfam Name: Tubulin binding cofactor A Pfam Description: Tubulin binding cofactor A
  misc_feature (4)..(106): Homolog of NCBI NO: 28278465 NR Description: Unknown (protein for MGC:56262) [Danio rerio]
  misc_feature (4)..(102): Homolog of NCBI NO: 28461233 NR Description: tubulin cofactor a [Bos taurus]
  misc_feature (4)..(102): Homolog of NCBI NO: 1711661 NR Description: TUBULIN-SPECIFIC CHAPERONE A (TUBULIN-FOLDING
  misc_feature (4)..(102): Homolog of NCBI NO: 21706425 NR Description: Unknown (protein for IMAGE:4209187) [Mus musculus]
  misc_feature (4)..(102): Homolog of NCBI NO: 6678225 NR Description: tubulin cofactor a
  misc_feature (4)..(102): Homolog of NCBI NO: 1711660 NR Description: TUBULIN-SPECIFIC CHAPERONE A (TUBULIN-FOLDING
  misc_feature (4)..(102): Homolog of NCBI NO: 30585151 NR Description: Homo sapiens tubulin-specific chaperone a
  misc_feature (4)..(102): Homolog of NCBI NO: 4759212 NR Description: beta-tubulin cofactor A [Homo sapiens]
  misc_feature (1)..(80): Homolog of NCBI NO: 25408070 NR Description: probable TCP1-chaperonin cofactor A
  misc_feature (1)..(113): Homolog of NCBI NO: 18402340 NR Description: TCP1-chaperonin cofactor A isolog
MATIRNLKIKTSTCKRIVKELHSYEKEVEREAAKTADMKDKGADPYDLKQQENVLGESRMMIPDCHKRLESALADLKSTLAELEETDEKEGPEIEDAKKTVADVEKQFPTEDA

SEQ ID NO: 26114 - DNA, 940 bp, Arabidopsis thaliana
  misc_feature (1)..(940): Ceres Seq. ID no. 12323802
  misc_feature: MA Experiment ID: 108433 Result: Down-regulated in Transcription
  misc_feature: MA Experiment 108433 PARAMETER Experiment Name: At_rhl_Mutant2_cDNA_P Parameter: Age (day) Value: 7
  misc_feature: MA Experiment 108433 PARAMETER Experiment Name: At_rhl_Mutant2_cDNA_P Parameter: Organism Value: A. thaliana
  misc_feature: MA Experiment 108433 PARAMETER Experiment Name: At_rhl_Mutant2_cDNA_P Parameter: Plant Line Value: rhl Mutant vs. wt landsburg
  misc_feature: MA Experiment 108433 PARAMETER Experiment Name: At_rhl_Mutant2_cDNA_P Parameter: Tissue Value: Roots
  misc_feature: MA Experiment ID: 108434 Result: Up-regulated in Transcription
  misc_feature: MA Experiment 108434 PARAMETER Experiment Name: At_Root_Tips_cDNA_P Parameter: Tissue Value: Root Tips
  misc_feature: MA Experiment ID: 20001451 Result: Down-regulated in Transcription
  misc_feature: MA Experiment 20001451 PARAMETER Experiment Name: At_Far-red-induction_P Parameter: Age (day) Value: 7
  misc_feature: MA Experiment 20001451 PARAMETER Experiment Name: At_Far-red-induction_P Parameter: Light Value: Far-red vs. White
  misc_feature: MA Experiment 20001451 PARAMETER Experiment Name: At_Far-red-induction_P Parameter: Organism Value: A. thaliana
  misc_feature: MA Experiment 20001451 PARAMETER Experiment Name: At_Far-red-induction_P Parameter: Plant Line Value: Columbia
  misc_feature: MA Experiment 20001451 PARAMETER Experiment Name: At_Far-red-induction_P Parameter: Timepoint (hr) Value: 24
  misc_feature: MA Experiment 20001451 PARAMETER Experiment Name: At_Far-red-induction_P Parameter: Tissue Value: Whole Plant
  misc_feature: MA Experiment ID: 20001911 Result: Down-regulated in Transcription
  misc_feature: MA Experiment 20001911 PARAMETER Experiment Name: At_Drought_Reproduction_P Parameter: Age (day) Value: 40
  misc_feature: MA Experiment 20001911 PARAMETER Experiment Name: At_Drought_Reproduction_P Parameter: Organism Value: A. thaliana
  misc_feature: MA Experiment 20001911 PARAMETER Experiment Name: At_Drought_Reproduction_P Parameter: Plant Line Value: WS
  misc_feature: MA Experiment 20001911 PARAMETER Experiment Name: At_Drought_Reproduction_P Parameter: Timepoint (day) Value: 10
  misc_feature: MA Experiment 20001911 PARAMETER Experiment Name: At_Drought_Reproduction_P Parameter: Tissue Value: Flowers
  misc_feature: MA Experiment 20001911 PARAMETER Experiment Name: At_Drought_Reproduction_P Parameter: Treatment Value: Drought vs. No Drought
acattcgcgtttcgaatcgaaacgaagaagatcgagatcagtgaagaagaagaagacgaaatcacgaaaccatgttcttgttcgattggttctacggaatcttagcttcgttagggttatggcaaaaagaagcaaagatcttgtttctcggtctcgataatgctggcaaaactacattacttcacatgctcaaagacgagagattagttcagcatcagccgacgcaacatccaacgtctgaagaacttagcattggaaaaatcaagttcaaggcttttgatttgggtggtcatcagattgctcgtagggtttggaaagattactatgccaaggttgatgctgttgtctaccttgtggatgcttatgacaaagaaagatttgcagagtcaaaaagagagcttgatgctcttctctcggatgaagcccttgcaactgtcccgtttctgattcttgggaacaagattgatatcccttatgcagcttctgaagacgaactgaggtatcacttgggtctcactaacttcaccaccggtaagggcaaagtgacgctcggagactctggtgttcgcccacttgaggtcttcatgtgcagcattgtccgtaaaatgggttatggcgagggattcaaatggctctctcagtacatcaactaaagacagacgtcaagtcttttatcatattttcaaaccaaacccaagaagattttccgtacaatttgtctatttcgagctaaaagatttgtgattgacgatgtcacatccttcccttagaagacttgagaacacttttttctcatatttgttctttttgttgttttctgtgtggaacataagtttggtggcttgcatttccaaacttattcatttctcttgtccacatttttgtcaactgcttatgtttcattgaacattattcccaagttagaccaccaacttttttg

SEQ ID NO: 26115 - protein, 193 aa, Arabidopsis thaliana
  peptide (1)..(193): Ceres Seq. ID no. 12323803
  misc_feature (5)..(192): Pfam Name: ADP-ribosylation factor family Pfam Description: ADP-ribosylation factor family
  misc_feature (1)..(192): Homolog of NCBI NO: 25294173 NR Description: small GTP-binding protein Sar1BNt [imported] -
  misc_feature (1)..(192): Homolog of NCBI NO: 7438457 NR Description: GTP-binding protein - curled-leaved tobacco
  misc_feature (1)..(192): Homolog of NCBI NO: 1549222 NR Description: NtSar1 protein [Nicotiana tabacum]
  misc_feature (1)..(193): Homolog of NCBI NO: 15228793 NR Description: Sar1-like GTP binding protein
  misc_feature (1)..(193): Homolog of NCBI NO: 25294172 NR Description: ras-like small monomeric GTP-binding protein
  misc_feature (1)..(192): Homolog of NCBI NO: 34894960 NR Description: putative GTP-binding protein
  misc_feature (1)..(192): Homolog of NCBI NO: 3334321 NR Description: GTP-binding protein SAR1A
  misc_feature (1)..(192): Homolog of NCBI NO: 15235226 NR Description: SAR1/GTP-binding secretory factor
  misc_feature (1)..(193): Homolog of NCBI NO: 3334322 NR Description: GTP-binding protein SAR1B
  misc_feature (1)..(193): Homolog of NCBI NO: 15223516 NR Description: GTP-binding protein (SAR1B)
MFLFDWFYGILASLGLWQKEAKILFLGLDNAGKTTLLHMLKDERLVQHQPTQHPTSEELSIGKIKFKAFDLGGHQIARRVWKDYYAKVDAVVYLVDAYDKERFAESKRELDALLSDEALATVPFLILGNKIDIPYAASEDELRYHLGLTNFTTGKGKVTLGDSGVRPLEVFMCSIVRKMGYGEGFKWLSQYIN

SEQ ID NO: 26116 - protein, 155 aa, Arabidopsis thaliana
  peptide (1)..(155): Ceres Seq. ID no. 12323804
  misc_feature (1)..(154): Pfam Name: ADP-ribosylation factor family Pfam Description: ADP-ribosylation factor family
  misc_feature (1)..(154): Homolog of NCBI NO: 25294173 NR Description: small GTP-binding protein Sar1BNt [imported] -
  misc_feature (1)..(154): Homolog of NCBI NO: 7438457 NR Description: GTP-binding protein - curled-leaved tobacco
  misc_feature (1)..(154): Homolog of NCBI NO: 1549222 NR Description: NtSar1 protein [Nicotiana tabacum]
  misc_feature (1)..(155): Homolog of NCBI NO: 15228793 NR Description: Sar1-like GTP binding protein
  misc_feature (1)..(155): Homolog of NCBI NO: 25294172 NR Description: ras-like small monomeric GTP-binding protein
  misc_feature (1)..(154): Homolog of NCBI NO: 34894960 NR Description: putative GTP-binding protein
  misc_feature (1)..(154): Homolog of NCBI NO: 3334321 NR Description: GTP-binding protein SAR1A
  misc_feature (1)..(154): Homolog of NCBI NO: 15235226 NR Description: SAR1/GTP-binding secretory factor
  misc_feature (1)..(155): Homolog of NCBI NO: 3334322 NR Description: GTP-binding protein SAR1B
  misc_feature (1)..(155): Homolog of NCBI NO: 15223516 NR Description: GTP-binding protein (SAR1B)
MLKDERLVQHQPTQHPTSEELSIGKIKFKAFDLGGHQIARRVWKDYYAKVDAVVYLVDAYDKERFAESKRELDALLSDEALATVPFLILGNKIDIPYAASEDELRYHLGLTNFTTGKGKVTLGDSGVRPLEVFMCSIVRKMGYGEGFKWLSQYIN

SEQ ID NO: 26117 - DNA, 1827 bp, Arabidopsis thaliana
  misc_feature (1)..(1827): Ceres Seq. ID no. 12331394
  misc_feature: MA Experiment ID: 108573 Result: Up-regulated in Transcription
  misc_feature: MA Experiment 108573 PARAMETER Experiment Name: At_Drought_cDNA_P Parameter: Timepoint (hr) Value: 6
  misc_feature: MA Experiment 108573 PARAMETER Experiment Name: At_Drought_cDNA_P Parameter: Tissue Value: Aerial
  misc_feature: MA Experiment 108573 PARAMETER Experiment Name: At_Drought_cDNA_P Parameter: Treatment Value: Drought vs. No Drought
  misc_feature: MA Experiment ID: 108595 Result: Down-regulated in Transcription
  misc_feature: MA Experiment 108595 PARAMETER Experiment Name: At_Ler-pi_Ovule_cDNA_P Parameter: Plant Line Value: null
  misc_feature: MA Experiment ID: 20000093 Result: Up-regulated in Transcription
  misc_feature: MA Experiment 20000093 PARAMETER Experiment Name: At_42deg_Heat_cDNA_P Parameter: Temperature (deg C) Value: 42 vs. 22
  misc_feature: MA Experiment 20000093 PARAMETER Experiment Name: At_42deg_Heat_cDNA_P Parameter: Timepoint (hr) Value: 0.5
  misc_feature: MA Experiment 20000093 PARAMETER Experiment Name: At_42deg_Heat_cDNA_P Parameter: Tissue Value: Aerial
  misc_feature: MA Experiment ID: 20000112 Result: Up-regulated in Transcription
  misc_feature: MA Experiment 20000112 PARAMETER Experiment Name: At_42deg_Heat_cDNA_P Parameter: Temperature (deg C) Value: 42 vs. 22
  misc_feature: MA Experiment 20000112 PARAMETER Experiment Name: At_42deg_Heat_cDNA_P Parameter: Timepoint (hr) Value: 2
  misc_feature: MA Experiment 20000112 PARAMETER Experiment Name: At_42deg_Heat_cDNA_P Parameter: Tissue Value: Aerial
  misc_feature: MA Experiment ID: 20000113 Result: Up-regulated in Transcription
  misc_feature: MA Experiment 20000113 PARAMETER Experiment Name: At_42deg_Heat_cDNA_P Parameter: Temperature (deg C) Value: 42 vs. 22
  misc_feature: MA Experiment 20000113 PARAMETER Experiment Name: At_42deg_Heat_cDNA_P Parameter: Timepoint (hr) Value: 8
  misc_feature: MA Experiment 20000113 PARAMETER Experiment Name: At_42deg_Heat_cDNA_P Parameter: Tissue Value: Aerial
  misc_feature: MA Experiment ID: 20000144 Result: Up-regulated in Transcription
  misc_feature: MA Experiment 20000144 PARAMETER Experiment Name: At_42deg_Heat_cDNA_P Parameter: Temperature (deg C) Value: 42 vs. 22
  misc_feature: MA Experiment 20000144 PARAMETER Experiment Name: At_42deg_Heat_cDNA_P Parameter: Timepoint (hr) Value: 1
  misc_feature: MA Experiment 20000144 PARAMETER Experiment Name: At_42deg_Heat_cDNA_P Parameter: Tissue Value: Aerial
  misc_feature: MA Experiment ID: 20000171 Result: Up-regulated in Transcription
  misc_feature: MA Experiment 20000171 PARAMETER Experiment Name: At_42deg_Heat_P Parameter: Age (day) Value: 14
  misc_feature: MA Experiment 20000171 PARAMETER Experiment Name: At_42deg_Heat_P Parameter: Organism Value: A. thaliana
  misc_feature: MA Experiment 20000171 PARAMETER Experiment Name: At_42deg_Heat_P Parameter: Plant Line Value: WS
  misc_feature: MA Experiment 20000171 PARAMETER Experiment Name: At_42deg_Heat_P Parameter: Temperature (deg C) Value: 42 vs. 22
  misc_feature: MA Experiment 20000171 PARAMETER Experiment Name: At_42deg_Heat_P Parameter: Timepoint (hr) Value: 1
  misc_feature: MA Experiment 20000171 PARAMETER Experiment Name: At_42deg_Heat_P Parameter: Tissue Value: Aerial
  misc_feature: MA Experiment ID: 20000286 Result: Up-regulated in Transcription
  misc_feature: MA Experiment 20000286 PARAMETER Experiment Name: At_Open_Flower_P Parameter: Age (day) Value: 21
  misc_feature: MA Experiment 20000286 PARAMETER Experiment Name: At_Open_Flower_P Parameter: Plant Line Value: WS
  misc_feature: MA Experiment 20000286 PARAMETER Experiment Name: At_Open_Flower_P Parameter: Tissue Value: Half Open vs. Whole Plant
  misc_feature: MA Experiment ID: 20000794 Result: Up-regulated in Transcription
  misc_feature: MA Experiment 20000794 PARAMETER Experiment Name: At_Petals_P Parameter: Age (day) Value: 23-25 days
  misc_feature: MA Experiment 20000794 PARAMETER Experiment Name: At_Petals_P Parameter: Plant Line Value: WS
  misc_feature: MA Experiment 20000794 PARAMETER Experiment Name: At_Petals_P Parameter: Tissue Value: Petals vs. Whole plant
  misc_feature: MA Experiment ID: 20001451 Result: Up-regulated in Transcription
  misc_feature: MA Experiment 20001451 PARAMETER Experiment Name: At_Far-red-induction_P Parameter: Age (day) Value: 7
  misc_feature: MA Experiment 20001451 PARAMETER Experiment Name: At_Far-red-induction_P Parameter: Light Value: Far-red vs. White
  misc_feature: MA Experiment 20001451 PARAMETER Experiment Name: At_Far-red-induction_P Parameter: Organism Value: A. thaliana
  misc_feature: MA Experiment 20001451 PARAMETER Experiment Name: At_Far-red-induction_P Parameter: Plant Line Value: Columbia
  misc_feature: MA Experiment 20001451 PARAMETER Experiment Name: At_Far-red-induction_P Parameter: Timepoint (hr) Value: 24
  misc_feature: MA Experiment 20001451 PARAMETER Experiment Name: At_Far-red-induction_P Parameter: Tissue Value: Whole Plant
aattcgatttggattgcagaaaaagaaaagaaaagaaaagactaaaaatttggacgataagcagaaaagagagaggagggcctctcgccctcttattaaaaccttgccttctccaaatctgaagatttctcaatcctaaaatcttttttttttcctctttctccgtttctttattttcggaatccaagatcgtgggtcgatcggtttttacacaatccgatcacgacccatctgctctttttcatcctattttgcttcccttgagaaatggaaatggaatcatgtaagctcttcatcggtggtatatcttgggaaaccagtgaagatcgtcttcgtgactattttcacagttttggtgaggttttagaggctgttattatgaaggatcgtgccactggccgtgctcgtggctttggtttcgttgtctttgctgatcctaatgttgctgaaagagtcgtcttgcttaaacatatcattgatggtaaaattgttgaggcaaagaaggctgttccaagagatgatcacgtagtatttaataaaagtaacagcagccttcagggatcacctggcccatcaaactccaagaagatctttgtgggaggtttggcatcatccgtgacagaggctgagttcaaaaagtattttgctcagtttgggatgatcactgatgttgtggtgatgtatgaccacagaacccagcggcctagaggctttgggttcatttcatatgactctgaggaagctgttgacaaagtactgcagaagacattccacgaactcaatggtaagatggtggaggtcaaactggctgttcctaaggatatggctctcaacacaatgcggaaccaaatgaatgtaaatagctttggcactagtagaatcagttcattactgaatgagtacacccagggattcagcccgagtccaatctctggttatggagtgaaacctgaagttaggtacagtccagcagtaggtaataggggaggattctcaccgtttggacatggatacggaatcgagctgaattttgagccaaaccagactcagaactacggttctggttccagtggaggctttggacgaccctttagccctggatatgctgcgagtctcggcaggttcggtagccaaatggagtcgggaggagctagtgttgggaacggttctgtcctaaatgcagcaccaaagaaccatttatggggaaatggtggtctaggttacatgtcaaactctccgatatcaagaagcagcttcagtggaaactctggaatgtcttcactaggcagcattggtgacaactggggaacagttgcacgtgcacgcagtagctaccacggtgagagaggaggtgtaggattagaagcaatgagaggagttcatgttggtggttacagcagcggctcaagcatcttggaggcagactctctgtacagcgactcgatgtggctttcgctgcctgcaaaggcagaggaaggattgggaatgggaccattggacttcatgtctagaggaccagctggatacatcaacaggcaaccaaacggaggaattgcagcttagagaagtgacaaatctataccatggagatcagatgattgcagaagagagtttttagaagaggaaaaaagtttattaaaaaaaaaaaaattattggtaccaaaaagcttaaagcttttatttactttttactattttgatttgttgttatagctttcttttcacccttttttctaatttggggttttgtttcttttgtttttatcgttaaagaaaaaagatgtaaacttgagtgatataaaaagagacaaagaaacaatgaagtgt

SEQ ID NO: 26118 - protein, 431 aa, Arabidopsis thaliana
  peptide (1)..(431): Ceres Seq. ID no. 12331395
  misc_feature (108)..(178): Pfam Name: RNA recognition motif. (a.k.a. RRM, RBD, or RNP domain) Pfam Description: RNA recognition motif. (a.k.a. RRM, RBD, or RNP
  misc_feature (7)..(398): Homolog of NCBI NO: 7487039 NR Description: hypothetical protein T15N24.100 - Arabidopsis
  misc_feature (1)..(398): Homolog of NCBI NO: 18416794 NR Description: heterogeneous nuclear ribonucleoprotein (hnRNP),
  misc_feature (1)..(380): Homolog of NCBI NO: 38175737 NR Description: putative heterogeneous nuclear ribonucleoprotein
  misc_feature (1)..(374): Homolog of NCBI NO: 18398061 NR Description: heterogeneous nuclear ribonucleoprotein (hnRNP),
  misc_feature (1)..(374): Homolog of NCBI NO: 30680456 NR Description: heterogeneous nuclear ribonucleoprotein (hnRNP),
  misc_feature (1)..(374): Homolog of NCBI NO: 15292697 NR Description: putative RNA-binding protein [Arabidopsis
  misc_feature (1)..(374): Homolog of NCBI NO: 6648193 NR Description: putative RNA-binding protein [Arabidopsis
  misc_feature (1)..(357): Homolog of NCBI NO: 9758790 NR Description: RNA-binding protein-like [Arabidopsis thaliana]
  misc_feature (1)..(431): Homolog of NCBI NO: 21553963 NR Description: RNA-binding protein-like [Arabidopsis thaliana]
  misc_feature (1)..(431): Homolog of NCBI NO: 18422817 NR Description: heterogeneous nuclear ribonucleoprotein (hnRNP),
MEMESCKLFIGGISWETSEDRLRDYFHSFGEVLEAVIMKDRATGRARGFGFVVFADPNVAERVVLLKHIIDGKIVEAKKAVPRDDHVVFNKSNSSLQGSPGPSNSKKIFVGGLASSVTEAEFKKYFAQFGMITDVVVMYDHRTQRPRGFGFISYDSEEAVDKVLQKTFHELNGKMVEVKLAVPKDMALNTMRNQMNVNSFGTSRISSLLNEYTQGFSPSPISGYGVKPEVRYSPAVGNRGGFSPFGHGYGIELNFEPNQTQNYGSGSSGGFGRPFSPGYAASLGRFGSQMESGGASVGNGSVLNAAPKNHLWGNGGLGYMSNSPISRSSFSGNSGMSSLGSIGDNWGTVARARSSYHGERGGVGLEAMRGVHVGGYSSGSSILEADSLYSDSMWLSLPAKAEEGLGMGPLDFMSRGPAGYINRQPNGGIAA

SEQ ID NO: 26119 - protein, 429 aa, Arabidopsis thaliana
  peptide (1)..(429): Ceres Seq. ID no. 12331396
  misc_feature (106)..(176): Pfam Name: RNA recognition motif. (a.k.a. RRM, RBD, or RNP domain) Pfam Description: RNA recognition motif. (a.k.a. RRM, RBD, or RNP
  misc_feature (5)..(396): Homolog of NCBI NO: 7487039 NR Description: hypothetical protein T15N24.100 - Arabidopsis
  misc_feature (1)..(396): Homolog of NCBI NO: 18416794 NR Description: heterogeneous nuclear ribonucleoprotein (hnRNP),
  misc_feature (1)..(378): Homolog of NCBI NO: 38175737 NR Description: putative heterogeneous nuclear ribonucleoprotein
  misc_feature (1)..(372): Homolog of NCBI NO: 15292697 NR Description: putative RNA-binding protein [Arabidopsis
  misc_feature (1)..(372): Homolog of NCBI NO: 30680456 NR Description: heterogeneous nuclear ribonucleoprotein (hnRNP),
  misc_feature (1)..(372): Homolog of NCBI NO: 18398061 NR Description: heterogeneous nuclear ribonucleoprotein (hnRNP),
  misc_feature (1)..(372): Homolog of NCBI NO: 6648193 NR Description: putative RNA-binding protein [Arabidopsis
  misc_feature (1)..(355): Homolog of NCBI NO: 9758790 NR Description: RNA-binding protein-like [Arabidopsis thaliana]
  misc_feature (1)..(429): Homolog of NCBI NO: 21553963 NR Description: RNA-binding protein-like [Arabidopsis thaliana]
  misc_feature (1)..(429): Homolog of NCBI NO: 18422817 NR Description: heterogeneous nuclear ribonucleoprotein (hnRNP),
MESCKLFIGGISWETSEDRLRDYFHSFGEVLEAVIMKDRATGRARGFGFVVFADPNVAERVVLLKHIIDGKIVEAKKAVPRDDHVVFNKSNSSLQGSPGPSNSKKIFVGGLASSVTEAEFKKYFAQFGMITDVVVMYDHRTQRPRGFGFISYDSEEAVDKVLQKTFHELNGKMVEVKLAVPKDMALNTMRNQMNVNSFGTSRISSLLNEYTQGFSPSPISGYGVKPEVRYSPAVGNRGGFSPFGHGYGIELNFEPNQTQNYGSGSSGGFGRPFSPGYAASLGRFGSQMESGGASVGNGSVLNAAPKNHLWGNGGLGYMSNSPISRSSFSGNSGMSSLGSIGDNWGTVARARSSYHGERGGVGLEAMRGVHVGGYSSGSSILEADSLYSDSMWLSLPAKAEEGLGMGPLDFMSRGPAGYINRQPNGGIAA

SEQ ID NO: 26120 - protein, 394 aa, Arabidopsis thaliana
  peptide (1)..(394): Ceres Seq. ID no. 12331397
  misc_feature (71)..(141): Pfam Name: RNA recognition motif. (a.k.a. RRM, RBD, or RNP domain) Pfam Description: RNA recognition motif. (a.k.a. RRM, RBD, or RNP
  misc_feature (1)..(361): Homolog of NCBI NO: 7487039 NR Description: hypothetical protein T15N24.100 - Arabidopsis
  misc_feature (1)..(361): Homolog of NCBI NO: 18416794 NR Description: heterogeneous nuclear ribonucleoprotein (hnRNP),
  misc_feature (1)..(343): Homolog of NCBI NO: 38175737 NR Description: putative heterogeneous nuclear ribonucleoprotein
  misc_feature (1)..(337): Homolog of NCBI NO: 30680456 NR Description: heterogeneous nuclear ribonucleoprotein (hnRNP),
  misc_feature (1)..(337): Homolog of NCBI NO: 15292697 NR Description: putative RNA-binding protein [Arabidopsis
  misc_feature (1)..(337): Homolog of NCBI NO: 18398061 NR Description: heterogeneous nuclear ribonucleoprotein (hnRNP),
  misc_feature (1)..(337): Homolog of NCBI NO: 6648193 NR Description: putative RNA-binding protein [Arabidopsis
  misc_feature (1)..(320): Homolog of NCBI NO: 9758790 NR Description: RNA-binding protein-like [Arabidopsis thaliana]
  misc_feature (1)..(394): Homolog of NCBI NO: 21553963 NR Description: RNA-binding protein-like [Arabidopsis thaliana]
  misc_feature (1)..(394): Homolog of NCBI NO: 18422817 NR Description: heterogeneous nuclear ribonucleoprotein (hnRNP),
MKDRATGRARGFGFVVFADPNVAERVVLLKHIIDGKIVEAKKAVPRDDHVVFNKSNSSLQGSPGPSNSKKIFVGGLASSVTEAEFKKYFAQFGMITDVVVMYDHRTQRPRGFGFISYDSEEAVDKVLQKTFHELNGKMVEVKLAVPKDMALNTMRNQMNVNSFGTSRISSLLNEYTQGFSPSPISGYGVKPEVRYSPAVGNRGGFSPFGHGYGIELNFEPNQTQNYGSGSSGGFGRPFSPGYAASLGRFGSQMESGGASVGNGSVLNAAPKNHLWGNGGLGYMSNSPISRSSFSGNSGMSSLGSIGDNWGTVARARSSYHGERGGVGLEAMRGVHVGGYSSGSSILEADSLYSDSMWLSLPAKAEEGLGMGPLDFMSRGPAGYINRQPNGGIAA

SEQ ID NO: 26121 - DNA, 1449 bp, Arabidopsis thaliana
  misc_feature (1)..(1449): Ceres Seq. ID no. 12333162
  misc_feature: MA Experiment ID: 108561 Result: Down-regulated in Transcription
  misc_feature: MA Experiment 108561 PARAMETER Experiment Name: At_100uM_ABA_cDNA_P Parameter: Timepoint (hr) Value: 6
  misc_feature: MA Experiment 108561 PARAMETER Experiment Name: At_100uM_ABA_cDNA_P Parameter: Tissue Value: Aerial
  misc_feature: MA Experiment 108561 PARAMETER Experiment Name: At_100uM_ABA_cDNA_P Parameter: Treatment Value: 100uM ABA vs. No Treatment
  misc_feature: MA Experiment ID: 108585 Result: Down-regulated in Transcription
  misc_feature: MA Experiment 108585 PARAMETER Experiment Name: At_5mM_NaNP_cDNA_P Parameter: Timepoint (hr) Value: 6
  misc_feature: MA Experiment 108585 PARAMETER Experiment Name: At_5mM_NaNP_cDNA_P Parameter: Tissue Value: Aerial
  misc_feature: MA Experiment 108585 PARAMETER Experiment Name: At_5mM_NaNP_cDNA_P Parameter: Treatment Value: null
  misc_feature: MA Experiment ID: 108595 Result: Down-regulated in Transcription
  misc_feature: MA Experiment 108595 PARAMETER Experiment Name: At_Ler-pi_Ovule_cDNA_P Parameter: Plant Line Value: null
  misc_feature: MA Experiment ID: 108668 Result: Down-regulated in Transcription
  misc_feature: MA Experiment 108668 PARAMETER Experiment Name: At_2mM_SA_cDNA_P Parameter: Plant Line Value: WS
  misc_feature: MA Experiment 108668 PARAMETER Experiment Name: At_2mM_SA_cDNA_P Parameter: Timepoint (hr) Value: 6
  misc_feature: MA Experiment 108668 PARAMETER Experiment Name: At_2mM_SA_cDNA_P Parameter: Treatment Value: 2mM SA vs. No Treatment
  misc_feature: MA Experiment ID: 20000087 Result: Down-regulated in Transcription
  misc_feature: MA Experiment 20000087 PARAMETER Experiment Name: At_100uM_ABA_Mutants_cDNA_P Parameter: Plant Line Value: WS
  misc_feature: MA Experiment 20000087 PARAMETER Experiment Name: At_100uM_ABA_Mutants_cDNA_P Parameter: Timepoint (hr) Value: 6
  misc_feature: MA Experiment 20000087 PARAMETER Experiment Name: At_100uM_ABA_Mutants_cDNA_P Parameter: Tissue Value: Aerial
  misc_feature: MA Experiment 20000087 PARAMETER Experiment Name: At_100uM_ABA_Mutants_cDNA_P Parameter: Treatment Value: 100uM ABA vs. No Treatment
  misc_feature: MA Experiment ID: 20000182 Result: Down-regulated in Transcription
  misc_feature: MA Experiment 20000182 PARAMETER Experiment Name: At_2mM_SA_P Parameter: Age (day) Value: 14
  misc_feature: MA Experiment 20000182 PARAMETER Experiment Name: At_2mM_SA_P Parameter: Organism Value: A. thaliana
  misc_feature: MA Experiment 20000182 PARAMETER Experiment Name: At_2mM_SA_P Parameter: Plant Line Value: WS
  misc_feature: MA Experiment 20000182 PARAMETER Experiment Name: At_2mM_SA_P Parameter: Timepoint (hr) Value: 6
  misc_feature: MA Experiment 20000182 PARAMETER Experiment Name: At_2mM_SA_P Parameter: Tissue Value: Aerial
  misc_feature: MA Experiment 20000182 PARAMETER Experiment Name: At_2mM_SA_P Parameter: Treatment Value: 2mM SA vs. No Treatment
  misc_feature: MA Experiment ID: 20000185 Result: Down-regulated in Transcription
  misc_feature: MA Experiment 20000185 PARAMETER Experiment Name: At_Roots__P Parameter: Age (day) Value: 7 vs. 21
  misc_feature: MA Experiment 20000185 PARAMETER Experiment Name: At_Roots__P Parameter: Organism Value: A. thaliana
  misc_feature: MA Experiment 20000185 PARAMETER Experiment Name: At_Roots__P Parameter: Tissue Value: Roots vs. Whole Plant
  misc_feature: MA Experiment ID: 20000437 Result: Down-regulated in Transcription
  misc_feature: MA Experiment 20000437 PARAMETER Experiment Name: At_Drought_P Parameter: Age (day) Value: 8
  misc_feature: MA Experiment 20000437 PARAMETER Experiment Name: At_Drought_P Parameter: Organism Value: A. thaliana
  misc_feature: MA Experiment 20000437 PARAMETER Experiment Name: At_Drought_P Parameter: Plant Line Value: WS
  misc_feature: MA Experiment 20000437 PARAMETER Experiment Name: At_Drought_P Parameter: Timepoint (hr) Value: 24
  misc_feature: MA Experiment 20000437 PARAMETER Experiment Name: At_Drought_P Parameter: Tissue Value: Whole Plant
  misc_feature: MA Experiment 20000437 PARAMETER Experiment Name: At_Drought_P Parameter: Treatment Value: Drought vs. No Drought
  misc_feature: MA Experiment ID: 20000439 Result: Down-regulated in Transcription
  misc_feature: MA Experiment 20000439 PARAMETER Experiment Name: At_Roots__P Parameter: Age (day) Value: 14 vs. 21
  misc_feature: MA Experiment 20000439 PARAMETER Experiment Name: At_Roots__P Parameter: Organism Value: A. thaliana
  misc_feature: MA Experiment 20000439 PARAMETER Experiment Name: At_Roots__P Parameter: Tissue Value: Roots vs. Whole Plant
  misc_feature: MA Experiment ID: 20001557 Result: Down-regulated in Transcription
  misc_feature: MA Experiment 20001557 PARAMETER Experiment Name: At_Drought_Soil_Dry_P Parameter: Age (day) Value: 27
  misc_feature: MA Experiment 20001557 PARAMETER Experiment Name: At_Drought_Soil_Dry_P Parameter: Organism Value: A. thaliana
  misc_feature: MA Experiment 20001557 PARAMETER Experiment Name: At_Drought_Soil_Dry_P Parameter: Plant Line Value: WS
  misc_feature: MA Experiment 20001557 PARAMETER Experiment Name: At_Drought_Soil_Dry_P Parameter: Post Timepoint (hr) Value: 3
  misc_feature: MA Experiment 20001557 PARAMETER Experiment Name: At_Drought_Soil_Dry_P Parameter: Post-Treatment Value: Re-Water vs. No Drought
  misc_feature: MA Experiment 20001557 PARAMETER Experiment Name: At_Drought_Soil_Dry_P Parameter: Timepoint (day) Value: 13
  misc_feature: MA Experiment 20001557 PARAMETER Experiment Name: At_Drought_Soil_Dry_P Parameter: Treatment Value: Drought vs. No Drought
  misc_feature: MA Experiment ID: 20001905 Result: Down-regulated in Transcription
  misc_feature: MA Experiment 20001905 PARAMETER Experiment Name: At_Drought_Reproduction_P Parameter: Age (day) Value: 40
  misc_feature: MA Experiment 20001905 PARAMETER Experiment Name: At_Drought_Reproduction_P Parameter: Organism Value: A. thaliana
  misc_feature: MA Experiment 20001905 PARAMETER Experiment Name: At_Drought_Reproduction_P Parameter: Plant Line Value: WS
  misc_feature: MA Experiment 20001905 PARAMETER Experiment Name: At_Drought_Reproduction_P Parameter: Timepoint (day) Value: 10
  misc_feature: MA Experiment 20001905 PARAMETER Experiment Name: At_Drought_Reproduction_P Parameter: Tissue Value: Rosettes
  misc_feature: MA Experiment 20001905 PARAMETER Experiment Name: At_Drought_Reproduction_P Parameter: Treatment Value: Drought vs. No Drought
tttttctactcctcgtcatcttctattcgttatccgttttgaagcgtactcggatgggattgagtttcgcagatgctttaaattctagaaaataatgcaatctcttaccttaactcggtacccaactccaatttccccgccaagactcaatctttacccgctaagacaaatcgcagcttctgttctctctgctccgaccgccggtattaaccgtcgcgatatggcgtctcgccatcagtcaacttcctttaagccccttgccgttggtcggaatttgaccggagatgatgatgatggttactgtactcttatagactttgcaggtagtggaggaggagaagggaaaaatgtaggagaggatcttgtggtgttgctttaccacttacaacatgcttgcaaaagaatcgcttctcttgtcgcctctcctttcaattcttcactcggaaagctctctgttaactcctctagtgggtcagaccgagatgcgcctaagccgctcgatattgtctcgaacgatatcgtcttgtcctctcttagaaactcagggaaagtagcagtaatggcttctgaagaaaacgatagtccaacttggatcaaagatgatggtccttacgttgtggttgtagatcctctagatggatcacggaacatcgatgcttcgattcccacgggaactatatttggaatttacaatcgtctcgttgagcttgatcatttacctgttgaagagaaagctgagctcaattctttgcagagaggcagcaggcttgtagcttccggttatgtgctatactcttcagccactatcttctgtgttacacttggatcgggaacacacgccttcacgctagaccattccacaggagaatttgttcttacccatcaaaacatcaagatcccaactcggggacaaatctactcagtgaacgatgcgaggtactttgattggccagaaggtttaaggaagtacattgacacagtgagacaaggcaaaggtcaaaacccgaaaaaatactctgcgcgttatatttgttctctagtagctgatcttcacaggactctcttatacggtggagtggctatgaatccaagagaccatcttcgtttagtctatgaaggtaaccctttggcttttctcgtggagcaagctggtggcaaatcctctgatggaaaaagagggatactttcgatacaacccgtgaagcttcaccaaagattgcctctgtttcttgggagcttagaggatgttgctgagctagagagctatggagatgtgcagcagactgtgaaccctggctatgaagtttaaacaactcctctgtttcatattatctgtaaaaacaataaatgaatcgatgttagatttggttgcttgtaacattatgtattaggaaagttagatccgtgtatatatctgtttatcaagattcaagatcgactggtataatc

SEQ ID NO: 26122 - protein, 404 aa, Arabidopsis thaliana
  peptide (1)..(404): Ceres Seq. ID no. 12333163
  misc_feature (70)..(395): Pfam Name: Fructose-1-6-bisphosphatase Pfam Description: Fructose-1-6-bisphosphatase
  misc_feature (34)..(391): Homolog of NCBI NO: 585118 NR Description: FRUCTOSE-1,6-BISPHOSPHATASE, CHLOROPLAST
  misc_feature (86)..(391): Homolog of NCBI NO: 67243 NR Description: fructose-bisphosphatase (EC 3.1.3.11),
  misc_feature (4)..(391): Homolog of NCBI NO: 99693 NR Description: fructose-bisphosphatase (EC 3.1.3.11) precursor,
  misc_feature (4)..(391): Homolog of NCBI NO: 15232408 NR Description: fructose-bisphosphatase precursor
  misc_feature (86)..(391): Homolog of NCBI NO: 4585576 NR Description: fructose-1,6-bisphosphatase precursor [Solanum
  misc_feature (86)..(391): Homolog of NCBI NO: 3915687 NR Description: Fructose-1,6-bisphosphatase, chloroplast
  misc_feature (82)..(392): Homolog of NCBI NO: 16519317 NR Description: fructose 1,6-bisphosphatase [Galdieria
  misc_feature (86)..(391): Homolog of NCBI NO: 4218951 NR Description: fructose-1,6-bisphosphatase precursor [Brassica
  misc_feature (9)..(391): Homolog of NCBI NO: 14318171 NR Description: fructose-1,6-bisphosphatase [Pisum sativum]
  misc_feature (1)..(404): Homolog of NCBI NO: 15237685 NR Description: fructose-bisphosphatase-like protein
MQSLTLTRYPTPISPPRLNLYPLRQIAASVLSAPTAGINRRDMASRHQSTSFKPLAVGRNLTGDDDDGYCTLIDFAGSGGGEGKNVGEDLVVLLYHLQHACKRIASLVASPFNSSLGKLSVNSSSGSDRDAPKPLDIVSNDIVLSSLRNSGKVAVMASEENDSPTWIKDDGPYVVVVDPLDGSRNIDASIPTGTIFGIYNRLVELDHLPVEEKAELNSLQRGSRLVASGYVLYSSATIFCVTLGSGTHAFTLDHSTGEFVLTHQNIKIPTRGQIYSVNDARYFDWPEGLRKYIDTVRQGKGQNPKKYSARYICSLVADLHRTLLYGGVAMNPRDHLRLVYEGNPLAFLVEQAGGKSSDGKRGILSIQPVKLHQRLPLFLGSLEDVAELESYGDVQQTVNPGYEV

SEQ ID NO: 26123 - protein, 362 aa, Arabidopsis thaliana
  peptide (1)..(362): Ceres Seq. ID no. 12333164
  misc_feature (28)..(353): Pfam Name: Fructose-1-6-bisphosphatase Pfam Description: Fructose-1-6-bisphosphatase
  misc_feature (1)..(349): Homolog of NCBI NO: 14318171 NR Description: fructose-1,6-bisphosphatase [Pisum sativum]
  misc_feature (1)..(349): Homolog of NCBI NO: 99693 NR Description: fructose-bisphosphatase (EC 3.1.3.11) precursor,
  misc_feature (44)..(349): Homolog of NCBI NO: 4218951 NR Description: fructose-1,6-bisphosphatase precursor [Brassica
  misc_feature (1)..(349): Homolog of NCBI NO: 15232408 NR Description: fructose-bisphosphatase precursor
  misc_feature (40)..(350): Homolog of NCBI NO: 16519317 NR Description: fructose 1,6-bisphosphatase [Galdieria
  misc_feature (44)..(349): Homolog of NCBI NO: 4585576 NR Description: fructose-1,6-bisphosphatase precursor [Solanum
  misc_feature (44)..(349): Homolog of NCBI NO: 3915687 NR Description: Fructose-1,6-bisphosphatase, chloroplast
  misc_feature (1)..(349): Homolog of NCBI NO: 585118 NR Description: FRUCTOSE-1,6-BISPHOSPHATASE, CHLOROPLAST
  misc_feature (44)..(349): Homolog of NCBI NO: 67243 NR Description: fructose-bisphosphatase (EC 3.1.3.11),
  misc_feature (1)..(362): Homolog of NCBI NO: 15237685 NR Description: fructose-bisphosphatase-like protein
MASRHQSTSFKPLAVGRNLTGDDDDGYCTLIDFAGSGGGEGKNVGEDLVVLLYHLQHACKRIASLVASPFNSSLGKLSVNSSSGSDRDAPKPLDIVSNDIVLSSLRNSGKVAVMASEENDSPTWIKDDGPYVVVVDPLDGSRNIDASIPTGTIFGIYNRLVELDHLPVEEKAELNSLQRGSRLVASGYVLYSSATIFCVTLGSGTHAFTLDHSTGEFVLTHQNIKIPTRGQIYSVNDARYFDWPEGLRKYIDTVRQGKGQNPKKYSARYICSLVADLHRTLLYGGVAMNPRDHLRLVYEGNPLAFLVEQAGGKSSDGKRGILSIQPVKLHQRLPLFLGSLEDVAELESYGDVQQTVNPGYEV

SEQ ID NO: 26124 - protein, 249 aa, Arabidopsis thaliana
  peptide (1)..(249): Ceres Seq. ID no. 12333165
  misc_feature (1)..(240): Pfam Name: Fructose-1-6-bisphosphatase Pfam Description: Fructose-1-6-bisphosphatase
  misc_feature (1)..(236): Homolog of NCBI NO: 14318171 NR Description: fructose-1,6-bisphosphatase [Pisum sativum]
  misc_feature (1)..(236): Homolog of NCBI NO: 99693 NR Description: fructose-bisphosphatase (EC 3.1.3.11) precursor,
  misc_feature (1)..(236): Homolog of NCBI NO: 4218951 NR Description: fructose-1,6-bisphosphatase precursor [Brassica
  misc_feature (1)..(236): Homolog of NCBI NO: 15232408 NR Description: fructose-bisphosphatase precursor
  misc_feature (1)..(237): Homolog of NCBI NO: 16519317 NR Description: fructose 1,6-bisphosphatase [Galdieria
  misc_feature (1)..(236): Homolog of NCBI NO: 4585576 NR Description: fructose-1,6-bisphosphatase precursor [Solanum
  misc_feature (1)..(236): Homolog of NCBI NO: 3915687 NR Description: Fructose-1,6-bisphosphatase, chloroplast
  misc_feature (1)..(236): Homolog of NCBI NO: 585118 NR Description: FRUCTOSE-1,6-BISPHOSPHATASE, CHLOROPLAST
  misc_feature (1)..(236): Homolog of NCBI NO: 67243 NR Description: fructose-bisphosphatase (EC 3.1.3.11),
  misc_feature (1)..(249): Homolog of NCBI NO: 15237685 NR Description: fructose-bisphosphatase-like protein
MASEENDSPTWIKDDGPYVVVVDPLDGSRNIDASIPTGTIFGIYNRLVELDHLPVEEKAELNSLQRGSRLVASGYVLYSSATIFCVTLGSGTHAFTLDHSTGEFVLTHQNIKIPTRGQIYSVNDARYFDWPEGLRKYIDTVRQGKGQNPKKYSARYICSLVADLHRTLLYGGVAMNPRDHLRLVYEGNPLAFLVEQAGGKSSDGKRGILSIQPVKLHQRLPLFLGSLEDVAELESYGDVQQTVNPGYEV

SEQ ID NO: 26125 - DNA, 831 bp, Arabidopsis thaliana
  misc_feature (1)..(831): Ceres Seq. ID no. 13487307
  misc_feature: MA Experiment ID: 108595 Result: Down-regulated in Transcription
  misc_feature: MA Experiment 108595 PARAMETER Experiment Name: At_Ler-pi_Ovule_cDNA_P Parameter: Plant Line Value: null
gaagaaagaaagagaaaagaaattgaaaagaaaaaaaaaaggtgaccgtattctccgtcgattgtagccgcctgaagaaatatcttctcctctctcgttgaaccacgaatttgctctgatattagtgtttctctagccatggcgaacgcggcatctggaatggctgtgcatgatgattgcaagctgagatttctggaactgaaggcgaaaaggacacaccgtttcatagtttacaagattgaggagaagcagaagcaagttgttgttgagaaagttggtcaaccgatccaaacttacgaggagtttgcagcatgtcttccagctgatgaatgccgttacgccatttacgattttgactttgtcactgctgagaattgccagaagagcaagatcttcttcatcgcgtggtgcccggatattgctaaggtgagaagcaagatgatctacgcaagctctaaggacaggttcaagagggaactagatgggattcaagtagagctacaggcaactgatccaacagagatggatctcgatgttttcagaagccgtgccaactaaagagtaaaaaccaaagtttattatcatcatccccttgaaagatctattctcttattctgttatttttgagtgatggtactggtacttgattatgtttttacattgtgttgtgaagttatgaacctataaacaacttcattctatcggtgtttcggtcttgtgttcgatgttgtctttggttttaaaatggtgtgtaaggaccccaaatcgtctattgaagatgaacccttttaggtatatcattgatgaaatggatgattaaaagtttctctc

SEQ ID NO: 26126 - protein, 139 aa, Arabidopsis thaliana
  peptide (1)..(139): Ceres Seq. ID no. 15218776
  misc_feature (12)..(139): Pfam Name: Cofilin/tropomyosin-type actin-binding protein Pfam Description: Cofilin/tropomyosin-type actin-binding protein
  misc_feature (8)..(139): Homolog of NCBI NO: 11276987 NR Description: actin depolymerizing factor 2 - Arabidopsis
  misc_feature (1)..(139): Homolog of NCBI NO: 38564721 NR Description: putative actin-depolymerizing factor 2
  misc_feature (1)..(139): Homolog of NCBI NO: 18408116 NR Description: actin depolymerizing factor 2 (ADF2) [Arabidopsis
  misc_feature (1)..(139): Homolog of NCBI NO: 30697295 NR Description: actin depolymerizing factor 3 - like protein
  misc_feature (1)..(138): Homolog of NCBI NO: 17366765 NR Description: Actin-depolymerizing factor 2 (ADF 2)
  misc_feature (1)..(139): Homolog of NCBI NO: 17366768 NR Description: Actin-depolymerizing factor 1 (ADF 1)
  misc_feature (8)..(139): Homolog of NCBI NO: 30697303 NR Description: actin depolymerizing factor 4 - like protein
  misc_feature (1)..(139): Homolog of NCBI NO: 4185511 NR Description: actin depolymerizing factor 4 [Arabidopsis
  misc_feature (1)..(139): Homolog of NCBI NO: 30697300 NR Description: actin depolymerizing factor 4 - like protein
  misc_feature (1)..(139): Homolog of NCBI NO: 15231309 NR Description: actin depolymerizing factor 1 (ADF1) [Arabidopsis
MANAASGMAVHDDCKLRFLELKAKRTHRFIVYKIEEKQKQVVVEKVGQPIQTYEEFAACLPADECRYAIYDFDFVTAENCQKSKIFFIAWCPDIAKVRSKMIYASSKDRFKRELDGIQVELQATDPTEMDLDVFRSRAN

SEQ ID NO: 26127 - protein, 132 aa, Arabidopsis thaliana
  peptide (1)..(132): Ceres Seq. ID no. 15218777
  misc_feature (5)..(132): Pfam Name: Cofilin/tropomyosin-type actin-binding protein Pfam Description: Cofilin/tropomyosin-type actin-binding protein
  misc_feature (1)..(132): Homolog of NCBI NO: 11276987 NR Description: actin depolymerizing factor 2 - Arabidopsis
  misc_feature (1)..(132): Homolog of NCBI NO: 38564721 NR Description: putative actin-depolymerizing factor 2
  misc_feature (1)..(132): Homolog of NCBI NO: 18408116 NR Description: actin depolymerizing factor 2 (ADF2) [Arabidopsis
  misc_feature (1)..(132): Homolog of NCBI NO: 30697295 NR Description: actin depolymerizing factor 3 - like protein
  misc_feature (1)..(131): Homolog of NCBI NO: 17366765 NR Description: Actin-depolymerizing factor 2 (ADF 2)
  misc_feature (1)..(132): Homolog of NCBI NO: 17366768 NR Description: Actin-depolymerizing factor 1 (ADF 1)
  misc_feature (1)..(132): Homolog of NCBI NO: 30697303 NR Description: actin depolymerizing factor 4 - like protein
  misc_feature (1)..(132): Homolog of NCBI NO: 4185511 NR Description: actin depolymerizing factor 4 [Arabidopsis
  misc_feature (1)..(132): Homolog of NCBI NO: 30697300 NR Description: actin depolymerizing factor 4 - like protein
  misc_feature (1)..(132): Homolog of NCBI NO: 15231309 NR Description: actin depolymerizing factor 1 (ADF1) [Arabidopsis
MAVHDDCKLRFLELKAKRTHRFIVYKIEEKQKQVVVEKVGQPIQTYEEFAACLPADECRYAIYDFDFVTAENCQKSKIFFIAWCPDIAKVRSKMIYASSKDRFKRELDGIQVELQATDPTEMDLDVFRSRAN

SEQ ID NO: 26128 - DNA, 1026 bp, Arabidopsis thaliana
  misc_feature (1)..(1026): Ceres Seq. ID no. 13488738
  misc_feature: MA Experiment ID: 20000087 Result: Up-regulated in Transcription
  misc_feature: MA Experiment 20000087 PARAMETER Experiment Name: At_100uM_ABA_Mutants_cDNA_P Parameter: Plant Line Value: WS
  misc_feature: MA Experiment 20000087 PARAMETER Experiment Name: At_100uM_ABA_Mutants_cDNA_P Parameter: Timepoint (hr) Value: 6
  misc_feature: MA Experiment 20000087 PARAMETER Experiment Name: At_100uM_ABA_Mutants_cDNA_P Parameter: Tissue Value: Aerial
  misc_feature: MA Experiment 20000087 PARAMETER Experiment Name: At_100uM_ABA_Mutants_cDNA_P Parameter: Treatment Value: 100uM ABA vs. No Treatment
aaattcctcctcattgttaaagtcgaaaaaaagggtaaagcagcaaaaccctaataaaatcacaacaaattaacacaaaaaaaccagatcttaaaactctctctacccaccaagaggatcaaccagtctcttccccttcagattctcctttccacagtgaatggatcaacaagaccatggacagtctggagctatgaactatggcacaaacccataccaaaccaacccgatgagcaccactgctgctactgtagcaggaggtgcggcacaaccaggccagctggcgttccaccagatccatcagcagcagcagcagcaacagctggcacagcagcttcaagcattttgggagaaccaattcaaagagattgagaagactaccgatttcaagaaccacagccttccccttgcgagaatcaagaaaatcatgaaagcggatgaagatgtccgtatgatctcggctgaggcgcctgtcgtgtttgcaagggcctgtgagatgttcatcctggagctgacactcaggtcgtggaaccacactgaggagaataagaggcggacgttgcagaagaacgatattgctgctgctgtgactagaaccgatatttttgatttccttgtggatattgttccccgggaggatctccgagatgaagtcttgggaagtattccgaggggcactgtcccggaagctgctgctgctggttacccgtatggatacttgcctgcaggaactgctccaataggaaatccgggaatggttatgggtaatcccggtggtgcgtatccacctaatccttatatgggtcaaccaatgtggcaacaacaggcacctgaccaacctgaccaggaaaattagcaagaaactgtgagtcttccagcttcttttaggcctaccttgtagtcttggggttttgtttctgttttcgaataatggtaacctttgtataacttatttcagtatcgtctcagtttggtactatgtcagttttggtattcttatcttattgaagtaaaaatgtgatagtg

SEQ ID NO: 26129 - protein, 231 aa, Arabidopsis thaliana
  peptide (1)..(231): Ceres Seq. ID no. 13488739
  misc_feature (68)..(187): Homolog of NCBI NO: 2398533 NR Description: Transcription factor [Arabidopsis thaliana]
  misc_feature (52)..(183): Homolog of NCBI NO: 5257260 NR Description: Similar to sequence of BAC F7G19 from Arabidopsis
  misc_feature (1)..(187): Homolog of NCBI NO: 21554704 NR Description: transcription factor, putative [Arabidopsis
  misc_feature (23)..(223): Homolog of NCBI NO: 15242784 NR Description: transcription factor Hap5a, putative [Arabidopsis
  misc_feature (23)..(220): Homolog of NCBI NO: 15228405 NR Description: transcription factor Hap5a, putative [Arabidopsis
  misc_feature (1)..(187): Homolog of NCBI NO: 15223482 NR Description: transcription factor Hap5a, putative [Arabidopsis
  misc_feature (1)..(231): Homolog of NCBI NO: 15221912 NR Description: transcription factor Hap5a, putative [Arabidopsis
  misc_feature (24)..(231): Homolog of NCBI NO: 25372763 NR Description: hypothetical protein [imported] - Arabidopsis
  misc_feature (1)..(231): Homolog of NCBI NO: 6289057 NR Description: heme activated protein [Arabidopsis thaliana]
  misc_feature (1)..(231): Homolog of NCBI NO: 15223986 NR Description: transcription factor Hap5a, putative [Arabidopsis
  misc_feature (68)..(187): Homolog of NCBI NO: 2398533 NR Description: Transcription factor [Arabidopsis thaliana]
  misc_feature (52)..(183): Homolog of NCBI NO: 5257260 NR Description: Similar to sequence of BAC F7G19 from Arabidopsis
  misc_feature (1)..(187): Homolog of NCBI NO: 21554704 NR Description: transcription factor, putative [Arabidopsis
  misc_feature (23)..(223): Homolog of NCBI NO: 15242784 NR Description: transcription factor Hap5a, putative [Arabidopsis
  misc_feature (23)..(220): Homolog of NCBI NO: 15228405 NR Description: transcription factor Hap5a, putative [Arabidopsis
  misc_feature (1)..(187): Homolog of NCBI NO: 15223482 NR Description: transcription factor Hap5a, putative [Arabidopsis
  misc_feature (1)..(231): Homolog of NCBI NO: 15221912 NR Description: transcription factor Hap5a, putative [Arabidopsis
  misc_feature (24)..(231): Homolog of NCBI NO: 25372763 NR Description: hypothetical protein [imported] - Arabidopsis
  misc_feature (1)..(231): Homolog of NCBI NO: 6289057 NR Description: heme activated protein [Arabidopsis thaliana]
  misc_feature (1)..(231): Homolog of NCBI NO: 15223986 NR Description: transcription factor Hap5a, putative [Arabidopsis
MDQQDHGQSGAMNYGTNPYQTNPMSTTAATVAGGAAQPGQLAFHQIHQQQQQQQLAQQLQAFWENQFKEIEKTTDFKNHSLPLARIKKIMKADEDVRMISAEAPVVFARACEMFILELTLRSWNHTEENKRRTLQKNDIAAAVTRTDIFDFLVDIVPREDLRDEVLGSIPRGTVPEAAAAGYPYGYLPAGTAPIGNPGMVMGNPGGAYPPNPYMGQPMWQQQAPDQPDQEN

SEQ ID NO: 26130 - protein, 220 aa, Arabidopsis thaliana
  peptide (1)..(220): Ceres Seq. ID no. 13488740
  misc_feature (57)..(176): Homolog of NCBI NO: 2398533 NR Description: Transcription factor [Arabidopsis thaliana]
  misc_feature (41)..(172): Homolog of NCBI NO: 5257260 NR Description: Similar to sequence of BAC F7G19 from Arabidopsis
  misc_feature (1)..(176): Homolog of NCBI NO: 21554704 NR Description: transcription factor, putative [Arabidopsis
  misc_feature (12)..(212): Homolog of NCBI NO: 15242784 NR Description: transcription factor Hap5a, putative [Arabidopsis
  misc_feature (12)..(209): Homolog of NCBI NO: 15228405 NR Description: transcription factor Hap5a, putative [Arabidopsis
  misc_feature (1)..(176): Homolog of NCBI NO: 15223482 NR Description: transcription factor Hap5a, putative [Arabidopsis
  misc_feature (1)..(220): Homolog of NCBI NO: 15221912 NR Description: transcription factor Hap5a, putative [Arabidopsis
  misc_feature (13)..(220): Homolog of NCBI NO: 25372763 NR Description: hypothetical protein [imported] - Arabidopsis
  misc_feature (1)..(220): Homolog of NCBI NO: 6289057 NR Description: heme activated protein [Arabidopsis thaliana]
  misc_feature (1)..(220): Homolog of NCBI NO: 15223986 NR Description: transcription factor Hap5a, putative [Arabidopsis
  misc_feature (57)..(176): Homolog of NCBI NO: 2398533 NR Description: Transcription factor [Arabidopsis thaliana]
  misc_feature (41)..(172): Homolog of NCBI NO: 5257260 NR Description: Similar to sequence of BAC F7G19 from Arabidopsis
  misc_feature (1)..(176): Homolog of NCBI NO: 21554704 NR Description: transcription factor, putative [Arabidopsis
  misc_feature (12)..(212): Homolog of NCBI NO: 15242784 NR Description: transcription factor Hap5a, putative [Arabidopsis
  misc_feature (12)..(209): Homolog of NCBI NO: 15228405 NR Description: transcription factor Hap5a, putative [Arabidopsis
  misc_feature (1)..(176): Homolog of NCBI NO: 15223482 NR Description: transcription factor Hap5a, putative [Arabidopsis
  misc_feature (1)..(220): Homolog of NCBI NO: 15221912 NR Description: transcription factor Hap5a, putative [Arabidopsis
  misc_feature (13)..(220): Homolog of NCBI NO: 25372763 NR Description: hypothetical protein [imported] - Arabidopsis
  misc_feature (1)..(220): Homolog of NCBI NO: 6289057 NR Description: heme activated protein [Arabidopsis thaliana]
  misc_feature (1)..(220): Homolog of NCBI NO: 15223986 NR Description: transcription factor Hap5a, putative [Arabidopsis
MNYGTNPYQTNPMSTTAATVAGGAAQPGQLAFHQIHQQQQQQQLAQQLQAFWENQFKEIEKTTDFKNHSLPLARIKKIMKADEDVRMISAEAPVVFARACEMFILELTLRSWNHTEENKRRTLQKNDIAAAVTRTDIFDFLVDIVPREDLRDEVLGSIPRGTVPEAAAAGYPYGYLPAGTAPIGNPGMVMGNPGGAYPPNPYMGQPMWQQQAPDQPDQEN

SEQ ID NO: 26131 - protein, 208 aa, Arabidopsis thaliana
  peptide (1)..(208): Ceres Seq. ID no. 13488741
  misc_feature (45)..(164): Homolog of NCBI NO: 2398533 NR Description: Transcription factor [Arabidopsis thaliana]
  misc_feature (29)..(160): Homolog of NCBI NO: 5257260 NR Description: Similar to sequence of BAC F7G19 from Arabidopsis
  misc_feature (1)..(164): Homolog of NCBI NO: 21554704 NR Description: transcription factor, putative [Arabidopsis
  misc_feature (1)..(200): Homolog of NCBI NO: 15242784 NR Description: transcription factor Hap5a, putative [Arabidopsis
  misc_feature (1)..(197): Homolog of NCBI NO: 15228405 NR Description: transcription factor Hap5a, putative [Arabidopsis
  misc_feature (1)..(164): Homolog of NCBI NO: 15223482 NR Description: transcription factor Hap5a, putative [Arabidopsis
  misc_feature (1)..(208): Homolog of NCBI NO: 15221912 NR Description: transcription factor Hap5a, putative [Arabidopsis
  misc_feature (1)..(208): Homolog of NCBI NO: 25372763 NR Description: hypothetical protein [imported] - Arabidopsis
  misc_feature (1)..(208): Homolog of NCBI NO: 6289057 NR Description: heme activated protein [Arabidopsis thaliana]
  misc_feature (1)..(208): Homolog of NCBI NO: 15223986 NR Description: transcription factor Hap5a, putative [Arabidopsis
  misc_feature (1)..(208): Homolog of NCBI NO: 15221912 NR Description: transcription factor Hap5a, putative [Arabidopsis
  misc_feature (1)..(208): Homolog of NCBI NO: 25372763 NR Description: hypothetical protein [imported] - Arabidopsis
  misc_feature (1)..(208): Homolog of NCBI NO: 6289057 NR Description: heme activated protein [Arabidopsis thaliana]
  misc_feature (1)..(208): Homolog of NCBI NO: 15223986 NR Description: transcription factor Hap5a, putative [Arabidopsis
  misc_feature (45)..(164): Homolog of NCBI NO: 2398533 NR Description: Transcription factor [Arabidopsis thaliana]
  misc_feature (29)..(160): Homolog of NCBI NO: 5257260 NR Description: Similar to sequence of BAC F7G19 from Arabidopsis
  misc_feature (1)..(164): Homolog of NCBI NO: 21554704 NR Description: transcription factor, putative [Arabidopsis
  misc_feature (1)..(200): Homolog of NCBI NO: 15242784 NR Description: transcription factor Hap5a, putative [Arabidopsis
  misc_feature (1)..(197): Homolog of NCBI NO: 15228405 NR Description: transcription factor Hap5a, putative [Arabidopsis
  misc_feature (1)..(164): Homolog of NCBI NO: 15223482 NR Description: transcription factor Hap5a, putative [Arabidopsis
MSTTAATVAGGAAQPGQLAFHQIHQQQQQQQLAQQLQAFWENQFKEIEKTTDFKNHSLPLARIKKIMKADEDVRMISAEAPVVFARACEMFILELTLRSWNHTEENKRRTLQKNDIAAAVTRTDIFDFLVDIVPREDLRDEVLGSIPRGTVPEAAAAGYPYGYLPAGTAPIGNPGMVMGNPGGAYPPNPYMGQPMWQQQAPDQPDQEN

SEQ ID NO: 26132 - DNA, 695 bp, Arabidopsis thaliana
  misc_feature (1)..(695): Ceres Seq. ID no. 13487381
  misc_feature: MA Experiment ID: 108434 Result: Up-regulated in Transcription
  misc_feature: MA Experiment 108434 PARAMETER Experiment Name: At_Root_Tips_cDNA_P Parameter: Tissue Value: Root Tips
  misc_feature: MA Experiment ID: 108462 Result: Down-regulated in Transcription
  misc_feature: MA Experiment 108462 PARAMETER Experiment Name: At_Germinating_Seeds_cDNA_P Parameter: Age (day) Value: 2 vs. 0
  misc_feature: MA Experiment 108462 PARAMETER Experiment Name: At_Germinating_Seeds_cDNA_P Parameter: Tissue Value: Germinating Seeds
  misc_feature: MA Experiment ID: 108463 Result: Down-regulated in Transcription
  misc_feature: MA Experiment 108463 PARAMETER Experiment Name: At_Germinating_Seeds_cDNA_P Parameter: Age (day) Value: 3 vs. 0
  misc_feature: MA Experiment 108463 PARAMETER Experiment Name: At_Germinating_Seeds_cDNA_P Parameter: Tissue Value: Germinating Seeds
  misc_feature: MA Experiment ID: 108464 Result: Down-regulated in Transcription
  misc_feature: MA Experiment 108464 PARAMETER Experiment Name: At_Germinating_Seeds_cDNA_P Parameter: Age (day) Value: 4 vs. 0
  misc_feature: MA Experiment 108464 PARAMETER Experiment Name: At_Germinating_Seeds_cDNA_P Parameter: Tissue Value: Germinating Seeds
  misc_feature: MA Experiment ID: 20000180 Result: Down-regulated in Transcription
  misc_feature: MA Experiment 20000180 PARAMETER Experiment Name: At_Germinating_Seeds_P Parameter: Age (hr) Value: 24 vs. 0
  misc_feature: MA Experiment 20000180 PARAMETER Experiment Name: At_Germinating_Seeds_P Parameter: Tissue Value: Germinating Seeds
  misc_feature: MA Experiment ID: 20000437 Result: Down-regulated in Transcription
  misc_feature: MA Experiment 20000437 PARAMETER Experiment Name: At_Drought_P Parameter: Age (day) Value: 8
  misc_feature: MA Experiment 20000437 PARAMETER Experiment Name: At_Drought_P Parameter: Organism Value: A. thaliana
  misc_feature: MA Experiment 20000437 PARAMETER Experiment Name: At_Drought_P Parameter: Plant Line Value: WS
  misc_feature: MA Experiment 20000437 PARAMETER Experiment Name: At_Drought_P Parameter: Timepoint (hr) Value: 24
  misc_feature: MA Experiment 20000437 PARAMETER Experiment Name: At_Drought_P Parameter: Tissue Value: Whole Plant
  misc_feature: MA Experiment 20000437 PARAMETER Experiment Name: At_Drought_P Parameter: Treatment Value: Drought vs. No Drought
  misc_feature: MA Experiment ID: 20000794 Result: Down-regulated in Transcription
  misc_feature: MA Experiment 20000794 PARAMETER Experiment Name: At_Petals_P Parameter: Age (day) Value: 23-25 days
  misc_feature: MA Experiment 20000794 PARAMETER Experiment Name: At_Petals_P Parameter: Plant Line Value: WS
  misc_feature: MA Experiment 20000794 PARAMETER Experiment Name: At_Petals_P Parameter: Tissue Value: Petals vs. Whole plant
  misc_feature: MA Experiment ID: 20001557 Result: Up-regulated in Transcription
  misc_feature: MA Experiment 20001557 PARAMETER Experiment Name: At_Drought_Soil_Dry_P Parameter: Age (day) Value: 27
  misc_feature: MA Experiment 20001557 PARAMETER Experiment Name: At_Drought_Soil_Dry_P Parameter: Organism Value: A. thaliana
  misc_feature: MA Experiment 20001557 PARAMETER Experiment Name: At_Drought_Soil_Dry_P Parameter: Plant Line Value: WS
  misc_feature: MA Experiment 20001557 PARAMETER Experiment Name: At_Drought_Soil_Dry_P Parameter: Post Timepoint (hr) Value: 3
  misc_feature: MA Experiment 20001557 PARAMETER Experiment Name: At_Drought_Soil_Dry_P Parameter: Post-Treatment Value: Re-Water vs. No Drought
  misc_feature: MA Experiment 20001557 PARAMETER Experiment Name: At_Drought_Soil_Dry_P Parameter: Timepoint (day) Value: 13
  misc_feature: MA Experiment 20001557 PARAMETER Experiment Name: At_Drought_Soil_Dry_P Parameter: Treatment Value: Drought vs. No Drought
  misc_feature: MA Experiment ID: 20001558 Result: Up-regulated in Transcription
  misc_feature: MA Experiment 20001558 PARAMETER Experiment Name: At_Drought_Soil_Dry_P Parameter: Age (day) Value: 27
  misc_feature: MA Experiment 20001558 PARAMETER Experiment Name: At_Drought_Soil_Dry_P Parameter: Organism Value: A. thaliana
  misc_feature: MA Experiment 20001558 PARAMETER Experiment Name: At_Drought_Soil_Dry_P Parameter: Plant Line Value: WS
  misc_feature: MA Experiment 20001558 PARAMETER Experiment Name: At_Drought_Soil_Dry_P Parameter: Post Timepoint (hr) Value: 6
  misc_feature: MA Experiment 20001558 PARAMETER Experiment Name: At_Drought_Soil_Dry_P Parameter: Post-Treatment Value: Re-Water vs. No Drought
  misc_feature: MA Experiment 20001558 PARAMETER Experiment Name: At_Drought_Soil_Dry_P Parameter: Timepoint (day) Value: 13
  misc_feature: MA Experiment 20001558 PARAMETER Experiment Name: At_Drought_Soil_Dry_P Parameter: Treatment Value: Drought vs. No Drought
  misc_feature: MA Experiment ID: 20001560 Result: Up-regulated in Transcription
  misc_feature: MA Experiment 20001560 PARAMETER Experiment Name: At_Drought_Soil_Dry_P Parameter: Age (day) Value: 28
  misc_feature: MA Experiment 20001560 PARAMETER Experiment Name: At_Drought_Soil_Dry_P Parameter: Organism Value: A. thaliana
  misc_feature: MA Experiment 20001560 PARAMETER Experiment Name: At_Drought_Soil_Dry_P Parameter: Plant Line Value: WS
  misc_feature: MA Experiment 20001560 PARAMETER Experiment Name: At_Drought_Soil_Dry_P Parameter: Post Timepoint (hr) Value: None
  misc_feature: MA Experiment 20001560 PARAMETER Experiment Name: At_Drought_Soil_Dry_P Parameter: Post-Treatment Value: None
  misc_feature: MA Experiment 20001560 PARAMETER Experiment Name: At_Drought_Soil_Dry_P Parameter: Timepoint (day) Value: 14
  misc_feature: MA Experiment 20001560 PARAMETER Experiment Name: At_Drought_Soil_Dry_P Parameter: Treatment Value: Drought vs. No Drought
atggaagttagagacttcattttttacactgcaaacgccgtttcgagacttccggcgaagaagacgaacgcaaagatgcagattttcgtgaaaacgctaaccggcaagaccatcaccctcgaggtcgagagcagtgacaccatcgacaatgtcaaggccaagatccaggacaaagaaggaattcctccggaccagcagaggttgatcttcgccggaaaacagcttgaagatggtcgtaccttggctgactacaacatccagaaagagtcgactttgcatcttgttctgaggcttaggggaggtatcattgagccttcattgatgatgttggctcgtaagtataaccaagacaaaatgatttgtcgcaagtgttatgctcgtctccacccaagagctgtgaactgcaggaagaagaagtgtggccatagcaaccagttgaggccaaagaagaagatcaagtgatcttttgttcaccaaaagcttatttacgttatttttgtgtttgctttgagaaagactcctctattgttctgacacaaaccttgtttcagtgaattttgattttacgattattgtttagtaaatctgatttttggctttttttcttcatcaattctaaaatctcttgcaaagtttcttcaaattagagttctgcaatccgaaatataaatttaagagccccattattcatctgt

SEQ ID NO: 26133 - protein, 153 aa, Arabidopsis thaliana
  peptide (1)..(153): Ceres Seq. ID no. 13487382
  misc_feature (26)..(99): Pfam Name: Ubiquitin family Pfam Description: Ubiquitin family
  misc_feature (26)..(153): Homolog of NCBI NO: 2558539 NR Description: ubiquitin-ribosomal protein fusion protein
  misc_feature (17)..(153): Homolog of NCBI NO: 31225298 NR Description: ENSANGP00000010158 [Anopheles gambiae]
  misc_feature (21)..(153): Homolog of NCBI NO: 13569612 NR Description: ubiquitin A-52 residue ribosomal protein fusion
  misc_feature (26)..(153): Homolog of NCBI NO: 70654 NR Description: ubiquitin / ribosomal protein CEP52 -
  misc_feature (124)..(153): Homolog of NCBI NO: 20330759 NR Description: Putative ubiquitin / ribosomal protein CEP52
  misc_feature (26)..(122): Homolog of NCBI NO: 20330759 NR Description: Putative ubiquitin / ribosomal protein CEP52
  misc_feature (26)..(153): Homolog of NCBI NO: 421867 NR Description: ubiquitin / ribosomal protein CEP52 - turnip
  misc_feature (26)..(153): Homolog of NCBI NO: 485518 NR Description: ubiquitin / ribosomal protein CEP52 - rice
  misc_feature (26)..(153): Homolog of NCBI NO: 322750 NR Description: ubiquitin / ribosomal protein CEP52 - wood
  misc_feature (26)..(153): Homolog of NCBI NO: 18404062 NR Description: ubiquitin extension protein (UBQ2)/60S ribosomal
MEVRDFIFYTANAVSRLPAKKTNAKMQIFVKTLTGKTITLEVESSDTIDNVKAKIQDKEGIPPDQQRLIFAGKQLEDGRTLADYNIQKESTLHLVLRLRGGIIEPSLMMLARKYNQDKMICRKCYARLHPRAVNCRKKKCGHSNQLRPKKKIK

SEQ ID NO: 26134 - protein, 128 aa, Arabidopsis thaliana
  peptide (1)..(128): Ceres Seq. ID no. 13487383
  misc_feature (1)..(74): Pfam Name: Ubiquitin family Pfam Description: Ubiquitin family
  misc_feature (1)..(128): Homolog of NCBI NO: 2558539 NR Description: ubiquitin-ribosomal protein fusion protein
  misc_feature (1)..(128): Homolog of NCBI NO: 31225298 NR Description: ENSANGP00000010158 [Anopheles gambiae]
  misc_feature (1)..(128): Homolog of NCBI NO: 13569612 NR Description: ubiquitin A-52 residue ribosomal protein fusion
  misc_feature (1)..(128): Homolog of NCBI NO: 70654 NR Description: ubiquitin / ribosomal protein CEP52 -
  misc_feature (99)..(128): Homolog of NCBI NO: 20330759 NR Description: Putative ubiquitin / ribosomal protein CEP52
  misc_feature (1)..(97): Homolog of NCBI NO: 20330759 NR Description: Putative ubiquitin / ribosomal protein CEP52
  misc_feature (1)..(128): Homolog of NCBI NO: 421867 NR Description: ubiquitin / ribosomal protein CEP52 - turnip
  misc_feature (1)..(128): Homolog of NCBI NO: 485518 NR Description: ubiquitin / ribosomal protein CEP52 - rice
  misc_feature (1)..(128): Homolog of NCBI NO: 322750 NR Description: ubiquitin / ribosomal protein CEP52 - wood
  misc_feature (1)..(128): Homolog of NCBI NO: 18404062 NR Description: ubiquitin extension protein (UBQ2)/60S ribosomal
MQIFVKTLTGKTITLEVESSDTIDNVKAKIQDKEGIPPDQQRLIFAGKQLEDGRTLADYNIQKESTLHLVLRLRGGIIEPSLMMLARKYNQDKMICRKCYARLHPRAVNCRKKKCGHSNQLRPKKKIK

SEQ ID NO: 26135 - DNA, 1400 bp, Arabidopsis thaliana
  misc_feature (1)..(1400): Ceres Seq. ID no. 12332414
  misc_feature: MA Experiment ID: 108433 Result: Up-regulated in Transcription
  misc_feature: MA Experiment 108433 PARAMETER Experiment Name: At_rhl_Mutant2_cDNA_P Parameter: Age (day) Value: 7
  misc_feature: MA Experiment 108433 PARAMETER Experiment Name: At_rhl_Mutant2_cDNA_P Parameter: Organism Value: A. thaliana
  misc_feature: MA Experiment 108433 PARAMETER Experiment Name: At_rhl_Mutant2_cDNA_P Parameter: Plant Line Value: rhl Mutant vs. wt landsburg
  misc_feature: MA Experiment 108433 PARAMETER Experiment Name: At_rhl_Mutant2_cDNA_P Parameter: Tissue Value: Roots
  misc_feature: MA Experiment ID: 108434 Result: Down-regulated in Transcription
  misc_feature: MA Experiment 108434 PARAMETER Experiment Name: At_Root_Tips_cDNA_P Parameter: Tissue Value: Root Tips
  misc_feature: MA Experiment ID: 108435 Result: Down-regulated in Transcription
  misc_feature: MA Experiment 108435 PARAMETER Experiment Name: At_stm_Mutants_cDNA_P Parameter: Plant Line Value: wt Landsburg vs stm
  misc_feature: MA Experiment 108435 PARAMETER Experiment Name: At_stm_Mutants_cDNA_P Parameter: Tissue Value: Shoot Apical Meristem Region
  misc_feature: MA Experiment ID: 108462 Result: Down-regulated in Transcription
  misc_feature: MA Experiment 108462 PARAMETER Experiment Name: At_Germinating_Seeds_cDNA_P Parameter: Age (day) Value: 2 vs. 0
  misc_feature: MA Experiment 108462 PARAMETER Experiment Name: At_Germinating_Seeds_cDNA_P Parameter: Tissue Value: Germinating Seeds
  misc_feature: MA Experiment ID: 108463 Result: Down-regulated in Transcription
  misc_feature: MA Experiment 108463 PARAMETER Experiment Name: At_Germinating_Seeds_cDNA_P Parameter: Age (day) Value: 3 vs. 0
  misc_feature: MA Experiment 108463 PARAMETER Experiment Name: At_Germinating_Seeds_cDNA_P Parameter: Tissue Value: Germinating Seeds
  misc_feature: MA Experiment ID: 108464 Result: Down-regulated in Transcription
  misc_feature: MA Experiment 108464 PARAMETER Experiment Name: At_Germinating_Seeds_cDNA_P Parameter: Age (day) Value: 4 vs. 0
  misc_feature: MA Experiment 108464 PARAMETER Experiment Name: At_Germinating_Seeds_cDNA_P Parameter: Tissue Value: Germinating Seeds
  misc_feature: MA Experiment ID: 108489 Result: Up-regulated in Transcription
  misc_feature: MA Experiment ID: 108501 Result: Down-regulated in Transcription
  misc_feature: MA Experiment 108501 PARAMETER Experiment Name: At_ap2_floral_buds_cDNA_P Parameter: Plant Line Value: ap2 (Ler.)
  misc_feature: MA Experiment 108501 PARAMETER Experiment Name: At_ap2_floral_buds_cDNA_P Parameter: Tissue Value: Closed Flower
  misc_feature: MA Experiment ID: 108574 Result: Down-regulated in Transcription
  misc_feature: MA Experiment 108574 PARAMETER Experiment Name: At_Wounding__cDNA_P Parameter: Timepoint (hr) Value: 1
  misc_feature: MA Experiment 108574 PARAMETER Experiment Name: At_Wounding__cDNA_P Parameter: Tissue Value: Aerial
  misc_feature: MA Experiment 108574 PARAMETER Experiment Name: At_Wounding__cDNA_P Parameter: Treatment Value: Wounding vs. No Wounding
  misc_feature: MA Experiment ID: 108576 Result: Up-regulated in Transcription
  misc_feature: MA Experiment 108576 PARAMETER Experiment Name: At_42deg_Heat_cDNA_P Parameter: Temperature (deg C) Value: 42 vs. 22
  misc_feature: MA Experiment 108576 PARAMETER Experiment Name: At_42deg_Heat_cDNA_P Parameter: Timepoint (hr) Value: 1
  misc_feature: MA Experiment 108576 PARAMETER Experiment Name: At_42deg_Heat_cDNA_P Parameter: Tissue Value: Aerial
  misc_feature: MA Experiment ID: 108579 Result: Down-regulated in Transcription
  misc_feature: MA Experiment 108579 PARAMETER Experiment Name: At_4deg_Cold_cDNA_P Parameter: Temperature (deg C) Value: 4 vs. 22
  misc_feature: MA Experiment 108579 PARAMETER Experiment Name: At_4deg_Cold_cDNA_P Parameter: Timepoint (hr) Value: 6
  misc_feature: MA Experiment 108579 PARAMETER Experiment Name: At_4deg_Cold_cDNA_P Parameter: Tissue Value: Aerial
  misc_feature: MA Experiment ID: 108595 Result: Down-regulated in Transcription
  misc_feature: MA Experiment 108595 PARAMETER Experiment Name: At_Ler-pi_Ovule_cDNA_P Parameter: Plant Line Value: null
  misc_feature: MA Experiment ID: 108607 Result: Down-regulated in Transcription
  misc_feature: MA Experiment 108607 PARAMETER Experiment Name: At_100uM_ABA_cDNA_P Parameter: Timepoint (hr) Value: 4
  misc_feature: MA Experiment 108607 PARAMETER Experiment Name: At_100uM_ABA_cDNA_P Parameter: Tissue Value: Aerial
  misc_feature: MA Experiment 108607 PARAMETER Experiment Name: At_100uM_ABA_cDNA_P Parameter: Treatment Value: 100uM ABA vs. No Treatment
  misc_feature: MA Experiment ID: 108668 Result: Up-regulated in Transcription
  misc_feature: MA Experiment 108668 PARAMETER Experiment Name: At_2mM_SA_cDNA_P Parameter: Plant Line Value: WS
  misc_feature: MA Experiment 108668 PARAMETER Experiment Name: At_2mM_SA_cDNA_P Parameter: Timepoint (hr) Value: 6
  misc_feature: MA Experiment 108668 PARAMETER Experiment Name: At_2mM_SA_cDNA_P Parameter: Treatment Value: 2mM SA vs. No Treatment
  misc_feature: MA Experiment ID: 20000089 Result: Up-regulated in Transcription
  misc_feature: MA Experiment ID: 20000307 Result: Down-regulated in Transcription
  misc_feature: MA Experiment 20000307 PARAMETER Experiment Name: At_Germinating_Seeds_Sub_P Parameter: Age (hr) Value: 24 vs. 0
  misc_feature: MA Experiment 20000307 PARAMETER Experiment Name: At_Germinating_Seeds_Sub_P Parameter: Organism Value: A. thaliana
  misc_feature: MA Experiment 20000307 PARAMETER Experiment Name: At_Germinating_Seeds_Sub_P Parameter: Plant Line Value: WS
  misc_feature: MA Experiment 20000307 PARAMETER Experiment Name: At_Germinating_Seeds_Sub_P Parameter: Tissue Value: Germinating Seeds
  misc_feature: MA Experiment ID: 20000315 Result: Down-regulated in Transcription
  misc_feature: MA Experiment 20000315 PARAMETER Experiment Name: At_14day_Shoots-Roots_Sub_P Parameter: Age (day) Value: 14
  misc_feature: MA Experiment 20000315 PARAMETER Experiment Name: At_14day_Shoots-Roots_Sub_P Parameter: Organism Value: A. thaliana
  misc_feature: MA Experiment 20000315 PARAMETER Experiment Name: At_14day_Shoots-Roots_Sub_P Parameter: Plant Line Value: WS
  misc_feature: MA Experiment 20000315 PARAMETER Experiment Name: At_14day_Shoots-Roots_Sub_P Parameter: Tissue Value: Shoots vs. Whole Plant
  misc_feature: MA Experiment ID: 20000347 Result: Up-regulated in Transcription
  misc_feature: MA Experiment 20000347 PARAMETER Experiment Name: At_2mM_SA_Sub_P Parameter: Age (day) Value: 14
  misc_feature: MA Experiment 20000347 PARAMETER Experiment Name: At_2mM_SA_Sub_P Parameter: Organism Value: A. thaliana
  misc_feature: MA Experiment 20000347 PARAMETER Experiment Name: At_2mM_SA_Sub_P Parameter: Plant Line Value: WS
  misc_feature: MA Experiment 20000347 PARAMETER Experiment Name: At_2mM_SA_Sub_P Parameter: Timepoint (hr) Value: 6
  misc_feature: MA Experiment 20000347 PARAMETER Experiment Name: At_2mM_SA_Sub_P Parameter: Tissue Value: Aerial
  misc_feature: MA Experiment 20000347 PARAMETER Experiment Name: At_2mM_SA_Sub_P Parameter: Treatment Value: 2mM SA vs. No Treatment
  misc_feature: MA Experiment ID: 20000355 Result: Down-regulated in Transcription
  misc_feature: MA Experiment 20000355 PARAMETER Experiment Name: At_Siliques_Sub_P Parameter: Age (day) Value: 21
  misc_feature: MA Experiment 20000355 PARAMETER Experiment Name: At_Siliques_Sub_P Parameter: Organism Value: A. thaliana
  misc_feature: MA Experiment 20000355 PARAMETER Experiment Name: At_Siliques_Sub_P Parameter: Plant Line Value: WS
  misc_feature: MA Experiment 20000355 PARAMETER Experiment Name: At_Siliques_Sub_P Parameter: Tissue Value: Less Than 5mm Siliques vs. Whole Plant
aaacaaaaagcaaaaaagctttctctttctctacctttttccttaatttcacttttgcggcgtcgttcttatctactcacaagaaagcaaccgatcaaataactcccagaataaagaaagactcaaactttattctctctctctttcttaaatagtgaagaaagcttcgattttgggaagtgggtttgttcgaaaaatgggttcttctgtggaacagaacattttggtgactggtggtgctggattcattggaacacatactgttgttcagcttttgaatcagggttttaaggttacgatcattgataatcttgataactctgtcgttgaagctgttcatagggttagggaacttgttggtcctgatctctctaccaagcttgaattcaatctgggtgatctaagaaacaaaggagatattgagaaactcttttccaatcagagatttgatgctgtgattcactttgctggtcttaaagctgtgggagaaagtgttggaaaccctcgtcgttactttgataataacttagttggaactatcaatctatatgagaccatggcaaaatacaactgcaaaatgatggtgtttttcgtcgtctgcaacagtttatggtcaacctgaaatagtcccatgtgtggaagactttgagttacaggctatgaatccttatggtcgtactaagctgtttcttgaagagatagctagagacattcacgctgcggaaccagaatggaagataattcttctgaggtacttcaatccggttggagctcacgagagtggaagaattggagaagatccaaagggcataccgaataatctcatgccttatatccaacaagtggcggttggaagattacctgaactcaatgtatttggacatgattatcctaccatggatggtagcgcggttagagactacatccatgtaatggatttagcagatggccatgtggctgcgttaaacaaattgttttcagactcaaagattggctgtactgcttataatcttggcactggtcaaggaacttctgtcttagaaatggtttcttcttttgaaaaagcttctggcaagaaaatacctatcaagctatgtccaagaagagctggagatgcaacagctgtttatgcttcaactcagaaagctgagaaggaacttggctggaaggcaaaatatggagttgatgagatgtgcagagatcaatggaactgggcaaataagaatccatggggtttccagaagaagccttgattgattttgttttgtttcaccactcaatataaagaaaaaaaaagatatagatgtcgttttattttcctgcatctatttgatttctctcttcaaaaaaagttgtattgaactcgtcatctttcggttaataaagtataaagtttatct

SEQ ID NO: 26136 - protein, 197 aa, Arabidopsis thaliana
  peptide (1)..(197): Ceres Seq. ID no. 12332415
  misc_feature (1)..(190): Pfam Name: NAD dependent epimerase/dehydratase family Pfam Description: NAD dependent epimerase/dehydratase family
  misc_feature (1)..(193): Homolog of NCBI NO: 12643850 NR Description: Probable UDP-glucose 4-epimerase At4g10960
  misc_feature (1)..(196): Homolog of NCBI NO: 21553659 NR Description: UDP-galactose 4-epimerase-like protein
  misc_feature (1)..(193): Homolog of NCBI NO: 11386775 NR Description: UDP-glucose 4-epimerase GEPI48 (Galactowaldenase)
  misc_feature (1)..(193): Homolog of NCBI NO: 26106014 NR Description: putative UDP-glucose 4-epimerase
  misc_feature (1)..(196): Homolog of NCBI NO: 11386774 NR Description: UDP-glucose 4-epimerase GEPI42 (Galactowaldenase)
  misc_feature (1)..(197): Homolog of NCBI NO: 11386762 NR Description: UDP-glucose 4-epimerase (Galactowaldenase)
  misc_feature (1)..(196): Homolog of NCBI NO: 2129759 NR Description: UDPglucose 4-epimerase (EC 5.1.3.2) - Arabidopsis
  misc_feature (1)..(196): Homolog of NCBI NO: 15222072 NR Description: uridine diphosphate glucose epimerase
  misc_feature (1)..(197): Homolog of NCBI NO: 25292327 NR Description: hypothetical protein F16M19.8 [imported] -
  misc_feature (1)..(197): Homolog of NCBI NO: 18407751 NR Description: uridine diphosphate glucose epimerase, putative
MNPYGRTKLFLEEIARDIHAAEPEWKIILLRYFNPVGAHESGRIGEDPKGIPNNLMPYIQQVAVGRLPELNVFGHDYPTMDGSAVRDYIHVMDLADGHVAALNKLFSDSKIGCTAYNLGTGQGTSVLEMVSSFEKASGKKIPIKLCPRRAGDATAVYASTQKAEKELGWKAKYGVDEMCRDQWNWANKNPWGFQKKP

SEQ ID NO: 26137 - protein, 142 aa, Arabidopsis thaliana
  peptide (1)..(142): Ceres Seq. ID no. 12332416
  misc_feature (1)..(135): Pfam Name: NAD dependent epimerase/dehydratase family Pfam Description: NAD dependent epimerase/dehydratase family
  misc_feature (1)..(138): Homolog of NCBI NO: 12643850 NR Description: Probable UDP-glucose 4-epimerase At4g10960
  misc_feature (1)..(141): Homolog of NCBI NO: 21553659 NR Description: UDP-galactose 4-epimerase-like protein
  misc_feature (1)..(138): Homolog of NCBI NO: 11386775 NR Description: UDP-glucose 4-epimerase GEPI48 (Galactowaldenase)
  misc_feature (1)..(138): Homolog of NCBI NO: 26106014 NR Description: putative UDP-glucose 4-epimerase
  misc_feature (1)..(141): Homolog of NCBI NO: 11386774 NR Description: UDP-glucose 4-epimerase GEPI42 (Galactowaldenase)
  misc_feature (1)..(142): Homolog of NCBI NO: 11386762 NR Description: UDP-glucose 4-epimerase (Galactowaldenase)
  misc_feature (1)..(141): Homolog of NCBI NO: 2129759 NR Description: UDPglucose 4-epimerase (EC 5.1.3.2) - Arabidopsis
  misc_feature (1)..(141): Homolog of NCBI NO: 15222072 NR Description: uridine diphosphate glucose epimerase
  misc_feature (1)..(142): Homolog of NCBI NO: 25292327 NR Description: hypothetical protein F16M19.8 [imported] -
  misc_feature (1)..(142): Homolog of NCBI NO: 18407751 NR Description: uridine diphosphate glucose epimerase, putative
MPYIQQVAVGRLPELNVFGHDYPTMDGSAVRDYIHVMDLADGHVAALNKLFSDSKIGCTAYNLGTGQGTSVLEMVSSFEKASGKKIPIKLCPRRAGDATAVYASTQKAEKELGWKAKYGVDEMCRDQWNWANKNPWGFQKKP

SEQ ID NO: 26138 - protein, 141 aa, Arabidopsis thaliana
  peptide (1)..(141): Ceres Seq. ID no. 12332417
  misc_feature (9)..(131): Pfam Name: NAD dependent epimerase/dehydratase family Pfam Description: NAD dependent epimerase/dehydratase family
  misc_feature (7)..(131): Homolog of NCBI NO: 12643850 NR Description: Probable UDP-glucose 4-epimerase At4g10960
  misc_feature (7)..(131): Homolog of NCBI NO: 21553659 NR Description: UDP-galactose 4-epimerase-like protein
  misc_feature (7)..(131): Homolog of NCBI NO: 11386775 NR Description: UDP-glucose 4-epimerase GEPI48 (Galactowaldenase)
  misc_feature (1)..(131): Homolog of NCBI NO: 26106014 NR Description: putative UDP-glucose 4-epimerase
  misc_feature (7)..(130): Homolog of NCBI NO: 11386774 NR Description: UDP-glucose 4-epimerase GEPI42 (Galactowaldenase)
  misc_feature (7)..(131): Homolog of NCBI NO: 11386762 NR Description: UDP-glucose 4-epimerase (Galactowaldenase)
  misc_feature (1)..(131): Homolog of NCBI NO: 2129759 NR Description: UDPglucose 4-epimerase (EC 5.1.3.2) - Arabidopsis
  misc_feature (1)..(131): Homolog of NCBI NO: 15222072 NR Description: uridine diphosphate glucose epimerase
  misc_feature (1)..(131): Homolog of NCBI NO: 25292327 NR Description: hypothetical protein F16M19.8 [imported] -
  misc_feature (1)..(131): Homolog of NCBI NO: 18407751 NR Description: uridine diphosphate glucose epimerase, putative
MGSSVEQNILVTGGAGFIGTHTVVQLLNQGFKVTIIDNLDNSVVEAVHRVRELVGPDLSTKLEFNLGDLRNKGDIEKLFSNQRFDAVIHFAGLKAVGESVGNPRRYFDNNLVGTINLYETMAKYNCKMMVFFVVCNSLWST

SEQ ID NO: 26139 - DNA, 1541 bp, Arabidopsis thaliana
  misc_feature (1)..(1541): Ceres Seq. ID no. 12357754
  misc_feature: MA Experiment ID: 20000173 Result: Up-regulated in Transcription
  misc_feature: MA Experiment 20000173 PARAMETER Experiment Name: At_42deg_Heat_P Parameter: Age (day) Value: 14
  misc_feature: MA Experiment 20000173 PARAMETER Experiment Name: At_42deg_Heat_P Parameter: Organism Value: A. thaliana
  misc_feature: MA Experiment 20000173 PARAMETER Experiment Name: At_42deg_Heat_P Parameter: Plant Line Value: WS
  misc_feature: MA Experiment 20000173 PARAMETER Experiment Name: At_42deg_Heat_P Parameter: Temperature (deg C) Value: 42 vs. 22
  misc_feature: MA Experiment 20000173 PARAMETER Experiment Name: At_42deg_Heat_P Parameter: Timepoint (hr) Value: 6
  misc_feature: MA Experiment 20000173 PARAMETER Experiment Name: At_42deg_Heat_P Parameter: Tissue Value: Aerial
  misc_feature: MA Experiment ID: 20000179 Result: Down-regulated in Transcription
  misc_feature: MA Experiment 20000179 PARAMETER Experiment Name: At_Germinating_Seeds_P Parameter: Age (hr) Value: 6 vs. 0
  misc_feature: MA Experiment 20000179 PARAMETER Experiment Name: At_Germinating_Seeds_P Parameter: Tissue Value: Germinating Seeds
  misc_feature: MA Experiment ID: 20000180 Result: Down-regulated in Transcription
  misc_feature: MA Experiment 20000180 PARAMETER Experiment Name: At_Germinating_Seeds_P Parameter: Age (hr) Value: 24 vs. 0
  misc_feature: MA Experiment 20000180 PARAMETER Experiment Name: At_Germinating_Seeds_P Parameter: Tissue Value: Germinating Seeds
ttcttcttcttatttcttgtataccgtcgtcgaaaagctttaccaaaatctcacgcccccgacgattctgccgattcatcgggatttgagtttgcacaaaacccacaatggtttcgtatcgtgctaccacagagacgatttccctggctttagaagccaacagctcggaggctattacgatactgtaccaggttttggaagacccttcttcatctcctgaggctatacggatcaaggagcaagcgattacaaacctttgtgatcgattgactgaagagaagagaggtgaggatctccggaaactgttgaccaagttgaggcctttcttctcgttaatccccaaggcgaaaactgccaaaatcgtcagaggaatcattgatgctgtggcaaagattcctggaacaactgatctccagatcactctctgcaaagagatggtggagtggactcgcgctgagaagcgtactttcctcaggcagcgagtagaggctaggcttgcagctcttttgatggagaacaaggagtatgttgaagctttggcgctgttgagtactttggtaaaagaggttaggagattagatgataagctccttctggtcgacatagacttgctggagagcaaacttcacttctcattgagaaacttacccaaggcaaaagctgcactcactgcagctaggacagctgctaacgctatatatgtcccaccggcccaacaaggcaccatagatctgcagagtgggattcttcacgctgaagagaaggactacaaaaccggatacagttacttctttgaagcctttgaatccttcaacgctctcggagatccaagagccgttttcagtctgaagtacatgttactgtgcaagatcatggttagccaagctgatgatgttgcaggaataatctcctcaaaggctggactacagtacgttggccctgacctggatgccatgaaagcagtcgctgatgctcactcgaagaggtccttgaagttgtttgagaacgcactccgtgactacaaagcacagcttgaagatgacccaattgtccacaggcatctctcttctctctatgacacgcttctggagcaaaatctgtgtcgtttgatcgagcccttctcaagagttgagatagctcacattgctgagctgattggattgccgctcgaccatgtggagaagaagctatctcagatgatactcgacaagaaatttgcaggtaccttggatcaaggagctggatgcctcatcatcttcgaagacccaaaggcagatgctatctactcggctactcttgacaccattgcaaacatggggaaggtcgtcgacagcctttatgtccggtctgccaaaatcatgtcctgagtgagtgagtgagttgatcgtatgaatctcattctatcgttctttctttctggttttagatatcgtttggactcaaagaaactgatgtttctcaatggaggaagtaaacttgtctgaattgttcccattactcgttttgcttatgatcttattatgtcatggttaccttttatt

SEQ ID NO: 26140 - protein, 419 aa, Arabidopsis thaliana
  peptide (1)..(419): Ceres Seq. ID no. 12357755
  misc_feature (281)..(385): Pfam Name: PCI domain Pfam Description: PCI domain
  misc_feature (15)..(417): Homolog of NCBI NO: 34872897 NR Description: similar to 26S proteasome non-ATPase regulatory
  misc_feature (15)..(417): Homolog of NCBI NO: 28872725 NR Description: proteasome 26S non-ATPase subunit 11
  misc_feature (15)..(417): Homolog of NCBI NO: 2150046 NR Description: 26S proteasome subunit 9 [Homo sapiens]
  misc_feature (15)..(417): Homolog of NCBI NO: 33585718 NR Description: Unknown (protein for IMAGE:3964625) [Mus musculus]
  misc_feature (15)..(417): Homolog of NCBI NO: 26342168 NR Description: unnamed protein product [Mus musculus]
  misc_feature (12)..(417): Homolog of NCBI NO: 17137740 NR Description: Proteasome p44.5 subunit CG10149-PB [Drosophila
  misc_feature (110)..(419): Homolog of NCBI NO: 38093742 NR Description: putative proteosome subunit
  misc_feature (6)..(419): Homolog of NCBI NO: 38344536 NR Description: OSJNBa0027P08.4 [Oryza sativa (japonica
  misc_feature (1)..(412): Homolog of NCBI NO: 25332510 NR Description: 19S proteosome subunit 9 [imported] - Arabidopsis
  misc_feature (1)..(419): Homolog of NCBI NO: 15218845 NR Description: 26S proteasome regulatory subunit (RPN6), putative
MVSYRATTETISLALEANSSEAITILYQVLEDPSSSPEAIRIKEQAITNLCDRLTEEKRGEDLRKLLTKLRPFFSLIPKAKTAKIVRGIIDAVAKIPGTTDLQITLCKEMVEWTRAEKRTFLRQRVEARLAALLMENKEYVEALALLSTLVKEVRRLDDKLLLVDIDLLESKLHFSLRNLPKAKAALTAARTAANAIYVPPAQQGTIDLQSGILHAEEKDYKTGYSYFFEAFESFNALGDPRAVFSLKYMLLCKIMVSQADDVAGIISSKAGLQYVGPDLDAMKAVADAHSKRSLKLFENALRDYKAQLEDDPIVHRHLSSLYDTLLEQNLCRLIEPFSRVEIAHIAELIGLPLDHVEKKLSQMILDKKFAGTLDQGAGCLIIFEDPKADAIYSATLDTIANMGKVVDSLYVRSAKIMS

SEQ ID NO: 26141 - protein, 310 aa, Arabidopsis thaliana
  peptide (1)..(310): Ceres Seq. ID no. 12357756
  misc_feature (172)..(276): Pfam Name: PCI domain Pfam Description: PCI domain
  misc_feature (1)..(308): Homolog of NCBI NO: 17137740 NR Description: Proteasome p44.5 subunit CG10149-PB [Drosophila
  misc_feature (1)..(310): Homolog of NCBI NO: 38093742 NR Description: putative proteosome subunit
  misc_feature (1)..(310): Homolog of NCBI NO: 38344536 NR Description: OSJNBa0027P08.4 [Oryza sativa (japonica
  misc_feature (1)..(308): Homolog of NCBI NO: 28872725 NR Description: proteasome 26S non-ATPase subunit 11
  misc_feature (1)..(308): Homolog of NCBI NO: 33585718 NR Description: Unknown (protein for IMAGE:3964625) [Mus musculus]
  misc_feature (1)..(308): Homolog of NCBI NO: 26342168 NR Description: unnamed protein product [Mus musculus]
  misc_feature (1)..(308): Homolog of NCBI NO: 2150046 NR Description: 26S proteasome subunit 9 [Homo sapiens]
  misc_feature (1)..(308): Homolog of NCBI NO: 34872897 NR Description: similar to 26S proteasome non-ATPase regulatory
  misc_feature (1)..(303): Homolog of NCBI NO: 25332510 NR Description: 19S proteosome subunit 9 [imported] - Arabidopsis
  misc_feature (1)..(310): Homolog of NCBI NO: 15218845 NR Description: 26S proteasome regulatory subunit (RPN6), putative
MVEWTRAEKRTFLRQRVEARLAALLMENKEYVEALALLSTLVKEVRRLDDKLLLVDIDLLESKLHFSLRNLPKAKAALTAARTAANAIYVPPAQQGTIDLQSGILHAEEKDYKTGYSYFFEAFESFNALGDPRAVFSLKYMLLCKIMVSQADDVAGIISSKAGLQYVGPDLDAMKAVADAHSKRSLKLFENALRDYKAQLEDDPIVHRHLSSLYDTLLEQNLCRLIEPFSRVEIAHIAELIGLPLDHVEKKLSQMILDKKFAGTLDQGAGCLIIFEDPKADAIYSATLDTIANMGKVVDSLYVRSAKIMS

SEQ ID NO: 26142 - protein, 285 aa, Arabidopsis thaliana
  peptide (1)..(285): Ceres Seq. ID no. 12357757
  misc_feature (147)..(251): Pfam Name: PCI domain Pfam Description: PCI domain
  misc_feature (1)..(283): Homolog of NCBI NO: 34872897 NR Description: similar to 26S proteasome non-ATPase regulatory
  misc_feature (1)..(283): Homolog of NCBI NO: 28872725 NR Description: proteasome 26S non-ATPase subunit 11
  misc_feature (1)..(283): Homolog of NCBI NO: 2150046 NR Description: 26S proteasome subunit 9 [Homo sapiens]
  misc_feature (1)..(283): Homolog of NCBI NO: 33585718 NR Description: Unknown (protein for IMAGE:3964625) [Mus musculus]
  misc_feature (1)..(283): Homolog of NCBI NO: 26342168 NR Description: unnamed protein product [Mus musculus]
  misc_feature (1)..(283): Homolog of NCBI NO: 17137740 NR Description: Proteasome p44.5 subunit CG10149-PB [Drosophila
  misc_feature (1)..(285): Homolog of NCBI NO: 38093742 NR Description: putative proteosome subunit
  misc_feature (1)..(285): Homolog of NCBI NO: 38344536 NR Description: OSJNBa0027P08.4 [Oryza sativa (japonica
  misc_feature (1)..(278): Homolog of NCBI NO: 25332510 NR Description: 19S proteosome subunit 9 [imported] - Arabidopsis
  misc_feature (1)..(285): Homolog of NCBI NO: 15218845 NR Description: 26S proteasome regulatory subunit (RPN6), putative
MENKEYVEALALLSTLVKEVRRLDDKLLLVDIDLLESKLHFSLRNLPKAKAALTAARTAANAIYVPPAQQGTIDLQSGILHAEEKDYKTGYSYFFEAFESFNALGDPRAVFSLKYMLLCKIMVSQADDVAGIISSKAGLQYVGPDLDAMKAVADAHSKRSLKLFENALRDYKAQLEDDPIVHRHLSSLYDTLLEQNLCRLIEPFSRVEIAHIAELIGLPLDHVEKKLSQMILDKKFAGTLDQGAGCLIIFEDPKADAIYSATLDTIANMGKVVDSLYVRSAKIMS

SEQ ID NO: 26143 - DNA, 626 bp, Arabidopsis thaliana
  misc_feature (1)..(626): Ceres Seq. ID no. 12338158
  misc_feature: MA Experiment ID: 108434 Result: Down-regulated in Transcription
  misc_feature: MA Experiment 108434 PARAMETER Experiment Name: At_Root_Tips_cDNA_P Parameter: Tissue Value: Root Tips
  misc_feature: MA Experiment ID: 108572 Result: Up-regulated in Transcription
  misc_feature: MA Experiment 108572 PARAMETER Experiment Name: At_Drought_cDNA_P Parameter: Timepoint (hr) Value: 1
  misc_feature: MA Experiment 108572 PARAMETER Experiment Name: At_Drought_cDNA_P Parameter: Tissue Value: Aerial
  misc_feature: MA Experiment 108572 PARAMETER Experiment Name: At_Drought_cDNA_P Parameter: Treatment Value: Drought vs. No Drought
  misc_feature: MA Experiment ID: 108573 Result: Up-regulated in Transcription
  misc_feature: MA Experiment 108573 PARAMETER Experiment Name: At_Drought_cDNA_P Parameter: Timepoint (hr) Value: 6
  misc_feature: MA Experiment 108573 PARAMETER Experiment Name: At_Drought_cDNA_P Parameter: Tissue Value: Aerial
  misc_feature: MA Experiment 108573 PARAMETER Experiment Name: At_Drought_cDNA_P Parameter: Treatment Value: Drought vs. No Drought
  misc_feature: MA Experiment ID: 108579 Result: Down-regulated in Transcription
  misc_feature: MA Experiment 108579 PARAMETER Experiment Name: At_4deg_Cold_cDNA_P Parameter: Temperature (deg C) Value: 4 vs. 22
  misc_feature: MA Experiment 108579 PARAMETER Experiment Name: At_4deg_Cold_cDNA_P Parameter: Timepoint (hr) Value: 6
  misc_feature: MA Experiment 108579 PARAMETER Experiment Name: At_4deg_Cold_cDNA_P Parameter: Tissue Value: Aerial
  misc_feature: MA Experiment ID: 108594 Result: Down-regulated in Transcription
  misc_feature: MA Experiment 108594 PARAMETER Experiment Name: At_Ler-rhl_Root_cDNA_P Parameter: Plant Line Value: null
  misc_feature: MA Experiment ID: 108595 Result: Down-regulated in Transcription
  misc_feature: MA Experiment 108595 PARAMETER Experiment Name: At_Ler-pi_Ovule_cDNA_P Parameter: Plant Line Value: null
  misc_feature: MA Experiment ID: 108605 Result: Up-regulated in Transcription
  misc_feature: MA Experiment 108605 PARAMETER Experiment Name: At_100uM_ABA_cDNA_P Parameter: Timepoint (hr) Value: 6
  misc_feature: MA Experiment 108605 PARAMETER Experiment Name: At_100uM_ABA_cDNA_P Parameter: Tissue Value: Aerial
  misc_feature: MA Experiment 108605 PARAMETER Experiment Name: At_100uM_ABA_cDNA_P Parameter: Treatment Value: 100uM ABA vs. No Treatment
  misc_feature: MA Experiment ID: 20000071 Result: Up-regulated in Transcription
  misc_feature: MA Experiment 20000071 PARAMETER Experiment Name: At_100uM_ABA_Mutants_cDNA_P Parameter: Plant Line Value: CS8104
  misc_feature: MA Experiment 20000071 PARAMETER Experiment Name: At_100uM_ABA_Mutants_cDNA_P Parameter: Timepoint (hr) Value: 6
  misc_feature: MA Experiment 20000071 PARAMETER Experiment Name: At_100uM_ABA_Mutants_cDNA_P Parameter: Tissue Value: Aerial
  misc_feature: MA Experiment 20000071 PARAMETER Experiment Name: At_100uM_ABA_Mutants_cDNA_P Parameter: Treatment Value: 100uM ABA vs. No Treatment
  misc_feature: MA Experiment ID: 20000072 Result: Up-regulated in Transcription
  misc_feature: MA Experiment 20000072 PARAMETER Experiment Name: At_100uM_ABA_Mutants_cDNA_P Parameter: Plant Line Value: CS8105
  misc_feature: MA Experiment 20000072 PARAMETER Experiment Name: At_100uM_ABA_Mutants_cDNA_P Parameter: Timepoint (hr) Value: 6
  misc_feature: MA Experiment 20000072 PARAMETER Experiment Name: At_100uM_ABA_Mutants_cDNA_P Parameter: Tissue Value: Aerial
  misc_feature: MA Experiment 20000072 PARAMETER Experiment Name: At_100uM_ABA_Mutants_cDNA_P Parameter: Treatment Value: 100uM ABA vs. No Treatment
  misc_feature: MA Experiment ID: 20000088 Result: Up-regulated in Transcription
  misc_feature: MA Experiment 20000088 PARAMETER Experiment Name: At_100uM_ABA_Mutants_cDNA_P Parameter: Plant Line Value: Landsberg
  misc_feature: MA Experiment 20000088 PARAMETER Experiment Name: At_100uM_ABA_Mutants_cDNA_P Parameter: Timepoint (hr) Value: 6
  misc_feature: MA Experiment 20000088 PARAMETER Experiment Name: At_100uM_ABA_Mutants_cDNA_P Parameter: Tissue Value: Aerial
  misc_feature: MA Experiment 20000088 PARAMETER Experiment Name: At_100uM_ABA_Mutants_cDNA_P Parameter: Treatment Value: 100uM ABA vs. No Treatment
  misc_feature: MA Experiment ID: 20000117 Result: Up-regulated in Transcription
  misc_feature: MA Experiment 20000117 PARAMETER Experiment Name: At_100uM_ABA_Mutants_cDNA_P Parameter: Plant Line Value: Columbia
  misc_feature: MA Experiment 20000117 PARAMETER Experiment Name: At_100uM_ABA_Mutants_cDNA_P Parameter: Timepoint (hr) Value: 6
  misc_feature: MA Experiment 20000117 PARAMETER Experiment Name: At_100uM_ABA_Mutants_cDNA_P Parameter: Tissue Value: Aerial
  misc_feature: MA Experiment 20000117 PARAMETER Experiment Name: At_100uM_ABA_Mutants_cDNA_P Parameter: Treatment Value: 100uM ABA vs. No Treatment
  misc_feature: MA Experiment ID: 20000169 Result: Up-regulated in Transcription
  misc_feature: MA Experiment 20000169 PARAMETER Experiment Name: At_100uM_ABA_P Parameter: Age (day) Value: 14
  misc_feature: MA Experiment 20000169 PARAMETER Experiment Name: At_100uM_ABA_P Parameter: Organism Value: A. thaliana
  misc_feature: MA Experiment 20000169 PARAMETER Experiment Name: At_100uM_ABA_P Parameter: Plant Line Value: WS
  misc_feature: MA Experiment 20000169 PARAMETER Experiment Name: At_100uM_ABA_P Parameter: Timepoint (hr) Value: 6
  misc_feature: MA Experiment 20000169 PARAMETER Experiment Name: At_100uM_ABA_P Parameter: Tissue Value: Aerial
  misc_feature: MA Experiment 20000169 PARAMETER Experiment Name: At_100uM_ABA_P Parameter: Treatment Value: 100uM ABA vs. No Treatment
  misc_feature: MA Experiment ID: 20000179 Result: Up-regulated in Transcription
  misc_feature: MA Experiment 20000179 PARAMETER Experiment Name: At_Germinating_Seeds_P Parameter: Age (hr) Value: 6 vs. 0
  misc_feature: MA Experiment 20000179 PARAMETER Experiment Name: At_Germinating_Seeds_P Parameter: Tissue Value: Germinating Seeds
  misc_feature: MA Experiment ID: 20000180 Result: Up-regulated in Transcription
  misc_feature: MA Experiment 20000180 PARAMETER Experiment Name: At_Germinating_Seeds_P Parameter: Age (hr) Value: 24 vs. 0
  misc_feature: MA Experiment 20000180 PARAMETER Experiment Name: At_Germinating_Seeds_P Parameter: Tissue Value: Germinating Seeds
  misc_feature: MA Experiment ID: 20000234 Result: Down-regulated in Transcription
  misc_feature: MA Experiment 20000234 PARAMETER Experiment Name: At_Siliques_P Parameter: Age (day) Value: 21
  misc_feature: MA Experiment 20000234 PARAMETER Experiment Name: At_Siliques_P Parameter: Organism Value: A. thaliana
  misc_feature: MA Experiment 20000234 PARAMETER Experiment Name: At_Siliques_P Parameter: Plant Line Value: WS
  misc_feature: MA Experiment 20000234 PARAMETER Experiment Name: At_Siliques_P Parameter: Tissue Value: Less Than 5mm Siliques vs. Whole Plant
  misc_feature: MA Experiment ID: 20000264 Result: Up-regulated in Transcription
  misc_feature: MA Experiment 20000264 PARAMETER Experiment Name: At_Open_Flower_P Parameter: Age (day) Value: 21
  misc_feature: MA Experiment 20000264 PARAMETER Experiment Name: At_Open_Flower_P Parameter: Plant Line Value: WS
  misc_feature: MA Experiment 20000264 PARAMETER Experiment Name: At_Open_Flower_P Parameter: Tissue Value: Open Flower vs. Whole Plant
  misc_feature: MA Experiment ID: 20000455 Result: Up-regulated in Transcription
  misc_feature: MA Experiment 20000455 PARAMETER Experiment Name: At_100uM_ABA_P Parameter: Age (day) Value: 16
  misc_feature: MA Experiment 20000455 PARAMETER Experiment Name: At_100uM_ABA_P Parameter: Organism Value: A. thaliana
  misc_feature: MA Experiment 20000455 PARAMETER Experiment Name: At_100uM_ABA_P Parameter: Plant Line Value: WS
  misc_feature: MA Experiment 20000455 PARAMETER Experiment Name: At_100uM_ABA_P Parameter: Timepoint (hr) Value: 48
  misc_feature: MA Experiment 20000455 PARAMETER Experiment Name: At_100uM_ABA_P Parameter: Tissue Value: Aerial
  misc_feature: MA Experiment 20000455 PARAMETER Experiment Name: At_100uM_ABA_P Parameter: Treatment Value: 100uM ABA vs. No Treatment
  misc_feature: MA Experiment ID: 20000495 Result: Down-regulated in Transcription
  misc_feature: MA Experiment 20000495 PARAMETER Experiment Name: At_Guard_Cells_P Parameter: Harvest Date Value: 8/2/2002
  misc_feature: MA Experiment 20000495 PARAMETER Experiment Name: At_Guard_Cells_P Parameter: Organism Value: A. thaliana
  misc_feature: MA Experiment 20000495 PARAMETER Experiment Name: At_Guard_Cells_P Parameter: Tissue Value: Guard Cells vs. Leaves
  misc_feature: MA Experiment ID: 20000496 Result: Down-regulated in Transcription
  misc_feature: MA Experiment 20000496 PARAMETER Experiment Name: At_Guard_Cells_P Parameter: Harvest Date Value: 7/19/2002
  misc_feature: MA Experiment 20000496 PARAMETER Experiment Name: At_Guard_Cells_P Parameter: Organism Value: Canola
  misc_feature: MA Experiment 20000496 PARAMETER Experiment Name: At_Guard_Cells_P Parameter: Tissue Value: Guard Cells vs. Leaves
  misc_feature: MA Experiment ID: 20000794 Result: Up-regulated in Transcription
  misc_feature: MA Experiment 20000794 PARAMETER Experiment Name: At_Petals_P Parameter: Age (day) Value: 23-25 days
  misc_feature: MA Experiment 20000794 PARAMETER Experiment Name: At_Petals_P Parameter: Plant Line Value: WS
  misc_feature: MA Experiment 20000794 PARAMETER Experiment Name: At_Petals_P Parameter: Tissue Value: Petals vs. Whole plant
  misc_feature: MA Experiment ID: 20001451 Result: Down-regulated in Transcription
  misc_feature: MA Experiment 20001451 PARAMETER Experiment Name: At_Far-red-induction_P Parameter: Age (day) Value: 7
  misc_feature: MA Experiment 20001451 PARAMETER Experiment Name: At_Far-red-induction_P Parameter: Light Value: Far-red vs. White
  misc_feature: MA Experiment 20001451 PARAMETER Experiment Name: At_Far-red-induction_P Parameter: Organism Value: A. thaliana
  misc_feature: MA Experiment 20001451 PARAMETER Experiment Name: At_Far-red-induction_P Parameter: Plant Line Value: Columbia
  misc_feature: MA Experiment 20001451 PARAMETER Experiment Name: At_Far-red-induction_P Parameter: Timepoint (hr) Value: 24
  misc_feature: MA Experiment 20001451 PARAMETER Experiment Name: At_Far-red-induction_P Parameter: Tissue Value: Whole Plant
caacggcaaagattactggattgtgagaaactcatggggtaaaagctggggagagagtggatacctaaggatggcgcgtaacattgcgtcttcatcaggaaaatgtggaatcgcgattgaaccttcatacccgataaagaatggcgaaaacccgccaaacccgggaccttcacctccatctcccatcaagcctccaacccaatgtgacagttactacacttgtcctgagagcaacacttgttgttgtctgtttgagtatggcaagtattgctttgcttggggatgttgcccactagaagcagccacttgctgtgatgacaactatagttgctgccctcacgagtacccggtttgtgaccttgatcaaggaacctgtttattgagcaagaacagtccatttagtgttaaggccttaaagcgtaaacccgcaacgccattctggtcacaaggcagaaagaacattgcctaaacattgcttcttcaagaggactctggctcatgagagaagagatctctctgaagagatttatcagatgctttttaatgttgttgtttatgccataactagatacataaaaaatgcagctgttgggtttcgtgtatataaaaaaaggaccctatgtttc

SEQ ID NO: 26144 - protein, 155 aa, Arabidopsis thaliana
  peptide (1)..(155): Ceres Seq. ID no. 12338159
  misc_feature (80)..(127): Pfam Name: Granulin Pfam Description: Granulin
  misc_feature (1)..(147): Homolog of NCBI NO: 4731372 NR Description: papain-like cysteine protease [Sandersonia
  misc_feature (1)..(145): Homolog of NCBI NO: 32396020 NR Description: senescence-associated cysteine protease
  misc_feature (1)..(148): Homolog of NCBI NO: 6682829 NR Description: cysteine protease component of protease-inhibitor
  misc_feature (1)..(155): Homolog of NCBI NO: 38345906 NR Description: OSJNBb0059K02.8 [Oryza sativa (japonica
  misc_feature (1)..(155): Homolog of NCBI NO: 129231 NR Description: Oryzain alpha chain precursor
  misc_feature (1)..(129): Homolog of NCBI NO: 18141285 NR Description: senescence-associated cysteine protease [Brassica
  misc_feature (1)..(155): Homolog of NCBI NO: 18422289 NR Description: cysteine proteinase RD21A
  misc_feature (1)..(155): Homolog of NCBI NO: 18141283 NR Description: senescence-associated cysteine protease [Brassica
  misc_feature (1)..(155): Homolog of NCBI NO: 18401614 NR Description: cysteine proteinase RD21A
  misc_feature (1)..(155): Homolog of NCBI NO: 14517542 NR Description: F2G19.31/F2G19.31 [Arabidopsis thaliana]
NGKDYWIVRNSWGKSWGESGYLRMARNIASSSGKCGIAIEPSYPIKNGENPPNPGPSPPSPIKPPTQCDSYYTCPESNTCCCLFEYGKYCFAWGCCPLEAATCCDDNYSCCPHEYPVCDLDQGTCLLSKNSPFSVKALKRKPATPFWSQGRKNIA

SEQ ID NO: 26145 - protein, 132 aa, Arabidopsis thaliana
  peptide (1)..(132): Ceres Seq. ID no. 12338160
  misc_feature (57)..(104): Pfam Name: Granulin Pfam Description: Granulin
  misc_feature (1)..(124): Homolog of NCBI NO: 4731372 NR Description: papain-like cysteine protease [Sandersonia
  misc_feature (1)..(122): Homolog of NCBI NO: 32396020 NR Description: senescence-associated cysteine protease
  misc_feature (1)..(125): Homolog of NCBI NO: 6682829 NR Description: cysteine protease component of protease-inhibitor
  misc_feature (1)..(132): Homolog of NCBI NO: 38345906 NR Description: OSJNBb0059K02.8 [Oryza sativa (japonica
  misc_feature (1)..(132): Homolog of NCBI NO: 129231 NR Description: Oryzain alpha chain precursor
  misc_feature (1)..(106): Homolog of NCBI NO: 18141285 NR Description: senescence-associated cysteine protease [Brassica
  misc_feature (1)..(132): Homolog of NCBI NO: 18422289 NR Description: cysteine proteinase RD21A
  misc_feature (1)..(132): Homolog of NCBI NO: 18141283 NR Description: senescence-associated cysteine protease [Brassica
  misc_feature (1)..(132): Homolog of NCBI NO: 18401614 NR Description: cysteine proteinase RD21A
  misc_feature (1)..(132): Homolog of NCBI NO: 14517542 NR Description: F2G19.31/F2G19.31 [Arabidopsis thaliana]
MARNIASSSGKCGIAIEPSYPIKNGENPPNPGPSPPSPIKPPTQCDSYYTCPESNTCCCLFEYGKYCFAWGCCPLEAATCCDDNYSCCPHEYPVCDLDQGTCLLSKNSPFSVKALKRKPATPFWSQGRKNIA

SEQ ID NO: 26146 - DNA, 1187 bp, Arabidopsis thaliana
  misc_feature (1)..(1187): Ceres Seq. ID no. 12371727
  misc_feature: MA Experiment ID: 108461 Result: Up-regulated in Transcription
  misc_feature: MA Experiment 108461 PARAMETER Experiment Name: At_Germinating_Seeds_cDNA_P Parameter: Age (day) Value: 1 vs. 0
  misc_feature: MA Experiment 108461 PARAMETER Experiment Name: At_Germinating_Seeds_cDNA_P Parameter: Tissue Value: Germinating Seeds
  misc_feature: MA Experiment ID: 108462 Result: Up-regulated in Transcription
  misc_feature: MA Experiment 108462 PARAMETER Experiment Name: At_Germinating_Seeds_cDNA_P Parameter: Age (day) Value: 2 vs. 0
  misc_feature: MA Experiment 108462 PARAMETER Experiment Name: At_Germinating_Seeds_cDNA_P Parameter: Tissue Value: Germinating Seeds
  misc_feature: MA Experiment ID: 108463 Result: Up-regulated in Transcription
  misc_feature: MA Experiment 108463 PARAMETER Experiment Name: At_Germinating_Seeds_cDNA_P Parameter: Age (day) Value: 3 vs. 0
  misc_feature: MA Experiment 108463 PARAMETER Experiment Name: At_Germinating_Seeds_cDNA_P Parameter: Tissue Value: Germinating Seeds
  misc_feature: MA Experiment ID: 108464 Result: Up-regulated in Transcription
  misc_feature: MA Experiment 108464 PARAMETER Experiment Name: At_Germinating_Seeds_cDNA_P Parameter: Age (day) Value: 4 vs. 0
  misc_feature: MA Experiment 108464 PARAMETER Experiment Name: At_Germinating_Seeds_cDNA_P Parameter: Tissue Value: Germinating Seeds
  misc_feature: MA Experiment ID: 108573 Result: Up-regulated in Transcription
  misc_feature: MA Experiment 108573 PARAMETER Experiment Name: At_Drought_cDNA_P Parameter: Timepoint (hr) Value: 6
  misc_feature: MA Experiment 108573 PARAMETER Experiment Name: At_Drought_cDNA_P Parameter: Tissue Value: Aerial
  misc_feature: MA Experiment 108573 PARAMETER Experiment Name: At_Drought_cDNA_P Parameter: Treatment Value: Drought vs. No Drought
  misc_feature: MA Experiment ID: 108595 Result: Down-regulated in Transcription
  misc_feature: MA Experiment 108595 PARAMETER Experiment Name: At_Ler-pi_Ovule_cDNA_P Parameter: Plant Line Value: null
  misc_feature: MA Experiment ID: 20000179 Result: Up-regulated in Transcription
  misc_feature: MA Experiment 20000179 PARAMETER Experiment Name: At_Germinating_Seeds_P Parameter: Age (hr) Value: 6 vs. 0
  misc_feature: MA Experiment 20000179 PARAMETER Experiment Name: At_Germinating_Seeds_P Parameter: Tissue Value: Germinating Seeds
  misc_feature: MA Experiment ID: 20000180 Result: Up-regulated in Transcription
  misc_feature: MA Experiment 20000180 PARAMETER Experiment Name: At_Germinating_Seeds_P Parameter: Age (hr) Value: 24 vs. 0
  misc_feature: MA Experiment 20000180 PARAMETER Experiment Name: At_Germinating_Seeds_P Parameter: Tissue Value: Germinating Seeds
  misc_feature: MA Experiment ID: 20000224 Result: Down-regulated in Transcription
aaattttcgttaatgattaattagtaagcttcggaatatatcctatctgtcaaaacaacatttttctgttttgtccgaaatcatcaaagactcttccttcggcgatcgctgctcagaagtttgatttcgatatcaagaatcgtgatagaaaaaatgcgacacaattgttgccatgtctcgttcgcttcgattctcaagatccttaattttctccaagctttcatcggtatatcaatcataatctactcgatttggatgctcgatcaatacaatcatcacgttcccgttgaccctcctccgtctcagcctccggcagcttcatcaccggattcttcttattccttctctaattcaataattgagatcaacagtgtttctgattctttgaagaatccgatcgatttcgtatcgggtatcgttctcgggtctggtggtggagattcgggtttcaatctccgttctttagatcttcctgctccatggtttatctactgtttcatggcgattgggattttggtctgcattgtcactatcattggtttcattgcagctgaagctatcaatggatgttgcttgtgtttctattcaattctcaaaactcttttaatcattatcgaagcagctctagtgggattcatagtgattgaccgtcactgggagaaggatcttccttatgatccaactggagaactcaatagtcttcgagctttcatcgaagaaaacatcgatatttgcaaatgggtcggaattgttgtggtagccatccagttactgtcattgctactggctttggttttgagagctatggtttcacctcggcaatcagagcttgatgatgaagatgattttgagaatccgatgagtagagcacgagacaatcttcttggtccacaggcaaaccagacatcttctggatcaagcaatattgacaactggaggtcccgaatcagagagaagtacggattgatcaacagtcagagccacactccatcagcttaactcaaaagactgagttcttgtgtctggaattatcagtactttggtttggttcttctctctgttaactttcgagtgtgcatagatatttacacatttatgttatcgtttgatacttttttcgaaactctgtttagatcgcaacatagctttcattttggtgtacaaaagagttacgagatttgtgtttg

SEQ ID NO: 26147 - protein, 281 aa, Arabidopsis thaliana
  peptide (1)..(281): Ceres Seq. ID no. 12371728
  misc_feature (13)..(78): Pfam Name: Tetraspanin family Pfam Description: Tetraspanin family
  misc_feature (105)..(280): Homolog of NCBI NO: 18398417 NR Description: expressed protein
  misc_feature (106)..(268): Homolog of NCBI NO: 32487399 NR Description: OSJNBb0017I01.13 [Oryza sativa (japonica
  misc_feature (12)..(43): Homolog of NCBI NO: 30681117 NR Description: expressed protein [Arabidopsis thaliana]
  misc_feature (105)..(232): Homolog of NCBI NO: 30681117 NR Description: expressed protein [Arabidopsis thaliana]
  misc_feature (35)..(279): Homolog of NCBI NO: 25360978 NR Description: hypothetical protein At2g20230 [imported] -
  misc_feature (1)..(279): Homolog of NCBI NO: 18399283 NR Description: expressed protein
  misc_feature (1)..(281): Homolog of NCBI NO: 15235419 NR Description: putative protein
MRHNCCHVSFASILKILNFLQAFIGISIIIYSIWMLDQYNHHVPVDPPPSQPPAASSPDSSYSFSNSIIEINSVSDSLKNPIDFVSGIVLGSGGGDSGFNLRSLDLPAPWFIYCFMAIGILVCIVTIIGFIAAEAINGCCLCFYSILKTLLIIIEAALVGFIVIDRHWEKDLPYDPTGELNSLRAFIEENIDICKWVGIVVVAIQLLSLLLALVLRAMVSPRQSELDDEDDFENPMSRARDNLLGPQANQTSSGSSNIDNWRSRIREKYGLINSQSHTPSA

SEQ ID NO: 26148 - protein, 247 aa, Arabidopsis thaliana
  peptide (1)..(247): Ceres Seq. ID no. 12371729
  misc_feature (71)..(171): Pfam Name: Tetraspanin family Pfam Description: Tetraspanin family
  misc_feature (71)..(246): Homolog of NCBI NO: 18398417 NR Description: expressed protein
  misc_feature (72)..(234): Homolog of NCBI NO: 32487399 NR Description: OSJNBb0017I01.13 [Oryza sativa (japonica
  misc_feature (71)..(198): Homolog of NCBI NO: 30681117 NR Description: expressed protein [Arabidopsis thaliana]
  misc_feature (1)..(245): Homolog of NCBI NO: 25360978 NR Description: hypothetical protein At2g20230 [imported] -
  misc_feature (1)..(245): Homolog of NCBI NO: 18399283 NR Description: expressed protein
  misc_feature (1)..(247): Homolog of NCBI NO: 15235419 NR Description: putative protein
MLDQYNHHVPVDPPPSQPPAASSPDSSYSFSNSIIEINSVSDSLKNPIDFVSGIVLGSGGGDSGFNLRSLDLPAPWFIYCFMAIGILVCIVTIIGFIAAEAINGCCLCFYSILKTLLIIIEAALVGFIVIDRHWEKDLPYDPTGELNSLRAFIEENIDICKWVGIVVVAIQLLSLLLALVLRAMVSPRQSELDDEDDFENPMSRARDNLLGPQANQTSSGSSNIDNWRSRIREKYGLINSQSHTPSA

SEQ ID NO: 26149 - protein, 166 aa, Arabidopsis thaliana
  peptide (1)..(166): Ceres Seq. ID no. 12371730
  misc_feature (1)..(90): Pfam Name: Tetraspanin family Pfam Description: Tetraspanin family
  misc_feature (1)..(165): Homolog of NCBI NO: 18398417 NR Description: expressed protein
  misc_feature (1)..(153): Homolog of NCBI NO: 32487399 NR Description: OSJNBb0017I01.13 [Oryza sativa (japonica
  misc_feature (1)..(117): Homolog of NCBI NO: 30681117 NR Description: expressed protein [Arabidopsis thaliana]
  misc_feature (1)..(164): Homolog of NCBI NO: 25360978 NR Description: hypothetical protein At2g20230 [imported] -
  misc_feature (1)..(164): Homolog of NCBI NO: 18399283 NR Description: expressed protein
  misc_feature (1)..(166): Homolog of NCBI NO: 15235419 NR Description: putative protein
MAIGILVCIVTIIGFIAAEAINGCCLCFYSILKTLLIIIEAALVGFIVIDRHWEKDLPYDPTGELNSLRAFIEENIDICKWVGIVVVAIQLLSLLLALVLRAMVSPRQSELDDEDDFENPMSRARDNLLGPQANQTSSGSSNIDNWRSRIREKYGLINSQSHTPSA

SEQ ID NO: 26150 - DNA, 1914 bp, Arabidopsis thaliana
  misc_feature (1)..(1914): Ceres Seq. ID no. 12370725
  misc_feature: MA Experiment ID: 108434 Result: Up-regulated in Transcription
  misc_feature: MA Experiment 108434 PARAMETER Experiment Name: At_Root_Tips_cDNA_P Parameter: Tissue Value: Root Tips
  misc_feature: MA Experiment ID: 108462 Result: Up-regulated in Transcription
  misc_feature: MA Experiment 108462 PARAMETER Experiment Name: At_Germinating_Seeds_cDNA_P Parameter: Age (day) Value: 2 vs. 0
  misc_feature: MA Experiment 108462 PARAMETER Experiment Name: At_Germinating_Seeds_cDNA_P Parameter: Tissue Value: Germinating Seeds
  misc_feature: MA Experiment ID: 108464 Result: Up-regulated in Transcription
  misc_feature: MA Experiment 108464 PARAMETER Experiment Name: At_Germinating_Seeds_cDNA_P Parameter: Age (day) Value: 4 vs. 0
  misc_feature: MA Experiment 108464 PARAMETER Experiment Name: At_Germinating_Seeds_cDNA_P Parameter: Tissue Value: Germinating Seeds
  misc_feature: MA Experiment ID: 108501 Result: Up-regulated in Transcription
  misc_feature: MA Experiment 108501 PARAMETER Experiment Name: At_ap2_floral_buds_cDNA_P Parameter: Plant Line Value: ap2 (Ler.)
  misc_feature: MA Experiment 108501 PARAMETER Experiment Name: At_ap2_floral_buds_cDNA_P Parameter: Tissue Value: Closed Flower
  misc_feature: MA Experiment ID: 108561 Result: Down-regulated in Transcription
  misc_feature: MA Experiment 108561 PARAMETER Experiment Name: At_100uM_ABA_cDNA_P Parameter: Timepoint (hr) Value: 6
  misc_feature: MA Experiment 108561 PARAMETER Experiment Name: At_100uM_ABA_cDNA_P Parameter: Tissue Value: Aerial
  misc_feature: MA Experiment 108561 PARAMETER Experiment Name: At_100uM_ABA_cDNA_P Parameter: Treatment Value: 100uM ABA vs. No Treatment
  misc_feature: MA Experiment ID: 108569 Result: Up-regulated in Transcription
  misc_feature: MA Experiment 108569 PARAMETER Experiment Name: At_0.001%_MeJA__cDNA_P Parameter: Timepoint (hr) Value: 6
  misc_feature: MA Experiment 108569 PARAMETER Experiment Name: At_0.001%_MeJA__cDNA_P Parameter: Tissue Value: Aerial
  misc_feature: MA Experiment 108569 PARAMETER Experiment Name: At_0.001%_MeJA__cDNA_P Parameter: Treatment Value: 0.001% MeJA vs. No Treatment
  misc_feature: MA Experiment ID: 108577 Result: Up-regulated in Transcription
  misc_feature: MA Experiment 108577 PARAMETER Experiment Name: At_42deg_Heat_cDNA_P Parameter: Temperature (deg C) Value: 42 vs. 22
  misc_feature: MA Experiment 108577 PARAMETER Experiment Name: At_42deg_Heat_cDNA_P Parameter: Timepoint (hr) Value: 6
  misc_feature: MA Experiment 108577 PARAMETER Experiment Name: At_42deg_Heat_cDNA_P Parameter: Tissue Value: Aerial
  misc_feature: MA Experiment ID: 108579 Result: Up-regulated in Transcription
  misc_feature: MA Experiment 108579 PARAMETER Experiment Name: At_4deg_Cold_cDNA_P Parameter: Temperature (deg C) Value: 4 vs. 22
  misc_feature: MA Experiment 108579 PARAMETER Experiment Name: At_4deg_Cold_cDNA_P Parameter: Timepoint (hr) Value: 6
  misc_feature: MA Experiment 108579 PARAMETER Experiment Name: At_4deg_Cold_cDNA_P Parameter: Tissue Value: Aerial
  misc_feature: MA Experiment ID: 108605 Result: Down-regulated in Transcription
  misc_feature: MA Experiment 108605 PARAMETER Experiment Name: At_100uM_ABA_cDNA_P Parameter: Timepoint (hr) Value: 6
  misc_feature: MA Experiment 108605 PARAMETER Experiment Name: At_100uM_ABA_cDNA_P Parameter: Tissue Value: Aerial
  misc_feature: MA Experiment 108605 PARAMETER Experiment Name: At_100uM_ABA_cDNA_P Parameter: Treatment Value: 100uM ABA vs. No Treatment
  misc_feature: MA Experiment ID: 20000071 Result: Down-regulated in Transcription
  misc_feature: MA Experiment 20000071 PARAMETER Experiment Name: At_100uM_ABA_Mutants_cDNA_P Parameter: Plant Line Value: CS8104
  misc_feature: MA Experiment 20000071 PARAMETER Experiment Name: At_100uM_ABA_Mutants_cDNA_P Parameter: Timepoint (hr) Value: 6
  misc_feature: MA Experiment 20000071 PARAMETER Experiment Name: At_100uM_ABA_Mutants_cDNA_P Parameter: Tissue Value: Aerial
  misc_feature: MA Experiment 20000071 PARAMETER Experiment Name: At_100uM_ABA_Mutants_cDNA_P Parameter: Treatment Value: 100uM ABA vs. No Treatment
  misc_feature: MA Experiment ID: 20000086 Result: Down-regulated in Transcription
  misc_feature: MA Experiment 20000086 PARAMETER Experiment Name: At_100uM_ABA_Mutants_cDNA_P Parameter: Plant Line Value: CS22
  misc_feature: MA Experiment 20000086 PARAMETER Experiment Name: At_100uM_ABA_Mutants_cDNA_P Parameter: Timepoint (hr) Value: 6
  misc_feature: MA Experiment 20000086 PARAMETER Experiment Name: At_100uM_ABA_Mutants_cDNA_P Parameter: Tissue Value: Aerial
  misc_feature: MA Experiment 20000086 PARAMETER Experiment Name: At_100uM_ABA_Mutants_cDNA_P Parameter: Treatment Value: 100uM ABA vs. No Treatment
  misc_feature: MA Experiment ID: 20000093 Result: Up-regulated in Transcription
  misc_feature: MA Experiment 20000093 PARAMETER Experiment Name: At_42deg_Heat_cDNA_P Parameter: Temperature (deg C) Value: 42 vs. 22
  misc_feature: MA Experiment 20000093 PARAMETER Experiment Name: At_42deg_Heat_cDNA_P Parameter: Timepoint (hr) Value: 0.5
  misc_feature: MA Experiment 20000093 PARAMETER Experiment Name: At_42deg_Heat_cDNA_P Parameter: Tissue Value: Aerial
  misc_feature: MA Experiment ID: 20000117 Result: Down-regulated in Transcription
  misc_feature: MA Experiment 20000117 PARAMETER Experiment Name: At_100uM_ABA_Mutants_cDNA_P Parameter: Plant Line Value: Columbia
  misc_feature: MA Experiment 20000117 PARAMETER Experiment Name: At_100uM_ABA_Mutants_cDNA_P Parameter: Timepoint (hr) Value: 6
  misc_feature: MA Experiment 20000117 PARAMETER Experiment Name: At_100uM_ABA_Mutants_cDNA_P Parameter: Tissue Value: Aerial
  misc_feature: MA Experiment 20000117 PARAMETER Experiment Name: At_100uM_ABA_Mutants_cDNA_P Parameter: Treatment Value: 100uM ABA vs. No Treatment
  misc_feature: MA Experiment ID: 20000169 Result: Down-regulated in Transcription
  misc_feature: MA Experiment 20000169 PARAMETER Experiment Name: At_100uM_ABA_P Parameter: Age (day) Value: 14
  misc_feature: MA Experiment 20000169 PARAMETER Experiment Name: At_100uM_ABA_P Parameter: Organism Value: A. thaliana
  misc_feature: MA Experiment 20000169 PARAMETER Experiment Name: At_100uM_ABA_P Parameter: Plant Line Value: WS
  misc_feature: MA Experiment 20000169 PARAMETER Experiment Name: At_100uM_ABA_P Parameter: Timepoint (hr) Value: 6
  misc_feature: MA Experiment 20000169 PARAMETER Experiment Name: At_100uM_ABA_P Parameter: Tissue Value: Aerial
  misc_feature: MA Experiment 20000169 PARAMETER Experiment Name: At_100uM_ABA_P Parameter: Treatment Value: 100uM ABA vs. No Treatment
  misc_feature: MA Experiment ID: 20000184 Result: Up-regulated in Transcription
  misc_feature: MA Experiment 20000184 PARAMETER Experiment Name: At_Shoots__P Parameter: Age (day) Value: 7
  misc_feature: MA Experiment 20000184 PARAMETER Experiment Name: At_Shoots__P Parameter: Tissue Value: Shoots vs. Whole Plant
  misc_feature: MA Experiment ID: 20000227 Result: Up-regulated in Transcription
  misc_feature: MA Experiment 20000227 PARAMETER Experiment Name: At_Root-Tips-vs-Tops_P Parameter: Tissue Value: Root Tips vs. Root Tops
  misc_feature: MA Experiment ID: 20000234 Result: Up-regulated in Transcription
  misc_feature: MA Experiment 20000234 PARAMETER Experiment Name: At_Siliques_P Parameter: Age (day) Value: 21
  misc_feature: MA Experiment 20000234 PARAMETER Experiment Name: At_Siliques_P Parameter: Organism Value: A. thaliana
  misc_feature: MA Experiment 20000234 PARAMETER Experiment Name: At_Siliques_P Parameter: Plant Line Value: WS
  misc_feature: MA Experiment 20000234 PARAMETER Experiment Name: At_Siliques_P Parameter: Tissue Value: Less Than 5mm Siliques vs. Whole Plant
  misc_feature: MA Experiment ID: 20000269 Result: Up-regulated in Transcription
  misc_feature: MA Experiment 20000269 PARAMETER Experiment Name: At_1mM_KNO3_L-vs-H_Roots_P Parameter: Age (day) Value: 7,10,12
  misc_feature: MA Experiment 20000269 PARAMETER Experiment Name: At_1mM_KNO3_L-vs-H_Roots_P Parameter: Organism Value: A. thaliana
  misc_feature: MA Experiment 20000269 PARAMETER Experiment Name: At_1mM_KNO3_L-vs-H_Roots_P Parameter: Plant Line Value: WS
  misc_feature: MA Experiment 20000269 PARAMETER Experiment Name: At_1mM_KNO3_L-vs-H_Roots_P Parameter: Timepoint (day) Value: 7,10,12
  misc_feature: MA Experiment 20000269 PARAMETER Experiment Name: At_1mM_KNO3_L-vs-H_Roots_P Parameter: Tissue Value: Roots
  misc_feature: MA Experiment 20000269 PARAMETER Experiment Name: At_1mM_KNO3_L-vs-H_Roots_P Parameter: Treatment Value: 1mM KNO3 vs. 50mM KNO3
  misc_feature: MA Experiment ID: 20000438 Result: Up-regulated in Transcription
  misc_feature: MA Experiment 20000438 PARAMETER Experiment Name: At_Shoots__P Parameter: Age (day) Value: 14
  misc_feature: MA Experiment 20000438 PARAMETER Experiment Name: At_Shoots__P Parameter: Tissue Value: Shoots vs. Whole Plant
  misc_feature: MA Experiment ID: 20000441 Result: Down-regulated in Transcription
  misc_feature: MA Experiment 20000441 PARAMETER Experiment Name: At_1uM_BR-BRZ__P Parameter: Tissue Value: Shoot Apices
  misc_feature: MA Experiment 20000441 PARAMETER Experiment Name: At_1uM_BR-BRZ__P Parameter: Treatment Value: 1uM BR vs. No Treatment
  misc_feature: MA Experiment ID: 20000573 Result: Down-regulated in Transcription
  misc_feature: MA Experiment 20000573 PARAMETER Experiment Name: At_100uM_ABA_Mutants__P Parameter: Organism Value: A. thaliana
  misc_feature: MA Experiment 20000573 PARAMETER Experiment Name: At_100uM_ABA_Mutants__P Parameter: Plant Line Value: CS22 vs. Ler wt
  misc_feature: MA Experiment 20000573 PARAMETER Experiment Name: At_100uM_ABA_Mutants__P Parameter: Timepoint (hr) Value: N/A
  misc_feature: MA Experiment 20000573 PARAMETER Experiment Name: At_100uM_ABA_Mutants__P Parameter: Tissue Value: Whole Plant
  misc_feature: MA Experiment 20000573 PARAMETER Experiment Name: At_100uM_ABA_Mutants__P Parameter: Treatment Value: None
  misc_feature: MA Experiment ID: 20000574 Result: Down-regulated in Transcription
  misc_feature: MA Experiment 20000574 PARAMETER Experiment Name: At_100uM_ABA_Mutants__P Parameter: Organism Value: A. thaliana
  misc_feature: MA Experiment 20000574 PARAMETER Experiment Name: At_100uM_ABA_Mutants__P Parameter: Plant Line Value: CS23 vs. Ler wt
  misc_feature: MA Experiment 20000574 PARAMETER Experiment Name: At_100uM_ABA_Mutants__P Parameter: Timepoint (hr) Value: N/A
  misc_feature: MA Experiment 20000574 PARAMETER Experiment Name: At_100uM_ABA_Mutants__P Parameter: Tissue Value: Whole Plant
  misc_feature: MA Experiment 20000574 PARAMETER Experiment Name: At_100uM_ABA_Mutants__P Parameter: Treatment Value: None
  misc_feature: MA Experiment ID: 20000794 Result: Down-regulated in Transcription
  misc_feature: MA Experiment 20000794 PARAMETER Experiment Name: At_Petals_P Parameter: Age (day) Value: 23-25 days
  misc_feature: MA Experiment 20000794 PARAMETER Experiment Name: At_Petals_P Parameter: Plant Line Value: WS
  misc_feature: MA Experiment 20000794 PARAMETER Experiment Name: At_Petals_P Parameter: Tissue Value: Petals vs. Whole plant
  misc_feature: MA Experiment ID: 20001248 Result: Down-regulated in Transcription
  misc_feature: MA Experiment 20001248 PARAMETER Experiment Name: At_Far-red-induction_P Parameter: Age (day) Value: 7
  misc_feature: MA Experiment 20001248 PARAMETER Experiment Name: At_Far-red-induction_P Parameter: Light Value: Far-red vs. White
  misc_feature: MA Experiment 20001248 PARAMETER Experiment Name: At_Far-red-induction_P Parameter: Organism Value: A. thaliana
  misc_feature: MA Experiment 20001248 PARAMETER Experiment Name: At_Far-red-induction_P Parameter: Plant Line Value: Columbia
  misc_feature: MA Experiment 20001248 PARAMETER Experiment Name: At_Far-red-induction_P Parameter: Timepoint (hr) Value: 4
  misc_feature: MA Experiment 20001248 PARAMETER Experiment Name: At_Far-red-induction_P Parameter: Tissue Value: Whole Plant
  misc_feature: MA Experiment ID: 20001450 Result: Down-regulated in Transcription
  misc_feature: MA Experiment 20001450 PARAMETER Experiment Name: At_Far-red-induction_P Parameter: Age (day) Value: 7
  misc_feature: MA Experiment 20001450 PARAMETER Experiment Name: At_Far-red-induction_P Parameter: Light Value: Far-red vs. White
  misc_feature: MA Experiment 20001450 PARAMETER Experiment Name: At_Far-red-induction_P Parameter: Organism Value: A. thaliana
  misc_feature: MA Experiment 20001450 PARAMETER Experiment Name: At_Far-red-induction_P Parameter: Plant Line Value: Columbia
  misc_feature: MA Experiment 20001450 PARAMETER Experiment Name: At_Far-red-induction_P Parameter: Timepoint (hr) Value: 8
  misc_feature: MA Experiment 20001450 PARAMETER Experiment Name: At_Far-red-induction_P Parameter: Tissue Value: Whole Plant
  misc_feature: MA Experiment ID: 20001451 Result: Down-regulated in Transcription
  misc_feature: MA Experiment 20001451 PARAMETER Experiment Name: At_Far-red-induction_P Parameter: Age (day) Value: 7
  misc_feature: MA Experiment 20001451 PARAMETER Experiment Name: At_Far-red-induction_P Parameter: Light Value: Far-red vs. White
  misc_feature: MA Experiment 20001451 PARAMETER Experiment Name: At_Far-red-induction_P Parameter: Organism Value: A. thaliana
  misc_feature: MA Experiment 20001451 PARAMETER Experiment Name: At_Far-red-induction_P Parameter: Plant Line Value: Columbia
  misc_feature: MA Experiment 20001451 PARAMETER Experiment Name: At_Far-red-induction_P Parameter: Timepoint (hr) Value: 24
  misc_feature: MA Experiment 20001451 PARAMETER Experiment Name: At_Far-red-induction_P Parameter: Tissue Value: Whole Plant
  misc_feature: MA Experiment ID: 20001757 Result: Down-regulated in Transcription
  misc_feature: MA Experiment 20001757 PARAMETER Experiment Name: At_50mM_NH4NO3_L-to-H_P Parameter: Timepoint (hr) Value: 6
  misc_feature: MA Experiment 20001757 PARAMETER Experiment Name: At_50mM_NH4NO3_L-to-H_P Parameter: Tissue Value: Leaf
  misc_feature: MA Experiment 20001757 PARAMETER Experiment Name: At_50mM_NH4NO3_L-to-H_P Parameter: Treatment Value: 50mM NH4NO3 vs 100mM Mannitol
  misc_feature: MA Experiment ID: 20001911 Result: Down-regulated in Transcription
  misc_feature: MA Experiment 20001911 PARAMETER Experiment Name: At_Drought_Reproduction_P Parameter: Age (day) Value: 40
  misc_feature: MA Experiment 20001911 PARAMETER Experiment Name: At_Drought_Reproduction_P Parameter: Organism Value: A. thaliana
  misc_feature: MA Experiment 20001911 PARAMETER Experiment Name: At_Drought_Reproduction_P Parameter: Plant Line Value: WS
  misc_feature: MA Experiment 20001911 PARAMETER Experiment Name: At_Drought_Reproduction_P Parameter: Timepoint (day) Value: 10
  misc_feature: MA Experiment 20001911 PARAMETER Experiment Name: At_Drought_Reproduction_P Parameter: Tissue Value: Flowers
  misc_feature: MA Experiment 20001911 PARAMETER Experiment Name: At_Drought_Reproduction_P Parameter: Treatment Value: Drought vs. No Drought
acaaaactcacaccccaaaaccgatccaaattccgagaaagacaaccaaattttccttttcctctgcaaaaatgtttattgagagcttcaaagttgagagcccgaacgtgaagtacacagagaatgagattcactctgtgtacgattacgagacgacggaggttgttcatgagaagaccgtcaatggcacttaccaatggattgtgaagccaaagactgtcaaatacgatttcaaaaccgatattcgtgtccccaaattaggggttatgcttgtgggtttgggaggaaacaatggatcaactctcaccgctggtgtgattgcgaacaaagaaggaatctcgtgggcaacgaaggacaaagtgcaacaagcgaattacttcgggtcactaactcaagcttcatcgattcgtgtcggatcttttaacggtgaagagatctatgctcctttcaagagtctccttccaatggtgaatccggatgatgttgtgtttggaggatgggatataagtgacatgaacttagcagatgccatggctagagccagggttcttgatatcgacttgcagaaacagctcaggccttacatggagaacattgtgccactccctgggatcttcgatcctgatttcatagctgctaatcaagggtcacgtgctaaccacgtgatcaaaggtaccaagaaggaacaagtcgaccacatcatcaaggacatgagggagtttaaggagaagaataaggtggataaggttgtggttctctggacggctaacacagagcgttatagcaatgtggtcgttgggatgaacgatacaatggagaatctcatggagtctgtggatagggatgaggctgagatctctccttcaacactttatgcgattgcttgtgttcttgagggaatcccgttcatcaatggaagccctcaaaacacctttgttccaggtctaattgatatggcgatcaggaacaatgttttgatcggtggagatgatttcaagagtggtcaaaccaagatgaaatctgtcttggttgatttcctagttggcgcaggaatcaagcctacttcaattgtgagctacaatcacttgggaaacaacgatggaatgaatctctcagctccacagactttcagatctaaggagatctccaaaagcaatgtcgtggacgatatggttgctagcaatggtatcctctttgagcctggggaacacccggaccatgttgttgtcatcaagtatgtaccgtatgttgcggatagtaagcgagccatggacgagtacacatcagagatattcatgggagggaagaacacaattgtgatgcacaatacctgcgaggactctctcttagctgctccaatcatcttggatcttgttctcctcgcggagctcagcaccaggatccagttcaaatccgagggagagggaaagtttcactctttccatcctgtggccaccatactcagctacctcaccaaggcaccacttgtaccgccgggaactccggtgattaacgcactgtcgaagcagcgggctatgctggagaatattatgagggcgtgcgttggactggctccggagaacaacatgatcatggaattcaagtgaacatgaagaagcatgaatctaagacctttaattagctcataatttaagagtctttaatttgtgtcgttgtttggtttttatataatgtttttaaattatgaaagcttgtgtttctgagagaccaaagagcttttagtttggtctctgtagggtgtgaagtaacttgtatttgtagtaatccggatgggttggtatattttgcaagtgtgtctaggttggaccataatttcaatatctcttatgattttgtttcatatgtttgtaaaacagcttatcttttgagatatataatcatggttttggttcc

SEQ ID NO: 26151 - protein, 534 aa, Arabidopsis thaliana
  peptide (1)..(534): Ceres Seq. ID no. 12370726
  misc_feature (85)..(519): Pfam Name: Myo-inositol-1-phosphate synthase Pfam Description: Myo-inositol-1-phosphate synthase
  misc_feature (24)..(534): Homolog of NCBI NO: 32140125 NR Description: inositol 1-phosphate synthase [Porteresia
  misc_feature (24)..(534): Homolog of NCBI NO: 14548099 NR Description: Inositol-3-phosphate synthase
  misc_feature (24)..(534): Homolog of NCBI NO: 973313 NR Description: myo-inositol 1-phosphate synthase isozyme-2
  misc_feature (24)..(534): Homolog of NCBI NO: 14548098 NR Description: Inositol-3-phosphate synthase
  misc_feature (24)..(534): Homolog of NCBI NO: 15227169 NR Description: putative myo-inositol 1-phosphate synthase
  misc_feature (25)..(534): Homolog of NCBI NO: 7488491 NR Description: inositol-3-phosphate synthase (EC 5.5.1.4)
  misc_feature (24)..(534): Homolog of NCBI NO: 14548093 NR Description: Inositol-3-phosphate synthase
  misc_feature (24)..(534): Homolog of NCBI NO: 14548092 NR Description: Inositol-3-phosphate synthase
  misc_feature (24)..(534): Homolog of NCBI NO: 1161312 NR Description: myo-inositol-1-phosphate synthase
  misc_feature (24)..(534): Homolog of NCBI NO: 15236025 NR Description: myo-inositol-1-phosphate synthase
KTHTPKPIQIPRKTTKFSFSSAKMFIESFKVESPNVKYTENEIHSVYDYETTEVVHEKTVNGTYQWIVKPKTVKYDFKTDIRVPKLGVMLVGLGGNNGSTLTAGVIANKEGISWATKDKVQQANYFGSLTQASSIRVGSFNGEEIYAPFKSLLPMVNPDDVVFGGWDISDMNLADAMARARVLDIDLQKQLRPYMENIVPLPGIFDPDFIAANQGSRANHVIKGTKKEQVDHIIKDMREFKEKNKVDKVVVLWTANTERYSNVVVGMNDTMENLMESVDRDEAEISPSTLYAIACVLEGIPFINGSPQNTFVPGLIDMAIRNNVLIGGDDFKSGQTKMKSVLVDFLVGAGIKPTSIVSYNHLGNNDGMNLSAPQTFRSKEISKSNVVDDMVASNGILFEPGEHPDHVVVIKYVPYVADSKRAMDEYTSEIFMGGKNTIVMHNTCEDSLLAAPIILDLVLLAELSTRIQFKSEGEGKFHSFHPVATILSYLTKAPLVPPGTPVINALSKQRAMLENIMRACVGLAPENNMIMEFK

SEQ ID NO: 26152 - protein, 511 aa, Arabidopsis thaliana
  peptide (1)..(511): Ceres Seq. ID no. 12370727
  misc_feature (62)..(496): Pfam Name: Myo-inositol-1-phosphate synthase Pfam Description: Myo-inositol-1-phosphate synthase
  misc_feature (1)..(511): Homolog of NCBI NO: 32140125 NR Description: inositol 1-phosphate synthase [Porteresia
  misc_feature (1)..(511): Homolog of NCBI NO: 14548099 NR Description: Inositol-3-phosphate synthase
  misc_feature (1)..(511): Homolog of NCBI NO: 973313 NR Description: myo-inositol 1-phosphate synthase isozyme-2
  misc_feature (1)..(511): Homolog of NCBI NO: 14548098 NR Description: Inositol-3-phosphate synthase
  misc_feature (1)..(511): Homolog of NCBI NO: 15227169 NR Description: putative myo-inositol 1-phosphate synthase
  misc_feature (2)..(511): Homolog of NCBI NO: 7488491 NR Description: inositol-3-phosphate synthase (EC 5.5.1.4)
  misc_feature (1)..(511): Homolog of NCBI NO: 14548093 NR Description: Inositol-3-phosphate synthase
  misc_feature (1)..(511): Homolog of NCBI NO: 14548092 NR Description: Inositol-3-phosphate synthase
  misc_feature (1)..(511): Homolog of NCBI NO: 1161312 NR Description: myo-inositol-1-phosphate synthase
  misc_feature (1)..(511): Homolog of NCBI NO: 15236025 NR Description: myo-inositol-1-phosphate synthase
MFIESFKVESPNVKYTENEIHSVYDYETTEVVHEKTVNGTYQWIVKPKTVKYDFKTDIRVPKLGVMLVGLGGNNGSTLTAGVIANKEGISWATKDKVQQANYFGSLTQASSIRVGSFNGEEIYAPFKSLLPMVNPDDVVFGGWDISDMNLADAMARARVLDIDLQKQLRPYMENIVPLPGIFDPDFIAANQGSRANHVIKGTKKEQVDHIIKDMREFKEKNKVDKVVVLWTANTERYSNVVVGMNDTMENLMESVDRDEAEISPSTLYAIACVLEGIPFINGSPQNTFVPGLIDMAIRNNVLIGGDDFKSGQTKMKSVLVDFLVGAGIKPTSIVSYNHLGNNDGMNLSAPQTFRSKEISKSNVVDDMVASNGILFEPGEHPDHVVVIKYVPYVADSKRAMDEYTSEIFMGGKNTIVMHNTCEDSLLAAPIILDLVLLAELSTRIQFKSEGEGKFHSFHPVATILSYLTKAPLVPPGTPVINALSKQRAMLENIMRACVGLAPENNMIMEFK

SEQ ID NO: 26153 - protein, 446 aa, Arabidopsis thaliana
  peptide (1)..(446): Ceres Seq. ID no. 12370728
  misc_feature (1)..(431): Pfam Name: Myo-inositol-1-phosphate synthase Pfam Description: Myo-inositol-1-phosphate synthase
  misc_feature (1)..(446): Homolog of NCBI NO: 14548092 NR Description: Inositol-3-phosphate synthase
  misc_feature (1)..(446): Homolog of NCBI NO: 1161312 NR Description: myo-inositol-1-phosphate synthase
  misc_feature (1)..(446): Homolog of NCBI NO: 14548099 NR Description: Inositol-3-phosphate synthase
  misc_feature (1)..(446): Homolog of NCBI NO: 14548098 NR Description: Inositol-3-phosphate synthase
  misc_feature (1)..(446): Homolog of NCBI NO: 7488491 NR Description: inositol-3-phosphate synthase (EC 5.5.1.4)
  misc_feature (1)..(446): Homolog of NCBI NO: 14548093 NR Description: Inositol-3-phosphate synthase
  misc_feature (1)..(446): Homolog of NCBI NO: 15227169 NR Description: putative myo-inositol 1-phosphate synthase
  misc_feature (1)..(446): Homolog of NCBI NO: 973313 NR Description: myo-inositol 1-phosphate synthase isozyme-2
  misc_feature (1)..(446): Homolog of NCBI NO: 32140125 NR Description: inositol 1-phosphate synthase [Porteresia
  misc_feature (1)..(446): Homolog of NCBI NO: 15236025 NR Description: myo-inositol-1-phosphate synthase
MLVGLGGNNGSTLTAGVIANKEGISWATKDKVQQANYFGSLTQASSIRVGSFNGEEIYAPFKSLLPMVNPDDVVFGGWDISDMNLADAMARARVLDIDLQKQLRPYMENIVPLPGIFDPDFIAANQGSRANHVIKGTKKEQVDHIIKDMREFKEKNKVDKVVVLWTANTERYSNVVVGMNDTMENLMESVDRDEAEISPSTLYAIACVLEGIPFINGSPQNTFVPGLIDMAIRNNVLIGGDDFKSGQTKMKSVLVDFLVGAGIKPTSIVSYNHLGNNDGMNLSAPQTFRSKEISKSNVVDDMVASNGILFEPGEHPDHVVVIKYVPYVADSKRAMDEYTSEIFMGGKNTIVMHNTCEDSLLAAPIILDLVLLAELSTRIQFKSEGEGKFHSFHPVATILSYLTKAPLVPPGTPVINALSKQRAMLENIMRACVGLAPENNMIMEFK

SEQ ID NO: 26154 - DNA, 817 bp, Arabidopsis thaliana
  misc_feature (1)..(817): Ceres Seq. ID no. 12421073
  misc_feature: MA Experiment ID: 108573 Result: Up-regulated in Transcription
  misc_feature: MA Experiment 108573 PARAMETER Experiment Name: At_Drought_cDNA_P Parameter: Timepoint (hr) Value: 6
  misc_feature: MA Experiment 108573 PARAMETER Experiment Name: At_Drought_cDNA_P Parameter: Tissue Value: Aerial
  misc_feature: MA Experiment 108573 PARAMETER Experiment Name: At_Drought_cDNA_P Parameter: Treatment Value: Drought vs. No Drought
  misc_feature: MA Experiment ID: 108585 Result: Up-regulated in Transcription
  misc_feature: MA Experiment 108585 PARAMETER Experiment Name: At_5mM_NaNP_cDNA_P Parameter: Timepoint (hr) Value: 6
  misc_feature: MA Experiment 108585 PARAMETER Experiment Name: At_5mM_NaNP_cDNA_P Parameter: Tissue Value: Aerial
  misc_feature: MA Experiment 108585 PARAMETER Experiment Name: At_5mM_NaNP_cDNA_P Parameter: Treatment Value: null
  misc_feature: MA Experiment ID: 108668 Result: Up-regulated in Transcription
  misc_feature: MA Experiment 108668 PARAMETER Experiment Name: At_2mM_SA_cDNA_P Parameter: Plant Line Value: WS
  misc_feature: MA Experiment 108668 PARAMETER Experiment Name: At_2mM_SA_cDNA_P Parameter: Timepoint (hr) Value: 6
  misc_feature: MA Experiment 108668 PARAMETER Experiment Name: At_2mM_SA_cDNA_P Parameter: Treatment Value: 2mM SA vs. No Treatment
  misc_feature: MA Experiment ID: 20000182 Result: Up-regulated in Transcription
  misc_feature: MA Experiment 20000182 PARAMETER Experiment Name: At_2mM_SA_P Parameter: Age (day) Value: 14
  misc_feature: MA Experiment 20000182 PARAMETER Experiment Name: At_2mM_SA_P Parameter: Organism Value: A. thaliana
  misc_feature: MA Experiment 20000182 PARAMETER Experiment Name: At_2mM_SA_P Parameter: Plant Line Value: WS
  misc_feature: MA Experiment 20000182 PARAMETER Experiment Name: At_2mM_SA_P Parameter: Timepoint (hr) Value: 6
  misc_feature: MA Experiment 20000182 PARAMETER Experiment Name: At_2mM_SA_P Parameter: Tissue Value: Aerial
  misc_feature: MA Experiment 20000182 PARAMETER Experiment Name: At_2mM_SA_P Parameter: Treatment Value: 2mM SA vs. No Treatment
  misc_feature: MA Experiment ID: 20000184 Result: Down-regulated in Transcription
  misc_feature: MA Experiment 20000184 PARAMETER Experiment Name: At_Shoots__P Parameter: Age (day) Value: 7
  misc_feature: MA Experiment 20000184 PARAMETER Experiment Name: At_Shoots__P Parameter: Tissue Value: Shoots vs. Whole Plant
  misc_feature: MA Experiment ID: 20000185 Result: Down-regulated in Transcription
  misc_feature: MA Experiment 20000185 PARAMETER Experiment Name: At_Roots__P Parameter: Age (day) Value: 7 vs. 21
  misc_feature: MA Experiment 20000185 PARAMETER Experiment Name: At_Roots__P Parameter: Organism Value: A. thaliana
  misc_feature: MA Experiment 20000185 PARAMETER Experiment Name: At_Roots__P Parameter: Tissue Value: Roots vs. Whole Plant
  misc_feature: MA Experiment ID: 20000234 Result: Down-regulated in Transcription
  misc_feature: MA Experiment 20000234 PARAMETER Experiment Name: At_Siliques_P Parameter: Age (day) Value: 21
  misc_feature: MA Experiment 20000234 PARAMETER Experiment Name: At_Siliques_P Parameter: Organism Value: A. thaliana
  misc_feature: MA Experiment 20000234 PARAMETER Experiment Name: At_Siliques_P Parameter: Plant Line Value: WS
  misc_feature: MA Experiment 20000234 PARAMETER Experiment Name: At_Siliques_P Parameter: Tissue Value: Less Than 5mm Siliques vs. Whole Plant
  misc_feature: MA Experiment ID: 20000264 Result: Down-regulated in Transcription
  misc_feature: MA Experiment 20000264 PARAMETER Experiment Name: At_Open_Flower_P Parameter: Age (day) Value: 21
  misc_feature: MA Experiment 20000264 PARAMETER Experiment Name: At_Open_Flower_P Parameter: Plant Line Value: WS
  misc_feature: MA Experiment 20000264 PARAMETER Experiment Name: At_Open_Flower_P Parameter: Tissue Value: Open Flower vs. Whole Plant
  misc_feature: MA Experiment ID: 20000265 Result: Down-regulated in Transcription
  misc_feature: MA Experiment 20000265 PARAMETER Experiment Name: At_Open_Flower_P Parameter: Age (day) Value: 21
  misc_feature: MA Experiment 20000265 PARAMETER Experiment Name: At_Open_Flower_P Parameter: Plant Line Value: WS
  misc_feature: MA Experiment 20000265 PARAMETER Experiment Name: At_Open_Flower_P Parameter: Tissue Value: Closed Flower vs. Whole Plant
  misc_feature: MA Experiment ID: 20000286 Result: Down-regulated in Transcription
  misc_feature: MA Experiment 20000286 PARAMETER Experiment Name: At_Open_Flower_P Parameter: Age (day) Value: 21
  misc_feature: MA Experiment 20000286 PARAMETER Experiment Name: At_Open_Flower_P Parameter: Plant Line Value: WS
  misc_feature: MA Experiment 20000286 PARAMETER Experiment Name: At_Open_Flower_P Parameter: Tissue Value: Half Open vs. Whole Plant
  misc_feature: MA Experiment ID: 20000438 Result: Down-regulated in Transcription
  misc_feature: MA Experiment 20000438 PARAMETER Experiment Name: At_Shoots__P Parameter: Age (day) Value: 14
  misc_feature: MA Experiment 20000438 PARAMETER Experiment Name: At_Shoots__P Parameter: Tissue Value: Shoots vs. Whole Plant
  misc_feature: MA Experiment ID: 20000439 Result: Down-regulated in Transcription
  misc_feature: MA Experiment 20000439 PARAMETER Experiment Name: At_Roots__P Parameter: Age (day) Value: 14 vs. 21
  misc_feature: MA Experiment 20000439 PARAMETER Experiment Name: At_Roots__P Parameter: Organism Value: A. thaliana
  misc_feature: MA Experiment 20000439 PARAMETER Experiment Name: At_Roots__P Parameter: Tissue Value: Roots vs. Whole Plant
  misc_feature: MA Experiment ID: 20000495 Result: Down-regulated in Transcription
  misc_feature: MA Experiment 20000495 PARAMETER Experiment Name: At_Guard_Cells_P Parameter: Harvest Date Value: 8/2/2002
  misc_feature: MA Experiment 20000495 PARAMETER Experiment Name: At_Guard_Cells_P Parameter: Organism Value: A. thaliana
  misc_feature: MA Experiment 20000495 PARAMETER Experiment Name: At_Guard_Cells_P Parameter: Tissue Value: Guard Cells vs. Leaves
  misc_feature: MA Experiment ID: 20000794 Result: Down-regulated in Transcription
  misc_feature: MA Experiment 20000794 PARAMETER Experiment Name: At_Petals_P Parameter: Age (day) Value: 23-25 days
  misc_feature: MA Experiment 20000794 PARAMETER Experiment Name: At_Petals_P Parameter: Plant Line Value: WS
  misc_feature: MA Experiment 20000794 PARAMETER Experiment Name: At_Petals_P Parameter: Tissue Value: Petals vs. Whole plant
  misc_feature: MA Experiment ID: 20001247 Result: Up-regulated in Transcription
  misc_feature: MA Experiment 20001247 PARAMETER Experiment Name: At_Far-red-induction_P Parameter: Age (day) Value: 7
  misc_feature: MA Experiment 20001247 PARAMETER Experiment Name: At_Far-red-induction_P Parameter: Light Value: Far-red vs. White
  misc_feature: MA Experiment 20001247 PARAMETER Experiment Name: At_Far-red-induction_P Parameter: Organism Value: A. thaliana
  misc_feature: MA Experiment 20001247 PARAMETER Experiment Name: At_Far-red-induction_P Parameter: Plant Line Value: Columbia
  misc_feature: MA Experiment 20001247 PARAMETER Experiment Name: At_Far-red-induction_P Parameter: Timepoint (hr) Value: 1
  misc_feature: MA Experiment 20001247 PARAMETER Experiment Name: At_Far-red-induction_P Parameter: Tissue Value: Whole Plant
  misc_feature: MA Experiment ID: 20001451 Result: Down-regulated in Transcription
  misc_feature: MA Experiment 20001451 PARAMETER Experiment Name: At_Far-red-induction_P Parameter: Age (day) Value: 7
  misc_feature: MA Experiment 20001451 PARAMETER Experiment Name: At_Far-red-induction_P Parameter: Light Value: Far-red vs. White
  misc_feature: MA Experiment 20001451 PARAMETER Experiment Name: At_Far-red-induction_P Parameter: Organism Value: A. thaliana
  misc_feature: MA Experiment 20001451 PARAMETER Experiment Name: At_Far-red-induction_P Parameter: Plant Line Value: Columbia
  misc_feature: MA Experiment 20001451 PARAMETER Experiment Name: At_Far-red-induction_P Parameter: Timepoint (hr) Value: 24
  misc_feature: MA Experiment 20001451 PARAMETER Experiment Name: At_Far-red-induction_P Parameter: Tissue Value: Whole Plant
aactctatagagcttccgaagaacgacgctgcgacgagagagactaatagcagaggaggaagacgaagacgacaatgaatgcgccaccggagaacgaagtttgttcgatatgccatggccacttcaacgctccttgccaatccaattgctctcactggttctgcgggaactgcattatgctagtttggaggcatggatctacattacggccatgcaaatgtcccttgtgtcgtcgtccgataagtttgttagttccttctgaggaaacagtgagaagtcggaatgatgctacagtttctgaggttcttcatgatgttgaaacttacaaccgtgtctttggtggacagtcaagtggccttattcagaggatgcaagaccttcccttcttactccgaaggttgttgcgagaaatgatggatccacaaagaacgcttccactcgtcatcagagctcgtgtttatattgcgttgatactcagtgcgatttacataatcagcccaatagatatcattccggaaggagtcttgggggttatcggtttactagatgatcttctcatagccctgatttgtttcctccatgtcgctgctctctaccgatccgttctctattcccgtcatggtggttcgtgaacctctttgaagttttcacatcattaatcatcacagttgaagtaccatggtttacttgtttgaccctatctttttgactgttagacttaggaaacttgatttggatgataaaacgaaatggtcctttcctttattactatttcagtaacagatgcattatattggtgaaggaattgaatttctct

SEQ ID NO: 26155 - protein, 185 aa, Arabidopsis thaliana
  peptide (1)..(185): Ceres Seq. ID no. 12421074
  misc_feature (10)..(52): Pfam Name: Zinc finger, C3HC4 type (RING finger) Pfam Description: Zinc finger, C3HC4 type (RING finger)
  misc_feature (10)..(184): Homolog of NCBI NO: 33604158 NR Description: Unknown (protein for MGC:65779) [Danio rerio]
  misc_feature (1)..(175): Homolog of NCBI NO: 26453304 NR Description: unknown protein [Arabidopsis thaliana]
  misc_feature (1)..(175): Homolog of NCBI NO: 18418331 NR Description: Expressed protein
  misc_feature (62)..(184): Homolog of NCBI NO: 25406151 NR Description: unknown protein T9N14.2 [imported] - Arabidopsis
  misc_feature (1)..(175): Homolog of NCBI NO: 21553438 NR Description: unknown [Arabidopsis thaliana]
  misc_feature (4)..(184): Homolog of NCBI NO: 28376707 NR Description: unknown protein [Oryza sativa (japonica
  misc_feature (58)..(185): Homolog of NCBI NO: 25518502 NR Description: hypothetical protein F12K8.14 - Arabidopsis
  misc_feature (1)..(185): Homolog of NCBI NO: 18410010 NR Description: Expressed protein
  misc_feature (1)..(185): Homolog of NCBI NO: 18395127 NR Description: expressed protein
  misc_feature (1)..(185): Homolog of NCBI NO: 21554064 NR Description: unknown [Arabidopsis thaliana]
MNAPPENEVCSICHGHFNAPCQSNCSHWFCGNCIMLVWRHGSTLRPCKCPLCRRPISLLVPSEETVRSRNDATVSEVLHDVETYNRVFGGQSSGLIQRMQDLPFLLRRLLREMMDPQRTLPLVIRARVYIALILSAIYIISPIDIIPEGVLGVIGLLDDLLIALICFLHVAALYRSVLYSRHGGS

SEQ ID NO: 26156 - protein, 151 aa, Arabidopsis thaliana
  peptide (1)..(151): Ceres Seq. ID no. 12421075
  misc_feature (1)..(150): Homolog of NCBI NO: 33604158 NR Description: Unknown (protein for MGC:65779) [Danio rerio]
  misc_feature (1)..(141): Homolog of NCBI NO: 26453304 NR Description: unknown protein [Arabidopsis thaliana]
  misc_feature (1)..(141): Homolog of NCBI NO: 18418331 NR Description: Expressed protein
  misc_feature (28)..(150): Homolog of NCBI NO: 25406151 NR Description: unknown protein T9N14.2 [imported] - Arabidopsis
  misc_feature (1)..(141): Homolog of NCBI NO: 21553438 NR Description: unknown [Arabidopsis thaliana]
  misc_feature (1)..(150): Homolog of NCBI NO: 28376707 NR Description: unknown protein [Oryza sativa (japonica
  misc_feature (24)..(151): Homolog of NCBI NO: 25518502 NR Description: hypothetical protein F12K8.14 - Arabidopsis
  misc_feature (1)..(151): Homolog of NCBI NO: 18410010 NR Description: Expressed protein
  misc_feature (1)..(151): Homolog of NCBI NO: 18395127 NR Description: expressed protein
  misc_feature (1)..(151): Homolog of NCBI NO: 21554064 NR Description: unknown [Arabidopsis thaliana]
MLVWRHGSTLRPCKCPLCRRPISLLVPSEETVRSRNDATVSEVLHDVETYNRVFGGQSSGLIQRMQDLPFLLRRLLREMMDPQRTLPLVIRARVYIALILSAIYIISPIDIIPEGVLGVIGLLDDLLIALICFLHVAALYRSVLYSRHGGS

SEQ ID NO: 26157 - DNA, 1256 bp, Arabidopsis thaliana
  misc_feature (1)..(1256): Ceres Seq. ID no. 12422643
  misc_feature: MA Experiment ID: 108464 Result: Up-regulated in Transcription
  misc_feature: MA Experiment 108464 PARAMETER Experiment Name: At_Germinating_Seeds_cDNA_P Parameter: Age (day) Value: 4 vs. 0
  misc_feature: MA Experiment 108464 PARAMETER Experiment Name: At_Germinating_Seeds_cDNA_P Parameter: Tissue Value: Germinating Seeds
  misc_feature: MA Experiment ID: 20000113 Result: Down-regulated in Transcription
  misc_feature: MA Experiment 20000113 PARAMETER Experiment Name: At_42deg_Heat_cDNA_P Parameter: Temperature (deg C) Value: 42 vs. 22
  misc_feature: MA Experiment 20000113 PARAMETER Experiment Name: At_42deg_Heat_cDNA_P Parameter: Timepoint (hr) Value: 8
  misc_feature: MA Experiment 20000113 PARAMETER Experiment Name: At_42deg_Heat_cDNA_P Parameter: Tissue Value: Aerial
  misc_feature: MA Experiment ID: 20000173 Result: Down-regulated in Transcription
  misc_feature: MA Experiment 20000173 PARAMETER Experiment Name: At_42deg_Heat_P Parameter: Age (day) Value: 14
  misc_feature: MA Experiment 20000173 PARAMETER Experiment Name: At_42deg_Heat_P Parameter: Organism Value: A. thaliana
  misc_feature: MA Experiment 20000173 PARAMETER Experiment Name: At_42deg_Heat_P Parameter: Plant Line Value: WS
  misc_feature: MA Experiment 20000173 PARAMETER Experiment Name: At_42deg_Heat_P Parameter: Temperature (deg C) Value: 42 vs. 22
  misc_feature: MA Experiment 20000173 PARAMETER Experiment Name: At_42deg_Heat_P Parameter: Timepoint (hr) Value: 6
  misc_feature: MA Experiment 20000173 PARAMETER Experiment Name: At_42deg_Heat_P Parameter: Tissue Value: Aerial
  misc_feature: MA Experiment ID: 20000264 Result: Up-regulated in Transcription
  misc_feature: MA Experiment 20000264 PARAMETER Experiment Name: At_Open_Flower_P Parameter: Age (day) Value: 21
  misc_feature: MA Experiment 20000264 PARAMETER Experiment Name: At_Open_Flower_P Parameter: Plant Line Value: WS
  misc_feature: MA Experiment 20000264 PARAMETER Experiment Name: At_Open_Flower_P Parameter: Tissue Value: Open Flower vs. Whole Plant
  misc_feature: MA Experiment ID: 20000794 Result: Up-regulated in Transcription
  misc_feature: MA Experiment 20000794 PARAMETER Experiment Name: At_Petals_P Parameter: Age (day) Value: 23-25 days
  misc_feature: MA Experiment 20000794 PARAMETER Experiment Name: At_Petals_P Parameter: Plant Line Value: WS
  misc_feature: MA Experiment 20000794 PARAMETER Experiment Name: At_Petals_P Parameter: Tissue Value: Petals vs. Whole plant
  misc_feature: MA Experiment ID: 20001247 Result: Up-regulated in Transcription
  misc_feature: MA Experiment 20001247 PARAMETER Experiment Name: At_Far-red-induction_P Parameter: Age (day) Value: 7
  misc_feature: MA Experiment 20001247 PARAMETER Experiment Name: At_Far-red-induction_P Parameter: Light Value: Far-red vs. White
  misc_feature: MA Experiment 20001247 PARAMETER Experiment Name: At_Far-red-induction_P Parameter: Organism Value: A. thaliana
  misc_feature: MA Experiment 20001247 PARAMETER Experiment Name: At_Far-red-induction_P Parameter: Plant Line Value: Columbia
  misc_feature: MA Experiment 20001247 PARAMETER Experiment Name: At_Far-red-induction_P Parameter: Timepoint (hr) Value: 1
  misc_feature: MA Experiment 20001247 PARAMETER Experiment Name: At_Far-red-induction_P Parameter: Tissue Value: Whole Plant
aaaagattctttcttctaaacccattcgctctctccgatcaacacaacatttgatctaacggtttaattttctcgagaaaccgaaggaaaacaaacagaggtgcataacgattctgacggaaacttttgagatattttttttagagccaaaaggattcactttttttggttttatcttcgcatcgatctatgacgtacagcaatggcgtcgatgggacggtgcctgagctgaaattgagagtcgaagaagattccgataatggtgattatctgaaattgagaggaggatcaaatgaagaagatgaaggatcatcggcggaatcatcgagatgtccgataggatcggttacttctgtctggttctgggtgaaattgatctccttggtcgtttgtttgggttcattggcctttgttatcatcaaatgggttggtcccttttttattgaaaaggagctgattccatttataaattgggtgagaaacacattcagcataccggttctcggtcttctactatttgcctcagtggcattgtttccaagcattcttcttccttcttccccttccatgtggatggctggtcttacatttggttatggaaaagggtttcttctgattttatcagctgcttccatcggtgttactcttcctttcttaattggacatctcttcctccacaagatgcaagaatggttgaagaaataccctaaaaaagcagccatacttagagctgctggtgaaggaacctggtttcatcagtttcaagcagtcacactaatccgtgtctctccatttccttacatcatttacaactactgcgctttagcgactggagttcattatggtccttatatcttaggctctcttgttggaatggttcctgagatctttgtctcaatttacacgggtataatgctaaggacactagcagttgcatcagacacgagacacacactttcggttgtggagatagtcgtgaatgttcttggcttctgtgtaactgcgagcgcgactatagtctgcacaatctatgcgaagaagaagctaagtgcgatgcaatcagaggacgtagagacattacaaaatccaatactttattaactcttttcaccatgaccacaacataccatcatctaacacgatcttgaaattgataatatataatgttttttttttttttgttattcttattcatttgaaaatgaatatttatgtctttttctcttgtatatatgatatgtatcaattgaattttg

SEQ ID NO: 26158 - protein, 303 aa, Arabidopsis thaliana
  peptide (1)..(303): Ceres Seq. ID no. 12422644
  misc_feature (105)..(247): Pfam Name: DedA family Pfam Description: DedA family
  misc_feature (165)..(293): Homolog of NCBI NO: 25410981 NR Description: hypothetical protein At2g02370 [imported] -
  misc_feature (139)..(256): Homolog of NCBI NO: 8778630 NR Description: F5O11.19 [Arabidopsis thaliana]
  misc_feature (141)..(298): Homolog of NCBI NO: 7486891 NR Description: hypothetical protein T12H17.240 - Arabidopsis
  misc_feature (59)..(293): Homolog of NCBI NO: 34913316 NR Description: P0519E12.36 [Oryza sativa (japonica
  misc_feature (39)..(293): Homolog of NCBI NO: 18395356 NR Description: expressed protein
  misc_feature (1)..(292): Homolog of NCBI NO: 15234386 NR Description: putative protein
  misc_feature (11)..(298): Homolog of NCBI NO: 30685958 NR Description: expressed protein [Arabidopsis thaliana]
  misc_feature (233)..(303): Homolog of NCBI NO: 8778630 NR Description: F5O11.19 [Arabidopsis thaliana]
  misc_feature (1)..(166): Homolog of NCBI NO: 8778630 NR Description: F5O11.19 [Arabidopsis thaliana]
  misc_feature (1)..(303): Homolog of NCBI NO: 15221330 NR Description: hypothetical protein; protein id: At1g12450.1
MTYSNGVDGTVPELKLRVEEDSDNGDYLKLRGGSNEEDEGSSAESSRCPIGSVTSVWFWVKLISLVVCLGSLAFVIIKWVGPFFIEKELIPFINWVRNTFSIPVLGLLLFASVALFPSILLPSSPSMWMAGLTFGYGKGFLLILSAASIGVTLPFLIGHLFLHKMQEWLKKYPKKAAILRAAGEGTWFHQFQAVTLIRVSPFPYIIYNYCALATGVHYGPYILGSLVGMVPEIFVSIYTGIMLRTLAVASDTRHTLSVVEIVVNVLGFCVTASATIVCTIYAKKKLSAMQSEDVETLQNPILY

SEQ ID NO: 26159 - protein, 177 aa, Arabidopsis thaliana
  peptide (1)..(177): Ceres Seq. ID no. 12422645
  misc_feature (1)..(121): Pfam Name: DedA family Pfam Description: DedA family
  misc_feature (39)..(167): Homolog of NCBI NO: 25410981 NR Description: hypothetical protein At2g02370 [imported] -
  misc_feature (13)..(130): Homolog of NCBI NO: 8778630 NR Description: F5O11.19 [Arabidopsis thaliana]
  misc_feature (15)..(172): Homolog of NCBI NO: 7486891 NR Description: hypothetical protein T12H17.240 - Arabidopsis
  misc_feature (1)..(167): Homolog of NCBI NO: 34913316 NR Description: P0519E12.36 [Oryza sativa (japonica
  misc_feature (1)..(167): Homolog of NCBI NO: 18395356 NR Description: expressed protein
  misc_feature (1)..(166): Homolog of NCBI NO: 15234386 NR Description: putative protein
  misc_feature (1)..(172): Homolog of NCBI NO: 30685958 NR Description: expressed protein [Arabidopsis thaliana]
  misc_feature (107)..(177): Homolog of NCBI NO: 8778630 NR Description: F5O11.19 [Arabidopsis thaliana]
  misc_feature (1)..(40): Homolog of NCBI NO: 8778630 NR Description: F5O11.19 [Arabidopsis thaliana]
  misc_feature (1)..(177): Homolog of NCBI NO: 15221330 NR Description: hypothetical protein; protein id: At1g12450.1
MWMAGLTFGYGKGFLLILSAASIGVTLPFLIGHLFLHKMQEWLKKYPKKAAILRAAGEGTWFHQFQAVTLIRVSPFPYIIYNYCALATGVHYGPYILGSLVGMVPEIFVSIYTGIMLRTLAVASDTRHTLSVVEIVVNVLGFCVTASATIVCTIYAKKKLSAMQSEDVETLQNPILY

SEQ ID NO: 26160 - protein, 175 aa, Arabidopsis thaliana
  peptide (1)..(175): Ceres Seq. ID no. 12422646
  misc_feature (1)..(119): Pfam Name: DedA family Pfam Description: DedA family
  misc_feature (37)..(165): Homolog of NCBI NO: 25410981 NR Description: hypothetical protein At2g02370 [imported] -
  misc_feature (11)..(128): Homolog of NCBI NO: 8778630 NR Description: F5O11.19 [Arabidopsis thaliana]
  misc_feature (13)..(170): Homolog of NCBI NO: 7486891 NR Description: hypothetical protein T12H17.240 - Arabidopsis
  misc_feature (1)..(165): Homolog of NCBI NO: 34913316 NR Description: P0519E12.36 [Oryza sativa (japonica
  misc_feature (1)..(165): Homolog of NCBI NO: 18395356 NR Description: expressed protein
  misc_feature (1)..(164): Homolog of NCBI NO: 15234386 NR Description: putative protein
  misc_feature (1)..(170): Homolog of NCBI NO: 30685958 NR Description: expressed protein [Arabidopsis thaliana]
  misc_feature (105)..(175): Homolog of NCBI NO: 8778630 NR Description: F5O11.19 [Arabidopsis thaliana]
  misc_feature (1)..(38): Homolog of NCBI NO: 8778630 NR Description: F5O11.19 [Arabidopsis thaliana]
  misc_feature (1)..(175): Homolog of NCBI NO: 15221330 NR Description: hypothetical protein; protein id: At1g12450.1
MAGLTFGYGKGFLLILSAASIGVTLPFLIGHLFLHKMQEWLKKYPKKAAILRAAGEGTWFHQFQAVTLIRVSPFPYIIYNYCALATGVHYGPYILGSLVGMVPEIFVSIYTGIMLRTLAVASDTRHTLSVVEIVVNVLGFCVTASATIVCTIYAKKKLSAMQSEDVETLQNPILY

SEQ ID NO: 26161 - DNA, 652 bp, Arabidopsis thaliana
  misc_feature (1)..(652): Ceres Seq. ID no. 12331385
  misc_feature: MA Experiment ID: 108434 Result: Up-regulated in Transcription
  misc_feature: MA Experiment 108434 PARAMETER Experiment Name: At_Root_Tips_cDNA_P Parameter: Tissue Value: Root Tips
  misc_feature: MA Experiment ID: 108461 Result: Up-regulated in Transcription
  misc_feature: MA Experiment 108461 PARAMETER Experiment Name: At_Germinating_Seeds_cDNA_P Parameter: Age (day) Value: 1 vs. 0
  misc_feature: MA Experiment 108461 PARAMETER Experiment Name: At_Germinating_Seeds_cDNA_P Parameter: Tissue Value: Germinating Seeds
  misc_feature: MA Experiment ID: 108462 Result: Up-regulated in Transcription
  misc_feature: MA Experiment 108462 PARAMETER Experiment Name: At_Germinating_Seeds_cDNA_P Parameter: Age (day) Value: 2 vs. 0
  misc_feature: MA Experiment 108462 PARAMETER Experiment Name: At_Germinating_Seeds_cDNA_P Parameter: Tissue Value: Germinating Seeds
  misc_feature: MA Experiment ID: 108464 Result: Up-regulated in Transcription
  misc_feature: MA Experiment 108464 PARAMETER Experiment Name: At_Germinating_Seeds_cDNA_P Parameter: Age (day) Value: 4 vs. 0
  misc_feature: MA Experiment 108464 PARAMETER Experiment Name: At_Germinating_Seeds_cDNA_P Parameter: Tissue Value: Germinating Seeds
  misc_feature: MA Experiment ID: 108474 Result: Down-regulated in Transcription
  misc_feature: MA Experiment 108474 PARAMETER Experiment Name: At_Drought_Flowers_cDNA_P Parameter: Timepoint (hr) Value: null
  misc_feature: MA Experiment 108474 PARAMETER Experiment Name: At_Drought_Flowers_cDNA_P Parameter: Treatment Value: Drought vs. No Drought
  misc_feature: MA Experiment ID: 108569 Result: Down-regulated in Transcription
  misc_feature: MA Experiment 108569 PARAMETER Experiment Name: At_0.001%_MeJA__cDNA_P Parameter: Timepoint (hr) Value: 6
  misc_feature: MA Experiment 108569 PARAMETER Experiment Name: At_0.001%_MeJA__cDNA_P Parameter: Tissue Value: Aerial
  misc_feature: MA Experiment 108569 PARAMETER Experiment Name: At_0.001%_MeJA__cDNA_P Parameter: Treatment Value: 0.001% MeJA vs. No Treatment
  misc_feature: MA Experiment ID: 108573 Result: Down-regulated in Transcription
  misc_feature: MA Experiment 108573 PARAMETER Experiment Name: At_Drought_cDNA_P Parameter: Timepoint (hr) Value: 6
  misc_feature: MA Experiment 108573 PARAMETER Experiment Name: At_Drought_cDNA_P Parameter: Tissue Value: Aerial
  misc_feature: MA Experiment 108573 PARAMETER Experiment Name: At_Drought_cDNA_P Parameter: Treatment Value: Drought vs. No Drought
  misc_feature: MA Experiment ID: 108577 Result: Down-regulated in Transcription
  misc_feature: MA Experiment 108577 PARAMETER Experiment Name: At_42deg_Heat_cDNA_P Parameter: Temperature (deg C) Value: 42 vs. 22
  misc_feature: MA Experiment 108577 PARAMETER Experiment Name: At_42deg_Heat_cDNA_P Parameter: Timepoint (hr) Value: 6
  misc_feature: MA Experiment 108577 PARAMETER Experiment Name: At_42deg_Heat_cDNA_P Parameter: Tissue Value: Aerial
  misc_feature: MA Experiment ID: 108668 Result: Down-regulated in Transcription
  misc_feature: MA Experiment 108668 PARAMETER Experiment Name: At_2mM_SA_cDNA_P Parameter: Plant Line Value: WS
  misc_feature: MA Experiment 108668 PARAMETER Experiment Name: At_2mM_SA_cDNA_P Parameter: Timepoint (hr) Value: 6
  misc_feature: MA Experiment 108668 PARAMETER Experiment Name: At_2mM_SA_cDNA_P Parameter: Treatment Value: 2mM SA vs. No Treatment
  misc_feature: MA Experiment ID: 20000113 Result: Down-regulated in Transcription
  misc_feature: MA Experiment 20000113 PARAMETER Experiment Name: At_42deg_Heat_cDNA_P Parameter: Temperature (deg C) Value: 42 vs. 22
  misc_feature: MA Experiment 20000113 PARAMETER Experiment Name: At_42deg_Heat_cDNA_P Parameter: Timepoint (hr) Value: 8
  misc_feature: MA Experiment 20000113 PARAMETER Experiment Name: At_42deg_Heat_cDNA_P Parameter: Tissue Value: Aerial
  misc_feature: MA Experiment ID: 20000117 Result: Down-regulated in Transcription
  misc_feature: MA Experiment 20000117 PARAMETER Experiment Name: At_100uM_ABA_Mutants_cDNA_P Parameter: Plant Line Value: Columbia
  misc_feature: MA Experiment 20000117 PARAMETER Experiment Name: At_100uM_ABA_Mutants_cDNA_P Parameter: Timepoint (hr) Value: 6
  misc_feature: MA Experiment 20000117 PARAMETER Experiment Name: At_100uM_ABA_Mutants_cDNA_P Parameter: Tissue Value: Aerial
  misc_feature: MA Experiment 20000117 PARAMETER Experiment Name: At_100uM_ABA_Mutants_cDNA_P Parameter: Treatment Value: 100uM ABA vs. No Treatment
  misc_feature: MA Experiment ID: 20000169 Result: Down-regulated in Transcription
  misc_feature: MA Experiment 20000169 PARAMETER Experiment Name: At_100uM_ABA_P Parameter: Age (day) Value: 14
  misc_feature: MA Experiment 20000169 PARAMETER Experiment Name: At_100uM_ABA_P Parameter: Organism Value: A. thaliana
  misc_feature: MA Experiment 20000169 PARAMETER Experiment Name: At_100uM_ABA_P Parameter: Plant Line Value: WS
  misc_feature: MA Experiment 20000169 PARAMETER Experiment Name: At_100uM_ABA_P Parameter: Timepoint (hr) Value: 6
  misc_feature: MA Experiment 20000169 PARAMETER Experiment Name: At_100uM_ABA_P Parameter: Tissue Value: Aerial
  misc_feature: MA Experiment 20000169 PARAMETER Experiment Name: At_100uM_ABA_P Parameter: Treatment Value: 100uM ABA vs. No Treatment
  misc_feature: MA Experiment ID: 20000180 Result: Up-regulated in Transcription
  misc_feature: MA Experiment 20000180 PARAMETER Experiment Name: At_Germinating_Seeds_P Parameter: Age (hr) Value: 24 vs. 0
  misc_feature: MA Experiment 20000180 PARAMETER Experiment Name: At_Germinating_Seeds_P Parameter: Tissue Value: Germinating Seeds
  misc_feature: MA Experiment ID: 20000182 Result: Down-regulated in Transcription
  misc_feature: MA Experiment 20000182 PARAMETER Experiment Name: At_2mM_SA_P Parameter: Age (day) Value: 14
  misc_feature: MA Experiment 20000182 PARAMETER Experiment Name: At_2mM_SA_P Parameter: Organism Value: A. thaliana
  misc_feature: MA Experiment 20000182 PARAMETER Experiment Name: At_2mM_SA_P Parameter: Plant Line Value: WS
  misc_feature: MA Experiment 20000182 PARAMETER Experiment Name: At_2mM_SA_P Parameter: Timepoint (hr) Value: 6
  misc_feature: MA Experiment 20000182 PARAMETER Experiment Name: At_2mM_SA_P Parameter: Tissue Value: Aerial
  misc_feature: MA Experiment 20000182 PARAMETER Experiment Name: At_2mM_SA_P Parameter: Treatment Value: 2mM SA vs. No Treatment
  misc_feature: MA Experiment ID: 20000184 Result: Down-regulated in Transcription
  misc_feature: MA Experiment 20000184 PARAMETER Experiment Name: At_Shoots__P Parameter: Age (day) Value: 7
  misc_feature: MA Experiment 20000184 PARAMETER Experiment Name: At_Shoots__P Parameter: Tissue Value: Shoots vs. Whole Plant
  misc_feature: MA Experiment ID: 20000214 Result: Down-regulated in Transcription
  misc_feature: MA Experiment 20000214 PARAMETER Experiment Name: At_4deg_Cold_P Parameter: Timepoint (hr) Value: 6
  misc_feature: MA Experiment ID: 20000227 Result: Up-regulated in Transcription
  misc_feature: MA Experiment 20000227 PARAMETER Experiment Name: At_Root-Tips-vs-Tops_P Parameter: Tissue Value: Root Tips vs. Root Tops
  misc_feature: MA Experiment ID: 20000234 Result: Down-regulated in Transcription
  misc_feature: MA Experiment 20000234 PARAMETER Experiment Name: At_Siliques_P Parameter: Age (day) Value: 21
  misc_feature: MA Experiment 20000234 PARAMETER Experiment Name: At_Siliques_P Parameter: Organism Value: A. thaliana
  misc_feature: MA Experiment 20000234 PARAMETER Experiment Name: At_Siliques_P Parameter: Plant Line Value: WS
  misc_feature: MA Experiment 20000234 PARAMETER Experiment Name: At_Siliques_P Parameter: Tissue Value: Less Than 5mm Siliques vs. Whole Plant
  misc_feature: MA Experiment ID: 20000437 Result: Down-regulated in Transcription
  misc_feature: MA Experiment 20000437 PARAMETER Experiment Name: At_Drought_P Parameter: Age (day) Value: 8
  misc_feature: MA Experiment 20000437 PARAMETER Experiment Name: At_Drought_P Parameter: Organism Value: A. thaliana
  misc_feature: MA Experiment 20000437 PARAMETER Experiment Name: At_Drought_P Parameter: Plant Line Value: WS
  misc_feature: MA Experiment 20000437 PARAMETER Experiment Name: At_Drought_P Parameter: Timepoint (hr) Value: 24
  misc_feature: MA Experiment 20000437 PARAMETER Experiment Name: At_Drought_P Parameter: Tissue Value: Whole Plant
  misc_feature: MA Experiment 20000437 PARAMETER Experiment Name: At_Drought_P Parameter: Treatment Value: Drought vs. No Drought
  misc_feature: MA Experiment ID: 20000438 Result: Down-regulated in Transcription
  misc_feature: MA Experiment 20000438 PARAMETER Experiment Name: At_Shoots__P Parameter: Age (day) Value: 14
  misc_feature: MA Experiment 20000438 PARAMETER Experiment Name: At_Shoots__P Parameter: Tissue Value: Shoots vs. Whole Plant
  misc_feature: MA Experiment ID: 20000495 Result: Down-regulated in Transcription
  misc_feature: MA Experiment 20000495 PARAMETER Experiment Name: At_Guard_Cells_P Parameter: Harvest Date Value: 8/2/2002
  misc_feature: MA Experiment 20000495 PARAMETER Experiment Name: At_Guard_Cells_P Parameter: Organism Value: A. thaliana
  misc_feature: MA Experiment 20000495 PARAMETER Experiment Name: At_Guard_Cells_P Parameter: Tissue Value: Guard Cells vs. Leaves
  misc_feature: MA Experiment ID: 20000527 Result: Down-regulated in Transcription
  misc_feature: MA Experiment 20000527 PARAMETER Experiment Name: At_10percent_PEG_P Parameter: Age (day) Value: 20
  misc_feature: MA Experiment 20000527 PARAMETER Experiment Name: At_10percent_PEG_P Parameter: Organism Value: A. thaliana
  misc_feature: MA Experiment 20000527 PARAMETER Experiment Name: At_10percent_PEG_P Parameter: Plant Line Value: WS
  misc_feature: MA Experiment 20000527 PARAMETER Experiment Name: At_10percent_PEG_P Parameter: Timepoint (day) Value: 20
  misc_feature: MA Experiment 20000527 PARAMETER Experiment Name: At_10percent_PEG_P Parameter: Tissue Value: Whole Plant
  misc_feature: MA Experiment 20000527 PARAMETER Experiment Name: At_10percent_PEG_P Parameter: Treatment Value: 10percent PEG vs. No Treatment
  misc_feature: MA Experiment ID: 20001247 Result: Up-regulated in Transcription
  misc_feature: MA Experiment 20001247 PARAMETER Experiment Name: At_Far-red-induction_P Parameter: Age (day) Value: 7
  misc_feature: MA Experiment 20001247 PARAMETER Experiment Name: At_Far-red-induction_P Parameter: Light Value: Far-red vs. White
  misc_feature: MA Experiment 20001247 PARAMETER Experiment Name: At_Far-red-induction_P Parameter: Organism Value: A. thaliana
  misc_feature: MA Experiment 20001247 PARAMETER Experiment Name: At_Far-red-induction_P Parameter: Plant Line Value: Columbia
  misc_feature: MA Experiment 20001247 PARAMETER Experiment Name: At_Far-red-induction_P Parameter: Timepoint (hr) Value: 1
  misc_feature: MA Experiment 20001247 PARAMETER Experiment Name: At_Far-red-induction_P Parameter: Tissue Value: Whole Plant
  misc_feature: MA Experiment ID: 20001248 Result: Up-regulated in Transcription
  misc_feature: MA Experiment 20001248 PARAMETER Experiment Name: At_Far-red-induction_P Parameter: Age (day) Value: 7
  misc_feature: MA Experiment 20001248 PARAMETER Experiment Name: At_Far-red-induction_P Parameter: Light Value: Far-red vs. White
  misc_feature: MA Experiment 20001248 PARAMETER Experiment Name: At_Far-red-induction_P Parameter: Organism Value: A. thaliana
  misc_feature: MA Experiment 20001248 PARAMETER Experiment Name: At_Far-red-induction_P Parameter: Plant Line Value: Columbia
  misc_feature: MA Experiment 20001248 PARAMETER Experiment Name: At_Far-red-induction_P Parameter: Timepoint (hr) Value: 4
  misc_feature: MA Experiment 20001248 PARAMETER Experiment Name: At_Far-red-induction_P Parameter: Tissue Value: Whole Plant
  misc_feature: MA Experiment ID: 20001450 Result: Up-regulated in Transcription
  misc_feature: MA Experiment 20001450 PARAMETER Experiment Name: At_Far-red-induction_P Parameter: Age (day) Value: 7
  misc_feature: MA Experiment 20001450 PARAMETER Experiment Name: At_Far-red-induction_P Parameter: Light Value: Far-red vs. White
  misc_feature: MA Experiment 20001450 PARAMETER Experiment Name: At_Far-red-induction_P Parameter: Organism Value: A. thaliana
  misc_feature: MA Experiment 20001450 PARAMETER Experiment Name: At_Far-red-induction_P Parameter: Plant Line Value: Columbia
  misc_feature: MA Experiment 20001450 PARAMETER Experiment Name: At_Far-red-induction_P Parameter: Timepoint (hr) Value: 8
  misc_feature: MA Experiment 20001450 PARAMETER Experiment Name: At_Far-red-induction_P Parameter: Tissue Value: Whole Plant
  misc_feature: MA Experiment ID: 20001451 Result: Up-regulated in Transcription
  misc_feature: MA Experiment 20001451 PARAMETER Experiment Name: At_Far-red-induction_P Parameter: Age (day) Value: 7
  misc_feature: MA Experiment 20001451 PARAMETER Experiment Name: At_Far-red-induction_P Parameter: Light Value: Far-red vs. White
  misc_feature: MA Experiment 20001451 PARAMETER Experiment Name: At_Far-red-induction_P Parameter: Organism Value: A. thaliana
  misc_feature: MA Experiment 20001451 PARAMETER Experiment Name: At_Far-red-induction_P Parameter: Plant Line Value: Columbia
  misc_feature: MA Experiment 20001451 PARAMETER Experiment Name: At_Far-red-induction_P Parameter: Timepoint (hr) Value: 24
  misc_feature: MA Experiment 20001451 PARAMETER Experiment Name: At_Far-red-induction_P Parameter: Tissue Value: Whole Plant
  misc_feature: MA Experiment ID: 20001555 Result: Down-regulated in Transcription
  misc_feature: MA Experiment 20001555 PARAMETER Experiment Name: At_Drought_Soil_Dry_P Parameter: Age (day) Value: 24
  misc_feature: MA Experiment 20001555 PARAMETER Experiment Name: At_Drought_Soil_Dry_P Parameter: Organism Value: A. thaliana
  misc_feature: MA Experiment 20001555 PARAMETER Experiment Name: At_Drought_Soil_Dry_P Parameter: Plant Line Value: WS
  misc_feature: MA Experiment 20001555 PARAMETER Experiment Name: At_Drought_Soil_Dry_P Parameter: Post Timepoint (hr) Value: None
  misc_feature: MA Experiment 20001555 PARAMETER Experiment Name: At_Drought_Soil_Dry_P Parameter: Post-Treatment Value: None
  misc_feature: MA Experiment 20001555 PARAMETER Experiment Name: At_Drought_Soil_Dry_P Parameter: Timepoint (day) Value: 10
  misc_feature: MA Experiment 20001555 PARAMETER Experiment Name: At_Drought_Soil_Dry_P Parameter: Treatment Value: Drought vs. No Drought
  misc_feature: MA Experiment ID: 20001556 Result: Down-regulated in Transcription
  misc_feature: MA Experiment 20001556 PARAMETER Experiment Name: At_Drought_Soil_Dry_P Parameter: Age (day) Value: 26
  misc_feature: MA Experiment 20001556 PARAMETER Experiment Name: At_Drought_Soil_Dry_P Parameter: Organism Value: A. thaliana
  misc_feature: MA Experiment 20001556 PARAMETER Experiment Name: At_Drought_Soil_Dry_P Parameter: Plant Line Value: WS
  misc_feature: MA Experiment 20001556 PARAMETER Experiment Name: At_Drought_Soil_Dry_P Parameter: Post Timepoint (hr) Value: None
  misc_feature: MA Experiment 20001556 PARAMETER Experiment Name: At_Drought_Soil_Dry_P Parameter: Post-Treatment Value: None
  misc_feature: MA Experiment 20001556 PARAMETER Experiment Name: At_Drought_Soil_Dry_P Parameter: Timepoint (day) Value: 12
  misc_feature: MA Experiment 20001556 PARAMETER Experiment Name: At_Drought_Soil_Dry_P Parameter: Treatment Value: Drought vs. No Drought
  misc_feature: MA Experiment ID: 20001558 Result: Down-regulated in Transcription
  misc_feature: MA Experiment 20001558 PARAMETER Experiment Name: At_Drought_Soil_Dry_P Parameter: Age (day) Value: 27
  misc_feature: MA Experiment 20001558 PARAMETER Experiment Name: At_Drought_Soil_Dry_P Parameter: Organism Value: A. thaliana
  misc_feature: MA Experiment 20001558 PARAMETER Experiment Name: At_Drought_Soil_Dry_P Parameter: Plant Line Value: WS
  misc_feature: MA Experiment 20001558 PARAMETER Experiment Name: At_Drought_Soil_Dry_P Parameter: Post Timepoint (hr) Value: 6
  misc_feature: MA Experiment 20001558 PARAMETER Experiment Name: At_Drought_Soil_Dry_P Parameter: Post-Treatment Value: Re-Water vs. No Drought
  misc_feature: MA Experiment 20001558 PARAMETER Experiment Name: At_Drought_Soil_Dry_P Parameter: Timepoint (day) Value: 13
  misc_feature: MA Experiment 20001558 PARAMETER Experiment Name: At_Drought_Soil_Dry_P Parameter: Treatment Value: Drought vs. No Drought
  misc_feature: MA Experiment ID: 20001911 Result: Down-regulated in Transcription
  misc_feature: MA Experiment 20001911 PARAMETER Experiment Name: At_Drought_Reproduction_P Parameter: Age (day) Value: 40
  misc_feature: MA Experiment 20001911 PARAMETER Experiment Name: At_Drought_Reproduction_P Parameter: Organism Value: A. thaliana
  misc_feature: MA Experiment 20001911 PARAMETER Experiment Name: At_Drought_Reproduction_P Parameter: Plant Line Value: WS
  misc_feature: MA Experiment 20001911 PARAMETER Experiment Name: At_Drought_Reproduction_P Parameter: Timepoint (day) Value: 10
  misc_feature: MA Experiment 20001911 PARAMETER Experiment Name: At_Drought_Reproduction_P Parameter: Tissue Value: Flowers
  misc_feature: MA Experiment 20001911 PARAMETER Experiment Name: At_Drought_Reproduction_P Parameter: Treatment Value: Drought vs. No Drought
actcatcaaaacatcacatacactatttttctcctctccttattgtctatatatttttcctctttagctttttcatttcgaaatggccaccgttgaggttgaacaagtcactccagtagcagtagagaacgttgaggtaccaacaaagacagtggaggagacagtggtggagacagaggtgacccaacagccggaagaatccgtccccgccgtgacagaacaaaaatccgaagcaccaattgtagaaacaaacgaagaagtggttgtggaagaggcagagaagaaagatgaagaaaccgagaagaaaacagaggagaaagacgagaagacagaagtgatcacggaaactccggtagttgaggaggaggagaagaaagctgaggaagtgaccgaaactccggcggttgtggaggaggagaagaagacagaggtggttgaggagaaacagactgaggttgcggctgctgaggaagtcgccgttgagaaggccgaggagtaaagaggaaggaagaagctatatatgaccttttttggtctcatatcgttttctgtttattttattttatcaacatttcataagtattttctatgtttgttgggtttgttatgatgaaatcagatgtttggatcttttaatggttgctacattgtt

SEQ ID NO: 26162 - protein, 138 aa, Arabidopsis thaliana
  peptide (1)..(138): Ceres Seq. ID no. 12331386
  misc_feature (25)..(132): Pfam Name: DREPP plasma membrane polypeptide Pfam Description: DREPP plasma membrane polypeptide
  misc_feature (1)..(138): Homolog of NCBI NO: 22999045 NR Description: hypothetical protein [Magnetococcus sp. MC-1]
  misc_feature (1)..(138): Homolog of NCBI NO: 9049359 NR Description: vacuolar calcium binding protein [Raphanus
  misc_feature (1)..(138): Homolog of NCBI NO: 9049359 NR Description: vacuolar calcium binding protein [Raphanus
  misc_feature (1)..(138): Homolog of NCBI NO: 9049359 NR Description: vacuolar calcium binding protein [Raphanus
  misc_feature (1)..(130): Homolog of NCBI NO: 18391349 NR Description: expressed protein
  misc_feature (39)..(138): Homolog of NCBI NO: 15231671 NR Description: putative protein; protein id: At3g59370.1
  misc_feature (1)..(134): Homolog of NCBI NO: 18407594 NR Description: expressed protein
  misc_feature (1)..(134): Homolog of NCBI NO: 21555836 NR Description: unknown [Arabidopsis thaliana]
  misc_feature (39)..(138): Homolog of NCBI NO: 18391349 NR Description: expressed protein
  misc_feature (1)..(138): Homolog of NCBI NO: 30682601 NR Description: expressed protein [Arabidopsis thaliana]
MATVEVEQVTPVAVENVEVPTKTVEETVVETEVTQQPEESVPAVTEQKSEAPIVETNEEVVVEEAEKKDEETEKKTEEKDEKTEVITETPVVEEEEKKAEEVTETPAVVEEEKKTEVVEEKQTEVAAAEEVAVEKAEE

SEQ ID NO: 26163 - DNA, 1281 bp, Arabidopsis thaliana
  misc_feature (1)..(1281): Ceres Seq. ID no. 13489923
  misc_feature: MA Experiment ID: 108434 Result: Up-regulated in Transcription
  misc_feature: MA Experiment 108434 PARAMETER Experiment Name: At_Root_Tips_cDNA_P Parameter: Tissue Value: Root Tips
  misc_feature: MA Experiment ID: 108463 Result: Down-regulated in Transcription
  misc_feature: MA Experiment 108463 PARAMETER Experiment Name: At_Germinating_Seeds_cDNA_P Parameter: Age (day) Value: 3 vs. 0
  misc_feature: MA Experiment 108463 PARAMETER Experiment Name: At_Germinating_Seeds_cDNA_P Parameter: Tissue Value: Germinating Seeds
  misc_feature: MA Experiment ID: 108464 Result: Down-regulated in Transcription
  misc_feature: MA Experiment 108464 PARAMETER Experiment Name: At_Germinating_Seeds_cDNA_P Parameter: Age (day) Value: 4 vs. 0
  misc_feature: MA Experiment 108464 PARAMETER Experiment Name: At_Germinating_Seeds_cDNA_P Parameter: Tissue Value: Germinating Seeds
  misc_feature: MA Experiment ID: 108585 Result: Down-regulated in Transcription
  misc_feature: MA Experiment 108585 PARAMETER Experiment Name: At_5mM_NaNP_cDNA_P Parameter: Timepoint (hr) Value: 6
  misc_feature: MA Experiment 108585 PARAMETER Experiment Name: At_5mM_NaNP_cDNA_P Parameter: Tissue Value: Aerial
  misc_feature: MA Experiment 108585 PARAMETER Experiment Name: At_5mM_NaNP_cDNA_P Parameter: Treatment Value: null
  misc_feature: MA Experiment ID: 108595 Result: Down-regulated in Transcription
  misc_feature: MA Experiment 108595 PARAMETER Experiment Name: At_Ler-pi_Ovule_cDNA_P Parameter: Plant Line Value: null
  misc_feature: MA Experiment ID: 108668 Result: Down-regulated in Transcription
  misc_feature: MA Experiment 108668 PARAMETER Experiment Name: At_2mM_SA_cDNA_P Parameter: Plant Line Value: WS
  misc_feature: MA Experiment 108668 PARAMETER Experiment Name: At_2mM_SA_cDNA_P Parameter: Timepoint (hr) Value: 6
  misc_feature: MA Experiment 108668 PARAMETER Experiment Name: At_2mM_SA_cDNA_P Parameter: Treatment Value: 2mM SA vs. No Treatment
  misc_feature: MA Experiment ID: 20000069 Result: Up-regulated in Transcription
  misc_feature: MA Experiment 20000069 PARAMETER Experiment Name: At_100uM_ABA_Mutants_cDNA_P Parameter: Plant Line Value: CS23
  misc_feature: MA Experiment 20000069 PARAMETER Experiment Name: At_100uM_ABA_Mutants_cDNA_P Parameter: Timepoint (hr) Value: 6
  misc_feature: MA Experiment 20000069 PARAMETER Experiment Name: At_100uM_ABA_Mutants_cDNA_P Parameter: Tissue Value: Aerial
  misc_feature: MA Experiment 20000069 PARAMETER Experiment Name: At_100uM_ABA_Mutants_cDNA_P Parameter: Treatment Value: 100uM ABA vs. No Treatment
  misc_feature: MA Experiment ID: 20000070 Result: Up-regulated in Transcription
  misc_feature: MA Experiment 20000070 PARAMETER Experiment Name: At_100uM_ABA_Mutants_cDNA_P Parameter: Plant Line Value: CS24
  misc_feature: MA Experiment 20000070 PARAMETER Experiment Name: At_100uM_ABA_Mutants_cDNA_P Parameter: Timepoint (hr) Value: 6
  misc_feature: MA Experiment 20000070 PARAMETER Experiment Name: At_100uM_ABA_Mutants_cDNA_P Parameter: Tissue Value: Aerial
  misc_feature: MA Experiment 20000070 PARAMETER Experiment Name: At_100uM_ABA_Mutants_cDNA_P Parameter: Treatment Value: 100uM ABA vs. No Treatment
  misc_feature: MA Experiment ID: 20000071 Result: Up-regulated in Transcription
  misc_feature: MA Experiment 20000071 PARAMETER Experiment Name: At_100uM_ABA_Mutants_cDNA_P Parameter: Plant Line Value: CS8104
  misc_feature: MA Experiment 20000071 PARAMETER Experiment Name: At_100uM_ABA_Mutants_cDNA_P Parameter: Timepoint (hr) Value: 6
  misc_feature: MA Experiment 20000071 PARAMETER Experiment Name: At_100uM_ABA_Mutants_cDNA_P Parameter: Tissue Value: Aerial
  misc_feature: MA Experiment 20000071 PARAMETER Experiment Name: At_100uM_ABA_Mutants_cDNA_P Parameter: Treatment Value: 100uM ABA vs. No Treatment
  misc_feature: MA Experiment ID: 20000072 Result: Up-regulated in Transcription
  misc_feature: MA Experiment 20000072 PARAMETER Experiment Name: At_100uM_ABA_Mutants_cDNA_P Parameter: Plant Line Value: CS8105
  misc_feature: MA Experiment 20000072 PARAMETER Experiment Name: At_100uM_ABA_Mutants_cDNA_P Parameter: Timepoint (hr) Value: 6
  misc_feature: MA Experiment 20000072 PARAMETER Experiment Name: At_100uM_ABA_Mutants_cDNA_P Parameter: Tissue Value: Aerial
  misc_feature: MA Experiment 20000072 PARAMETER Experiment Name: At_100uM_ABA_Mutants_cDNA_P Parameter: Treatment Value: 100uM ABA vs. No Treatment
  misc_feature: MA Experiment ID: 20000086 Result: Up-regulated in Transcription
  misc_feature: MA Experiment 20000086 PARAMETER Experiment Name: At_100uM_ABA_Mutants_cDNA_P Parameter: Plant Line Value: CS22
  misc_feature: MA Experiment 20000086 PARAMETER Experiment Name: At_100uM_ABA_Mutants_cDNA_P Parameter: Timepoint (hr) Value: 6
  misc_feature: MA Experiment 20000086 PARAMETER Experiment Name: At_100uM_ABA_Mutants_cDNA_P Parameter: Tissue Value: Aerial
  misc_feature: MA Experiment 20000086 PARAMETER Experiment Name: At_100uM_ABA_Mutants_cDNA_P Parameter: Treatment Value: 100uM ABA vs. No Treatment
  misc_feature: MA Experiment ID: 20000087 Result: Up-regulated in Transcription
  misc_feature: MA Experiment 20000087 PARAMETER Experiment Name: At_100uM_ABA_Mutants_cDNA_P Parameter: Plant Line Value: WS
  misc_feature: MA Experiment 20000087 PARAMETER Experiment Name: At_100uM_ABA_Mutants_cDNA_P Parameter: Timepoint (hr) Value: 6
  misc_feature: MA Experiment 20000087 PARAMETER Experiment Name: At_100uM_ABA_Mutants_cDNA_P Parameter: Tissue Value: Aerial
  misc_feature: MA Experiment 20000087 PARAMETER Experiment Name: At_100uM_ABA_Mutants_cDNA_P Parameter: Treatment Value: 100uM ABA vs. No Treatment
  misc_feature: MA Experiment ID: 20000088 Result: Up-regulated in Transcription
  misc_feature: MA Experiment 20000088 PARAMETER Experiment Name: At_100uM_ABA_Mutants_cDNA_P Parameter: Plant Line Value: Landsberg
  misc_feature: MA Experiment 20000088 PARAMETER Experiment Name: At_100uM_ABA_Mutants_cDNA_P Parameter: Timepoint (hr) Value: 6
  misc_feature: MA Experiment 20000088 PARAMETER Experiment Name: At_100uM_ABA_Mutants_cDNA_P Parameter: Tissue Value: Aerial
  misc_feature: MA Experiment 20000088 PARAMETER Experiment Name: At_100uM_ABA_Mutants_cDNA_P Parameter: Treatment Value: 100uM ABA vs. No Treatment
  misc_feature: MA Experiment ID: 20000089 Result: Up-regulated in Transcription
  misc_feature: MA Experiment ID: 20000111 Result: Down-regulated in Transcription
  misc_feature: MA Experiment 20000111 PARAMETER Experiment Name: At_42deg_Heat_cDNA_P Parameter: Temperature (deg C) Value: 42 vs. 22
  misc_feature: MA Experiment 20000111 PARAMETER Experiment Name: At_42deg_Heat_cDNA_P Parameter: Timepoint (hr) Value: 6
  misc_feature: MA Experiment 20000111 PARAMETER Experiment Name: At_42deg_Heat_cDNA_P Parameter: Tissue Value: Aerial
  misc_feature: MA Experiment ID: 20000112 Result: Down-regulated in Transcription
  misc_feature: MA Experiment 20000112 PARAMETER Experiment Name: At_42deg_Heat_cDNA_P Parameter: Temperature (deg C) Value: 42 vs. 22
  misc_feature: MA Experiment 20000112 PARAMETER Experiment Name: At_42deg_Heat_cDNA_P Parameter: Timepoint (hr) Value: 2
  misc_feature: MA Experiment 20000112 PARAMETER Experiment Name: At_42deg_Heat_cDNA_P Parameter: Tissue Value: Aerial
  misc_feature: MA Experiment ID: 20000113 Result: Down-regulated in Transcription
  misc_feature: MA Experiment 20000113 PARAMETER Experiment Name: At_42deg_Heat_cDNA_P Parameter: Temperature (deg C) Value: 42 vs. 22
  misc_feature: MA Experiment 20000113 PARAMETER Experiment Name: At_42deg_Heat_cDNA_P Parameter: Timepoint (hr) Value: 8
  misc_feature: MA Experiment 20000113 PARAMETER Experiment Name: At_42deg_Heat_cDNA_P Parameter: Tissue Value: Aerial
  misc_feature: MA Experiment ID: 20000117 Result: Up-regulated in Transcription
  misc_feature: MA Experiment 20000117 PARAMETER Experiment Name: At_100uM_ABA_Mutants_cDNA_P Parameter: Plant Line Value: Columbia
  misc_feature: MA Experiment 20000117 PARAMETER Experiment Name: At_100uM_ABA_Mutants_cDNA_P Parameter: Timepoint (hr) Value: 6
  misc_feature: MA Experiment 20000117 PARAMETER Experiment Name: At_100uM_ABA_Mutants_cDNA_P Parameter: Tissue Value: Aerial
  misc_feature: MA Experiment 20000117 PARAMETER Experiment Name: At_100uM_ABA_Mutants_cDNA_P Parameter: Treatment Value: 100uM ABA vs. No Treatment
  misc_feature: MA Experiment ID: 20000185 Result: Down-regulated in Transcription
  misc_feature: MA Experiment 20000185 PARAMETER Experiment Name: At_Roots__P Parameter: Age (day) Value: 7 vs. 21
  misc_feature: MA Experiment 20000185 PARAMETER Experiment Name: At_Roots__P Parameter: Organism Value: A. thaliana
  misc_feature: MA Experiment 20000185 PARAMETER Experiment Name: At_Roots__P Parameter: Tissue Value: Roots vs. Whole Plant
  misc_feature: MA Experiment ID: 20000439 Result: Down-regulated in Transcription
  misc_feature: MA Experiment 20000439 PARAMETER Experiment Name: At_Roots__P Parameter: Age (day) Value: 14 vs. 21
  misc_feature: MA Experiment 20000439 PARAMETER Experiment Name: At_Roots__P Parameter: Organism Value: A. thaliana
  misc_feature: MA Experiment 20000439 PARAMETER Experiment Name: At_Roots__P Parameter: Tissue Value: Roots vs. Whole Plant
  misc_feature: MA Experiment ID: 20001247 Result: Down-regulated in Transcription
  misc_feature: MA Experiment 20001247 PARAMETER Experiment Name: At_Far-red-induction_P Parameter: Age (day) Value: 7
  misc_feature: MA Experiment 20001247 PARAMETER Experiment Name: At_Far-red-induction_P Parameter: Light Value: Far-red vs. White
  misc_feature: MA Experiment 20001247 PARAMETER Experiment Name: At_Far-red-induction_P Parameter: Organism Value: A. thaliana
  misc_feature: MA Experiment 20001247 PARAMETER Experiment Name: At_Far-red-induction_P Parameter: Plant Line Value: Columbia
  misc_feature: MA Experiment 20001247 PARAMETER Experiment Name: At_Far-red-induction_P Parameter: Timepoint (hr) Value: 1
  misc_feature: MA Experiment 20001247 PARAMETER Experiment Name: At_Far-red-induction_P Parameter: Tissue Value: Whole Plant
atcttgtagaaacagaaacttgtctggtcttttcgaatgtgatttttggttgatgatgatgaggctagttcaagtatcttccactgaatccatttcttctatttccgcttcctcggcccggaatggtggagttctctacttgaagcgtggttctgtctgtgtatgtagagtcttgaagccgaataaagttgctctcaacagtatgattctttcagctatgaggacttgctcaatctctgggttccatactcatcttccgaagtcaagcggttcagtttcttcgagaaagaggttttcttctactgctttatcactcatcactcaaaccatttcaccatttgctcatccccgttcatcagtaattgtgtcaagccttctctccccatctgatatccctcagaaatctgaagaatggtttgctttaaggaaagacaagttaaccacaagtacattcagtacagcgctggggttttggaaaggaaaccggcgtgccgagctctggcatgaaaaggtttatgattcagatgcacgagttgttgaggagtctgcacggtttgctatgaactggggtgtacaaatggaatcatctgcgatagaaaggtacaaaagaataatgggttgtgaggttggaacaatgggatttgctattcactccaatgaggaatttcactggcttggcgcttcaccggatggaatcctcgattgctttggtattctagaagtgaaatgtccatataacaaagggaaaaccgaaactgtattaccctggaaaaaagtgccctactattacatgcctcagctgcagggtcaaatggagataatggaccgggaatgggtcaacttatactgctggacacgaaatggaagcacggttttccgtgtgatgagagaccgaagctattggagaatcatacatgatgtattaagggagttctggtgggagagtgtgattcctgcaagggaggctttgttgttagggaaagaggatgaggaggtgaaaaagtatgagccaacatctacgcataaacgaaccaagcttgccatagctaaaagcctaaatttggctgcggaatcaaaactagtatgcagagaaattgctgatcatgtcgagttcttttagatgaaataggagaatgatgattcatcttattagatcacgcattgttgtacttatgaaactggttaaatgatgtaacactctttaatcagatttcactctttggagtttagtggttttctatcgtctgtaaattaattggatgtgaaatgattttcattgct

SEQ ID NO: 26164 - protein, 372 aa, Arabidopsis thaliana
  peptide (1)..(372): Ceres Seq. ID no. 13489924
  misc_feature (122)..(332): Homolog of NCBI NO: 9631735 NR Description: PBCV-1 exonuclease [Paramecium bursaria Chlorella
  misc_feature (136)..(365): Homolog of NCBI NO: 25402766 NR Description: protein F16A14.4 [imported] - Arabidopsis
  misc_feature (136)..(365): Homolog of NCBI NO: 15222951 NR Description: hypothetical protein [Arabidopsis thaliana]
  misc_feature (118)..(372): Homolog of NCBI NO: 10241653 NR Description: contains similarity to F12A21.16
  misc_feature (56)..(372): Homolog of NCBI NO: 38345347 NR Description: OSJNBa0081L15.20 [Oryza sativa (japonica
  misc_feature (99)..(372): Homolog of NCBI NO: 40253518 NR Description: unknown protein [Oryza sativa (japonica
  misc_feature (51)..(372): Homolog of NCBI NO: 25404961 NR Description: protein F12A21.19 [imported] - Arabidopsis
  misc_feature (18)..(372): Homolog of NCBI NO: 30697546 NR Description: F12A21.19 [Arabidopsis thaliana]
SCRNRNLSGLFECDFWLMMMRLVQVSSTESISSISASSARNGGVLYLKRGSVCVCRVLKPNKVALNSMILSAMRTCSISGFHTHLPKSSGSVSSRKRFSSTALSLITQTISPFAHPRSSVIVSSLLSPSDIPQKSEEWFALRKDKLTTSTFSTALGFWKGNRRAELWHEKVYDSDARVVEESARFAMNWGVQMESSAIERYKRIMGCEVGTMGFAIHSNEEFHWLGASPDGILDCFGILEVKCPYNKGKTETVLPWKKVPYYYMPQLQGQMEIMDREWVNLYCWTRNGSTVFRVMRDRSYWRIIHDVLREFWWESVIPAREALLLGKEDEEVKKYEPTSTHKRTKLAIAKSLNLAAESKLVCREIADHVEFF

SEQ ID NO: 26165 - protein, 355 aa, Arabidopsis thaliana
  peptide (1)..(355): Ceres Seq. ID no. 13489925
  misc_feature (105)..(315): Homolog of NCBI NO: 9631735 NR Description: PBCV-1 exonuclease [Paramecium bursaria Chlorella
  misc_feature (119)..(348): Homolog of NCBI NO: 25402766 NR Description: protein F16A14.4 [imported] - Arabidopsis
  misc_feature (119)..(348): Homolog of NCBI NO: 15222951 NR Description: hypothetical protein [Arabidopsis thaliana]
  misc_feature (101)..(355): Homolog of NCBI NO: 10241653 NR Description: contains similarity to F12A21.16
  misc_feature (39)..(355): Homolog of NCBI NO: 38345347 NR Description: OSJNBa0081L15.20 [Oryza sativa (japonica
  misc_feature (82)..(355): Homolog of NCBI NO: 40253518 NR Description: unknown protein [Oryza sativa (japonica
  misc_feature (34)..(355): Homolog of NCBI NO: 25404961 NR Description: protein F12A21.19 [imported] - Arabidopsis
  misc_feature (1)..(355): Homolog of NCBI NO: 30697546 NR Description: F12A21.19 [Arabidopsis thaliana]
MMMRLVQVSSTESISSISASSARNGGVLYLKRGSVCVCRVLKPNKVALNSMILSAMRTCSISGFHTHLPKSSGSVSSRKRFSSTALSLITQTISPFAHPRSSVIVSSLLSPSDIPQKSEEWFALRKDKLTTSTFSTALGFWKGNRRAELWHEKVYDSDARVVEESARFAMNWGVQMESSAIERYKRIMGCEVGTMGFAIHSNEEFHWLGASPDGILDCFGILEVKCPYNKGKTETVLPWKKVPYYYMPQLQGQMEIMDREWVNLYCWTRNGSTVFRVMRDRSYWRIIHDVLREFWWESVIPAREALLLGKEDEEVKKYEPTSTHKRTKLAIAKSLNLAAESKLVCREIADHVEFF

SEQ ID NO: 26166 - protein, 354 aa, Arabidopsis thaliana
  peptide (1)..(354): Ceres Seq. ID no. 13489926
  misc_feature (104)..(314): Homolog of NCBI NO: 9631735 NR Description: PBCV-1 exonuclease [Paramecium bursaria Chlorella
  misc_feature (118)..(347): Homolog of NCBI NO: 25402766 NR Description: protein F16A14.4 [imported] - Arabidopsis
  misc_feature (118)..(347): Homolog of NCBI NO: 15222951 NR Description: hypothetical protein [Arabidopsis thaliana]
  misc_feature (100)..(354): Homolog of NCBI NO: 10241653 NR Description: contains similarity to F12A21.16
  misc_feature (38)..(354): Homolog of NCBI NO: 38345347 NR Description: OSJNBa0081L15.20 [Oryza sativa (japonica
  misc_feature (81)..(354): Homolog of NCBI NO: 40253518 NR Description: unknown protein [Oryza sativa (japonica
  misc_feature (33)..(354): Homolog of NCBI NO: 25404961 NR Description: protein F12A21.19 [imported] - Arabidopsis
  misc_feature (1)..(354): Homolog of NCBI NO: 30697546 NR Description: F12A21.19 [Arabidopsis thaliana]
MMRLVQVSSTESISSISASSARNGGVLYLKRGSVCVCRVLKPNKVALNSMILSAMRTCSISGFHTHLPKSSGSVSSRKRFSSTALSLITQTISPFAHPRSSVIVSSLLSPSDIPQKSEEWFALRKDKLTTSTFSTALGFWKGNRRAELWHEKVYDSDARVVEESARFAMNWGVQMESSAIERYKRIMGCEVGTMGFAIHSNEEFHWLGASPDGILDCFGILEVKCPYNKGKTETVLPWKKVPYYYMPQLQGQMEIMDREWVNLYCWTRNGSTVFRVMRDRSYWRIIHDVLREFWWESVIPAREALLLGKEDEEVKKYEPTSTHKRTKLAIAKSLNLAAESKLVCREIADHVEFF

SEQ ID NO: 26167 - DNA, 884 bp, Arabidopsis thaliana
  misc_feature (1)..(884): Ceres Seq. ID no. 12482146
  misc_feature: MA Experiment ID: 108464 Result: Down-regulated in Transcription
  misc_feature: MA Experiment 108464 PARAMETER Experiment Name: At_Germinating_Seeds_cDNA_P Parameter: Age (day) Value: 4 vs. 0
  misc_feature: MA Experiment 108464 PARAMETER Experiment Name: At_Germinating_Seeds_cDNA_P Parameter: Tissue Value: Germinating Seeds
  misc_feature: MA Experiment ID: 108577 Result: Down-regulated in Transcription
  misc_feature: MA Experiment 108577 PARAMETER Experiment Name: At_42deg_Heat_cDNA_P Parameter: Temperature (deg C) Value: 42 vs. 22
  misc_feature: MA Experiment 108577 PARAMETER Experiment Name: At_42deg_Heat_cDNA_P Parameter: Timepoint (hr) Value: 6
  misc_feature: MA Experiment 108577 PARAMETER Experiment Name: At_42deg_Heat_cDNA_P Parameter: Tissue Value: Aerial
  misc_feature: MA Experiment ID: 108595 Result: Down-regulated in Transcription
  misc_feature: MA Experiment 108595 PARAMETER Experiment Name: At_Ler-pi_Ovule_cDNA_P Parameter: Plant Line Value: null
  misc_feature: Phenotype: WHOLE PLANT Size-Large
  misc_feature: Phenotype: FLOWERS Other
  misc_feature: Phenotype: FERTILITY Fertility-Reduced
  misc_feature: Phenotype: FLOWERS Other
  misc_feature: Phenotype: FERTILITY Fertility-Reduced
  misc_feature: Phenotype: FERTILITY Fertility-Reduced
  misc_feature: Phenotype: FLOWERS Other
  misc_feature: Phenotype: FERTILITY Fertility-Reduced
aaagaagctatggcttccaatttctggacttcgacgcactacaaagagcttaaggacccagaagaggttaatgttgttcatcctcttgatgctcagagaggaatctctgttgaagatttcagactcattaagcttcatatgtctaattatatatcgaaactggcacaacacattaagattaggcaaagagttgttgcaactgcagtaacctatatgcgtcgtgtttacacaagaaagagtttgacggaatatgagcctcggcttgttgctcctacatgcttgtatttggcttgcaaagcagaagagagtgtggtgcatgccaaacttcttgtcttctacatgaaaaaactttatgcggatgaaaagtttcgatatgagattaaagatattctggaaatggagatgaaggtcttggaagcattgaacttctatcttgttgtattccacccatatcgatctctgcctgagttcttgcaggattctggaatcaatgacactagtatgacccatctaacttggggtcttgtcaacgacacatatagaatggacctcatccttatacatccgccgtttctcataacactcgcttgcatttacattgcttctgtacacaaagagaaagacataaagacatggtttgaagagctttctgtcgacatgaacattgtgaagaatattgcaatggagatattagatttctatgaaaaccatagactgttcacggaagagagagttcacgccgccttcaacaaacttgctacaaacccataaagtttcgacttgtctgtgtgttttgttcccttgagaaaatataatgttttgccagaagttttggaaatgagattattctgtttattgtacatcagttttgctcgtcttggttc

SEQ ID NO: 26168 - protein, 256 aa, Arabidopsis thaliana
  peptide (1)..(256): Ceres Seq. ID no. 12482147
  misc_feature (12)..(146): Pfam Name: Cyclin, N-terminal domain Pfam Description: Cyclin, N-terminal domain
  misc_feature (4)..(244): Homolog of NCBI NO: 11042056 NR Description: dJ199J3.4 (cyclin C) [Homo sapiens]
  misc_feature (4)..(244): Homolog of NCBI NO: 1705767 NR Description: Cyclin C
  misc_feature (4)..(244): Homolog of NCBI NO: 34867083 NR Description: cyclin C [Rattus norvegicus]
  misc_feature (3)..(244): Homolog of NCBI NO: 34783612 NR Description: Unknown (protein for IMAGE:6165083) [Homo sapiens]
  misc_feature (3)..(244): Homolog of NCBI NO: 4885119 NR Description: cyclin C [Homo sapiens]
  misc_feature (3)..(244): Homolog of NCBI NO: 38382739 NR Description: Unknown (protein for IMAGE:6391891) [Mus musculus]
  misc_feature (4)..(252): Homolog of NCBI NO: 28828497 NR Description: similar to Mus musculus (Mouse). 16 days neonate cDNA, RIKEN full-length enriched library, clone:A130067E11
  misc_feature (4)..(252): Homolog of NCBI NO: 3334144 NR Description: G1/S-SPECIFIC CYCLIN C-TYPE
  misc_feature (4)..(253): Homolog of NCBI NO: 15239665 NR Description: cyclin C-like protein; protein id: At5g48640.1
  misc_feature (4)..(256): Homolog of NCBI NO: 15239664 NR Description: cyclin C-like protein
KEAMASNFWTSTHYKELKDPEEVNVVHPLDAQRGISVEDFRLIKLHMSNYISKLAQHIKIRQRVVATAVTYMRRVYTRKSLTEYEPRLVAPTCLYLACKAEESVVHAKLLVFYMKKLYADEKFRYEIKDILEMEMKVLEALNFYLVVFHPYRSLPEFLQDSGINDTSMTHLTWGLVNDTYRMDLILIHPPFLITLACIYIASVHKEKDIKTWFEELSVDMNIVKNIAMEILDFYENHRLFTEERVHAAFNKLATNP

SEQ ID NO: 26169 - protein, 253 aa, Arabidopsis thaliana
  peptide (1)..(253): Ceres Seq. ID no. 12482148
  misc_feature (9)..(143): Pfam Name: Cyclin, N-terminal domain Pfam Description: Cyclin, N-terminal domain
  misc_feature (1)..(241): Homolog of NCBI NO: 11042056 NR Description: dJ199J3.4 (cyclin C) [Homo sapiens]
  misc_feature (1)..(241): Homolog of NCBI NO: 1705767 NR Description: Cyclin C
  misc_feature (1)..(241): Homolog of NCBI NO: 34867083 NR Description: cyclin C [Rattus norvegicus]
  misc_feature (1)..(241): Homolog of NCBI NO: 34783612 NR Description: Unknown (protein for IMAGE:6165083) [Homo sapiens]
  misc_feature (1)..(241): Homolog of NCBI NO: 4885119 NR Description: cyclin C [Homo sapiens]
  misc_feature (1)..(241): Homolog of NCBI NO: 38382739 NR Description: Unknown (protein for IMAGE:6391891) [Mus musculus]
  misc_feature (1)..(249): Homolog of NCBI NO: 28828497 NR Description: similar to Mus musculus (Mouse). 16 days neonate cDNA, RIKEN full-length enriched library, clone:A130067E11
  misc_feature (1)..(249): Homolog of NCBI NO: 3334144 NR Description: G1/S-SPECIFIC CYCLIN C-TYPE
  misc_feature (1)..(250): Homolog of NCBI NO: 15239665 NR Description: cyclin C-like protein; protein id: At5g48640.1
  misc_feature (1)..(253): Homolog of NCBI NO: 15239664 NR Description: cyclin C-like protein
MASNFWTSTHYKELKDPEEVNVVHPLDAQRGISVEDFRLIKLHMSNYISKLAQHIKIRQRVVATAVTYMRRVYTRKSLTEYEPRLVAPTCLYLACKAEESVVHAKLLVFYMKKLYADEKFRYEIKDILEMEMKVLEALNFYLVVFHPYRSLPEFLQDSGINDTSMTHLTWGLVNDTYRMDLILIHPPFLITLACIYIASVHKEKDIKTWFEELSVDMNIVKNIAMEILDFYENHRLFTEERVHAAFNKLATNP

SEQ ID NO: 26170 - protein, 210 aa, Arabidopsis thaliana
  peptide (1)..(210): Ceres Seq. ID no. 12482149
  misc_feature (1)..(100): Pfam Name: Cyclin, N-terminal domain Pfam Description: Cyclin, N-terminal domain
  misc_feature (1)..(198): Homolog of NCBI NO: 11042056 NR Description: dJ199J3.4 (cyclin C) [Homo sapiens]
  misc_feature (1)..(198): Homolog of NCBI NO: 1705767 NR Description: Cyclin C
  misc_feature (1)..(198): Homolog of NCBI NO: 34867083 NR Description: cyclin C [Rattus norvegicus]
  misc_feature (1)..(198): Homolog of NCBI NO: 34783612 NR Description: Unknown (protein for IMAGE:6165083) [Homo sapiens]
  misc_feature (1)..(198): Homolog of NCBI NO: 4885119 NR Description: cyclin C [Homo sapiens]
  misc_feature (1)..(198): Homolog of NCBI NO: 38382739 NR Description: Unknown (protein for IMAGE:6391891) [Mus musculus]
  misc_feature (1)..(206): Homolog of NCBI NO: 28828497 NR Description: similar to Mus musculus (Mouse). 16 days neonate cDNA, RIKEN full-length enriched library, clone:A130067E11
  misc_feature (1)..(206): Homolog of NCBI NO: 3334144 NR Description: G1/S-SPECIFIC CYCLIN C-TYPE
  misc_feature (1)..(207): Homolog of NCBI NO: 15239665 NR Description: cyclin C-like protein; protein id: At5g48640.1
  misc_feature (1)..(210): Homolog of NCBI NO: 15239664 NR Description: cyclin C-like protein
MSNYISKLAQHIKIRQRVVATAVTYMRRVYTRKSLTEYEPRLVAPTCLYLACKAEESVVHAKLLVFYMKKLYADEKFRYEIKDILEMEMKVLEALNFYLVVFHPYRSLPEFLQDSGINDTSMTHLTWGLVNDTYRMDLILIHPPFLITLACIYIASVHKEKDIKTWFEELSVDMNIVKNIAMEILDFYENHRLFTEERVHAAFNKLATNP

SEQ ID NO: 26171 - DNA, 924 bp, Arabidopsis thaliana
  misc_feature (1)..(924): Ceres Seq. ID no. 13497048
  misc_feature: MA Experiment ID: 108433 Result: Down-regulated in Transcription
  misc_feature: MA Experiment 108433 PARAMETER Experiment Name: At_rhl_Mutant2_cDNA_P Parameter: Age (day) Value: 7
  misc_feature: MA Experiment 108433 PARAMETER Experiment Name: At_rhl_Mutant2_cDNA_P Parameter: Organism Value: A. thaliana
  misc_feature: MA Experiment 108433 PARAMETER Experiment Name: At_rhl_Mutant2_cDNA_P Parameter: Plant Line Value: rhl Mutant vs. wt landsburg
  misc_feature: MA Experiment 108433 PARAMETER Experiment Name: At_rhl_Mutant2_cDNA_P Parameter: Tissue Value: Roots
  misc_feature: MA Experiment ID: 108434 Result: Up-regulated in Transcription
  misc_feature: MA Experiment 108434 PARAMETER Experiment Name: At_Root_Tips_cDNA_P Parameter: Tissue Value: Root Tips
  misc_feature: MA Experiment ID: 108435 Result: Up-regulated in Transcription
  misc_feature: MA Experiment 108435 PARAMETER Experiment Name: At_stm_Mutants_cDNA_P Parameter: Plant Line Value: wt Landsburg vs stm
  misc_feature: MA Experiment 108435 PARAMETER Experiment Name: At_stm_Mutants_cDNA_P Parameter: Tissue Value: Shoot Apical Meristem Region
  misc_feature: MA Experiment ID: 108462 Result: Down-regulated in Transcription
  misc_feature: MA Experiment 108462 PARAMETER Experiment Name: At_Germinating_Seeds_cDNA_P Parameter: Age (day) Value: 2 vs. 0
  misc_feature: MA Experiment 108462 PARAMETER Experiment Name: At_Germinating_Seeds_cDNA_P Parameter: Tissue Value: Germinating Seeds
  misc_feature: MA Experiment ID: 108577 Result: Down-regulated in Transcription
  misc_feature: MA Experiment 108577 PARAMETER Experiment Name: At_42deg_Heat_cDNA_P Parameter: Temperature (deg C) Value: 42 vs. 22
  misc_feature: MA Experiment 108577 PARAMETER Experiment Name: At_42deg_Heat_cDNA_P Parameter: Timepoint (hr) Value: 6
  misc_feature: MA Experiment 108577 PARAMETER Experiment Name: At_42deg_Heat_cDNA_P Parameter: Tissue Value: Aerial
  misc_feature: MA Experiment ID: 108579 Result: Up-regulated in Transcription
  misc_feature: MA Experiment 108579 PARAMETER Experiment Name: At_4deg_Cold_cDNA_P Parameter: Temperature (deg C) Value: 4 vs. 22
  misc_feature: MA Experiment 108579 PARAMETER Experiment Name: At_4deg_Cold_cDNA_P Parameter: Timepoint (hr) Value: 6
  misc_feature: MA Experiment 108579 PARAMETER Experiment Name: At_4deg_Cold_cDNA_P Parameter: Tissue Value: Aerial
  misc_feature: MA Experiment ID: 108595 Result: Up-regulated in Transcription
  misc_feature: MA Experiment 108595 PARAMETER Experiment Name: At_Ler-pi_Ovule_cDNA_P Parameter: Plant Line Value: null
  misc_feature: MA Experiment ID: 20000113 Result: Down-regulated in Transcription
  misc_feature: MA Experiment 20000113 PARAMETER Experiment Name: At_42deg_Heat_cDNA_P Parameter: Temperature (deg C) Value: 42 vs. 22
  misc_feature: MA Experiment 20000113 PARAMETER Experiment Name: At_42deg_Heat_cDNA_P Parameter: Timepoint (hr) Value: 8
  misc_feature: MA Experiment 20000113 PARAMETER Experiment Name: At_42deg_Heat_cDNA_P Parameter: Tissue Value: Aerial
  misc_feature: MA Experiment ID: 20000171 Result: Down-regulated in Transcription
  misc_feature: MA Experiment 20000171 PARAMETER Experiment Name: At_42deg_Heat_P Parameter: Age (day) Value: 14
  misc_feature: MA Experiment 20000171 PARAMETER Experiment Name: At_42deg_Heat_P Parameter: Organism Value: A. thaliana
  misc_feature: MA Experiment 20000171 PARAMETER Experiment Name: At_42deg_Heat_P Parameter: Plant Line Value: WS
  misc_feature: MA Experiment 20000171 PARAMETER Experiment Name: At_42deg_Heat_P Parameter: Temperature (deg C) Value: 42 vs. 22
  misc_feature: MA Experiment 20000171 PARAMETER Experiment Name: At_42deg_Heat_P Parameter: Timepoint (hr) Value: 1
  misc_feature: MA Experiment 20000171 PARAMETER Experiment Name: At_42deg_Heat_P Parameter: Tissue Value: Aerial
  misc_feature: MA Experiment ID: 20000182 Result: Down-regulated in Transcription
  misc_feature: MA Experiment 20000182 PARAMETER Experiment Name: At_2mM_SA_P Parameter: Age (day) Value: 14
  misc_feature: MA Experiment 20000182 PARAMETER Experiment Name: At_2mM_SA_P Parameter: Organism Value: A. thaliana
  misc_feature: MA Experiment 20000182 PARAMETER Experiment Name: At_2mM_SA_P Parameter: Plant Line Value: WS
  misc_feature: MA Experiment 20000182 PARAMETER Experiment Name: At_2mM_SA_P Parameter: Timepoint (hr) Value: 6
  misc_feature: MA Experiment 20000182 PARAMETER Experiment Name: At_2mM_SA_P Parameter: Tissue Value: Aerial
  misc_feature: MA Experiment 20000182 PARAMETER Experiment Name: At_2mM_SA_P Parameter: Treatment Value: 2mM SA vs. No Treatment
  misc_feature: MA Experiment ID: 20000184 Result: Up-regulated in Transcription
  misc_feature: MA Experiment 20000184 PARAMETER Experiment Name: At_Shoots__P Parameter: Age (day) Value: 7
  misc_feature: MA Experiment 20000184 PARAMETER Experiment Name: At_Shoots__P Parameter: Tissue Value: Shoots vs. Whole Plant
  misc_feature: MA Experiment ID: 20000211 Result: Up-regulated in Transcription
  misc_feature: MA Experiment 20000211 PARAMETER Experiment Name: At_0.001percent_MeJA__P Parameter: Age (day) Value: 14
  misc_feature: MA Experiment 20000211 PARAMETER Experiment Name: At_0.001percent_MeJA__P Parameter: Organism Value: A. thaliana
  misc_feature: MA Experiment 20000211 PARAMETER Experiment Name: At_0.001percent_MeJA__P Parameter: Plant Line Value: WS
  misc_feature: MA Experiment 20000211 PARAMETER Experiment Name: At_0.001percent_MeJA__P Parameter: Timepoint (hr) Value: 1
  misc_feature: MA Experiment 20000211 PARAMETER Experiment Name: At_0.001percent_MeJA__P Parameter: Tissue Value: Aerial
  misc_feature: MA Experiment 20000211 PARAMETER Experiment Name: At_0.001percent_MeJA__P Parameter: Treatment Value: 0.001percent MeJA vs. No Treatment
  misc_feature: MA Experiment ID: 20000227 Result: Up-regulated in Transcription
  misc_feature: MA Experiment 20000227 PARAMETER Experiment Name: At_Root-Tips-vs-Tops_P Parameter: Tissue Value: Root Tips vs. Root Tops
  misc_feature: MA Experiment ID: 20000234 Result: Up-regulated in Transcription
  misc_feature: MA Experiment 20000234 PARAMETER Experiment Name: At_Siliques_P Parameter: Age (day) Value: 21
  misc_feature: MA Experiment 20000234 PARAMETER Experiment Name: At_Siliques_P Parameter: Organism Value: A. thaliana
  misc_feature: MA Experiment 20000234 PARAMETER Experiment Name: At_Siliques_P Parameter: Plant Line Value: WS
  misc_feature: MA Experiment 20000234 PARAMETER Experiment Name: At_Siliques_P Parameter: Tissue Value: Less Than 5mm Siliques vs. Whole Plant
  misc_feature: MA Experiment ID: 20000235 Result: Up-regulated in Transcription
  misc_feature: MA Experiment 20000235 PARAMETER Experiment Name: At_Siliques_P Parameter: Age (day) Value: 21
  misc_feature: MA Experiment 20000235 PARAMETER Experiment Name: At_Siliques_P Parameter: Organism Value: A. thaliana
  misc_feature: MA Experiment 20000235 PARAMETER Experiment Name: At_Siliques_P Parameter: Plant Line Value: WS
  misc_feature: MA Experiment 20000235 PARAMETER Experiment Name: At_Siliques_P Parameter: Tissue Value: 5-10mm Siliques vs. Whole Plant
  misc_feature: MA Experiment ID: 20000264 Result: Up-regulated in Transcription
  misc_feature: MA Experiment 20000264 PARAMETER Experiment Name: At_Open_Flower_P Parameter: Age (day) Value: 21
  misc_feature: MA Experiment 20000264 PARAMETER Experiment Name: At_Open_Flower_P Parameter: Plant Line Value: WS
  misc_feature: MA Experiment 20000264 PARAMETER Experiment Name: At_Open_Flower_P Parameter: Tissue Value: Open Flower vs. Whole Plant
  misc_feature: MA Experiment ID: 20000265 Result: Up-regulated in Transcription
  misc_feature: MA Experiment 20000265 PARAMETER Experiment Name: At_Open_Flower_P Parameter: Age (day) Value: 21
  misc_feature: MA Experiment 20000265 PARAMETER Experiment Name: At_Open_Flower_P Parameter: Plant Line Value: WS
  misc_feature: MA Experiment 20000265 PARAMETER Experiment Name: At_Open_Flower_P Parameter: Tissue Value: Closed Flower vs. Whole Plant
  misc_feature: MA Experiment ID: 20000286 Result: Up-regulated in Transcription
  misc_feature: MA Experiment 20000286 PARAMETER Experiment Name: At_Open_Flower_P Parameter: Age (day) Value: 21
  misc_feature: MA Experiment 20000286 PARAMETER Experiment Name: At_Open_Flower_P Parameter: Plant Line Value: WS
  misc_feature: MA Experiment 20000286 PARAMETER Experiment Name: At_Open_Flower_P Parameter: Tissue Value: Half Open vs. Whole Plant
  misc_feature: MA Experiment ID: 20000451 Result: Up-regulated in Transcription
  misc_feature: MA Experiment 20000451 PARAMETER Experiment Name: At_CS6879_Shoots-Roots_P Parameter: Age (day) Value: 14
  misc_feature: MA Experiment 20000451 PARAMETER Experiment Name: At_CS6879_Shoots-Roots_P Parameter: Organism Value: A. thaliana
  misc_feature: MA Experiment 20000451 PARAMETER Experiment Name: At_CS6879_Shoots-Roots_P Parameter: Plant Line Value: CS6879 vs. WS
  misc_feature: MA Experiment 20000451 PARAMETER Experiment Name: At_CS6879_Shoots-Roots_P Parameter: Tissue Value: Roots
  misc_feature: MA Experiment ID: 20000495 Result: Up-regulated in Transcription
  misc_feature: MA Experiment 20000495 PARAMETER Experiment Name: At_Guard_Cells_P Parameter: Harvest Date Value: 8/2/2002
  misc_feature: MA Experiment 20000495 PARAMETER Experiment Name: At_Guard_Cells_P Parameter: Organism Value: A. thaliana
  misc_feature: MA Experiment 20000495 PARAMETER Experiment Name: At_Guard_Cells_P Parameter: Tissue Value: Guard Cells vs. Leaves
  misc_feature: MA Experiment ID: 20000496 Result: Up-regulated in Transcription
  misc_feature: MA Experiment 20000496 PARAMETER Experiment Name: At_Guard_Cells_P Parameter: Harvest Date Value: 7/19/2002
  misc_feature: MA Experiment 20000496 PARAMETER Experiment Name: At_Guard_Cells_P Parameter: Organism Value: Canola
  misc_feature: MA Experiment 20000496 PARAMETER Experiment Name: At_Guard_Cells_P Parameter: Tissue Value: Guard Cells vs. Leaves
  misc_feature: MA Experiment ID: 20000794 Result: Down-regulated in Transcription
  misc_feature: MA Experiment 20000794 PARAMETER Experiment Name: At_Petals_P Parameter: Age (day) Value: 23-25 days
  misc_feature: MA Experiment 20000794 PARAMETER Experiment Name: At_Petals_P Parameter: Plant Line Value: WS
  misc_feature: MA Experiment 20000794 PARAMETER Experiment Name: At_Petals_P Parameter: Tissue Value: Petals vs. Whole plant
  misc_feature: MA Experiment ID: 20001555 Result: Down-regulated in Transcription
  misc_feature: MA Experiment 20001555 PARAMETER Experiment Name: At_Drought_Soil_Dry_P Parameter: Age (day) Value: 24
  misc_feature: MA Experiment 20001555 PARAMETER Experiment Name: At_Drought_Soil_Dry_P Parameter: Organism Value: A. thaliana
  misc_feature: MA Experiment 20001555 PARAMETER Experiment Name: At_Drought_Soil_Dry_P Parameter: Plant Line Value: WS
  misc_feature: MA Experiment 20001555 PARAMETER Experiment Name: At_Drought_Soil_Dry_P Parameter: Post Timepoint (hr) Value: None
  misc_feature: MA Experiment 20001555 PARAMETER Experiment Name: At_Drought_Soil_Dry_P Parameter: Post-Treatment Value: None
  misc_feature: MA Experiment 20001555 PARAMETER Experiment Name: At_Drought_Soil_Dry_P Parameter: Timepoint (day) Value: 10
  misc_feature: MA Experiment 20001555 PARAMETER Experiment Name: At_Drought_Soil_Dry_P Parameter: Treatment Value: Drought vs. No Drought
  misc_feature: MA Experiment ID: 20001556 Result: Down-regulated in Transcription
  misc_feature: MA Experiment 20001556 PARAMETER Experiment Name: At_Drought_Soil_Dry_P Parameter: Age (day) Value: 26
  misc_feature: MA Experiment 20001556 PARAMETER Experiment Name: At_Drought_Soil_Dry_P Parameter: Organism Value: A. thaliana
  misc_feature: MA Experiment 20001556 PARAMETER Experiment Name: At_Drought_Soil_Dry_P Parameter: Plant Line Value: WS
  misc_feature: MA Experiment 20001556 PARAMETER Experiment Name: At_Drought_Soil_Dry_P Parameter: Post Timepoint (hr) Value: None
  misc_feature: MA Experiment 20001556 PARAMETER Experiment Name: At_Drought_Soil_Dry_P Parameter: Post-Treatment Value: None
  misc_feature: MA Experiment 20001556 PARAMETER Experiment Name: At_Drought_Soil_Dry_P Parameter: Timepoint (day) Value: 12
  misc_feature: MA Experiment 20001556 PARAMETER Experiment Name: At_Drought_Soil_Dry_P Parameter: Treatment Value: Drought vs. No Drought
  misc_feature: MA Experiment ID: 20001557 Result: Up-regulated in Transcription
  misc_feature: MA Experiment 20001557 PARAMETER Experiment Name: At_Drought_Soil_Dry_P Parameter: Age (day) Value: 27
  misc_feature: MA Experiment 20001557 PARAMETER Experiment Name: At_Drought_Soil_Dry_P Parameter: Organism Value: A. thaliana
  misc_feature: MA Experiment 20001557 PARAMETER Experiment Name: At_Drought_Soil_Dry_P Parameter: Plant Line Value: WS
  misc_feature: MA Experiment 20001557 PARAMETER Experiment Name: At_Drought_Soil_Dry_P Parameter: Post Timepoint (hr) Value: 3
  misc_feature: MA Experiment 20001557 PARAMETER Experiment Name: At_Drought_Soil_Dry_P Parameter: Post-Treatment Value: Re-Water vs. No Drought
  misc_feature: MA Experiment 20001557 PARAMETER Experiment Name: At_Drought_Soil_Dry_P Parameter: Timepoint (day) Value: 13
  misc_feature: MA Experiment 20001557 PARAMETER Experiment Name: At_Drought_Soil_Dry_P Parameter: Treatment Value: Drought vs. No Drought
  misc_feature: MA Experiment ID: 20001560 Result: Up-regulated in Transcription
  misc_feature: MA Experiment 20001560 PARAMETER Experiment Name: At_Drought_Soil_Dry_P Parameter: Age (day) Value: 28
  misc_feature: MA Experiment 20001560 PARAMETER Experiment Name: At_Drought_Soil_Dry_P Parameter: Organism Value: A. thaliana
  misc_feature: MA Experiment 20001560 PARAMETER Experiment Name: At_Drought_Soil_Dry_P Parameter: Plant Line Value: WS
  misc_feature: MA Experiment 20001560 PARAMETER Experiment Name: At_Drought_Soil_Dry_P Parameter: Post Timepoint (hr) Value: None
  misc_feature: MA Experiment 20001560 PARAMETER Experiment Name: At_Drought_Soil_Dry_P Parameter: Post-Treatment Value: None
  misc_feature: MA Experiment 20001560 PARAMETER Experiment Name: At_Drought_Soil_Dry_P Parameter: Timepoint (day) Value: 14
  misc_feature: MA Experiment 20001560 PARAMETER Experiment Name: At_Drought_Soil_Dry_P Parameter: Treatment Value: Drought vs. No Drought
  misc_feature: MA Experiment ID: 20001757 Result: Up-regulated in Transcription
  misc_feature: MA Experiment 20001757 PARAMETER Experiment Name: At_50mM_NH4NO3_L-to-H_P Parameter: Timepoint (hr) Value: 6
  misc_feature: MA Experiment 20001757 PARAMETER Experiment Name: At_50mM_NH4NO3_L-to-H_P Parameter: Tissue Value: Leaf
  misc_feature: MA Experiment 20001757 PARAMETER Experiment Name: At_50mM_NH4NO3_L-to-H_P Parameter: Treatment Value: 50mM NH4NO3 vs 100mM Mannitol
acaccaaaagctacacaatggctaaaacctctcttcctctcgccgcctccttcctcctcctcatctccttctcctccgccgtagacacttcccgtctcttcctcaccgtcgtcaacaactgtcccttcactgtctggccagccattcaacccaacgccggccaccccgtcctagagaaaggtggcttcgctctcccaactttcactcaccgctccttcaacgttccaaccacacactggtccggtcgcatctgggccagaacctggtgtgcccactacaacggaaaattctcctgcctcaccggagactgcggaaaccgcctggaatgcaacggtctcggcggggcaccaccagcttctctagctcagttcgacctccaccacggtggtcaccacgacttctcctcttacggtgtctctctcgttgacggttacaatgttccgatgaccgtgactcctcacgaaggccatggtgtctgtcctgtcgttggttgtcgtgaagatctaataaaaacgtgtccggctcatcttcaggtccggtcacacagtggacacgtggtggcttgtaagagtgggtgtgaggctttccatacagacgagctgtgttgtcgtggtcattacaatagccctaacacgtgtaaagcttcgagccattcgctgttctttaagcatgcgtgtccttcgagtttcacttttgctcatgatagtccttcgcttatgcatgactgtgcttctcctagagagctcaaagtcatcttctgccactaatgtttcggccatgttctagggttattgtcgtaacatcggactgatcttctaatgcttttgtttggttagtctgattttgattggtttagtatgcgatttcccggttcagttatgtagtccaactatgaaattatgtattatcttgaaattgctctcg

SEQ ID NO: 26172 - protein, 254 aa, Arabidopsis thaliana
  peptide (1)..(254): Ceres Seq. ID no. 13497049
  misc_feature (38)..(254): Pfam Name: Thaumatin family Pfam Description: Thaumatin family
  misc_feature (7)..(253): Homolog of NCBI NO: 37531042 NR Description: putative thaumatin-like protein
  misc_feature (10)..(253): Homolog of NCBI NO: 4105697 NR Description: thaumatin-like protein [Arabidopsis thaliana]
  misc_feature (10)..(253): Homolog of NCBI NO: 15222875 NR Description: thaumatin family [Arabidopsis thaliana]
  misc_feature (6)..(254): Homolog of NCBI NO: 34908134 NR Description: osmotin-like protein [Oryza sativa (japonica
  misc_feature (13)..(254): Homolog of NCBI NO: 5823278 NR Description: osmotin-like protein [Benincasa hispida]
  misc_feature (7)..(254): Homolog of NCBI NO: 2501182 NR Description: OSMOTIN-LIKE PROTEIN PRECURSOR
  misc_feature (6)..(254): Homolog of NCBI NO: 27373045 NR Description: cytokinin-binding protein [Brassica oleracea]
  misc_feature (6)..(254): Homolog of NCBI NO: 27373047 NR Description: cytokinin binding protein [Arabidopsis thaliana]
  misc_feature (6)..(254): Homolog of NCBI NO: 21554129 NR Description: putative thaumatin [Arabidopsis thaliana]
  misc_feature (6)..(254): Homolog of NCBI NO: 15226956 NR Description: osmotin-like protein, putative [Arabidopsis
TKSYTMAKTSLPLAASFLLLISFSSAVDTSRLFLTVVNNCPFTVWPAIQPNAGHPVLEKGGFALPTFTHRSFNVPTTHWSGRIWARTWCAHYNGKFSCLTGDCGNRLECNGLGGAPPASLAQFDLHHGGHHDFSSYGVSLVDGYNVPMTVTPHEGHGVCPVVGCREDLIKTCPAHLQVRSHSGHVVACKSGCEAFHTDELCCRGHYNSPNTCKASSHSLFFKHACPSSFTFAHDSPSLMHDCASPRELKVIFCH

SEQ ID NO: 26173 - protein, 249 aa, Arabidopsis thaliana
  peptide (1)..(249): Ceres Seq. ID no. 13497050
  misc_feature (33)..(249): Pfam Name: Thaumatin family Pfam Description: Thaumatin family
  misc_feature (2)..(248): Homolog of NCBI NO: 37531042 NR Description: putative thaumatin-like protein
  misc_feature (5)..(248): Homolog of NCBI NO: 4105697 NR Description: thaumatin-like protein [Arabidopsis thaliana]
  misc_feature (5)..(248): Homolog of NCBI NO: 15222875 NR Description: thaumatin family [Arabidopsis thaliana]
  misc_feature (1)..(249): Homolog of NCBI NO: 34908134 NR Description: osmotin-like protein [Oryza sativa (japonica
  misc_feature (8)..(249): Homolog of NCBI NO: 5823278 NR Description: osmotin-like protein [Benincasa hispida]
  misc_feature (2)..(249): Homolog of NCBI NO: 2501182 NR Description: OSMOTIN-LIKE PROTEIN PRECURSOR
  misc_feature (1)..(249): Homolog of NCBI NO: 27373045 NR Description: cytokinin-binding protein [Brassica oleracea]
  misc_feature (1)..(249): Homolog of NCBI NO: 27373047 NR Description: cytokinin binding protein [Arabidopsis thaliana]
  misc_feature (1)..(249): Homolog of NCBI NO: 21554129 NR Description: putative thaumatin [Arabidopsis thaliana]
  misc_feature (1)..(249): Homolog of NCBI NO: 15226956 NR Description: osmotin-like protein, putative [Arabidopsis
MAKTSLPLAASFLLLISFSSAVDTSRLFLTVVNNCPFTVWPAIQPNAGHPVLEKGGFALPTFTHRSFNVPTTHWSGRIWARTWCAHYNGKFSCLTGDCGNRLECNGLGGAPPASLAQFDLHHGGHHDFSSYGVSLVDGYNVPMTVTPHEGHGVCPVVGCREDLIKTCPAHLQVRSHSGHVVACKSGCEAFHTDELCCRGHYNSPNTCKASSHSLFFKHACPSSFTFAHDSPSLMHDCASPRELKVIFCH

SEQ ID NO: 26174 - DNA, 1116 bp, Arabidopsis thaliana
  misc_feature (1)..(1116): Ceres Seq. ID no. 12323578
  misc_feature: MA Experiment ID: 20000224 Result: Up-regulated in Transcription
  misc_feature: MA Experiment ID: 20000265 Result: Down-regulated in Transcription
  misc_feature: MA Experiment 20000265 PARAMETER Experiment Name: At_Open_Flower_P Parameter: Age (day) Value: 21
  misc_feature: MA Experiment 20000265 PARAMETER Experiment Name: At_Open_Flower_P Parameter: Plant Line Value: WS
  misc_feature: MA Experiment 20000265 PARAMETER Experiment Name: At_Open_Flower_P Parameter: Tissue Value: Closed Flower vs. Whole Plant
  misc_feature: MA Experiment ID: 20000452 Result: Up-regulated in Transcription
  misc_feature: MA Experiment 20000452 PARAMETER Experiment Name: At_CS6879_Shoots-Roots_P Parameter: Age (day) Value: 14
  misc_feature: MA Experiment 20000452 PARAMETER Experiment Name: At_CS6879_Shoots-Roots_P Parameter: Organism Value: A. thaliana
  misc_feature: MA Experiment 20000452 PARAMETER Experiment Name: At_CS6879_Shoots-Roots_P Parameter: Plant Line Value: CS6879 vs. WS
  misc_feature: MA Experiment 20000452 PARAMETER Experiment Name: At_CS6879_Shoots-Roots_P Parameter: Tissue Value: Shoots
acaaaagtgacatcgtcggaggagaaaaggtagtgccaatattagccggcgattcagatggagacggtggtcgataaagatgttctgaagtcttccggggctgagcttcttcccgacggacgtcgaggtttacgcatccatgactgggagatcgaaaccctccgcggcacgattctcacttctctcgctgtcgaagagtgggaaaaaaagcttaagacatctcacttacctgaaatggtttttggcgagaatgcattagtccttaaacacttaggtagcaacactaagattcattttaatgcgtttgacgcactagctggttggaagcaggaagggcttccacctgttgaagttcctgctgcagcacaatggaaattcaggagccaagccgtctcagcaggtgatactagattatgattacacgtttacaacgccatactgtggaagtgaagtagttgagaaagacaaagaaacgcaggttgaggcaaaagctaatccaaagggggaagctactcttcagtgggagaactgtgaagatcagattgatttggctgctctctcacttaaagaacctattctcttctatgatgaggtagttttgtatgaagatgaactggctgacaatggagtgtcacttctgactgtgaaagtgagagtcatgccaagctcatggttcctcctcttgcgattttggctgagagttgatggtgtgcttatgagattgagagagacgagaatgcattataggtttggcgaagatgaggcaccaactgttcttcgtgaaaactgttggagagaagcaacatttcagtctctatctgcgaaagggtatccagttgacttagcagtctggagcgacccgagctccatcagtcagaggcttccagtgattaagcatacgacacagaaactgaagatccctagtaaagtttaagctgtttataaagttgcaaattatatccaaaagaacgtaccgatgagctttctttacagccaaacaaactacttactattgaaaaaggagttactccactgacttattgtggtggtttcatatgaacattcaaacccttttcacgttgttcttacactcttattgttccctaccttgttccc

SEQ ID NO: 26175 - protein, 119 aa, Arabidopsis thaliana
  peptide (1)..(119): Ceres Seq. ID no. 12323579
  misc_feature (60)..(110): Pfam Name: TIP41-like family Pfam Description: TIP41-like family
  misc_feature (60)..(97): Homolog of NCBI NO: 5031530 NR Description: putative cytoskeletal protein [Arabidopsis
  misc_feature (9)..(86): Homolog of NCBI NO: 6325297 NR Description: SDF1 the first obserwed null phenotype was
  misc_feature (15)..(106): Homolog of NCBI NO: 40739133 NR Description: hypothetical protein AN5814.2 [Aspergillus
  misc_feature (32)..(115): Homolog of NCBI NO: 32403164 NR Description: hypothetical protein [Neurospora crassa]
  misc_feature (30)..(106): Homolog of NCBI NO: 34880821 NR Description: similar to CG9578-like [Rattus norvegicus]
  misc_feature (30)..(106): Homolog of NCBI NO: 21704010 NR Description: similar to CG9578 gene product [Mus musculus]
  misc_feature (30)..(106): Homolog of NCBI NO: 23097250 NR Description: similar to CG9578 gene product
  misc_feature (10)..(110): Homolog of NCBI NO: 14488361 NR Description: unknown protein [Oryza sativa (japonica
  misc_feature (60)..(110): Homolog of NCBI NO: 7485322 NR Description: hypothetical protein F10M10.40 - Arabidopsis
  misc_feature (1)..(110): Homolog of NCBI NO: 22329154 NR Description: putative protein
METVVDKDVLKSSGAELLPDGRRGLRIHDWEIETLRGTILTSLAVEEWEKKLKTSHLPEMVFGENALVLKHLGSNTKIHFNAFDALAGWKQEGLPPVEVPAAAQWKFRSQAVSAGDTRL

SEQ ID NO: 26176 - protein, 91 aa, Arabidopsis thaliana
  peptide (1)..(91): Ceres Seq. ID no. 12323580
  misc_feature (1)..(55): Pfam Name: TIP41-like family Pfam Description: TIP41-like family
  misc_feature (1)..(88): Homolog of NCBI NO: 34784442 NR Description: Unknown (protein for MGC:66327) [Danio rerio]
  misc_feature (1)..(79): Homolog of NCBI NO: 6325297 NR Description: SDF1 the first obserwed null phenotype was
  misc_feature (1)..(85): Homolog of NCBI NO: 40739133 NR Description: hypothetical protein AN5814.2 [Aspergillus
  misc_feature (1)..(85): Homolog of NCBI NO: 32403164 NR Description: hypothetical protein [Neurospora crassa]
  misc_feature (1)..(91): Homolog of NCBI NO: 34880821 NR Description: similar to CG9578-like [Rattus norvegicus]
  misc_feature (1)..(91): Homolog of NCBI NO: 21704010 NR Description: similar to CG9578 gene product [Mus musculus]
  misc_feature (1)..(91): Homolog of NCBI NO: 23097250 NR Description: similar to CG9578 gene product
  misc_feature (1)..(89): Homolog of NCBI NO: 14488361 NR Description: unknown protein [Oryza sativa (japonica
  misc_feature (1)..(91): Homolog of NCBI NO: 7485322 NR Description: hypothetical protein F10M10.40 - Arabidopsis
  misc_feature (1)..(91): Homolog of NCBI NO: 22329154 NR Description: putative protein
MPSSWFLLLRFWLRVDGVLMRLRETRMHYRFGEDEAPTVLRENCWREATFQSLSAKGYPVDLAVWSDPSSISQRLPVIKHTTQKLKIPSKV

SEQ ID NO: 26177 - protein, 72 aa, Arabidopsis thaliana
  peptide (1)..(72): Ceres Seq. ID no. 12323581
  misc_feature (1)..(69): Homolog of NCBI NO: 34784442 NR Description: Unknown (protein for MGC:66327) [Danio rerio]
  misc_feature (1)..(60): Homolog of NCBI NO: 6325297 NR Description: SDF1 the first obserwed null phenotype was
  misc_feature (1)..(66): Homolog of NCBI NO: 40739133 NR Description: hypothetical protein AN5814.2 [Aspergillus
  misc_feature (1)..(66): Homolog of NCBI NO: 32403164 NR Description: hypothetical protein [Neurospora crassa]
  misc_feature (1)..(72): Homolog of NCBI NO: 34880821 NR Description: similar to CG9578-like [Rattus norvegicus]
  misc_feature (1)..(72): Homolog of NCBI NO: 21704010 NR Description: similar to CG9578 gene product [Mus musculus]
  misc_feature (1)..(72): Homolog of NCBI NO: 23097250 NR Description: similar to CG9578 gene product
  misc_feature (1)..(70): Homolog of NCBI NO: 14488361 NR Description: unknown protein [Oryza sativa (japonica
  misc_feature (1)..(72): Homolog of NCBI NO: 7485322 NR Description: hypothetical protein F10M10.40 - Arabidopsis
  misc_feature (1)..(72): Homolog of NCBI NO: 22329154 NR Description: putative protein
MRLRETRMHYRFGEDEAPTVLRENCWREATFQSLSAKGYPVDLAVWSDPSSISQRLPVIKHTTQKLKIPSKV

SEQ ID NO: 26178 - DNA, 1295 bp, Arabidopsis thaliana
  misc_feature (1)..(1295): Ceres Seq. ID no. 12324151
  misc_feature: MA Experiment ID: 108595 Result: Down-regulated in Transcription
  misc_feature: MA Experiment 108595 PARAMETER Experiment Name: At_Ler-pi_Ovule_cDNA_P Parameter: Plant Line Value: null
  misc_feature: MA Experiment ID: 20000071 Result: Up-regulated in Transcription
  misc_feature: MA Experiment 20000071 PARAMETER Experiment Name: At_100uM_ABA_Mutants_cDNA_P Parameter: Plant Line Value: CS8104
  misc_feature: MA Experiment 20000071 PARAMETER Experiment Name: At_100uM_ABA_Mutants_cDNA_P Parameter: Timepoint (hr) Value: 6
  misc_feature: MA Experiment 20000071 PARAMETER Experiment Name: At_100uM_ABA_Mutants_cDNA_P Parameter: Tissue Value: Aerial
  misc_feature: MA Experiment 20000071 PARAMETER Experiment Name: At_100uM_ABA_Mutants_cDNA_P Parameter: Treatment Value: 100uM ABA vs. No Treatment
  misc_feature: MA Experiment ID: 20000089 Result: Up-regulated in Transcription
  misc_feature: MA Experiment ID: 20000111 Result: Down-regulated in Transcription
  misc_feature: MA Experiment 20000111 PARAMETER Experiment Name: At_42deg_Heat_cDNA_P Parameter: Temperature (deg C) Value: 42 vs. 22
  misc_feature: MA Experiment 20000111 PARAMETER Experiment Name: At_42deg_Heat_cDNA_P Parameter: Timepoint (hr) Value: 6
  misc_feature: MA Experiment 20000111 PARAMETER Experiment Name: At_42deg_Heat_cDNA_P Parameter: Tissue Value: Aerial
  misc_feature: MA Experiment ID: 20000224 Result: Down-regulated in Transcription
  misc_feature: MA Experiment ID: 20000328 Result: Down-regulated in Transcription
  misc_feature: MA Experiment 20000328 PARAMETER Experiment Name: At_42deg_Heat_Sub_P Parameter: Age (day) Value: 14
  misc_feature: MA Experiment 20000328 PARAMETER Experiment Name: At_42deg_Heat_Sub_P Parameter: Organism Value: A. thaliana
  misc_feature: MA Experiment 20000328 PARAMETER Experiment Name: At_42deg_Heat_Sub_P Parameter: Plant Line Value: WS
  misc_feature: MA Experiment 20000328 PARAMETER Experiment Name: At_42deg_Heat_Sub_P Parameter: Temperature (deg C) Value: 42 vs. 22
  misc_feature: MA Experiment 20000328 PARAMETER Experiment Name: At_42deg_Heat_Sub_P Parameter: Timepoint (hr) Value: 6
  misc_feature: MA Experiment 20000328 PARAMETER Experiment Name: At_42deg_Heat_Sub_P Parameter: Tissue Value: Aerial
ataatcatctaaagactcagccttttaagtatccccagaagtcgtatgaccttacgtagcttaatccttgagatgcgttcgagaccgcatcgtgtggtccacgaccttgccgccgccgcagctgccgattccacttctgtgtcatcgcaagattatcgctggtcagagattcctgaagagcttcttagggagattctgattcgtgttgaagcggcggacggtggcggatggccgtcacgacgcagcgtggtggcttgtgccggcgtttgtcgtggctggcggctacttatgaacgaaaccgtcgttgtccctgagatctcttctaagttgactttccccatctctctcaagcagcctggtccaagggattcactgtttcaatgctttatcaaacgtaatcgaattacgcaatcatatcatctctatctcggattaaccaactctttaacggatgatgggaagtttttgcttgctgcgtgtaagttgaagcacacaacttgtacggattacattatctctttacgttctgatgatatgtcgagaagaagccaagcttatgttggcaaagtgagatcgaacttcctaggaacgaaattcactgtctttgatggaaatctgctgccttcaacgggagccgcaaagttgagaaagagccgatcttataatcccgcaaaagtttcagcaaaagttcctcttggaagttatcctgtcgctcatatcacatatgagctgaatgtcttaggatcccggggaccaagaaagatgcaatgtcttatggacacaatacctacaagcacaatggagcctcaaggagtagcttcagaaccatcagagtttcccttactcggtactcggtcaaccttatccaggtctcagtcaaaaccattacgcagtagctcaagccacctgaaagaaacaccattagtgctgagcaacaagacaccacggtggcacgagcagctacgctgctggtgcttgaatttccatggccgtgtcacagtagcgtcagtgaagaactttcagctcgtggcagcaggagctagctgtggcagtggcacgggaatgtcaccggagaggcagagcgagcggattatattgcagtttgggaaagtcgggaaagatatgttcacgatggattatggatacccgatctcagctttccaggcttttgccatttgcttgagcagctttgagactagaatcgcttgtgaatgatttacaagactttgttaagatatcgctatatctatcttgtaaagagcaatttgtagccttttgtaaattgtgttcttttt

SEQ ID NO: 26179 - protein, 389 aa, Arabidopsis thaliana
  peptide (1)..(389): Ceres Seq. ID no. 12324152
  misc_feature (105)..(389): Pfam Name: Tub family Pfam Description: Tub family
  misc_feature (11)..(389): Homolog of NCBI NO: 25409071 NR Description: probable Tub family protein [imported] -
  misc_feature (11)..(389): Homolog of NCBI NO: 30690823 NR Description: F-box containing tubby family protein
  misc_feature (39)..(389): Homolog of NCBI NO: 30680328 NR Description: F-box containing tubby family protein
  misc_feature (1)..(284): Homolog of NCBI NO: 38637048 NR Description: putative chain A, C-terminal domain of mouse
  misc_feature (28)..(289): Homolog of NCBI NO: 34908598 NR Description: putative tubby protein [Oryza sativa (japonica
  misc_feature (11)..(389): Homolog of NCBI NO: 34899264 NR Description: contains ESTs
  misc_feature (285)..(389): Homolog of NCBI NO: 34908598 NR Description: putative tubby protein [Oryza sativa (japonica
  misc_feature (271)..(389): Homolog of NCBI NO: 38637048 NR Description: putative chain A, C-terminal domain of mouse
  misc_feature (1)..(389): Homolog of NCBI NO: 15230707 NR Description: F-box containing tubby family protein; protein
  misc_feature (1)..(389): Homolog of NCBI NO: 22326885 NR Description: F-box containing tubby family protein; protein
MTLRSLILEMRSRPHRVVHDLAAAAAADSTSVSSQDYRWSEIPEELLREILIRVEAADGGGWPSRRSVVACAGVCRGWRLLMNETVVVPEISSKLTFPISLKQPGPRDSLFQCFIKRNRITQSYHLYLGLTNSLTDDGKFLLAACKLKHTTCTDYIISLRSDDMSRRSQAYVGKVRSNFLGTKFTVFDGNLLPSTGAAKLRKSRSYNPAKVSAKVPLGSYPVAHITYELNVLGSRGPRKMQCLMDTIPTSTMEPQGVASEPSEFPLLGTRSTLSRSQSKPLRSSSSHLKETPLVLSNKTPRWHEQLRCWCLNFHGRVTVASVKNFQLVAAGASCGSGTGMSPERQSERIILQFGKVGKDMFTMDYGYPISAFQAFAICLSSFETRIACE

SEQ ID NO: 26180 - protein, 380 aa, Arabidopsis thaliana
  peptide (1)..(380): Ceres Seq. ID no. 12324153
  misc_feature (96)..(380): Pfam Name: Tub family Pfam Description: Tub family
  misc_feature (30)..(380): Homolog of NCBI NO: 30680328 NR Description: F-box containing tubby family protein
  misc_feature (262)..(380): Homolog of NCBI NO: 38637048 NR Description: putative chain A, C-terminal domain of mouse
  misc_feature (1)..(275): Homolog of NCBI NO: 38637048 NR Description: putative chain A, C-terminal domain of mouse
  misc_feature (276)..(380): Homolog of NCBI NO: 34908598 NR Description: putative tubby protein [Oryza sativa (japonica
  misc_feature (19)..(280): Homolog of NCBI NO: 34908598 NR Description: putative tubby protein [Oryza sativa (japonica
  misc_feature (2)..(380): Homolog of NCBI NO: 34899264 NR Description: contains ESTs
  misc_feature (2)..(380): Homolog of NCBI NO: 25409071 NR Description: probable Tub family protein [imported] -
  misc_feature (2)..(380): Homolog of NCBI NO: 30690823 NR Description: F-box containing tubby family protein
  misc_feature (1)..(380): Homolog of NCBI NO: 15230707 NR Description: F-box containing tubby family protein; protein
  misc_feature (1)..(380): Homolog of NCBI NO: 22326885 NR Description: F-box containing tubby family protein; protein
MRSRPHRVVHDLAAAAAADSTSVSSQDYRWSEIPEELLREILIRVEAADGGGWPSRRSVVACAGVCRGWRLLMNETVVVPEISSKLTFPISLKQPGPRDSLFQCFIKRNRITQSYHLYLGLTNSLTDDGKFLLAACKLKHTTCTDYIISLRSDDMSRRSQAYVGKVRSNFLGTKFTVFDGNLLPSTGAAKLRKSRSYNPAKVSAKVPLGSYPVAHITYELNVLGSRGPRKMQCLMDTIPTSTMEPQGVASEPSEFPLLGTRSTLSRSQSKPLRSSSSHLKETPLVLSNKTPRWHEQLRCWCLNFHGRVTVASVKNFQLVAAGASCGSGTGMSPERQSERIILQFGKVGKDMFTMDYGYPISAFQAFAICLSSFETRIACE

SEQ ID NO: 26181 - protein, 308 aa, Arabidopsis thaliana
  peptide (1)..(308): Ceres Seq. ID no. 12324154
  misc_feature (24)..(308): Pfam Name: Tub family Pfam Description: Tub family
  misc_feature (1)..(308): Homolog of NCBI NO: 30680328 NR Description: F-box containing tubby family protein
  misc_feature (190)..(308): Homolog of NCBI NO: 38637048 NR Description: putative chain A, C-terminal domain of mouse
  misc_feature (1)..(203): Homolog of NCBI NO: 38637048 NR Description: putative chain A, C-terminal domain of mouse
  misc_feature (204)..(308): Homolog of NCBI NO: 34908598 NR Description: putative tubby protein [Oryza sativa (japonica
  misc_feature (1)..(208): Homolog of NCBI NO: 34908598 NR Description: putative tubby protein [Oryza sativa (japonica
  misc_feature (1)..(308): Homolog of NCBI NO: 34899264 NR Description: contains ESTs
  misc_feature (1)..(308): Homolog of NCBI NO: 25409071 NR Description: probable Tub family protein [imported] -
  misc_feature (1)..(308): Homolog of NCBI NO: 30690823 NR Description: F-box containing tubby family protein
  misc_feature (1)..(308): Homolog of NCBI NO: 15230707 NR Description: F-box containing tubby family protein; protein
  misc_feature (1)..(308): Homolog of NCBI NO: 22326885 NR Description: F-box containing tubby family protein; protein
MNETVVVPEISSKLTFPISLKQPGPRDSLFQCFIKRNRITQSYHLYLGLTNSLTDDGKFLLAACKLKHTTCTDYIISLRSDDMSRRSQAYVGKVRSNFLGTKFTVFDGNLLPSTGAAKLRKSRSYNPAKVSAKVPLGSYPVAHITYELNVLGSRGPRKMQCLMDTIPTSTMEPQGVASEPSEFPLLGTRSTLSRSQSKPLRSSSSHLKETPLVLSNKTPRWHEQLRCWCLNFHGRVTVASVKNFQLVAAGASCGSGTGMSPERQSERIILQFGKVGKDMFTMDYGYPISAFQAFAICLSSFETRIACE

SEQ ID NO: 26182 - DNA, 1438 bp, Arabidopsis thaliana
  misc_feature (1)..(1438): Ceres Seq. ID no. 12371731
  misc_feature: MA Experiment ID: 20000234 Result: Up-regulated in Transcription
  misc_feature: MA Experiment 20000234 PARAMETER Experiment Name: At_Siliques_P Parameter: Age (day) Value: 21
  misc_feature: MA Experiment 20000234 PARAMETER Experiment Name: At_Siliques_P Parameter: Organism Value: A. thaliana
  misc_feature: MA Experiment 20000234 PARAMETER Experiment Name: At_Siliques_P Parameter: Plant Line Value: WS
  misc_feature: MA Experiment 20000234 PARAMETER Experiment Name: At_Siliques_P Parameter: Tissue Value: Less Than 5mm Siliques vs. Whole Plant
  misc_feature: MA Experiment ID: 20000264 Result: Up-regulated in Transcription
  misc_feature: MA Experiment 20000264 PARAMETER Experiment Name: At_Open_Flower_P Parameter: Age (day) Value: 21
  misc_feature: MA Experiment 20000264 PARAMETER Experiment Name: At_Open_Flower_P Parameter: Plant Line Value: WS
  misc_feature: MA Experiment 20000264 PARAMETER Experiment Name: At_Open_Flower_P Parameter: Tissue Value: Open Flower vs. Whole Plant
ctctgtgtcgcctgaagtgataacattctcattattcacccaaggagagagatcggagctaaaaagccatctctcgccggaaaatttctcagttttcttattaccttagccacagacaacaagacgacagaggaatctaatcttagccccctttcctctctgtctctctctatatctctgtctttaggctttgagatatcttcaacacgaagctttttgcttcttttttttatctctttaaaaaattccagccaatggttcgaatccaatagtagcttcaaaggtcatggatttagtcaggggtttgtggaggaaacatagaaggaagattttggtgacgacgacttgtttgggaagtgggtatttgctctataaactatacaatgcccatactcgtaagctcgctgatttggaacgagagcttgctaatgagcgtgaaaacgacgagatcatcaaaacccaaatgaaggcacatttcgataacattcagatgattgctgatactactacattgcctcacgcaattcatcacttgagtagtcgtgtagttgaagagattgatgtctcgagtattatggataagctaagcaaaggcaaaggaatattgattccttctgagaagcttcaactctggaatgagctcaaaattttgagtttcacgagaatggtcttgtccctttggtcggtcactatgcttagtttgtacattagggttcaagtcaatattttgggcagacatttatatatcgacactgctagaggtcttgggagctcccatttacttgacgaactagatctcatagagagagatgatgaacaaaagtttttgacaagcgctgattttcttgcgaccagtggcatgccgagtttgatttctaacatgcagaacgcagtgaaagaagttctcaagggaaagcagttaaaggatgtgttaaccacaagtgctcttcgagaaactgtgatgcggattctcgatgtgtttatgagcacaggaagtccacaccactgggtagattatctaatgatgtcccaagacgcaaccactgatgtttcctcttctgatgcaactgttaccaagtttcatctactcataaccgagacacgggaagtactcgcaagcaatgatttttcaaatgtagcagagatctcactcaagtgttgtgccgttgcgttagtagaggagatggaaacgcagaccggtctggccacagggatgcaattggcaaagctattaccacagattgagaaaaccatgccggagatttcagctgagccggagaagaaccggttcttgcaactcatccgagatttgcctgaagttaaactcttttttactcttttatacgcaaatatgcctcagtagcattattaaaccccattgccaaaaattgtttcctgatcactttttatcatatgtttcaatttacttcaaaatagt

SEQ ID NO: 26183 - protein, 358 aa, Arabidopsis thaliana
  peptide (1)..(358): Ceres Seq. ID no. 12371732
  misc_feature (11)..(62): Pfam Name: Peroxin-3 Pfam Description: Peroxin-3
  misc_feature (3)..(300): Homolog of NCBI NO: 12230450 NR Description: Peroxisomal assembly protein PEX3 (Peroxin-3)
  misc_feature (9)..(353): Homolog of NCBI NO: 28278477 NR Description: Similar to peroxisomal biogenesis factor 3 [Danio
  misc_feature (167)..(358): Homolog of NCBI NO: 9294071 NR Description: gene_id:MRC8.15~unknown protein [Arabidopsis
  misc_feature (10)..(62): Homolog of NCBI NO: 12321594 NR Description: hypothetical protein, 3' partial [Arabidopsis
  misc_feature (55)..(334): Homolog of NCBI NO: 12321594 NR Description: hypothetical protein, 3' partial [Arabidopsis
  misc_feature (10)..(62): Homolog of NCBI NO: 12597815 NR Description: lysine and histidine specific transporter,
  misc_feature (55)..(345): Homolog of NCBI NO: 12597815 NR Description: lysine and histidine specific transporter,
  misc_feature (1)..(358): Homolog of NCBI NO: 22330115 NR Description: expressed protein
  misc_feature (1)..(358): Homolog of NCBI NO: 18401790 NR Description: expressed protein
  misc_feature (1)..(358): Homolog of NCBI NO: 21554142 NR Description: unknown [Arabidopsis thaliana]
MDLVRGLWRKHRRKILVTTTCLGSGYLLYKLYNAHTRKLADLERELANERENDEIIKTQMKAHFDNIQMIADTTTLPHAIHHLSSRVVEEIDVSSIMDKLSKGKGILIPSEKLQLWNELKILSFTRMVLSLWSVTMLSLYIRVQVNILGRHLYIDTARGLGSSHLLDELDLIERDDEQKFLTSADFLATSGMPSLISNMQNAVKEVLKGKQLKDVLTTSALRETVMRILDVFMSTGSPHHWVDYLMMSQDATTDVSSSDATVTKFHLLITETREVLASNDFSNVAEISLKCCAVALVEEMETQTGLATGMQLAKLLPQIEKTMPEISAEPEKNRFLQLIRDLPEVKLFFTLLYANMPQ

SEQ ID NO: 26184 - protein, 299 aa, Arabidopsis thaliana
  peptide (1)..(299): Ceres Seq. ID no. 12371733
  misc_feature (1)..(286): Pfam Name: Peroxin-3 Pfam Description: Peroxin-3
  misc_feature (1)..(241): Homolog of NCBI NO: 9910484 NR Description: peroxisomal biogenesis factor 3; peroxisomal
  misc_feature (1)..(241): Homolog of NCBI NO: 4505727 NR Description: peroxisomal biogenesis factor 3 [Homo sapiens]
  misc_feature (1)..(241): Homolog of NCBI NO: 12230450 NR Description: Peroxisomal assembly protein PEX3 (Peroxin-3)
  misc_feature (1)..(294): Homolog of NCBI NO: 28278477 NR Description: Similar to peroxisomal biogenesis factor 3 [Danio
  misc_feature (108)..(299): Homolog of NCBI NO: 9294071 NR Description: gene_id:MRC8.15~unknown protein [Arabidopsis
  misc_feature (1)..(275): Homolog of NCBI NO: 12321594 NR Description: hypothetical protein, 3' partial [Arabidopsis
  misc_feature (1)..(286): Homolog of NCBI NO: 12597815 NR Description: lysine and histidine specific transporter,
  misc_feature (1)..(299): Homolog of NCBI NO: 22330115 NR Description: expressed protein
  misc_feature (1)..(299): Homolog of NCBI NO: 18401790 NR Description: expressed protein
  misc_feature (1)..(299): Homolog of NCBI NO: 21554142 NR Description: unknown [Arabidopsis thaliana]
MKAHFDNIQMIADTTTLPHAIHHLSSRVVEEIDVSSIMDKLSKGKGILIPSEKLQLWNELKILSFTRMVLSLWSVTMLSLYIRVQVNILGRHLYIDTARGLGSSHLLDELDLIERDDEQKFLTSADFLATSGMPSLISNMQNAVKEVLKGKQLKDVLTTSALRETVMRILDVFMSTGSPHHWVDYLMMSQDATTDVSSSDATVTKFHLLITETREVLASNDFSNVAEISLKCCAVALVEEMETQTGLATGMQLAKLLPQIEKTMPEISAEPEKNRFLQLIRDLPEVKLFFTLLYANMPQ

SEQ ID NO: 26185 - protein, 290 aa, Arabidopsis thaliana
  peptide (1)..(290): Ceres Seq. ID no. 12371734
  misc_feature (1)..(277): Pfam Name: Peroxin-3 Pfam Description: Peroxin-3
  misc_feature (1)..(232): Homolog of NCBI NO: 9910484 NR Description: peroxisomal biogenesis factor 3; peroxisomal
  misc_feature (1)..(232): Homolog of NCBI NO: 4505727 NR Description: peroxisomal biogenesis factor 3 [Homo sapiens]
  misc_feature (1)..(232): Homolog of NCBI NO: 12230450 NR Description: Peroxisomal assembly protein PEX3 (Peroxin-3)
  misc_feature (1)..(285): Homolog of NCBI NO: 28278477 NR Description: Similar to peroxisomal biogenesis factor 3 [Danio
  misc_feature (99)..(290): Homolog of NCBI NO: 9294071 NR Description: gene_id:MRC8.15~unknown protein [Arabidopsis
  misc_feature (1)..(266): Homolog of NCBI NO: 12321594 NR Description: hypothetical protein, 3' partial [Arabidopsis
  misc_feature (1)..(277): Homolog of NCBI NO: 12597815 NR Description: lysine and histidine specific transporter,
  misc_feature (1)..(290): Homolog of NCBI NO: 22330115 NR Description: expressed protein
  misc_feature (1)..(290): Homolog of NCBI NO: 18401790 NR Description: expressed protein
  misc_feature (1)..(290): Homolog of NCBI NO: 21554142 NR Description: unknown [Arabidopsis thaliana]
MIADTTTLPHAIHHLSSRVVEEIDVSSIMDKLSKGKGILIPSEKLQLWNELKILSFTRMVLSLWSVTMLSLYIRVQVNILGRHLYIDTARGLGSSHLLDELDLIERDDEQKFLTSADFLATSGMPSLISNMQNAVKEVLKGKQLKDVLTTSALRETVMRILDVFMSTGSPHHWVDYLMMSQDATTDVSSSDATVTKFHLLITETREVLASNDFSNVAEISLKCCAVALVEEMETQTGLATGMQLAKLLPQIEKTMPEISAEPEKNRFLQLIRDLPEVKLFFTLLYANMPQ

SEQ ID NO: 26186 - DNA, 694 bp, Arabidopsis thaliana
  misc_feature (1)..(694): Ceres Seq. ID no. 13580701
  misc_feature: MA Experiment ID: 20000171 Result: Up-regulated in Transcription
  misc_feature: MA Experiment 20000171 PARAMETER Experiment Name: At_42deg_Heat_P Parameter: Age (day) Value: 14
  misc_feature: MA Experiment 20000171 PARAMETER Experiment Name: At_42deg_Heat_P Parameter: Organism Value: A. thaliana
  misc_feature: MA Experiment 20000171 PARAMETER Experiment Name: At_42deg_Heat_P Parameter: Plant Line Value: WS
  misc_feature: MA Experiment 20000171 PARAMETER Experiment Name: At_42deg_Heat_P Parameter: Temperature (deg C) Value: 42 vs. 22
  misc_feature: MA Experiment 20000171 PARAMETER Experiment Name: At_42deg_Heat_P Parameter: Timepoint (hr) Value: 1
  misc_feature: MA Experiment 20000171 PARAMETER Experiment Name: At_42deg_Heat_P Parameter: Tissue Value: Aerial
  misc_feature: MA Experiment ID: 20000184 Result: Up-regulated in Transcription
  misc_feature: MA Experiment 20000184 PARAMETER Experiment Name: At_Shoots__P Parameter: Age (day) Value: 7
  misc_feature: MA Experiment 20000184 PARAMETER Experiment Name: At_Shoots__P Parameter: Tissue Value: Shoots vs. Whole Plant
  misc_feature: MA Experiment ID: 20000185 Result: Up-regulated in Transcription
  misc_feature: MA Experiment 20000185 PARAMETER Experiment Name: At_Roots__P Parameter: Age (day) Value: 7 vs. 21
  misc_feature: MA Experiment 20000185 PARAMETER Experiment Name: At_Roots__P Parameter: Organism Value: A. thaliana
  misc_feature: MA Experiment 20000185 PARAMETER Experiment Name: At_Roots__P Parameter: Tissue Value: Roots vs. Whole Plant
  misc_feature: MA Experiment ID: 20000234 Result: Down-regulated in Transcription
  misc_feature: MA Experiment 20000234 PARAMETER Experiment Name: At_Siliques_P Parameter: Age (day) Value: 21
  misc_feature: MA Experiment 20000234 PARAMETER Experiment Name: At_Siliques_P Parameter: Organism Value: A. thaliana
  misc_feature: MA Experiment 20000234 PARAMETER Experiment Name: At_Siliques_P Parameter: Plant Line Value: WS
  misc_feature: MA Experiment 20000234 PARAMETER Experiment Name: At_Siliques_P Parameter: Tissue Value: Less Than 5mm Siliques vs. Whole Plant
  misc_feature: MA Experiment ID: 20000235 Result: Down-regulated in Transcription
  misc_feature: MA Experiment 20000235 PARAMETER Experiment Name: At_Siliques_P Parameter: Age (day) Value: 21
  misc_feature: MA Experiment 20000235 PARAMETER Experiment Name: At_Siliques_P Parameter: Organism Value: A. thaliana
  misc_feature: MA Experiment 20000235 PARAMETER Experiment Name: At_Siliques_P Parameter: Plant Line Value: WS
  misc_feature: MA Experiment 20000235 PARAMETER Experiment Name: At_Siliques_P Parameter: Tissue Value: 5-10mm Siliques vs. Whole Plant
  misc_feature: MA Experiment ID: 20000269 Result: Down-regulated in Transcription
  misc_feature: MA Experiment 20000269 PARAMETER Experiment Name: At_1mM_KNO3_L-vs-H_Roots_P Parameter: Age (day) Value: 7,10,12
  misc_feature: MA Experiment 20000269 PARAMETER Experiment Name: At_1mM_KNO3_L-vs-H_Roots_P Parameter: Organism Value: A. thaliana
  misc_feature: MA Experiment 20000269 PARAMETER Experiment Name: At_1mM_KNO3_L-vs-H_Roots_P Parameter: Plant Line Value: WS
  misc_feature: MA Experiment 20000269 PARAMETER Experiment Name: At_1mM_KNO3_L-vs-H_Roots_P Parameter: Timepoint (day) Value: 7,10,12
  misc_feature: MA Experiment 20000269 PARAMETER Experiment Name: At_1mM_KNO3_L-vs-H_Roots_P Parameter: Tissue Value: Roots
  misc_feature: MA Experiment 20000269 PARAMETER Experiment Name: At_1mM_KNO3_L-vs-H_Roots_P Parameter: Treatment Value: 1mM KNO3 vs. 50mM KNO3
  misc_feature: MA Experiment ID: 20000438 Result: Up-regulated in Transcription
  misc_feature: MA Experiment 20000438 PARAMETER Experiment Name: At_Shoots__P Parameter: Age (day) Value: 14
  misc_feature: MA Experiment 20000438 PARAMETER Experiment Name: At_Shoots__P Parameter: Tissue Value: Shoots vs. Whole Plant
  misc_feature: MA Experiment ID: 20000439 Result: Up-regulated in Transcription
  misc_feature: MA Experiment 20000439 PARAMETER Experiment Name: At_Roots__P Parameter: Age (day) Value: 14 vs. 21
  misc_feature: MA Experiment 20000439 PARAMETER Experiment Name: At_Roots__P Parameter: Organism Value: A. thaliana
  misc_feature: MA Experiment 20000439 PARAMETER Experiment Name: At_Roots__P Parameter: Tissue Value: Roots vs. Whole Plant
  misc_feature: MA Experiment ID: 20000451 Result: Down-regulated in Transcription
  misc_feature: MA Experiment 20000451 PARAMETER Experiment Name: At_CS6879_Shoots-Roots_P Parameter: Age (day) Value: 14
  misc_feature: MA Experiment 20000451 PARAMETER Experiment Name: At_CS6879_Shoots-Roots_P Parameter: Organism Value: A. thaliana
  misc_feature: MA Experiment 20000451 PARAMETER Experiment Name: At_CS6879_Shoots-Roots_P Parameter: Plant Line Value: CS6879 vs. WS
  misc_feature: MA Experiment 20000451 PARAMETER Experiment Name: At_CS6879_Shoots-Roots_P Parameter: Tissue Value: Roots
  misc_feature: MA Experiment ID: 20000452 Result: Down-regulated in Transcription
  misc_feature: MA Experiment 20000452 PARAMETER Experiment Name: At_CS6879_Shoots-Roots_P Parameter: Age (day) Value: 14
  misc_feature: MA Experiment 20000452 PARAMETER Experiment Name: At_CS6879_Shoots-Roots_P Parameter: Organism Value: A. thaliana
  misc_feature: MA Experiment 20000452 PARAMETER Experiment Name: At_CS6879_Shoots-Roots_P Parameter: Plant Line Value: CS6879 vs. WS
  misc_feature: MA Experiment 20000452 PARAMETER Experiment Name: At_CS6879_Shoots-Roots_P Parameter: Tissue Value: Shoots
  misc_feature: MA Experiment ID: 20000453 Result: Up-regulated in Transcription
  misc_feature: MA Experiment 20000453 PARAMETER Experiment Name: At_100uM_ABA_P Parameter: Age (day) Value: 15
  misc_feature: MA Experiment 20000453 PARAMETER Experiment Name: At_100uM_ABA_P Parameter: Organism Value: A. thaliana
  misc_feature: MA Experiment 20000453 PARAMETER Experiment Name: At_100uM_ABA_P Parameter: Plant Line Value: WS
  misc_feature: MA Experiment 20000453 PARAMETER Experiment Name: At_100uM_ABA_P Parameter: Timepoint (hr) Value: 24
  misc_feature: MA Experiment 20000453 PARAMETER Experiment Name: At_100uM_ABA_P Parameter: Tissue Value: Aerial
  misc_feature: MA Experiment 20000453 PARAMETER Experiment Name: At_100uM_ABA_P Parameter: Treatment Value: 100uM ABA vs. No Treatment
  misc_feature: MA Experiment ID: 20000455 Result: Up-regulated in Transcription
  misc_feature: MA Experiment 20000455 PARAMETER Experiment Name: At_100uM_ABA_P Parameter: Age (day) Value: 16
  misc_feature: MA Experiment 20000455 PARAMETER Experiment Name: At_100uM_ABA_P Parameter: Organism Value: A. thaliana
  misc_feature: MA Experiment 20000455 PARAMETER Experiment Name: At_100uM_ABA_P Parameter: Plant Line Value: WS
  misc_feature: MA Experiment 20000455 PARAMETER Experiment Name: At_100uM_ABA_P Parameter: Timepoint (hr) Value: 48
  misc_feature: MA Experiment 20000455 PARAMETER Experiment Name: At_100uM_ABA_P Parameter: Tissue Value: Aerial
  misc_feature: MA Experiment 20000455 PARAMETER Experiment Name: At_100uM_ABA_P Parameter: Treatment Value: 100uM ABA vs. No Treatment
  misc_feature: MA Experiment ID: 20000495 Result: Up-regulated in Transcription
  misc_feature: MA Experiment 20000495 PARAMETER Experiment Name: At_Guard_Cells_P Parameter: Harvest Date Value: 8/2/2002
  misc_feature: MA Experiment 20000495 PARAMETER Experiment Name: At_Guard_Cells_P Parameter: Organism Value: A. thaliana
  misc_feature: MA Experiment 20000495 PARAMETER Experiment Name: At_Guard_Cells_P Parameter: Tissue Value: Guard Cells vs. Leaves
  misc_feature: MA Experiment ID: 20000709 Result: Up-regulated in Transcription
  misc_feature: MA Experiment 20000709 PARAMETER Experiment Name: At_15mM_NH4NO3_L-to-H_P Parameter: Age (hr) Value: 14
  misc_feature: MA Experiment 20000709 PARAMETER Experiment Name: At_15mM_NH4NO3_L-to-H_P Parameter: Organism Value: A. thaliana
  misc_feature: MA Experiment 20000709 PARAMETER Experiment Name: At_15mM_NH4NO3_L-to-H_P Parameter: Plant Line Value: WS
  misc_feature: MA Experiment 20000709 PARAMETER Experiment Name: At_15mM_NH4NO3_L-to-H_P Parameter: Timepoint (hr) Value: 4
  misc_feature: MA Experiment 20000709 PARAMETER Experiment Name: At_15mM_NH4NO3_L-to-H_P Parameter: Tissue Value: Aerial
  misc_feature: MA Experiment 20000709 PARAMETER Experiment Name: At_15mM_NH4NO3_L-to-H_P Parameter: Treatment Value: 15mM NH4NO3 vs. 30mM Mannitol
  misc_feature: MA Experiment ID: 20001554 Result: Up-regulated in Transcription
  misc_feature: MA Experiment 20001554 PARAMETER Experiment Name: At_Drought_Soil_Dry_P Parameter: Age (day) Value: 21
  misc_feature: MA Experiment 20001554 PARAMETER Experiment Name: At_Drought_Soil_Dry_P Parameter: Organism Value: A. thaliana
  misc_feature: MA Experiment 20001554 PARAMETER Experiment Name: At_Drought_Soil_Dry_P Parameter: Plant Line Value: WS
  misc_feature: MA Experiment 20001554 PARAMETER Experiment Name: At_Drought_Soil_Dry_P Parameter: Post Timepoint (hr) Value: None
  misc_feature: MA Experiment 20001554 PARAMETER Experiment Name: At_Drought_Soil_Dry_P Parameter: Post-Treatment Value: None
  misc_feature: MA Experiment 20001554 PARAMETER Experiment Name: At_Drought_Soil_Dry_P Parameter: Timepoint (day) Value: 7
  misc_feature: MA Experiment 20001554 PARAMETER Experiment Name: At_Drought_Soil_Dry_P Parameter: Treatment Value: Drought vs. No Drought
  misc_feature: MA Experiment ID: 20001555 Result: Up-regulated in Transcription
  misc_feature: MA Experiment 20001555 PARAMETER Experiment Name: At_Drought_Soil_Dry_P Parameter: Age (day) Value: 24
  misc_feature: MA Experiment 20001555 PARAMETER Experiment Name: At_Drought_Soil_Dry_P Parameter: Organism Value: A. thaliana
  misc_feature: MA Experiment 20001555 PARAMETER Experiment Name: At_Drought_Soil_Dry_P Parameter: Plant Line Value: WS
  misc_feature: MA Experiment 20001555 PARAMETER Experiment Name: At_Drought_Soil_Dry_P Parameter: Post Timepoint (hr) Value: None
  misc_feature: MA Experiment 20001555 PARAMETER Experiment Name: At_Drought_Soil_Dry_P Parameter: Post-Treatment Value: None
  misc_feature: MA Experiment 20001555 PARAMETER Experiment Name: At_Drought_Soil_Dry_P Parameter: Timepoint (day) Value: 10
  misc_feature: MA Experiment 20001555 PARAMETER Experiment Name: At_Drought_Soil_Dry_P Parameter: Treatment Value: Drought vs. No Drought
  misc_feature: MA Experiment ID: 20001558 Result: Down-regulated in Transcription
  misc_feature: MA Experiment 20001558 PARAMETER Experiment Name: At_Drought_Soil_Dry_P Parameter: Age (day) Value: 27
  misc_feature: MA Experiment 20001558 PARAMETER Experiment Name: At_Drought_Soil_Dry_P Parameter: Organism Value: A. thaliana
  misc_feature: MA Experiment 20001558 PARAMETER Experiment Name: At_Drought_Soil_Dry_P Parameter: Plant Line Value: WS
  misc_feature: MA Experiment 20001558 PARAMETER Experiment Name: At_Drought_Soil_Dry_P Parameter: Post Timepoint (hr) Value: 6
  misc_feature: MA Experiment 20001558 PARAMETER Experiment Name: At_Drought_Soil_Dry_P Parameter: Post-Treatment Value: Re-Water vs. No Drought
  misc_feature: MA Experiment 20001558 PARAMETER Experiment Name: At_Drought_Soil_Dry_P Parameter: Timepoint (day) Value: 13
  misc_feature: MA Experiment 20001558 PARAMETER Experiment Name: At_Drought_Soil_Dry_P Parameter: Treatment Value: Drought vs. No Drought
atcacttacttaacatactaagagagttattagaacttgcaaaaaatggcttccaaggctttgattctgttaggtctcttctcagttcttctcgtcgtctccgaagtgtctgccgcaaggcaatcgggcatggtgaagccagagagtgaggaaactgtgcaacctgaaggttatggcggtggccacggaggacatggtggtcacggagggggaggaggccacggacatggaggacacaacggaggagggggccacggacttgacggatacggaggaggtggaggacactatggaggaggtggaggacactacggaggaggtggaggacactacggaggaggtggaggacactacggaggaggtggaggacactacggaggaggtggtggaggacacggaggtggaggacactacggaggtggtggaggaggatacggaggtggaggaggacaccacggaggaggaggccacgggctaaacgaacctgttcagactaagccgggtgtttaaaactatataatatcttcactaccatgcatgattgcatatatatatatacgcttatgtattatctatatgcctataaataaaccatggtgagtttgtaacgcagtgccttcagaaatgttcggaataaatttccataatattagtataatgtctctctgtttgaattataaactgcgctgtttgc

SEQ ID NO: 26187 - protein, 154 aa, Arabidopsis thaliana
  peptide (1)..(154): Ceres Seq. ID no. 13580702
  misc_feature (38)..(153): Pfam Name: Herpesvirus latent membrane protein 1 (LMP1) Pfam Description: Herpesvirus latent membrane protein 1 (LMP1)
  misc_feature (42)..(140): Homolog of NCBI NO: 33239465 NR Description: RNA-binding protein, RRM domain
  misc_feature (29)..(143): Homolog of NCBI NO: 33239465 NR Description: RNA-binding protein, RRM domain
  misc_feature (3)..(143): Homolog of NCBI NO: 121644 NR Description: Glycine-rich cell wall structural protein
  misc_feature (54)..(154): Homolog of NCBI NO: 21536606 NR Description: putative glycine-rich protein [Arabidopsis
  misc_feature (54)..(154): Homolog of NCBI NO: 15224540 NR Description: glycine-rich protein [Arabidopsis thaliana]
  misc_feature (1)..(118): Homolog of NCBI NO: 9957568 NR Description: antimicrobial peptide shep-GRP [Capsella
  misc_feature (1)..(154): Homolog of NCBI NO: 15224547 NR Description: glycine-rich protein [Arabidopsis thaliana]
  misc_feature (1)..(116): Homolog of NCBI NO: 21536606 NR Description: putative glycine-rich protein [Arabidopsis
  misc_feature (1)..(116): Homolog of NCBI NO: 15224540 NR Description: glycine-rich protein [Arabidopsis thaliana]
  misc_feature (1)..(154): Homolog of NCBI NO: 30678191 NR Description: glycine-rich protein [Arabidopsis thaliana]
MASKALILLGLFSVLLVVSEVSAARQSGMVKPESEETVQPEGYGGGHGGHGGHGGGGGHGHGGHNGGGGHGLDGYGGGGGHYGGGGGHYGGGGGHYGGGGGHYGGGGGHYGGGGGGHGGGGHYGGGGGGYGGGGGHHGGGGHGLNEPVQTKPGV

SEQ ID NO: 26188 - protein, 126 aa, Arabidopsis thaliana
  peptide (1)..(126): Ceres Seq. ID no. 13580703
  misc_feature (10)..(125): Pfam Name: Herpesvirus latent membrane protein 1 (LMP1) Pfam Description: Herpesvirus latent membrane protein 1 (LMP1)
  misc_feature (14)..(112): Homolog of NCBI NO: 33239465 NR Description: RNA-binding protein, RRM domain
  misc_feature (1)..(115): Homolog of NCBI NO: 33239465 NR Description: RNA-binding protein, RRM domain
  misc_feature (1)..(115): Homolog of NCBI NO: 121644 NR Description: Glycine-rich cell wall structural protein
  misc_feature (26)..(126): Homolog of NCBI NO: 21536606 NR Description: putative glycine-rich protein [Arabidopsis
  misc_feature (26)..(126): Homolog of NCBI NO: 15224540 NR Description: glycine-rich protein [Arabidopsis thaliana]
  misc_feature (1)..(90): Homolog of NCBI NO: 9957568 NR Description: antimicrobial peptide shep-GRP [Capsella
  misc_feature (1)..(126): Homolog of NCBI NO: 15224547 NR Description: glycine-rich protein [Arabidopsis thaliana]
  misc_feature (1)..(88): Homolog of NCBI NO: 21536606 NR Description: putative glycine-rich protein [Arabidopsis
  misc_feature (1)..(88): Homolog of NCBI NO: 15224540 NR Description: glycine-rich protein [Arabidopsis thaliana]
  misc_feature (1)..(126): Homolog of NCBI NO: 30678191 NR Description: glycine-rich protein [Arabidopsis thaliana]
MVKPESEETVQPEGYGGGHGGHGGHGGGGGHGHGGHNGGGGHGLDGYGGGGGHYGGGGGHYGGGGGHYGGGGGHYGGGGGHYGGGGGGHGGGGHYGGGGGGYGGGGGHHGGGGHGLNEPVQTKPGV

SEQ ID NO: 26189 - protein, 101 aa, Arabidopsis thaliana
  peptide (1)..(101): Ceres Seq. ID no. 13580704
  misc_feature (24)..(101): Pfam Name: Transferrin binding protein-like solute binding protein Pfam Description: Transferrin binding protein-like solute binding
MAVATEDMVVTEGEEATDMEDTTEEGATDLTDTEEVEDTMEEVEDTTEEVEDTTEEVEDTTEEVEDTTEEVVEDTEVEDTTEVVEEDTEVEEDTTEEEATG

SEQ ID NO: 26190 - DNA, 1230 bp, Arabidopsis thaliana
  misc_feature (1)..(1230): Ceres Seq. ID no. 12326026
  misc_feature: MA Experiment ID: 20000265 Result: Up-regulated in Transcription
  misc_feature: MA Experiment 20000265 PARAMETER Experiment Name: At_Open_Flower_P Parameter: Age (day) Value: 21
  misc_feature: MA Experiment 20000265 PARAMETER Experiment Name: At_Open_Flower_P Parameter: Plant Line Value: WS
  misc_feature: MA Experiment 20000265 PARAMETER Experiment Name: At_Open_Flower_P Parameter: Tissue Value: Closed Flower vs. Whole Plant
  misc_feature: MA Experiment ID: 20000286 Result: Up-regulated in Transcription
  misc_feature: MA Experiment 20000286 PARAMETER Experiment Name: At_Open_Flower_P Parameter: Age (day) Value: 21
  misc_feature: MA Experiment 20000286 PARAMETER Experiment Name: At_Open_Flower_P Parameter: Plant Line Value: WS
  misc_feature: MA Experiment 20000286 PARAMETER Experiment Name: At_Open_Flower_P Parameter: Tissue Value: Half Open vs. Whole Plant
  misc_feature: MA Experiment ID: 20001910 Result: Down-regulated in Transcription
  misc_feature: MA Experiment 20001910 PARAMETER Experiment Name: At_Drought_Reproduction_P Parameter: Age (day) Value: 37
  misc_feature: MA Experiment 20001910 PARAMETER Experiment Name: At_Drought_Reproduction_P Parameter: Organism Value: A. thaliana
  misc_feature: MA Experiment 20001910 PARAMETER Experiment Name: At_Drought_Reproduction_P Parameter: Plant Line Value: WS
  misc_feature: MA Experiment 20001910 PARAMETER Experiment Name: At_Drought_Reproduction_P Parameter: Timepoint (day) Value: 7
  misc_feature: MA Experiment 20001910 PARAMETER Experiment Name: At_Drought_Reproduction_P Parameter: Tissue Value: Flowers
  misc_feature: MA Experiment 20001910 PARAMETER Experiment Name: At_Drought_Reproduction_P Parameter: Treatment Value: Drought vs. No Drought
gacaaaatgttgatccatgtaattatattcatgatcataacgacaatgcaattctcgacgacatgccatgcatatgtgattaacgtgaccaacgttaacgtatcaatgttcccggctattcttgtattcggggattcaacaatcgataccggcaacaacaactacatcaaaacctacatccgggctaatttccctccttacggctgcaatttccccggccacaacgctaccggaagattctctaacggtaaacttattccggacttcatagcatctcttatgggaatcaaagacaccgttcctcctttcctagaccctcacttgtctgattccgatatcatcaccggagtgtgctttgcttcggctggttccggttacgacaacctcacagatcgagcaacttcaactctatccgttgataaacaggcggatatgctcagaagttacgtggagaggttgagccagatcgtcggggacgagaaagcggcctcgatagtcagcgaggctctggtgattgtaagctccggaactaacgatttcaatctaaatctctacgatactccttctcgtcgtcagaagcttggcgttgatggctatcaaagcttcattctctcgaatgtacacaacttcgttcaagaactatatgacattggatgccgtaaaataatggtgttgggtctaccgccggtcgggtgtttaccaattcagatgacaatggctatgcaaaagcagaacgagagacgatgcatcgacaaacaaaactcagattcacaagagtttaaccagaagctaaaaaactccttgacggagatgcaatccaacctcactggaagtgtcatcttctacggcgatatctacggagcattgttcgacatggccactaatcctcaaagatacgggttaaaggagacgacgagaggatcttgcgggactggagaaatagagttagcgtacttgtgcaatgctttaactcggatttgtcctaaccctaaccagtaccttttctgggacgatattcatccttcccaaattgcttacatagtcatcagtctcagtcttgttgaacaaattttccacgtactctcttgattttcattttgctttcatatatattaattaatctgtagtcaatctataattatttccctgtgggttcacataatctttcgtatttgcttaagctaggttttacatgtatactattatgatattatactactctatcctggt

SEQ ID NO: 26191 - protein, 362 aa, Arabidopsis thaliana
  peptide (1)..(362): Ceres Seq. ID no. 12326027
  misc_feature (40)..(353): Pfam Name: GDSL-like Lipase/Acylhydrolase Pfam Description: GDSL-like Lipase/Acylhydrolase
  misc_feature (8)..(346): Homolog of NCBI NO: 25336283 NR Description: hypothetical protein RXF26 [imported] -
  misc_feature (8)..(346): Homolog of NCBI NO: 15217963 NR Description: proline-rich protein, putative; protein id:
  misc_feature (16)..(362): Homolog of NCBI NO: 25336267 NR Description: hypothetical protein [imported] - Arabidopsis
  misc_feature (13)..(346): Homolog of NCBI NO: 21592974 NR Description: proline-rich protein, putative [Arabidopsis
  misc_feature (12)..(349): Homolog of NCBI NO: 21537117 NR Description: putative GDSL-motif lipase/hydrolase [Arabidopsis
  misc_feature (8)..(346): Homolog of NCBI NO: 15227723 NR Description: putative GDSL-motif lipase hydrolase; protein id:
  misc_feature (12)..(349): Homolog of NCBI NO: 15225096 NR Description: putative GDSL-motif lipase/hydrolase
  misc_feature (8)..(357): Homolog of NCBI NO: 15227734 NR Description: putative GDSL-motif lipase/hydrolase; protein id:
  misc_feature (11)..(362): Homolog of NCBI NO: 21554186 NR Description: Contains similarity to proline-rich protein APG
  misc_feature (3)..(362): Homolog of NCBI NO: 18390708 NR Description: expressed protein
DKMLIHVIIFMIITTMQFSTTCHAYVINVTNVNVSMFPAILVFGDSTIDTGNNNYIKTYIRANFPPYGCNFPGHNATGRFSNGKLIPDFIASLMGIKDTVPPFLDPHLSDSDIITGVCFASAGSGYDNLTDRATSTLSVDKQADMLRSYVERLSQIVGDEKAASIVSEALVIVSSGTNDFNLNLYDTPSRRQKLGVDGYQSFILSNVHNFVQELYDIGCRKIMVLGLPPVGCLPIQMTMAMQKQNERRCIDKQNSDSQEFNQKLKNSLTEMQSNLTGSVIFYGDIYGALFDMATNPQRYGLKETTRGSCGTGEIELAYLCNALTRICPNPNQYLFWDDIHPSQIAYIVISLSLVEQIFHVLS

SEQ ID NO: 26192 - protein, 360 aa, Arabidopsis thaliana
  peptide (1)..(360): Ceres Seq. ID no. 12326028
  misc_feature (38)..(351): Pfam Name: GDSL-like Lipase/Acylhydrolase Pfam Description: GDSL-like Lipase/Acylhydrolase
  misc_feature (10)..(347): Homolog of NCBI NO: 15225096 NR Description: putative GDSL-motif lipase/hydrolase
  misc_feature (10)..(347): Homolog of NCBI NO: 21537117 NR Description: putative GDSL-motif lipase/hydrolase [Arabidopsis
  misc_feature (6)..(344): Homolog of NCBI NO: 15227723 NR Description: putative GDSL-motif lipase hydrolase; protein id:
  misc_feature (6)..(355): Homolog of NCBI NO: 15227734 NR Description: putative GDSL-motif lipase/hydrolase; protein id:
  misc_feature (11)..(344): Homolog of NCBI NO: 21592974 NR Description: proline-rich protein, putative [Arabidopsis
  misc_feature (6)..(344): Homolog of NCBI NO: 25336283 NR Description: hypothetical protein RXF26 [imported] -
  misc_feature (6)..(344): Homolog of NCBI NO: 15217963 NR Description: proline-rich protein, putative; protein id:
  misc_feature (14)..(360): Homolog of NCBI NO: 25336267 NR Description: hypothetical protein [imported] - Arabidopsis
  misc_feature (9)..(360): Homolog of NCBI NO: 21554186 NR Description: Contains similarity to proline-rich protein APG
  misc_feature (1)..(360): Homolog of NCBI NO: 18390708 NR Description: expressed protein
MLIHVIIFMIITTMQFSTTCHAYVINVTNVNVSMFPAILVFGDSTIDTGNNNYIKTYIRANFPPYGCNFPGHNATGRFSNGKLIPDFIASLMGIKDTVPPFLDPHLSDSDIITGVCFASAGSGYDNLTDRATSTLSVDKQADMLRSYVERLSQIVGDEKAASIVSEALVIVSSGTNDFNLNLYDTPSRRQKLGVDGYQSFILSNVHNFVQELYDIGCRKIMVLGLPPVGCLPIQMTMAMQKQNERRCIDKQNSDSQEFNQKLKNSLTEMQSNLTGSVIFYGDIYGALFDMATNPQRYGLKETTRGSCGTGEIELAYLCNALTRICPNPNQYLFWDDIHPSQIAYIVISLSLVEQIFHVLS

SEQ ID NO: 26193 - protein, 352 aa, Arabidopsis thaliana
  peptide (1)..(352): Ceres Seq. ID no. 12326029
  misc_feature (30)..(343): Pfam Name: GDSL-like Lipase/Acylhydrolase Pfam Description: GDSL-like Lipase/Acylhydrolase
  misc_feature (2)..(339): Homolog of NCBI NO: 15225096 NR Description: putative GDSL-motif lipase/hydrolase
  misc_feature (2)..(339): Homolog of NCBI NO: 21537117 NR Description: putative GDSL-motif lipase/hydrolase [Arabidopsis
  misc_feature (1)..(336): Homolog of NCBI NO: 15227723 NR Description: putative GDSL-motif lipase hydrolase; protein id:
  misc_feature (1)..(347): Homolog of NCBI NO: 15227734 NR Description: putative GDSL-motif lipase/hydrolase; protein id:
  misc_feature (3)..(336): Homolog of NCBI NO: 21592974 NR Description: proline-rich protein, putative [Arabidopsis
  misc_feature (1)..(336): Homolog of NCBI NO: 25336283 NR Description: hypothetical protein RXF26 [imported] -
  misc_feature (1)..(336): Homolog of NCBI NO: 15217963 NR Description: proline-rich protein, putative; protein id:
  misc_feature (6)..(352): Homolog of NCBI NO: 25336267 NR Description: hypothetical protein [imported] - Arabidopsis
  misc_feature (1)..(352): Homolog of NCBI NO: 21554186 NR Description: Contains similarity to proline-rich protein APG
  misc_feature (1)..(352): Homolog of NCBI NO: 18390708 NR Description: expressed protein
MIITTMQFSTTCHAYVINVTNVNVSMFPAILVFGDSTIDTGNNNYIKTYIRANFPPYGCNFPGHNATGRFSNGKLIPDFIASLMGIKDTVPPFLDPHLSDSDIITGVCFASAGSGYDNLTDRATSTLSVDKQADMLRSYVERLSQIVGDEKAASIVSEALVIVSSGTNDFNLNLYDTPSRRQKLGVDGYQSFILSNVHNFVQELYDIGCRKIMVLGLPPVGCLPIQMTMAMQKQNERRCIDKQNSDSQEFNQKLKNSLTEMQSNLTGSVIFYGDIYGALFDMATNPQRYGLKETTRGSCGTGEIELAYLCNALTRICPNPNQYLFWDDIHPSQIAYIVISLSLVEQIFHVLS

SEQ ID NO: 26194 - DNA, 1462 bp, Arabidopsis thaliana
  misc_feature (1)..(1462): Ceres Seq. ID no. 12333181
  misc_feature: MA Experiment ID: 108569 Result: Up-regulated in Transcription
  misc_feature: MA Experiment 108569 PARAMETER Experiment Name: At_0.001%_MeJA__cDNA_P Parameter: Timepoint (hr) Value: 6
  misc_feature: MA Experiment 108569 PARAMETER Experiment Name: At_0.001%_MeJA__cDNA_P Parameter: Tissue Value: Aerial
  misc_feature: MA Experiment 108569 PARAMETER Experiment Name: At_0.001%_MeJA__cDNA_P Parameter: Treatment Value: 0.001% MeJA vs. No Treatment
  misc_feature: MA Experiment ID: 108573 Result: Up-regulated in Transcription
  misc_feature: MA Experiment 108573 PARAMETER Experiment Name: At_Drought_cDNA_P Parameter: Timepoint (hr) Value: 6
  misc_feature: MA Experiment 108573 PARAMETER Experiment Name: At_Drought_cDNA_P Parameter: Tissue Value: Aerial
  misc_feature: MA Experiment 108573 PARAMETER Experiment Name: At_Drought_cDNA_P Parameter: Treatment Value: Drought vs. No Drought
  misc_feature: MA Experiment ID: 108594 Result: Down-regulated in Transcription
  misc_feature: MA Experiment 108594 PARAMETER Experiment Name: At_Ler-rhl_Root_cDNA_P Parameter: Plant Line Value: null
  misc_feature: MA Experiment ID: 108595 Result: Down-regulated in Transcription
  misc_feature: MA Experiment 108595 PARAMETER Experiment Name: At_Ler-pi_Ovule_cDNA_P Parameter: Plant Line Value: null
  misc_feature: MA Experiment ID: 108668 Result: Up-regulated in Transcription
  misc_feature: MA Experiment 108668 PARAMETER Experiment Name: At_2mM_SA_cDNA_P Parameter: Plant Line Value: WS
  misc_feature: MA Experiment 108668 PARAMETER Experiment Name: At_2mM_SA_cDNA_P Parameter: Timepoint (hr) Value: 6
  misc_feature: MA Experiment 108668 PARAMETER Experiment Name: At_2mM_SA_cDNA_P Parameter: Treatment Value: 2mM SA vs. No Treatment
  misc_feature: MA Experiment ID: 20000111 Result: Down-regulated in Transcription
  misc_feature: MA Experiment 20000111 PARAMETER Experiment Name: At_42deg_Heat_cDNA_P Parameter: Temperature (deg C) Value: 42 vs. 22
  misc_feature: MA Experiment 20000111 PARAMETER Experiment Name: At_42deg_Heat_cDNA_P Parameter: Timepoint (hr) Value: 6
  misc_feature: MA Experiment 20000111 PARAMETER Experiment Name: At_42deg_Heat_cDNA_P Parameter: Tissue Value: Aerial
  misc_feature: MA Experiment ID: 20000113 Result: Down-regulated in Transcription
  misc_feature: MA Experiment 20000113 PARAMETER Experiment Name: At_42deg_Heat_cDNA_P Parameter: Temperature (deg C) Value: 42 vs. 22
  misc_feature: MA Experiment 20000113 PARAMETER Experiment Name: At_42deg_Heat_cDNA_P Parameter: Timepoint (hr) Value: 8
  misc_feature: MA Experiment 20000113 PARAMETER Experiment Name: At_42deg_Heat_cDNA_P Parameter: Tissue Value: Aerial
  misc_feature: MA Experiment ID: 20000173 Result: Down-regulated in Transcription
  misc_feature: MA Experiment 20000173 PARAMETER Experiment Name: At_42deg_Heat_P Parameter: Age (day) Value: 14
  misc_feature: MA Experiment 20000173 PARAMETER Experiment Name: At_42deg_Heat_P Parameter: Organism Value: A. thaliana
  misc_feature: MA Experiment 20000173 PARAMETER Experiment Name: At_42deg_Heat_P Parameter: Plant Line Value: WS
  misc_feature: MA Experiment 20000173 PARAMETER Experiment Name: At_42deg_Heat_P Parameter: Temperature (deg C) Value: 42 vs. 22
  misc_feature: MA Experiment 20000173 PARAMETER Experiment Name: At_42deg_Heat_P Parameter: Timepoint (hr) Value: 6
  misc_feature: MA Experiment 20000173 PARAMETER Experiment Name: At_42deg_Heat_P Parameter: Tissue Value: Aerial
  misc_feature: MA Experiment ID: 20000180 Result: Up-regulated in Transcription
  misc_feature: MA Experiment 20000180 PARAMETER Experiment Name: At_Germinating_Seeds_P Parameter: Age (hr) Value: 24 vs. 0
  misc_feature: MA Experiment 20000180 PARAMETER Experiment Name: At_Germinating_Seeds_P Parameter: Tissue Value: Germinating Seeds
  misc_feature: MA Experiment ID: 20000185 Result: Up-regulated in Transcription
  misc_feature: MA Experiment 20000185 PARAMETER Experiment Name: At_Roots__P Parameter: Age (day) Value: 7 vs. 21
  misc_feature: MA Experiment 20000185 PARAMETER Experiment Name: At_Roots__P Parameter: Organism Value: A. thaliana
  misc_feature: MA Experiment 20000185 PARAMETER Experiment Name: At_Roots__P Parameter: Tissue Value: Roots vs. Whole Plant
  misc_feature: MA Experiment ID: 20000234 Result: Down-regulated in Transcription
  misc_feature: MA Experiment 20000234 PARAMETER Experiment Name: At_Siliques_P Parameter: Age (day) Value: 21
  misc_feature: MA Experiment 20000234 PARAMETER Experiment Name: At_Siliques_P Parameter: Organism Value: A. thaliana
  misc_feature: MA Experiment 20000234 PARAMETER Experiment Name: At_Siliques_P Parameter: Plant Line Value: WS
  misc_feature: MA Experiment 20000234 PARAMETER Experiment Name: At_Siliques_P Parameter: Tissue Value: Less Than 5mm Siliques vs. Whole Plant
  misc_feature: MA Experiment ID: 20000439 Result: Up-regulated in Transcription
  misc_feature: MA Experiment 20000439 PARAMETER Experiment Name: At_Roots__P Parameter: Age (day) Value: 14 vs. 21
  misc_feature: MA Experiment 20000439 PARAMETER Experiment Name: At_Roots__P Parameter: Organism Value: A. thaliana
  misc_feature: MA Experiment 20000439 PARAMETER Experiment Name: At_Roots__P Parameter: Tissue Value: Roots vs. Whole Plant
cttcgttccaaaaagtcgcaactcttcttcatcttcttcctctgacgatcattttcagaagaatctgattccgatcaaaattgcagaagaagatgtctcgccaatcgttttctctactgaagaatcttcgtagcatcgcttccggttccaaaatccagacccgatccgtgacttacatgcccagacccggtgacggaaaaccaagaccagtgacgttaatccccggagacggagttggtccgttggtaacaaacgcggttcaacaagtgatggaagcgatgcacgctccggtttacttcgaaccgttcgaagttcatggagatatgaagagtttacctgaaggattgttggaatcgattaagaagaacaaagtttgtttgaaaggtggtcttaagactcccgtcggtggtggtgtgagctctctcaatgttaatctgagaaaggagcttgatctctttgcttctttggtcaactgtttcaatttgcctggtttagcttctcgtcatgagaatgttgatattgttgtgattagagagaacactgaaggtgaatatgcaggtcttgaacatgaagttgttcctggtgttgttgagagccttaaggtgattacaaagttctgttcagagcgtattgcaaagtatgcgtttgagtatgcttacttgaacaacaggaagaaagttacagcagtgcacaaggctaatatcatgaaattggctgatggtttgttcttggagtcttgtcaagaggttgctaagaagtatccaagcattgcctacaatgaaatcattgttgataattgttgtatgcaacttgtggctagaccagagcaattcgatgtcatggtgacgcctaatctctatggtaatctagtggcaaacactgctgctggtattgctggaggtactggagtcatgcctggaggaaatgttggggcggagtatgcggtctttgagcaaggtgcatcagcgggaaacgtggggaaggatacaacggaagagcaaaaaaatgcaaaccctgtggctttgttgctgtcatcagccatgatgcttagacaccttcagttcccttcttttgctgacaggcttgaaaccgctgtgaagcgtgttatcgctgaaggaaattgtcggactgaagatcttggcggaaacagtacgactcaagaggtcgttgacgctgtcattgcaaatttggattgacttgacaattccaacttcgctagtcttcgcttgtgtaaacatcagtcacacgtcggtatgattcacgcttaccggaaaatacttctagttcccacattctttcgagataactcgaattgggatttcagatttcgagaaaaataacatatggttttttgttttgttttgcttctttttgttcatgtataatatgcaaagtgcaaagtgaaaagtgaaaactgcctcagagcattattttttgaataatgaaaattacgtttaacttc

SEQ ID NO: 26195 - protein, 367 aa, Arabidopsis thaliana
  peptide (1)..(367): Ceres Seq. ID no. 12333182
  misc_feature (39)..(362): Pfam Name: Isocitrate/isopropylmalate dehydrogenase Pfam Description: Isocitrate/isopropylmalate dehydrogenase
  misc_feature (1)..(367): Homolog of NCBI NO: 15237075 NR Description: NAD+ dependent isocitrate dehydrogenase -like
  misc_feature (1)..(367): Homolog of NCBI NO: 3790188 NR Description: NAD-dependent isocitrate dehydrogenase [Nicotiana
  misc_feature (1)..(367): Homolog of NCBI NO: 28974498 NR Description: NAD-dependent isocitrate dehydrogenase beta
  misc_feature (1)..(367): Homolog of NCBI NO: 28974502 NR Description: NAD-dependent isocitrate dehydrogenase beta
  misc_feature (1)..(367): Homolog of NCBI NO: 1766046 NR Description: NAD+ dependent isocitrate dehydrogenase subunit 1
  misc_feature (1)..(367): Homolog of NCBI NO: 21537157 NR Description: NAD+ dependent isocitrate dehydrogenase subunit 1
  misc_feature (1)..(367): Homolog of NCBI NO: 15236932 NR Description: NAD+ dependent isocitrate dehydrogenase subunit 1
  misc_feature (3)..(367): Homolog of NCBI NO: 28974504 NR Description: NAD-dependent isocitrate dehydrogenase gamma
  misc_feature (1)..(367): Homolog of NCBI NO: 1766048 NR Description: NAD+ dependent isocitrate dehydrogenase subunit 2
  misc_feature (1)..(367): Homolog of NCBI NO: 15227370 NR Description: putative NAD+ dependent isocitrate dehydrogenase
MSRQSFSLLKNLRSIASGSKIQTRSVTYMPRPGDGKPRPVTLIPGDGVGPLVTNAVQQVMEAMHAPVYFEPFEVHGDMKSLPEGLLESIKKNKVCLKGGLKTPVGGGVSSLNVNLRKELDLFASLVNCFNLPGLASRHENVDIVVIRENTEGEYAGLEHEVVPGVVESLKVITKFCSERIAKYAFEYAYLNNRKKVTAVHKANIMKLADGLFLESCQEVAKKYPSIAYNEIIVDNCCMQLVARPEQFDVMVTPNLYGNLVANTAAGIAGGTGVMPGGNVGAEYAVFEQGASAGNVGKDTTEEQKNANPVALLLSSAMMLRHLQFPSFADRLETAVKRVIAEGNCRTEDLGGNSTTQEVVDAVIANLD

SEQ ID NO: 26196 - protein, 339 aa, Arabidopsis thaliana
  peptide (1)..(339): Ceres Seq. ID no. 12333183
  misc_feature (11)..(334): Pfam Name: Isocitrate/isopropylmalate dehydrogenase Pfam Description: Isocitrate/isopropylmalate dehydrogenase
  misc_feature (1)..(339): Homolog of NCBI NO: 15237075 NR Description: NAD+ dependent isocitrate dehydrogenase -like
  misc_feature (1)..(339): Homolog of NCBI NO: 3790188 NR Description: NAD-dependent isocitrate dehydrogenase [Nicotiana
  misc_feature (1)..(339): Homolog of NCBI NO: 28974498 NR Description: NAD-dependent isocitrate dehydrogenase beta
  misc_feature (1)..(339): Homolog of NCBI NO: 28974502 NR Description: NAD-dependent isocitrate dehydrogenase beta
  misc_feature (1)..(339): Homolog of NCBI NO: 1766046 NR Description: NAD+ dependent isocitrate dehydrogenase subunit 1
  misc_feature (1)..(339): Homolog of NCBI NO: 21537157 NR Description: NAD+ dependent isocitrate dehydrogenase subunit 1
  misc_feature (1)..(339): Homolog of NCBI NO: 15236932 NR Description: NAD+ dependent isocitrate dehydrogenase subunit 1
  misc_feature (1)..(339): Homolog of NCBI NO: 28974504 NR Description: NAD-dependent isocitrate dehydrogenase gamma
  misc_feature (1)..(339): Homolog of NCBI NO: 1766048 NR Description: NAD+ dependent isocitrate dehydrogenase subunit 2
  misc_feature (1)..(339): Homolog of NCBI NO: 15227370 NR Description: putative NAD+ dependent isocitrate dehydrogenase
MPRPGDGKPRPVTLIPGDGVGPLVTNAVQQVMEAMHAPVYFEPFEVHGDMKSLPEGLLESIKKNKVCLKGGLKTPVGGGVSSLNVNLRKELDLFASLVNCFNLPGLASRHENVDIVVIRENTEGEYAGLEHEVVPGVVESLKVITKFCSERIAKYAFEYAYLNNRKKVTAVHKANIMKLADGLFLESCQEVAKKYPSIAYNEIIVDNCCMQLVARPEQFDVMVTPNLYGNLVANTAAGIAGGTGVMPGGNVGAEYAVFEQGASAGNVGKDTTEEQKNANPVALLLSSAMMLRHLQFPSFADRLETAVKRVIAEGNCRTEDLGGNSTTQEVVDAVIANLD

SEQ ID NO: 26197 - protein, 308 aa, Arabidopsis thaliana
  peptide (1)..(308): Ceres Seq. ID no. 12333184
  misc_feature (1)..(303): Pfam Name: Isocitrate/isopropylmalate dehydrogenase Pfam Description: Isocitrate/isopropylmalate dehydrogenase
  misc_feature (1)..(308): Homolog of NCBI NO: 15237075 NR Description: NAD+ dependent isocitrate dehydrogenase -like
  misc_feature (1)..(308): Homolog of NCBI NO: 3790188 NR Description: NAD-dependent isocitrate dehydrogenase [Nicotiana
  misc_feature (1)..(308): Homolog of NCBI NO: 28974498 NR Description: NAD-dependent isocitrate dehydrogenase beta
  misc_feature (1)..(308): Homolog of NCBI NO: 28974502 NR Description: NAD-dependent isocitrate dehydrogenase beta
  misc_feature (1)..(308): Homolog of NCBI NO: 1766046 NR Description: NAD+ dependent isocitrate dehydrogenase subunit 1
  misc_feature (1)..(308): Homolog of NCBI NO: 21537157 NR Description: NAD+ dependent isocitrate dehydrogenase subunit 1
  misc_feature (1)..(308): Homolog of NCBI NO: 15236932 NR Description: NAD+ dependent isocitrate dehydrogenase subunit 1
  misc_feature (1)..(308): Homolog of NCBI NO: 28974504 NR Description: NAD-dependent isocitrate dehydrogenase gamma
  misc_feature (1)..(308): Homolog of NCBI NO: 1766048 NR Description: NAD+ dependent isocitrate dehydrogenase subunit 2
  misc_feature (1)..(308): Homolog of NCBI NO: 15227370 NR Description: putative NAD+ dependent isocitrate dehydrogenase
MEAMHAPVYFEPFEVHGDMKSLPEGLLESIKKNKVCLKGGLKTPVGGGVSSLNVNLRKELDLFASLVNCFNLPGLASRHENVDIVVIRENTEGEYAGLEHEVVPGVVESLKVITKFCSERIAKYAFEYAYLNNRKKVTAVHKANIMKLADGLFLESCQEVAKKYPSIAYNEIIVDNCCMQLVARPEQFDVMVTPNLYGNLVANTAAGIAGGTGVMPGGNVGAEYAVFEQGASAGNVGKDTTEEQKNANPVALLLSSAMMLRHLQFPSFADRLETAVKRVIAEGNCRTEDLGGNSTTQEVVDAVIANLD

SEQ ID NO: 26198 - DNA, 931 bp, Arabidopsis thaliana
  misc_feature (1)..(931): Ceres Seq. ID no. 12323674
  misc_feature: MA Experiment ID: 108434 Result: Up-regulated in Transcription
  misc_feature: MA Experiment 108434 PARAMETER Experiment Name: At_Root_Tips_cDNA_P Parameter: Tissue Value: Root Tips
  misc_feature: MA Experiment ID: 108461 Result: Up-regulated in Transcription
  misc_feature: MA Experiment 108461 PARAMETER Experiment Name: At_Germinating_Seeds_cDNA_P Parameter: Age (day) Value: 1 vs. 0
  misc_feature: MA Experiment 108461 PARAMETER Experiment Name: At_Germinating_Seeds_cDNA_P Parameter: Tissue Value: Germinating Seeds
  misc_feature: MA Experiment ID: 108579 Result: Down-regulated in Transcription
  misc_feature: MA Experiment 108579 PARAMETER Experiment Name: At_4deg_Cold_cDNA_P Parameter: Temperature (deg C) Value: 4 vs. 22
  misc_feature: MA Experiment 108579 PARAMETER Experiment Name: At_4deg_Cold_cDNA_P Parameter: Timepoint (hr) Value: 6
  misc_feature: MA Experiment 108579 PARAMETER Experiment Name: At_4deg_Cold_cDNA_P Parameter: Tissue Value: Aerial
  misc_feature: MA Experiment ID: 20000112 Result: Up-regulated in Transcription
  misc_feature: MA Experiment 20000112 PARAMETER Experiment Name: At_42deg_Heat_cDNA_P Parameter: Temperature (deg C) Value: 42 vs. 22
  misc_feature: MA Experiment 20000112 PARAMETER Experiment Name: At_42deg_Heat_cDNA_P Parameter: Timepoint (hr) Value: 2
  misc_feature: MA Experiment 20000112 PARAMETER Experiment Name: At_42deg_Heat_cDNA_P Parameter: Tissue Value: Aerial
  misc_feature: MA Experiment ID: 20000144 Result: Up-regulated in Transcription
  misc_feature: MA Experiment 20000144 PARAMETER Experiment Name: At_42deg_Heat_cDNA_P Parameter: Temperature (deg C) Value: 42 vs. 22
  misc_feature: MA Experiment 20000144 PARAMETER Experiment Name: At_42deg_Heat_cDNA_P Parameter: Timepoint (hr) Value: 1
  misc_feature: MA Experiment 20000144 PARAMETER Experiment Name: At_42deg_Heat_cDNA_P Parameter: Tissue Value: Aerial
  misc_feature: MA Experiment ID: 20000180 Result: Up-regulated in Transcription
  misc_feature: MA Experiment 20000180 PARAMETER Experiment Name: At_Germinating_Seeds_P Parameter: Age (hr) Value: 24 vs. 0
  misc_feature: MA Experiment 20000180 PARAMETER Experiment Name: At_Germinating_Seeds_P Parameter: Tissue Value: Germinating Seeds
  misc_feature: MA Experiment ID: 20001557 Result: Down-regulated in Transcription
  misc_feature: MA Experiment 20001557 PARAMETER Experiment Name: At_Drought_Soil_Dry_P Parameter: Age (day) Value: 27
  misc_feature: MA Experiment 20001557 PARAMETER Experiment Name: At_Drought_Soil_Dry_P Parameter: Organism Value: A. thaliana
  misc_feature: MA Experiment 20001557 PARAMETER Experiment Name: At_Drought_Soil_Dry_P Parameter: Plant Line Value: WS
  misc_feature: MA Experiment 20001557 PARAMETER Experiment Name: At_Drought_Soil_Dry_P Parameter: Post Timepoint (hr) Value: 3
  misc_feature: MA Experiment 20001557 PARAMETER Experiment Name: At_Drought_Soil_Dry_P Parameter: Post-Treatment Value: Re-Water vs. No Drought
  misc_feature: MA Experiment 20001557 PARAMETER Experiment Name: At_Drought_Soil_Dry_P Parameter: Timepoint (day) Value: 13
  misc_feature: MA Experiment 20001557 PARAMETER Experiment Name: At_Drought_Soil_Dry_P Parameter: Treatment Value: Drought vs. No Drought
  misc_feature: MA Experiment ID: 20001905 Result: Down-regulated in Transcription
  misc_feature: MA Experiment 20001905 PARAMETER Experiment Name: At_Drought_Reproduction_P Parameter: Age (day) Value: 40
  misc_feature: MA Experiment 20001905 PARAMETER Experiment Name: At_Drought_Reproduction_P Parameter: Organism Value: A. thaliana
  misc_feature: MA Experiment 20001905 PARAMETER Experiment Name: At_Drought_Reproduction_P Parameter: Plant Line Value: WS
  misc_feature: MA Experiment 20001905 PARAMETER Experiment Name: At_Drought_Reproduction_P Parameter: Timepoint (day) Value: 10
  misc_feature: MA Experiment 20001905 PARAMETER Experiment Name: At_Drought_Reproduction_P Parameter: Tissue Value: Rosettes
  misc_feature: MA Experiment 20001905 PARAMETER Experiment Name: At_Drought_Reproduction_P Parameter: Treatment Value: Drought vs. No Drought
agatcctcgattccttcgttttctcgcttatcagtgcgatcaatggcggattcagctttcaggaaaattcagatccaaagagatgacactacatttgatgcctatgtggtcggtaaagatgatgcgcctgggattgtggtgattcaagaatggtggggtgttgactttgagatcaagaaccatgctattaaaatctcacaacttgagcctggattcaaagcccttatacctgacttgtatcgaggaaaggttggtttggatactgcagaggcacagcatctaatggatggccttgattggccaggtgctatcaaagatatccgcgcttctgttaattggctaaaatccaatggctcaaaaaaggttggtgccactggaatgtgcatgggaggtgcattagctatagctagctctgtattggttcctgaggtggatgctgttgttggattctatggaaccccttcctcagagctcgcagatccagcacaagctaaggcacctattcaggctcattttggagagctcgacaattttgttggtttttctgatgtcacggcagcaaagaatctcgaagagaagctgaaagcgtctggagtagcacatgaagttcacatctatccaggtaatggacacgcgttcttgaacaggagtccagaaggagtgagcagaaggaaaagcatgggactttctgatgaagatgaagccgcagtggagcttgcttggtctcgcttcacctcctggatgaaacagtacttggcttaagctttcttccatcaggcagcaatggttgatgtaagtcccaaaacgttgtgtgatgcccaatcatctttaaataaggacattgctcttagaacttttaatctgaaccaaataaagaggtttgttcacttgtgaatcagtattgagtggaaatgttcgaagccttttttgc

SEQ ID NO: 26199 - protein, 253 aa, Arabidopsis thaliana
  peptide (1)..(253): Ceres Seq. ID no. 12323675
  misc_feature (32)..(252): Pfam Name: Dienelactone hydrolase family Pfam Description: Dienelactone hydrolase family
  misc_feature (43)..(253): Homolog of NCBI NO: 23105000 NR Description: hypothetical protein [Azotobacter vinelandii]
  misc_feature (34)..(252): Homolog of NCBI NO: 23472687 NR Description: hypothetical protein [Pseudomonas syringae pv.
  misc_feature (34)..(252): Homolog of NCBI NO: 28869992 NR Description: dienelactone hydrolase family protein
  misc_feature (42)..(253): Homolog of NCBI NO: 22963172 NR Description: hypothetical protein [Rhodopseudomonas palustris]
  misc_feature (39)..(252): Homolog of NCBI NO: 27377598 NR Description: blr2487 [Bradyrhizobium japonicum]
  misc_feature (42)..(243): Homolog of NCBI NO: 17549527 NR Description: PUTATIVE TRANSMEMBRANE PROTEIN [Ralstonia
  misc_feature (15)..(243): Homolog of NCBI NO: 22988407 NR Description: hypothetical protein [Burkholderia fungorum]
  misc_feature (1)..(252): Homolog of NCBI NO: 34913460 NR Description: putative carboxymethylenebutenolidase
  misc_feature (15)..(253): Homolog of NCBI NO: 15225693 NR Description: putative carboxymethylenebutenolidase
  misc_feature (15)..(253): Homolog of NCBI NO: 21554208 NR Description: putative carboxymethylenebutenolidase
RSSIPSFSRLSVRSMADSAFRKIQIQRDDTTFDAYVVGKDDAPGIVVIQEWWGVDFEIKNHAIKISQLEPGFKALIPDLYRGKVGLDTAEAQHLMDGLDWPGAIKDIRASVNWLKSNGSKKVGATGMCMGGALAIASSVLVPEVDAVVGFYGTPSSELADPAQAKAPIQAHFGELDNFVGFSDVTAAKNLEEKLKASGVAHEVHIYPGNGHAFLNRSPEGVSRRKSMGLSDEDEAAVELAWSRFTSWMKQYLA

SEQ ID NO: 26200 - protein, 239 aa, Arabidopsis thaliana
  peptide (1)..(239): Ceres Seq. ID no. 12323676
  misc_feature (18)..(238): Pfam Name: Dienelactone hydrolase family Pfam Description: Dienelactone hydrolase family
  misc_feature (29)..(239): Homolog of NCBI NO: 23105000 NR Description: hypothetical protein [Azotobacter vinelandii]
  misc_feature (20)..(238): Homolog of NCBI NO: 23472687 NR Description: hypothetical protein [Pseudomonas syringae pv.
  misc_feature (20)..(238): Homolog of NCBI NO: 28869992 NR Description: dienelactone hydrolase family protein
  misc_feature (28)..(239): Homolog of NCBI NO: 22963172 NR Description: hypothetical protein [Rhodopseudomonas palustris]
  misc_feature (25)..(238): Homolog of NCBI NO: 27377598 NR Description: blr2487 [Bradyrhizobium japonicum]
  misc_feature (28)..(229): Homolog of NCBI NO: 17549527 NR Description: PUTATIVE TRANSMEMBRANE PROTEIN [Ralstonia
  misc_feature (1)..(229): Homolog of NCBI NO: 22988407 NR Description: hypothetical protein [Burkholderia fungorum]
  misc_feature (1)..(238): Homolog of NCBI NO: 34913460 NR Description: putative carboxymethylenebutenolidase
  misc_feature (1)..(239): Homolog of NCBI NO: 15225693 NR Description: putative carboxymethylenebutenolidase
  misc_feature (1)..(239): Homolog of NCBI NO: 21554208 NR Description: putative carboxymethylenebutenolidase
MADSAFRKIQIQRDDTTFDAYVVGKDDAPGIVVIQEWWGVDFEIKNHAIKISQLEPGFKALIPDLYRGKVGLDTAEAQHLMDGLDWPGAIKDIRASVNWLKSNGSKKVGATGMCMGGALAIASSVLVPEVDAVVGFYGTPSSELADPAQAKAPIQAHFGELDNFVGFSDVTAAKNLEEKLKASGVAHEVHIYPGNGHAFLNRSPEGVSRRKSMGLSDEDEAAVELAWSRFTSWMKQYLA

SEQ ID NO: 26201 - protein, 159 aa, Arabidopsis thaliana
  peptide (1)..(159): Ceres Seq. ID no. 12323677
  misc_feature (1)..(158): Pfam Name: Dienelactone hydrolase family Pfam Description: Dienelactone hydrolase family
  misc_feature (1)..(159): Homolog of NCBI NO: 21554208 NR Description: putative carboxymethylenebutenolidase
  misc_feature (1)..(159): Homolog of NCBI NO: 23105000 NR Description: hypothetical protein [Azotobacter vinelandii]
  misc_feature (1)..(158): Homolog of NCBI NO: 23472687 NR Description: hypothetical protein [Pseudomonas syringae pv.
  misc_feature (1)..(158): Homolog of NCBI NO: 28869992 NR Description: dienelactone hydrolase family protein
  misc_feature (1)..(159): Homolog of NCBI NO: 22963172 NR Description: hypothetical protein [Rhodopseudomonas palustris]
  misc_feature (1)..(158): Homolog of NCBI NO: 27377598 NR Description: blr2487 [Bradyrhizobium japonicum]
  misc_feature (1)..(149): Homolog of NCBI NO: 17549527 NR Description: PUTATIVE TRANSMEMBRANE PROTEIN [Ralstonia
  misc_feature (1)..(149): Homolog of NCBI NO: 22988407 NR Description: hypothetical protein [Burkholderia fungorum]
  misc_feature (1)..(158): Homolog of NCBI NO: 34913460 NR Description: putative carboxymethylenebutenolidase
  misc_feature (1)..(159): Homolog of NCBI NO: 15225693 NR Description: putative carboxymethylenebutenolidase
MDGLDWPGAIKDIRASVNWLKSNGSKKVGATGMCMGGALAIASSVLVPEVDAVVGFYGTPSSELADPAQAKAPIQAHFGELDNFVGFSDVTAAKNLEEKLKASGVAHEVHIYPGNGHAFLNRSPEGVSRRKSMGLSDEDEAAVELAWSRFTSWMKQYLA

SEQ ID NO: 26202 - DNA, 946 bp, Arabidopsis thaliana
  misc_feature (1)..(946): Ceres Seq. ID no. 13487250
  misc_feature: MA Experiment ID: 108434 Result: Up-regulated in Transcription
  misc_feature: MA Experiment 108434 PARAMETER Experiment Name: At_Root_Tips_cDNA_P Parameter: Tissue Value: Root Tips
  misc_feature: MA Experiment ID: 108461 Result: Up-regulated in Transcription
  misc_feature: MA Experiment 108461 PARAMETER Experiment Name: At_Germinating_Seeds_cDNA_P Parameter: Age (day) Value: 1 vs. 0
  misc_feature: MA Experiment 108461 PARAMETER Experiment Name: At_Germinating_Seeds_cDNA_P Parameter: Tissue Value: Germinating Seeds
  misc_feature: MA Experiment ID: 108488 Result: Up-regulated in Transcription
  misc_feature: MA Experiment ID: 20000069 Result: Up-regulated in Transcription
  misc_feature: MA Experiment 20000069 PARAMETER Experiment Name: At_100uM_ABA_Mutants_cDNA_P Parameter: Plant Line Value: CS23
  misc_feature: MA Experiment 20000069 PARAMETER Experiment Name: At_100uM_ABA_Mutants_cDNA_P Parameter: Timepoint (hr) Value: 6
  misc_feature: MA Experiment 20000069 PARAMETER Experiment Name: At_100uM_ABA_Mutants_cDNA_P Parameter: Tissue Value: Aerial
  misc_feature: MA Experiment 20000069 PARAMETER Experiment Name: At_100uM_ABA_Mutants_cDNA_P Parameter: Treatment Value: 100uM ABA vs. No Treatment
  misc_feature: MA Experiment ID: 20000072 Result: Up-regulated in Transcription
  misc_feature: MA Experiment 20000072 PARAMETER Experiment Name: At_100uM_ABA_Mutants_cDNA_P Parameter: Plant Line Value: CS8105
  misc_feature: MA Experiment 20000072 PARAMETER Experiment Name: At_100uM_ABA_Mutants_cDNA_P Parameter: Timepoint (hr) Value: 6
  misc_feature: MA Experiment 20000072 PARAMETER Experiment Name: At_100uM_ABA_Mutants_cDNA_P Parameter: Tissue Value: Aerial
  misc_feature: MA Experiment 20000072 PARAMETER Experiment Name: At_100uM_ABA_Mutants_cDNA_P Parameter: Treatment Value: 100uM ABA vs. No Treatment
  misc_feature: MA Experiment ID: 20000086 Result: Up-regulated in Transcription
  misc_feature: MA Experiment 20000086 PARAMETER Experiment Name: At_100uM_ABA_Mutants_cDNA_P Parameter: Plant Line Value: CS22
  misc_feature: MA Experiment 20000086 PARAMETER Experiment Name: At_100uM_ABA_Mutants_cDNA_P Parameter: Timepoint (hr) Value: 6
  misc_feature: MA Experiment 20000086 PARAMETER Experiment Name: At_100uM_ABA_Mutants_cDNA_P Parameter: Tissue Value: Aerial
  misc_feature: MA Experiment 20000086 PARAMETER Experiment Name: At_100uM_ABA_Mutants_cDNA_P Parameter: Treatment Value: 100uM ABA vs. No Treatment
  misc_feature: MA Experiment ID: 20000087 Result: Up-regulated in Transcription
  misc_feature: MA Experiment 20000087 PARAMETER Experiment Name: At_100uM_ABA_Mutants_cDNA_P Parameter: Plant Line Value: WS
  misc_feature: MA Experiment 20000087 PARAMETER Experiment Name: At_100uM_ABA_Mutants_cDNA_P Parameter: Timepoint (hr) Value: 6
  misc_feature: MA Experiment 20000087 PARAMETER Experiment Name: At_100uM_ABA_Mutants_cDNA_P Parameter: Tissue Value: Aerial
  misc_feature: MA Experiment 20000087 PARAMETER Experiment Name: At_100uM_ABA_Mutants_cDNA_P Parameter: Treatment Value: 100uM ABA vs. No Treatment
  misc_feature: MA Experiment ID: 20000089 Result: Up-regulated in Transcription
  misc_feature: MA Experiment ID: 20000090 Result: Up-regulated in Transcription
  misc_feature: MA Experiment ID: 20000117 Result: Up-regulated in Transcription
  misc_feature: MA Experiment 20000117 PARAMETER Experiment Name: At_100uM_ABA_Mutants_cDNA_P Parameter: Plant Line Value: Columbia
  misc_feature: MA Experiment 20000117 PARAMETER Experiment Name: At_100uM_ABA_Mutants_cDNA_P Parameter: Timepoint (hr) Value: 6
  misc_feature: MA Experiment 20000117 PARAMETER Experiment Name: At_100uM_ABA_Mutants_cDNA_P Parameter: Tissue Value: Aerial
  misc_feature: MA Experiment 20000117 PARAMETER Experiment Name: At_100uM_ABA_Mutants_cDNA_P Parameter: Treatment Value: 100uM ABA vs. No Treatment
  misc_feature: MA Experiment ID: 20000173 Result: Down-regulated in Transcription
  misc_feature: MA Experiment 20000173 PARAMETER Experiment Name: At_42deg_Heat_P Parameter: Age (day) Value: 14
  misc_feature: MA Experiment 20000173 PARAMETER Experiment Name: At_42deg_Heat_P Parameter: Organism Value: A. thaliana
  misc_feature: MA Experiment 20000173 PARAMETER Experiment Name: At_42deg_Heat_P Parameter: Plant Line Value: WS
  misc_feature: MA Experiment 20000173 PARAMETER Experiment Name: At_42deg_Heat_P Parameter: Temperature (deg C) Value: 42 vs. 22
  misc_feature: MA Experiment 20000173 PARAMETER Experiment Name: At_42deg_Heat_P Parameter: Timepoint (hr) Value: 6
  misc_feature: MA Experiment 20000173 PARAMETER Experiment Name: At_42deg_Heat_P Parameter: Tissue Value: Aerial
  misc_feature: MA Experiment ID: 20000439 Result: Up-regulated in Transcription
  misc_feature: MA Experiment 20000439 PARAMETER Experiment Name: At_Roots__P Parameter: Age (day) Value: 14 vs. 21
  misc_feature: MA Experiment 20000439 PARAMETER Experiment Name: At_Roots__P Parameter: Organism Value: A. thaliana
  misc_feature: MA Experiment 20000439 PARAMETER Experiment Name: At_Roots__P Parameter: Tissue Value: Roots vs. Whole Plant
  misc_feature: MA Experiment ID: 20000794 Result: Down-regulated in Transcription
  misc_feature: MA Experiment 20000794 PARAMETER Experiment Name: At_Petals_P Parameter: Age (day) Value: 23-25 days
  misc_feature: MA Experiment 20000794 PARAMETER Experiment Name: At_Petals_P Parameter: Plant Line Value: WS
  misc_feature: MA Experiment 20000794 PARAMETER Experiment Name: At_Petals_P Parameter: Tissue Value: Petals vs. Whole plant
  misc_feature: MA Experiment ID: 20001905 Result: Down-regulated in Transcription
  misc_feature: MA Experiment 20001905 PARAMETER Experiment Name: At_Drought_Reproduction_P Parameter: Age (day) Value: 40
  misc_feature: MA Experiment 20001905 PARAMETER Experiment Name: At_Drought_Reproduction_P Parameter: Organism Value: A. thaliana
  misc_feature: MA Experiment 20001905 PARAMETER Experiment Name: At_Drought_Reproduction_P Parameter: Plant Line Value: WS
  misc_feature: MA Experiment 20001905 PARAMETER Experiment Name: At_Drought_Reproduction_P Parameter: Timepoint (day) Value: 10
  misc_feature: MA Experiment 20001905 PARAMETER Experiment Name: At_Drought_Reproduction_P Parameter: Tissue Value: Rosettes
  misc_feature: MA Experiment 20001905 PARAMETER Experiment Name: At_Drought_Reproduction_P Parameter: Treatment Value: Drought vs. No Drought
  misc_feature: MA Experiment ID: 20001911 Result: Down-regulated in Transcription
  misc_feature: MA Experiment 20001911 PARAMETER Experiment Name: At_Drought_Reproduction_P Parameter: Age (day) Value: 40
  misc_feature: MA Experiment 20001911 PARAMETER Experiment Name: At_Drought_Reproduction_P Parameter: Organism Value: A. thaliana
  misc_feature: MA Experiment 20001911 PARAMETER Experiment Name: At_Drought_Reproduction_P Parameter: Plant Line Value: WS
  misc_feature: MA Experiment 20001911 PARAMETER Experiment Name: At_Drought_Reproduction_P Parameter: Timepoint (day) Value: 10
  misc_feature: MA Experiment 20001911 PARAMETER Experiment Name: At_Drought_Reproduction_P Parameter: Tissue Value: Flowers
  misc_feature: MA Experiment 20001911 PARAMETER Experiment Name: At_Drought_Reproduction_P Parameter: Treatment Value: Drought vs. No Drought
agtaagtcatcatcactcagatctagtagttccacaaactcacattgggtcggatcgttgaccagaaaaacacacagagaaaggagaaaaacatgaaggagttggcgcatccgtacgttccgagagatctgaacctacccggatacgtaccaatctcaatgtcaatgtcctccatcgtctctatctacctcggttcttccctccttgttgtctccctcgtctggcttctcttcgggaggaagaaagctaaacttgataagttgcttatgtgttggtggacattcactggtctcactcatgttattctcgagggctatttcgttttctcccctgagtttttcaaggacaacacttctgcttatcttgctgaagtttggaaagaatatagcaaaggtgattcgagatacgtaggtagagattctgcagttgtatctgttgaagggatcactgctgttatcgttggcccagcttctctcctagctatttatgccattgctaaggagaagtcgtatagctacgtgcttcagcttgcgatttcggtttgccagctctacggatgtttggtttatttcattactgctatcttggaaggagacaactttgccacaaactctttctactattactcctactacatcggggctaactgttggtgggtcttgataccttcactcatttctttccgttgctggaaaaagatttgtgcagctgctgccattgccaacaacaacgtcgagacaaagacgaagaagaaaacccgttgaagcaaggatcaaactctcttttatctcttcaggttactgctgctatagcaaatgaacatgagtctccttttgcggataatttatccattttaaaaactttagctatgttgtctgtctctcttacagcaataaacttgtgaggataatttatccatttttcatatgatatttgcgcttttgtt

SEQ ID NO: 26203 - protein, 223 aa, Arabidopsis thaliana
  peptide (1)..(223): Ceres Seq. ID no. 13487251
  misc_feature (20)..(214): Pfam Name: Emopamil binding protein Pfam Description: Emopamil binding protein
  misc_feature (20)..(214): Pfam Name: Emopamil binding protein Pfam Description: Emopamil binding protein
  misc_feature (6)..(221): Homolog of NCBI NO: 5729810 NR Description: emopamil binding protein (sterol isomerase)
  misc_feature (6)..(195): Homolog of NCBI NO: 12848900 NR Description: unnamed protein product [Mus musculus]
  misc_feature (6)..(220): Homolog of NCBI NO: 18202586 NR Description: 3-beta-hydroxysteroid-delta(8),delta(7)-isomerase delta-isomerase) (Delta8-delta7 sterol isomerase) (D8-D7 sterol
  misc_feature (6)..(221): Homolog of NCBI NO: 6681255 NR Description: phenylalkylamine Ca2+ antagonist (emopamil)
  misc_feature (1)..(221): Homolog of NCBI NO: 16923992 NR Description: phenylalkylamine Ca2+ antagonist (emopamil)
  misc_feature (6)..(221): Homolog of NCBI NO: 5729810 NR Description: emopamil binding protein (sterol isomerase)
  misc_feature (6)..(220): Homolog of NCBI NO: 18202586 NR Description: 3-beta-hydroxysteroid-delta(8),delta(7)-isomerase delta-isomerase) (Delta8-delta7 sterol isomerase) (D8-D7 sterol
  misc_feature (1)..(221): Homolog of NCBI NO: 16923992 NR Description: phenylalkylamine Ca2+ antagonist (emopamil)
  misc_feature (1)..(223): Homolog of NCBI NO: 21554213 NR Description: C-8,7 sterol isomerase [Arabidopsis thaliana]
  misc_feature (1)..(223): Homolog of NCBI NO: 15223758 NR Description: C-8,7 sterol isomerase [Arabidopsis thaliana]
  misc_feature (1)..(223): Homolog of NCBI NO: 4098989 NR Description: phenylalkylamine binding protein homolog
  misc_feature (6)..(217): Homolog of NCBI NO: 34894044 NR Description: putative C-8,7 sterol isomerase
  misc_feature (6)..(221): Homolog of NCBI NO: 33417065 NR Description: Unknown (protein for MGC:68833) [Xenopus laevis]
  misc_feature (6)..(221): Homolog of NCBI NO: 6681255 NR Description: phenylalkylamine Ca2+ antagonist (emopamil)
  misc_feature (6)..(195): Homolog of NCBI NO: 12848900 NR Description: unnamed protein product [Mus musculus]
  misc_feature (6)..(221): Homolog of NCBI NO: 33417065 NR Description: Unknown (protein for MGC:68833) [Xenopus laevis]
  misc_feature (6)..(217): Homolog of NCBI NO: 34894044 NR Description: putative C-8,7 sterol isomerase
  misc_feature (1)..(223): Homolog of NCBI NO: 4098989 NR Description: phenylalkylamine binding protein homolog
  misc_feature (1)..(223): Homolog of NCBI NO: 15223758 NR Description: C-8,7 sterol isomerase [Arabidopsis thaliana]
  misc_feature (1)..(223): Homolog of NCBI NO: 21554213 NR Description: C-8,7 sterol isomerase [Arabidopsis thaliana]
MKELAHPYVPRDLNLPGYVPISMSMSSIVSIYLGSSLLVVSLVWLLFGRKKAKLDKLLMCWWTFTGLTHVILEGYFVFSPEFFKDNTSAYLAEVWKEYSKGDSRYVGRDSAVVSVEGITAVIVGPASLLAIYAIAKEKSYSYVLQLAISVCQLYGCLVYFITAILEGDNFATNSFYYYSYYIGANCWWVLIPSLISFRCWKKICAAAAIANNNVETKTKKKTR

SEQ ID NO: 26204 - protein, 201 aa, Arabidopsis thaliana
  peptide (1)..(201): Ceres Seq. ID no. 13487252
  misc_feature (1)..(192): Pfam Name: Emopamil binding protein Pfam Description: Emopamil binding protein
  misc_feature (1)..(192): Pfam Name: Emopamil binding protein Pfam Description: Emopamil binding protein
  misc_feature (1)..(199): Homolog of NCBI NO: 5729810 NR Description: emopamil binding protein (sterol isomerase)
  misc_feature (1)..(173): Homolog of NCBI NO: 12848900 NR Description: unnamed protein product [Mus musculus]
  misc_feature (1)..(198): Homolog of NCBI NO: 18202586 NR Description: 3-beta-hydroxysteroid-delta(8),delta(7)-isomerase delta-isomerase) (Delta8-delta7 sterol isomerase) (D8-D7 sterol
  misc_feature (1)..(199): Homolog of NCBI NO: 6681255 NR Description: phenylalkylamine Ca2+ antagonist (emopamil)
  misc_feature (1)..(199): Homolog of NCBI NO: 16923992 NR Description: phenylalkylamine Ca2+ antagonist (emopamil)
  misc_feature (1)..(199): Homolog of NCBI NO: 5729810 NR Description: emopamil binding protein (sterol isomerase)
  misc_feature (1)..(198): Homolog of NCBI NO: 18202586 NR Description: 3-beta-hydroxysteroid-delta(8),delta(7)-isomerase delta-isomerase) (Delta8-delta7 sterol isomerase) (D8-D7 sterol
  misc_feature (1)..(199): Homolog of NCBI NO: 16923992 NR Description: phenylalkylamine Ca2+ antagonist (emopamil)
  misc_feature (1)..(201): Homolog of NCBI NO: 21554213 NR Description: C-8,7 sterol isomerase [Arabidopsis thaliana]
  misc_feature (1)..(201): Homolog of NCBI NO: 15223758 NR Description: C-8,7 sterol isomerase [Arabidopsis thaliana]
  misc_feature (1)..(201): Homolog of NCBI NO: 4098989 NR Description: phenylalkylamine binding protein homolog
  misc_feature (1)..(195): Homolog of NCBI NO: 34894044 NR Description: putative C-8,7 sterol isomerase
  misc_feature (1)..(199): Homolog of NCBI NO: 33417065 NR Description: Unknown (protein for MGC:68833) [Xenopus laevis]
  misc_feature (1)..(199): Homolog of NCBI NO: 6681255 NR Description: phenylalkylamine Ca2+ antagonist (emopamil)
  misc_feature (1)..(173): Homolog of NCBI NO: 12848900 NR Description: unnamed protein product [Mus musculus]
  misc_feature (1)..(199): Homolog of NCBI NO: 33417065 NR Description: Unknown (protein for MGC:68833) [Xenopus laevis]
  misc_feature (1)..(195): Homolog of NCBI NO: 34894044 NR Description: putative C-8,7 sterol isomerase
  misc_feature (1)..(201): Homolog of NCBI NO: 4098989 NR Description: phenylalkylamine binding protein homolog
  misc_feature (1)..(201): Homolog of NCBI NO: 15223758 NR Description: C-8,7 sterol isomerase [Arabidopsis thaliana]
  misc_feature (1)..(201): Homolog of NCBI NO: 21554213 NR Description: C-8,7 sterol isomerase [Arabidopsis thaliana]
MSMSSIVSIYLGSSLLVVSLVWLLFGRKKAKLDKLLMCWWTFTGLTHVILEGYFVFSPEFFKDNTSAYLAEVWKEYSKGDSRYVGRDSAVVSVEGITAVIVGPASLLAIYAIAKEKSYSYVLQLAISVCQLYGCLVYFITAILEGDNFATNSFYYYSYYIGANCWWVLIPSLISFRCWKKICAAAAIANNNVETKTKKKTR

SEQ ID NO: 26205 - protein, 199 aa, Arabidopsis thaliana
  peptide (1)..(199): Ceres Seq. ID no. 13487253
  misc_feature (1)..(190): Pfam Name: Emopamil binding protein Pfam Description: Emopamil binding protein
  misc_feature (1)..(190): Pfam Name: Emopamil binding protein Pfam Description: Emopamil binding protein
  misc_feature (1)..(197): Homolog of NCBI NO: 5729810 NR Description: emopamil binding protein (sterol isomerase)
  misc_feature (1)..(171): Homolog of NCBI NO: 12848900 NR Description: unnamed protein product [Mus musculus]
  misc_feature (1)..(196): Homolog of NCBI NO: 18202586 NR Description: 3-beta-hydroxysteroid-delta(8),delta(7)-isomerase delta-isomerase) (Delta8-delta7 sterol isomerase) (D8-D7 sterol
  misc_feature (1)..(197): Homolog of NCBI NO: 6681255 NR Description: phenylalkylamine Ca2+ antagonist (emopamil)
  misc_feature (1)..(197): Homolog of NCBI NO: 16923992 NR Description: phenylalkylamine Ca2+ antagonist (emopamil)
  misc_feature (1)..(197): Homolog of NCBI NO: 5729810 NR Description: emopamil binding protein (sterol isomerase)
  misc_feature (1)..(196): Homolog of NCBI NO: 18202586 NR Description: 3-beta-hydroxysteroid-delta(8),delta(7)-isomerase delta-isomerase) (Delta8-delta7 sterol isomerase) (D8-D7 sterol
  misc_feature (1)..(197): Homolog of NCBI NO: 16923992 NR Description: phenylalkylamine Ca2+ antagonist (emopamil)
  misc_feature (1)..(199): Homolog of NCBI NO: 21554213 NR Description: C-8,7 sterol isomerase [Arabidopsis thaliana]
  misc_feature (1)..(199): Homolog of NCBI NO: 15223758 NR Description: C-8,7 sterol isomerase [Arabidopsis thaliana]
  misc_feature (1)..(199): Homolog of NCBI NO: 4098989 NR Description: phenylalkylamine binding protein homolog
  misc_feature (1)..(193): Homolog of NCBI NO: 34894044 NR Description: putative C-8,7 sterol isomerase
  misc_feature (1)..(197): Homolog of NCBI NO: 33417065 NR Description: Unknown (protein for MGC:68833) [Xenopus laevis]
  misc_feature (1)..(197): Homolog of NCBI NO: 6681255 NR Description: phenylalkylamine Ca2+ antagonist (emopamil)
  misc_feature (1)..(171): Homolog of NCBI NO: 12848900 NR Description: unnamed protein product [Mus musculus]
  misc_feature (1)..(197): Homolog of NCBI NO: 33417065 NR Description: Unknown (protein for MGC:68833) [Xenopus laevis]
  misc_feature (1)..(193): Homolog of NCBI NO: 34894044 NR Description: putative C-8,7 sterol isomerase
  misc_feature (1)..(199): Homolog of NCBI NO: 4098989 NR Description: phenylalkylamine binding protein homolog
  misc_feature (1)..(199): Homolog of NCBI NO: 15223758 NR Description: C-8,7 sterol isomerase [Arabidopsis thaliana]
  misc_feature (1)..(199): Homolog of NCBI NO: 21554213 NR Description: C-8,7 sterol isomerase [Arabidopsis thaliana]
MSSIVSIYLGSSLLVVSLVWLLFGRKKAKLDKLLMCWWTFTGLTHVILEGYFVFSPEFFKDNTSAYLAEVWKEYSKGDSRYVGRDSAVVSVEGITAVIVGPASLLAIYAIAKEKSYSYVLQLAISVCQLYGCLVYFITAILEGDNFATNSFYYYSYYIGANCWWVLIPSLISFRCWKKICAAAAIANNNVETKTKKKTR

SEQ ID NO: 26206 - DNA, 916 bp, Arabidopsis thaliana
  misc_feature (1)..(916): Ceres Seq. ID no. 13499613
  misc_feature: MA Experiment ID: 108435 Result: Up-regulated in Transcription
  misc_feature: MA Experiment 108435 PARAMETER Experiment Name: At_stm_Mutants_cDNA_P Parameter: Plant Line Value: wt Landsburg vs stm
  misc_feature: MA Experiment 108435 PARAMETER Experiment Name: At_stm_Mutants_cDNA_P Parameter: Tissue Value: Shoot Apical Meristem Region
  misc_feature: MA Experiment ID: 108461 Result: Up-regulated in Transcription
  misc_feature: MA Experiment 108461 PARAMETER Experiment Name: At_Germinating_Seeds_cDNA_P Parameter: Age (day) Value: 1 vs. 0
  misc_feature: MA Experiment 108461 PARAMETER Experiment Name: At_Germinating_Seeds_cDNA_P Parameter: Tissue Value: Germinating Seeds
  misc_feature: MA Experiment ID: 108462 Result: Up-regulated in Transcription
  misc_feature: MA Experiment 108462 PARAMETER Experiment Name: At_Germinating_Seeds_cDNA_P Parameter: Age (day) Value: 2 vs. 0
  misc_feature: MA Experiment 108462 PARAMETER Experiment Name: At_Germinating_Seeds_cDNA_P Parameter: Tissue Value: Germinating Seeds
  misc_feature: MA Experiment ID: 108463 Result: Up-regulated in Transcription
  misc_feature: MA Experiment 108463 PARAMETER Experiment Name: At_Germinating_Seeds_cDNA_P Parameter: Age (day) Value: 3 vs. 0
  misc_feature: MA Experiment 108463 PARAMETER Experiment Name: At_Germinating_Seeds_cDNA_P Parameter: Tissue Value: Germinating Seeds
  misc_feature: MA Experiment ID: 108464 Result: Up-regulated in Transcription
  misc_feature: MA Experiment 108464 PARAMETER Experiment Name: At_Germinating_Seeds_cDNA_P Parameter: Age (day) Value: 4 vs. 0
  misc_feature: MA Experiment 108464 PARAMETER Experiment Name: At_Germinating_Seeds_cDNA_P Parameter: Tissue Value: Germinating Seeds
  misc_feature: MA Experiment ID: 108473 Result: Down-regulated in Transcription
  misc_feature: MA Experiment 108473 PARAMETER Experiment Name: At_Drought_Flowers_cDNA_P Parameter: Timepoint (hr) Value: 7 d
  misc_feature: MA Experiment 108473 PARAMETER Experiment Name: At_Drought_Flowers_cDNA_P Parameter: Tissue Value: Flower
  misc_feature: MA Experiment 108473 PARAMETER Experiment Name: At_Drought_Flowers_cDNA_P Parameter: Treatment Value: Drought vs. No Drought
  misc_feature: MA Experiment ID: 108489 Result: Down-regulated in Transcription
  misc_feature: MA Experiment ID: 108501 Result: Up-regulated in Transcription
  misc_feature: MA Experiment 108501 PARAMETER Experiment Name: At_ap2_floral_buds_cDNA_P Parameter: Plant Line Value: ap2 (Ler.)
  misc_feature: MA Experiment 108501 PARAMETER Experiment Name: At_ap2_floral_buds_cDNA_P Parameter: Tissue Value: Closed Flower
  misc_feature: MA Experiment ID: 108579 Result: Up-regulated in Transcription
  misc_feature: MA Experiment 108579 PARAMETER Experiment Name: At_4deg_Cold_cDNA_P Parameter: Temperature (deg C) Value: 4 vs. 22
  misc_feature: MA Experiment 108579 PARAMETER Experiment Name: At_4deg_Cold_cDNA_P Parameter: Timepoint (hr) Value: 6
  misc_feature: MA Experiment 108579 PARAMETER Experiment Name: At_4deg_Cold_cDNA_P Parameter: Tissue Value: Aerial
  misc_feature: MA Experiment ID: 108594 Result: Down-regulated in Transcription
  misc_feature: MA Experiment 108594 PARAMETER Experiment Name: At_Ler-rhl_Root_cDNA_P Parameter: Plant Line Value: null
  misc_feature: MA Experiment ID: 20000030 Result: Up-regulated in Transcription
  misc_feature: MA Experiment 20000030 PARAMETER Experiment Name: At_CS6630_Roots_cDNA_P Parameter: Plant Line Value: CS6630 vs. WS
  misc_feature: MA Experiment 20000030 PARAMETER Experiment Name: At_CS6630_Roots_cDNA_P Parameter: Tissue Value: Roots
  misc_feature: MA Experiment ID: 20000069 Result: Down-regulated in Transcription
  misc_feature: MA Experiment 20000069 PARAMETER Experiment Name: At_100uM_ABA_Mutants_cDNA_P Parameter: Plant Line Value: CS23
  misc_feature: MA Experiment 20000069 PARAMETER Experiment Name: At_100uM_ABA_Mutants_cDNA_P Parameter: Timepoint (hr) Value: 6
  misc_feature: MA Experiment 20000069 PARAMETER Experiment Name: At_100uM_ABA_Mutants_cDNA_P Parameter: Tissue Value: Aerial
  misc_feature: MA Experiment 20000069 PARAMETER Experiment Name: At_100uM_ABA_Mutants_cDNA_P Parameter: Treatment Value: 100uM ABA vs. No Treatment
  misc_feature: MA Experiment ID: 20000070 Result: Down-regulated in Transcription
  misc_feature: MA Experiment 20000070 PARAMETER Experiment Name: At_100uM_ABA_Mutants_cDNA_P Parameter: Plant Line Value: CS24
  misc_feature: MA Experiment 20000070 PARAMETER Experiment Name: At_100uM_ABA_Mutants_cDNA_P Parameter: Timepoint (hr) Value: 6
  misc_feature: MA Experiment 20000070 PARAMETER Experiment Name: At_100uM_ABA_Mutants_cDNA_P Parameter: Tissue Value: Aerial
  misc_feature: MA Experiment 20000070 PARAMETER Experiment Name: At_100uM_ABA_Mutants_cDNA_P Parameter: Treatment Value: 100uM ABA vs. No Treatment
  misc_feature: MA Experiment ID: 20000071 Result: Down-regulated in Transcription
  misc_feature: MA Experiment 20000071 PARAMETER Experiment Name: At_100uM_ABA_Mutants_cDNA_P Parameter: Plant Line Value: CS8104
  misc_feature: MA Experiment 20000071 PARAMETER Experiment Name: At_100uM_ABA_Mutants_cDNA_P Parameter: Timepoint (hr) Value: 6
  misc_feature: MA Experiment 20000071 PARAMETER Experiment Name: At_100uM_ABA_Mutants_cDNA_P Parameter: Tissue Value: Aerial
  misc_feature: MA Experiment 20000071 PARAMETER Experiment Name: At_100uM_ABA_Mutants_cDNA_P Parameter: Treatment Value: 100uM ABA vs. No Treatment
  misc_feature: MA Experiment ID: 20000086 Result: Down-regulated in Transcription
  misc_feature: MA Experiment 20000086 PARAMETER Experiment Name: At_100uM_ABA_Mutants_cDNA_P Parameter: Plant Line Value: CS22
  misc_feature: MA Experiment 20000086 PARAMETER Experiment Name: At_100uM_ABA_Mutants_cDNA_P Parameter: Timepoint (hr) Value: 6
  misc_feature: MA Experiment 20000086 PARAMETER Experiment Name: At_100uM_ABA_Mutants_cDNA_P Parameter: Tissue Value: Aerial
  misc_feature: MA Experiment 20000086 PARAMETER Experiment Name: At_100uM_ABA_Mutants_cDNA_P Parameter: Treatment Value: 100uM ABA vs. No Treatment
  misc_feature: MA Experiment ID: 20000088 Result: Down-regulated in Transcription
  misc_feature: MA Experiment 20000088 PARAMETER Experiment Name: At_100uM_ABA_Mutants_cDNA_P Parameter: Plant Line Value: Landsberg
  misc_feature: MA Experiment 20000088 PARAMETER Experiment Name: At_100uM_ABA_Mutants_cDNA_P Parameter: Timepoint (hr) Value: 6
  misc_feature: MA Experiment 20000088 PARAMETER Experiment Name: At_100uM_ABA_Mutants_cDNA_P Parameter: Tissue Value: Aerial
  misc_feature: MA Experiment 20000088 PARAMETER Experiment Name: At_100uM_ABA_Mutants_cDNA_P Parameter: Treatment Value: 100uM ABA vs. No Treatment
  misc_feature: MA Experiment ID: 20000090 Result: Down-regulated in Transcription
  misc_feature: MA Experiment ID: 20000117 Result: Down-regulated in Transcription
  misc_feature: MA Experiment 20000117 PARAMETER Experiment Name: At_100uM_ABA_Mutants_cDNA_P Parameter: Plant Line Value: Columbia
  misc_feature: MA Experiment 20000117 PARAMETER Experiment Name: At_100uM_ABA_Mutants_cDNA_P Parameter: Timepoint (hr) Value: 6
  misc_feature: MA Experiment 20000117 PARAMETER Experiment Name: At_100uM_ABA_Mutants_cDNA_P Parameter: Tissue Value: Aerial
  misc_feature: MA Experiment 20000117 PARAMETER Experiment Name: At_100uM_ABA_Mutants_cDNA_P Parameter: Treatment Value: 100uM ABA vs. No Treatment
  misc_feature: MA Experiment ID: 20000144 Result: Down-regulated in Transcription
  misc_feature: MA Experiment 20000144 PARAMETER Experiment Name: At_42deg_Heat_cDNA_P Parameter: Temperature (deg C) Value: 42 vs. 22
  misc_feature: MA Experiment 20000144 PARAMETER Experiment Name: At_42deg_Heat_cDNA_P Parameter: Timepoint (hr) Value: 1
  misc_feature: MA Experiment 20000144 PARAMETER Experiment Name: At_42deg_Heat_cDNA_P Parameter: Tissue Value: Aerial
  misc_feature: MA Experiment ID: 20000171 Result: Down-regulated in Transcription
  misc_feature: MA Experiment 20000171 PARAMETER Experiment Name: At_42deg_Heat_P Parameter: Age (day) Value: 14
  misc_feature: MA Experiment 20000171 PARAMETER Experiment Name: At_42deg_Heat_P Parameter: Organism Value: A. thaliana
  misc_feature: MA Experiment 20000171 PARAMETER Experiment Name: At_42deg_Heat_P Parameter: Plant Line Value: WS
  misc_feature: MA Experiment 20000171 PARAMETER Experiment Name: At_42deg_Heat_P Parameter: Temperature (deg C) Value: 42 vs. 22
  misc_feature: MA Experiment 20000171 PARAMETER Experiment Name: At_42deg_Heat_P Parameter: Timepoint (hr) Value: 1
  misc_feature: MA Experiment 20000171 PARAMETER Experiment Name: At_42deg_Heat_P Parameter: Tissue Value: Aerial
  misc_feature: MA Experiment ID: 20000184 Result: Up-regulated in Transcription
  misc_feature: MA Experiment 20000184 PARAMETER Experiment Name: At_Shoots__P Parameter: Age (day) Value: 7
  misc_feature: MA Experiment 20000184 PARAMETER Experiment Name: At_Shoots__P Parameter: Tissue Value: Shoots vs. Whole Plant
  misc_feature: MA Experiment ID: 20000185 Result: Up-regulated in Transcription
  misc_feature: MA Experiment 20000185 PARAMETER Experiment Name: At_Roots__P Parameter: Age (day) Value: 7 vs. 21
  misc_feature: MA Experiment 20000185 PARAMETER Experiment Name: At_Roots__P Parameter: Organism Value: A. thaliana
  misc_feature: MA Experiment 20000185 PARAMETER Experiment Name: At_Roots__P Parameter: Tissue Value: Roots vs. Whole Plant
  misc_feature: MA Experiment ID: 20000234 Result: Up-regulated in Transcription
  misc_feature: MA Experiment 20000234 PARAMETER Experiment Name: At_Siliques_P Parameter: Age (day) Value: 21
  misc_feature: MA Experiment 20000234 PARAMETER Experiment Name: At_Siliques_P Parameter: Organism Value: A. thaliana
  misc_feature: MA Experiment 20000234 PARAMETER Experiment Name: At_Siliques_P Parameter: Plant Line Value: WS
  misc_feature: MA Experiment 20000234 PARAMETER Experiment Name: At_Siliques_P Parameter: Tissue Value: Less Than 5mm Siliques vs. Whole Plant
  misc_feature: MA Experiment ID: 20000235 Result: Up-regulated in Transcription
  misc_feature: MA Experiment 20000235 PARAMETER Experiment Name: At_Siliques_P Parameter: Age (day) Value: 21
  misc_feature: MA Experiment 20000235 PARAMETER Experiment Name: At_Siliques_P Parameter: Organism Value: A. thaliana
  misc_feature: MA Experiment 20000235 PARAMETER Experiment Name: At_Siliques_P Parameter: Plant Line Value: WS
  misc_feature: MA Experiment 20000235 PARAMETER Experiment Name: At_Siliques_P Parameter: Tissue Value: 5-10mm Siliques vs. Whole Plant
  misc_feature: MA Experiment ID: 20000264 Result: Up-regulated in Transcription
  misc_feature: MA Experiment 20000264 PARAMETER Experiment Name: At_Open_Flower_P Parameter: Age (day) Value: 21
  misc_feature: MA Experiment 20000264 PARAMETER Experiment Name: At_Open_Flower_P Parameter: Plant Line Value: WS
  misc_feature: MA Experiment 20000264 PARAMETER Experiment Name: At_Open_Flower_P Parameter: Tissue Value: Open Flower vs. Whole Plant
  misc_feature: MA Experiment ID: 20000265 Result: Up-regulated in Transcription
  misc_feature: MA Experiment 20000265 PARAMETER Experiment Name: At_Open_Flower_P Parameter: Age (day) Value: 21
  misc_feature: MA Experiment 20000265 PARAMETER Experiment Name: At_Open_Flower_P Parameter: Plant Line Value: WS
  misc_feature: MA Experiment 20000265 PARAMETER Experiment Name: At_Open_Flower_P Parameter: Tissue Value: Closed Flower vs. Whole Plant
  misc_feature: MA Experiment ID: 20000267 Result: Up-regulated in Transcription
  misc_feature: MA Experiment 20000267 PARAMETER Experiment Name: At_Drought_P Parameter: Age (day) Value: 7
  misc_feature: MA Experiment 20000267 PARAMETER Experiment Name: At_Drought_P Parameter: Organism Value: A. thaliana
  misc_feature: MA Experiment 20000267 PARAMETER Experiment Name: At_Drought_P Parameter: Plant Line Value: WS
  misc_feature: MA Experiment 20000267 PARAMETER Experiment Name: At_Drought_P Parameter: Timepoint (hr) Value: 6
  misc_feature: MA Experiment 20000267 PARAMETER Experiment Name: At_Drought_P Parameter: Tissue Value: Whole Plant
  misc_feature: MA Experiment 20000267 PARAMETER Experiment Name: At_Drought_P Parameter: Treatment Value: Drought vs. No Drought
  misc_feature: MA Experiment ID: 20000286 Result: Up-regulated in Transcription
  misc_feature: MA Experiment 20000286 PARAMETER Experiment Name: At_Open_Flower_P Parameter: Age (day) Value: 21
  misc_feature: MA Experiment 20000286 PARAMETER Experiment Name: At_Open_Flower_P Parameter: Plant Line Value: WS
  misc_feature: MA Experiment 20000286 PARAMETER Experiment Name: At_Open_Flower_P Parameter: Tissue Value: Half Open vs. Whole Plant
  misc_feature: MA Experiment ID: 20000308 Result: Up-regulated in Transcription
  misc_feature: MA Experiment 20000308 PARAMETER Experiment Name: At_100mM_NaCl__P Parameter: Age (day) Value: 17
  misc_feature: MA Experiment 20000308 PARAMETER Experiment Name: At_100mM_NaCl__P Parameter: Organism Value: A. thaliana
  misc_feature: MA Experiment 20000308 PARAMETER Experiment Name: At_100mM_NaCl__P Parameter: Plant Line Value: WS
  misc_feature: MA Experiment 20000308 PARAMETER Experiment Name: At_100mM_NaCl__P Parameter: Timepoint (hr) Value: 72
  misc_feature: MA Experiment 20000308 PARAMETER Experiment Name: At_100mM_NaCl__P Parameter: Tissue Value: Whole Plant
  misc_feature: MA Experiment 20000308 PARAMETER Experiment Name: At_100mM_NaCl__P Parameter: Treatment Value: 100mM NaCl vs. No Treatment
  misc_feature: MA Experiment ID: 20000438 Result: Up-regulated in Transcription
  misc_feature: MA Experiment 20000438 PARAMETER Experiment Name: At_Shoots__P Parameter: Age (day) Value: 14
  misc_feature: MA Experiment 20000438 PARAMETER Experiment Name: At_Shoots__P Parameter: Tissue Value: Shoots vs. Whole Plant
  misc_feature: MA Experiment ID: 20000439 Result: Up-regulated in Transcription
  misc_feature: MA Experiment 20000439 PARAMETER Experiment Name: At_Roots__P Parameter: Age (day) Value: 14 vs. 21
  misc_feature: MA Experiment 20000439 PARAMETER Experiment Name: At_Roots__P Parameter: Organism Value: A. thaliana
  misc_feature: MA Experiment 20000439 PARAMETER Experiment Name: At_Roots__P Parameter: Tissue Value: Roots vs. Whole Plant
  misc_feature: MA Experiment ID: 20000451 Result: Up-regulated in Transcription
  misc_feature: MA Experiment 20000451 PARAMETER Experiment Name: At_CS6879_Shoots-Roots_P Parameter: Age (day) Value: 14
  misc_feature: MA Experiment 20000451 PARAMETER Experiment Name: At_CS6879_Shoots-Roots_P Parameter: Organism Value: A. thaliana
  misc_feature: MA Experiment 20000451 PARAMETER Experiment Name: At_CS6879_Shoots-Roots_P Parameter: Plant Line Value: CS6879 vs. WS
  misc_feature: MA Experiment 20000451 PARAMETER Experiment Name: At_CS6879_Shoots-Roots_P Parameter: Tissue Value: Roots
  misc_feature: MA Experiment ID: 20000452 Result: Up-regulated in Transcription
  misc_feature: MA Experiment 20000452 PARAMETER Experiment Name: At_CS6879_Shoots-Roots_P Parameter: Age (day) Value: 14
  misc_feature: MA Experiment 20000452 PARAMETER Experiment Name: At_CS6879_Shoots-Roots_P Parameter: Organism Value: A. thaliana
  misc_feature: MA Experiment 20000452 PARAMETER Experiment Name: At_CS6879_Shoots-Roots_P Parameter: Plant Line Value: CS6879 vs. WS
  misc_feature: MA Experiment 20000452 PARAMETER Experiment Name: At_CS6879_Shoots-Roots_P Parameter: Tissue Value: Shoots
  misc_feature: MA Experiment ID: 20000794 Result: Up-regulated in Transcription
  misc_feature: MA Experiment 20000794 PARAMETER Experiment Name: At_Petals_P Parameter: Age (day) Value: 23-25 days
  misc_feature: MA Experiment 20000794 PARAMETER Experiment Name: At_Petals_P Parameter: Plant Line Value: WS
  misc_feature: MA Experiment 20000794 PARAMETER Experiment Name: At_Petals_P Parameter: Tissue Value: Petals vs. Whole plant
  misc_feature: MA Experiment ID: 20001248 Result: Down-regulated in Transcription
  misc_feature: MA Experiment 20001248 PARAMETER Experiment Name: At_Far-red-induction_P Parameter: Age (day) Value: 7
  misc_feature: MA Experiment 20001248 PARAMETER Experiment Name: At_Far-red-induction_P Parameter: Light Value: Far-red vs. White
  misc_feature: MA Experiment 20001248 PARAMETER Experiment Name: At_Far-red-induction_P Parameter: Organism Value: A. thaliana
  misc_feature: MA Experiment 20001248 PARAMETER Experiment Name: At_Far-red-induction_P Parameter: Plant Line Value: Columbia
  misc_feature: MA Experiment 20001248 PARAMETER Experiment Name: At_Far-red-induction_P Parameter: Timepoint (hr) Value: 4
  misc_feature: MA Experiment 20001248 PARAMETER Experiment Name: At_Far-red-induction_P Parameter: Tissue Value: Whole Plant
  misc_feature: MA Experiment ID: 20001757 Result: Down-regulated in Transcription
  misc_feature: MA Experiment 20001757 PARAMETER Experiment Name: At_50mM_NH4NO3_L-to-H_P Parameter: Timepoint (hr) Value: 6
  misc_feature: MA Experiment 20001757 PARAMETER Experiment Name: At_50mM_NH4NO3_L-to-H_P Parameter: Tissue Value: Leaf
  misc_feature: MA Experiment 20001757 PARAMETER Experiment Name: At_50mM_NH4NO3_L-to-H_P Parameter: Treatment Value: 50mM NH4NO3 vs 100mM Mannitol
aatcaagaaaagctctgtaacattattatcaatcgaaattccaaccgactcaacaatgtcttcatccaacgcctgcgcctctccgtcaccgttccccgccgtcacgaagcttcatgtagactccgtcacgtttgtaccgtccgtcaagtcaccggcctcctccaatccattattcctcggcggcgccggtgtccgaggccttgatatccaaggtaaattcgtgatcttcaccgtcattggagtatacctagagggtaacgccgttccttctctatctgtcaagtggaagggaaaaactacggaggagctaacagaatctatcccgttcttccgtgaaatagtcaccggtgcgtttgagaagtttatcaaggtgacaatgaaactgccgttaacgggacaacaatattcggagaaagtgacggagaattgtgtggctatatggaaacaattagggctttatacggactgtgaagctaaagctgtggagaagttcttggagatcttcaaggaagaaacattccctcccggttcatcgatcctcttcgctctctcccctaccggctctcttacggttgcgttttcgaaagatgatagtatccctgaaaccgggatcgctgtgatcgagaacaaattgttggcggaggcggttctggaatctatcatcgggaagaacggtgtgtcacctggcactaggttaagtgttgcagaaagattatctcagctaatgatgaagaacaaggacgaaaaggaagttagtgatcactctgttgaggaaaaactagccaaagagaactgagaatgatagatttttcttgtgtttttgtcattttctatttcttatgttttctatatctaatttcttatgcggtactcaagtggagaataaagaacatgcatttacattataataaagttt

SEQ ID NO: 26207 - protein, 264 aa, Arabidopsis thaliana
  peptide (1)..(264): Ceres Seq. ID no. 13499614
  misc_feature (32)..(243): Pfam Name: Chalcone-flavanone isomerase Pfam Description: Chalcone-flavanone isomerase
  misc_feature (29)..(260): Homolog of NCBI NO: 5921722 NR Description: Chalcone--flavonone isomerase (Chalcone
  misc_feature (29)..(248): Homolog of NCBI NO: 4126399 NR Description: chalcone isomerase [Citrus sinensis]
  misc_feature (60)..(229): Homolog of NCBI NO: 28804474 NR Description: chalcone flavanone isomerase [Raphanus sativus]
  misc_feature (29)..(261): Homolog of NCBI NO: 1705761 NR Description: CHALCONE--FLAVONONE ISOMERASE (CHALCONE
  misc_feature (19)..(264): Homolog of NCBI NO: 5921725 NR Description: CHALCONE--FLAVONONE ISOMERASE (CHALCONE
  misc_feature (27)..(264): Homolog of NCBI NO: 18203239 NR Description: Chalcone--flavonone isomerase (Chalcone
  misc_feature (19)..(264): Homolog of NCBI NO: 320138 NR Description: chalcone isomerase (EC 5.5.1.6) - Arabidopsis
  misc_feature (19)..(264): Homolog of NCBI NO: 8670918 NR Description: chalcone flavanone isomerase [Arabidopsis
  misc_feature (19)..(264): Homolog of NCBI NO: 15233190 NR Description: chalcone-flavanone isomerase (chalcone isomerase)
  misc_feature (19)..(264): Homolog of NCBI NO: 8670955 NR Description: chalcone flavanone isomerase [Arabidopsis
IKKSSVTLLSIEIPTDSTMSSSNACASPSPFPAVTKLHVDSVTFVPSVKSPASSNPLFLGGAGVRGLDIQGKFVIFTVIGVYLEGNAVPSLSVKWKGKTTEELTESIPFFREIVTGAFEKFIKVTMKLPLTGQQYSEKVTENCVAIWKQLGLYTDCEAKAVEKFLEIFKEETFPPGSSILFALSPTGSLTVAFSKDDSIPETGIAVIENKLLAEAVLESIIGKNGVSPGTRLSVAERLSQLMMKNKDEKEVSDHSVEEKLAKEN

SEQ ID NO: 26208 - protein, 246 aa, Arabidopsis thaliana
  peptide (1)..(246): Ceres Seq. ID no. 13499615
  misc_feature (14)..(225): Pfam Name: Chalcone-flavanone isomerase Pfam Description: Chalcone-flavanone isomerase
  misc_feature (11)..(242): Homolog of NCBI NO: 5921722 NR Description: Chalcone--flavonone isomerase (Chalcone
  misc_feature (11)..(230): Homolog of NCBI NO: 4126399 NR Description: chalcone isomerase [Citrus sinensis]
  misc_feature (42)..(211): Homolog of NCBI NO: 28804474 NR Description: chalcone flavanone isomerase [Raphanus sativus]
  misc_feature (11)..(243): Homolog of NCBI NO: 1705761 NR Description: CHALCONE--FLAVONONE ISOMERASE (CHALCONE
  misc_feature (1)..(246): Homolog of NCBI NO: 5921725 NR Description: CHALCONE--FLAVONONE ISOMERASE (CHALCONE
  misc_feature (9)..(246): Homolog of NCBI NO: 18203239 NR Description: Chalcone--flavonone isomerase (Chalcone
  misc_feature (1)..(246): Homolog of NCBI NO: 320138 NR Description: chalcone isomerase (EC 5.5.1.6) - Arabidopsis
  misc_feature (1)..(246): Homolog of NCBI NO: 8670918 NR Description: chalcone flavanone isomerase [Arabidopsis
  misc_feature (1)..(246): Homolog of NCBI NO: 15233190 NR Description: chalcone-flavanone isomerase (chalcone isomerase)
  misc_feature (1)..(246): Homolog of NCBI NO: 8670955 NR Description: chalcone flavanone isomerase [Arabidopsis
MSSSNACASPSPFPAVTKLHVDSVTFVPSVKSPASSNPLFLGGAGVRGLDIQGKFVIFTVIGVYLEGNAVPSLSVKWKGKTTEELTESIPFFREIVTGAFEKFIKVTMKLPLTGQQYSEKVTENCVAIWKQLGLYTDCEAKAVEKFLEIFKEETFPPGSSILFALSPTGSLTVAFSKDDSIPETGIAVIENKLLAEAVLESIIGKNGVSPGTRLSVAERLSQLMMKNKDEKEVSDHSVEEKLAKEN

SEQ ID NO: 26209 - protein, 139 aa, Arabidopsis thaliana
  peptide (1)..(139): Ceres Seq. ID no. 13499616
  misc_feature (1)..(118): Pfam Name: Chalcone-flavanone isomerase Pfam Description: Chalcone-flavanone isomerase
  misc_feature (1)..(135): Homolog of NCBI NO: 5921722 NR Description: Chalcone--flavonone isomerase (Chalcone
  misc_feature (1)..(123): Homolog of NCBI NO: 4126399 NR Description: chalcone isomerase [Citrus sinensis]
  misc_feature (1)..(104): Homolog of NCBI NO: 28804474 NR Description: chalcone flavanone isomerase [Raphanus sativus]
  misc_feature (1)..(136): Homolog of NCBI NO: 1705761 NR Description: CHALCONE--FLAVONONE ISOMERASE (CHALCONE
  misc_feature (1)..(139): Homolog of NCBI NO: 5921725 NR Description: CHALCONE--FLAVONONE ISOMERASE (CHALCONE
  misc_feature (1)..(139): Homolog of NCBI NO: 18203239 NR Description: Chalcone--flavonone isomerase (Chalcone
  misc_feature (1)..(139): Homolog of NCBI NO: 320138 NR Description: chalcone isomerase (EC 5.5.1.6) - Arabidopsis
  misc_feature (1)..(139): Homolog of NCBI NO: 8670918 NR Description: chalcone flavanone isomerase [Arabidopsis
  misc_feature (1)..(139): Homolog of NCBI NO: 15233190 NR Description: chalcone-flavanone isomerase (chalcone isomerase)
  misc_feature (1)..(139): Homolog of NCBI NO: 8670955 NR Description: chalcone flavanone isomerase [Arabidopsis
MKLPLTGQQYSEKVTENCVAIWKQLGLYTDCEAKAVEKFLEIFKEETFPPGSSILFALSPTGSLTVAFSKDDSIPETGIAVIENKLLAEAVLESIIGKNGVSPGTRLSVAERLSQLMMKNKDEKEVSDHSVEEKLAKEN

SEQ ID NO: 26210 - DNA, 1004 bp, Arabidopsis thaliana
  misc_feature (1)..(1004): Ceres Seq. ID no. 12385807
  misc_feature: MA Experiment ID: 108595 Result: Down-regulated in Transcription
  misc_feature: MA Experiment 108595 PARAMETER Experiment Name: At_Ler-pi_Ovule_cDNA_P Parameter: Plant Line Value: null
  misc_feature: MA Experiment ID: 20000185 Result: Down-regulated in Transcription
  misc_feature: MA Experiment 20000185 PARAMETER Experiment Name: At_Roots__P Parameter: Age (day) Value: 7 vs. 21
  misc_feature: MA Experiment 20000185 PARAMETER Experiment Name: At_Roots__P Parameter: Organism Value: A. thaliana
  misc_feature: MA Experiment 20000185 PARAMETER Experiment Name: At_Roots__P Parameter: Tissue Value: Roots vs. Whole Plant
  misc_feature: MA Experiment ID: 20000439 Result: Down-regulated in Transcription
  misc_feature: MA Experiment 20000439 PARAMETER Experiment Name: At_Roots__P Parameter: Age (day) Value: 14 vs. 21
  misc_feature: MA Experiment 20000439 PARAMETER Experiment Name: At_Roots__P Parameter: Organism Value: A. thaliana
  misc_feature: MA Experiment 20000439 PARAMETER Experiment Name: At_Roots__P Parameter: Tissue Value: Roots vs. Whole Plant
aaaaacaaacaaaaaaatcagtgttcggctctaacacgctcgacgaccatggcggtctcgtttaatacaacgcttcaccagccttctctgagtccgagctgtagcatcaagctttattctgggttaaagcctcaatctgcaagctttttggcaagtgggtatcagaatttgaacaaggagttctatggaagagtttataagagtctgcaatctgggactgggaaagcgagcaggtcacgggtaaagatgatgccaataggaacaccgagagtaccctacagaaaccgagaagaagggacttggcaatgggttgatatatggaatgccctttatcgagagcgtgtaatcttcattggacaaaacattgatgaagagtttagcaaccagatattagcaaccatgttgtaccttgatactcttgatgactcgaggaggatttatatgtacctaaatggtccgggtggtgatcttactccaagtctagccatctatgatacaatgaagagcttgaaaagtccggttgggacacattgcgttgggcttgcttacaaccttgcaggttttcttcttgcggctggagaaaagggtcaccgatttgcgatgccattatcaagaatcgccctccagtcaccagctggtgcagcccgtggtcaggctgatgatatccaaaatgaagcaaaagagctttcaaggataagagactacctcttcaatgaactagccaagaatacaggccagcctgcggaaagggtcttcaaagacttgagccgggtgaaaaggttcaatgcagaggaagcaatcgagtatggacttattgataagattgttagaccaccgcgcatcaaagaagacgctcctcgccaagacgaaagcgcagggctaggctagtctttttgtttgtttgttatgtcaaaagttttaatctttatgttattgtgattgtgattgttacctaaaaaaatcactgattattgttttttcattccaccgattttctgatttct

SEQ ID NO: 26211 - protein, 295 aa, Arabidopsis thaliana
  peptide (1)..(295): Ceres Seq. ID no. 12385808
  misc_feature (95)..(279): Pfam Name: Clp protease Pfam Description: Clp protease
  misc_feature (176)..(295): Homolog of NCBI NO: 32364338 NR Description: ATP-dependent Clp protease proteolytic subunit
  misc_feature (84)..(276): Homolog of NCBI NO: 23126722 NR Description: hypothetical protein [Nostoc punctiforme]
  misc_feature (84)..(276): Homolog of NCBI NO: 17231849 NR Description: ATP-dependent Clp protease proteolytic subunit
  misc_feature (66)..(276): Homolog of NCBI NO: 13812170 NR Description: ATP-dependent Clp protease proteolytic subunit
  misc_feature (84)..(276): Homolog of NCBI NO: 23043112 NR Description: hypothetical protein [Trichodesmium erythraeum
  misc_feature (84)..(278): Homolog of NCBI NO: 18203213 NR Description: ATP-dependent Clp protease proteolytic subunit 3
  misc_feature (84)..(279): Homolog of NCBI NO: 33240837 NR Description: Protease subunit of ATP-dependent Clp protease
  misc_feature (84)..(276): Homolog of NCBI NO: 22298615 NR Description: ATP-dependent Clp protease proteolytic subunit 2
  misc_feature (17)..(295): Homolog of NCBI NO: 16209712 NR Description: At1g12410/F5O11_7 [Arabidopsis thaliana]
  misc_feature (17)..(295): Homolog of NCBI NO: 18391391 NR Description: ATP-dependent Clp protease proteolytic subunit
KNKQKNQCSALTRSTTMAVSFNTTLHQPSLSPSCSIKLYSGLKPQSASFLASGYQNLNKEFYGRVYKSLQSGTGKASRSRVKMMPIGTPRVPYRNREEGTWQWVDIWNALYRERVIFIGQNIDEEFSNQILATMLYLDTLDDSRRIYMYLNGPGGDLTPSLAIYDTMKSLKSPVGTHCVGLAYNLAGFLLAAGEKGHRFAMPLSRIALQSPAGAARGQADDIQNEAKELSRIRDYLFNELAKNTGQPAERVFKDLSRVKRFNAEEAIEYGLIDKIVRPPRIKEDAPRQDESAGLG

SEQ ID NO: 26212 - protein, 279 aa, Arabidopsis thaliana
  peptide (1)..(279): Ceres Seq. ID no. 12385809
  misc_feature (79)..(263): Pfam Name: Clp protease Pfam Description: Clp protease
  misc_feature (68)..(263): Homolog of NCBI NO: 33240837 NR Description: Protease subunit of ATP-dependent Clp protease
  misc_feature (68)..(260): Homolog of NCBI NO: 23043112 NR Description: hypothetical protein [Trichodesmium erythraeum
  misc_feature (68)..(262): Homolog of NCBI NO: 18203213 NR Description: ATP-dependent Clp protease proteolytic subunit 3
  misc_feature (160)..(279): Homolog of NCBI NO: 32364338 NR Description: ATP-dependent Clp protease proteolytic subunit
  misc_feature (68)..(260): Homolog of NCBI NO: 23126722 NR Description: hypothetical protein [Nostoc punctiforme]
  misc_feature (68)..(260): Homolog of NCBI NO: 17231849 NR Description: ATP-dependent Clp protease proteolytic subunit
  misc_feature (50)..(260): Homolog of NCBI NO: 13812170 NR Description: ATP-dependent Clp protease proteolytic subunit
  misc_feature (68)..(260): Homolog of NCBI NO: 22298615 NR Description: ATP-dependent Clp protease proteolytic subunit 2
  misc_feature (1)..(279): Homolog of NCBI NO: 16209712 NR Description: At1g12410/F5O11_7 [Arabidopsis thaliana]
  misc_feature (1)..(279): Homolog of NCBI NO: 18391391 NR Description: ATP-dependent Clp protease proteolytic subunit
MAVSFNTTLHQPSLSPSCSIKLYSGLKPQSASFLASGYQNLNKEFYGRVYKSLQSGTGKASRSRVKMMPIGTPRVPYRNREEGTWQWVDIWNALYRERVIFIGQNIDEEFSNQILATMLYLDTLDDSRRIYMYLNGPGGDLTPSLAIYDTMKSLKSPVGTHCVGLAYNLAGFLLAAGEKGHRFAMPLSRIALQSPAGAARGQADDIQNEAKELSRIRDYLFNELAKNTGQPAERVFKDLSRVKRFNAEEAIEYGLIDKIVRPPRIKEDAPRQDESAGLG

SEQ ID NO: 26213 - protein, 213 aa, Arabidopsis thaliana
  peptide (1)..(213): Ceres Seq. ID no. 12385810
  misc_feature (13)..(197): Pfam Name: Clp protease Pfam Description: Clp protease
  misc_feature (2)..(197): Homolog of NCBI NO: 33240837 NR Description: Protease subunit of ATP-dependent Clp protease
  misc_feature (2)..(194): Homolog of NCBI NO: 23043112 NR Description: hypothetical protein [Trichodesmium erythraeum
  misc_feature (2)..(196): Homolog of NCBI NO: 18203213 NR Description: ATP-dependent Clp protease proteolytic subunit 3
  misc_feature (94)..(213): Homolog of NCBI NO: 32364338 NR Description: ATP-dependent Clp protease proteolytic subunit
  misc_feature (2)..(194): Homolog of NCBI NO: 23126722 NR Description: hypothetical protein [Nostoc punctiforme]
  misc_feature (2)..(194): Homolog of NCBI NO: 17231849 NR Description: ATP-dependent Clp protease proteolytic subunit
  misc_feature (1)..(194): Homolog of NCBI NO: 13812170 NR Description: ATP-dependent Clp protease proteolytic subunit
  misc_feature (2)..(194): Homolog of NCBI NO: 22298615 NR Description: ATP-dependent Clp protease proteolytic subunit 2
  misc_feature (1)..(213): Homolog of NCBI NO: 16209712 NR Description: At1g12410/F5O11_7 [Arabidopsis thaliana]
  misc_feature (1)..(213): Homolog of NCBI NO: 18391391 NR Description: ATP-dependent Clp protease proteolytic subunit
MMPIGTPRVPYRNREEGTWQWVDIWNALYRERVIFIGQNIDEEFSNQILATMLYLDTLDDSRRIYMYLNGPGGDLTPSLAIYDTMKSLKSPVGTHCVGLAYNLAGFLLAAGEKGHRFAMPLSRIALQSPAGAARGQADDIQNEAKELSRIRDYLFNELAKNTGQPAERVFKDLSRVKRFNAEEAIEYGLIDKIVRPPRIKEDAPRQDESAGLG

SEQ ID NO: 26214 - DNA, 1011 bp, Arabidopsis thaliana
  misc_feature (1)..(1011): Ceres Seq. ID no. 12323753
  misc_feature: MA Experiment ID: 108434 Result: Up-regulated in Transcription
  misc_feature: MA Experiment 108434 PARAMETER Experiment Name: At_Root_Tips_cDNA_P Parameter: Tissue Value: Root Tips
  misc_feature: MA Experiment ID: 108435 Result: Down-regulated in Transcription
  misc_feature: MA Experiment 108435 PARAMETER Experiment Name: At_stm_Mutants_cDNA_P Parameter: Plant Line Value: wt Landsburg vs stm
  misc_feature: MA Experiment 108435 PARAMETER Experiment Name: At_stm_Mutants_cDNA_P Parameter: Tissue Value: Shoot Apical Meristem Region
  misc_feature: MA Experiment ID: 108463 Result: Down-regulated in Transcription
  misc_feature: MA Experiment 108463 PARAMETER Experiment Name: At_Germinating_Seeds_cDNA_P Parameter: Age (day) Value: 3 vs. 0
  misc_feature: MA Experiment 108463 PARAMETER Experiment Name: At_Germinating_Seeds_cDNA_P Parameter: Tissue Value: Germinating Seeds
  misc_feature: MA Experiment ID: 108573 Result: Down-regulated in Transcription
  misc_feature: MA Experiment 108573 PARAMETER Experiment Name: At_Drought_cDNA_P Parameter: Timepoint (hr) Value: 6
  misc_feature: MA Experiment 108573 PARAMETER Experiment Name: At_Drought_cDNA_P Parameter: Tissue Value: Aerial
  misc_feature: MA Experiment 108573 PARAMETER Experiment Name: At_Drought_cDNA_P Parameter: Treatment Value: Drought vs. No Drought
  misc_feature: MA Experiment ID: 108595 Result: Down-regulated in Transcription
  misc_feature: MA Experiment 108595 PARAMETER Experiment Name: At_Ler-pi_Ovule_cDNA_P Parameter: Plant Line Value: null
  misc_feature: MA Experiment ID: 20000070 Result: Down-regulated in Transcription
  misc_feature: MA Experiment 20000070 PARAMETER Experiment Name: At_100uM_ABA_Mutants_cDNA_P Parameter: Plant Line Value: CS24
  misc_feature: MA Experiment 20000070 PARAMETER Experiment Name: At_100uM_ABA_Mutants_cDNA_P Parameter: Timepoint (hr) Value: 6
  misc_feature: MA Experiment 20000070 PARAMETER Experiment Name: At_100uM_ABA_Mutants_cDNA_P Parameter: Tissue Value: Aerial
  misc_feature: MA Experiment 20000070 PARAMETER Experiment Name: At_100uM_ABA_Mutants_cDNA_P Parameter: Treatment Value: 100uM ABA vs. No Treatment
  misc_feature: MA Experiment ID: 20000071 Result: Down-regulated in Transcription
  misc_feature: MA Experiment 20000071 PARAMETER Experiment Name: At_100uM_ABA_Mutants_cDNA_P Parameter: Plant Line Value: CS8104
  misc_feature: MA Experiment 20000071 PARAMETER Experiment Name: At_100uM_ABA_Mutants_cDNA_P Parameter: Timepoint (hr) Value: 6
  misc_feature: MA Experiment 20000071 PARAMETER Experiment Name: At_100uM_ABA_Mutants_cDNA_P Parameter: Tissue Value: Aerial
  misc_feature: MA Experiment 20000071 PARAMETER Experiment Name: At_100uM_ABA_Mutants_cDNA_P Parameter: Treatment Value: 100uM ABA vs. No Treatment
  misc_feature: MA Experiment ID: 20000072 Result: Down-regulated in Transcription
  misc_feature: MA Experiment 20000072 PARAMETER Experiment Name: At_100uM_ABA_Mutants_cDNA_P Parameter: Plant Line Value: CS8105
  misc_feature: MA Experiment 20000072 PARAMETER Experiment Name: At_100uM_ABA_Mutants_cDNA_P Parameter: Timepoint (hr) Value: 6
  misc_feature: MA Experiment 20000072 PARAMETER Experiment Name: At_100uM_ABA_Mutants_cDNA_P Parameter: Tissue Value: Aerial
  misc_feature: MA Experiment 20000072 PARAMETER Experiment Name: At_100uM_ABA_Mutants_cDNA_P Parameter: Treatment Value: 100uM ABA vs. No Treatment
  misc_feature: MA Experiment ID: 20000087 Result: Down-regulated in Transcription
  misc_feature: MA Experiment 20000087 PARAMETER Experiment Name: At_100uM_ABA_Mutants_cDNA_P Parameter: Plant Line Value: WS
  misc_feature: MA Experiment 20000087 PARAMETER Experiment Name: At_100uM_ABA_Mutants_cDNA_P Parameter: Timepoint (hr) Value: 6
  misc_feature: MA Experiment 20000087 PARAMETER Experiment Name: At_100uM_ABA_Mutants_cDNA_P Parameter: Tissue Value: Aerial
  misc_feature: MA Experiment 20000087 PARAMETER Experiment Name: At_100uM_ABA_Mutants_cDNA_P Parameter: Treatment Value: 100uM ABA vs. No Treatment
  misc_feature: MA Experiment ID: 20000117 Result: Down-regulated in Transcription
  misc_feature: MA Experiment 20000117 PARAMETER Experiment Name: At_100uM_ABA_Mutants_cDNA_P Parameter: Plant Line Value: Columbia
  misc_feature: MA Experiment 20000117 PARAMETER Experiment Name: At_100uM_ABA_Mutants_cDNA_P Parameter: Timepoint (hr) Value: 6
  misc_feature: MA Experiment 20000117 PARAMETER Experiment Name: At_100uM_ABA_Mutants_cDNA_P Parameter: Tissue Value: Aerial
  misc_feature: MA Experiment 20000117 PARAMETER Experiment Name: At_100uM_ABA_Mutants_cDNA_P Parameter: Treatment Value: 100uM ABA vs. No Treatment
  misc_feature: MA Experiment ID: 20000180 Result: Up-regulated in Transcription
  misc_feature: MA Experiment 20000180 PARAMETER Experiment Name: At_Germinating_Seeds_P Parameter: Age (hr) Value: 24 vs. 0
  misc_feature: MA Experiment 20000180 PARAMETER Experiment Name: At_Germinating_Seeds_P Parameter: Tissue Value: Germinating Seeds
  misc_feature: MA Experiment ID: 20000185 Result: Down-regulated in Transcription
  misc_feature: MA Experiment 20000185 PARAMETER Experiment Name: At_Roots__P Parameter: Age (day) Value: 7 vs. 21
  misc_feature: MA Experiment 20000185 PARAMETER Experiment Name: At_Roots__P Parameter: Organism Value: A. thaliana
  misc_feature: MA Experiment 20000185 PARAMETER Experiment Name: At_Roots__P Parameter: Tissue Value: Roots vs. Whole Plant
  misc_feature: MA Experiment ID: 20000436 Result: Down-regulated in Transcription
  misc_feature: MA Experiment 20000436 PARAMETER Experiment Name: At_Drought_P Parameter: Age (day) Value: 7
  misc_feature: MA Experiment 20000436 PARAMETER Experiment Name: At_Drought_P Parameter: Organism Value: A. thaliana
  misc_feature: MA Experiment 20000436 PARAMETER Experiment Name: At_Drought_P Parameter: Plant Line Value: WS
  misc_feature: MA Experiment 20000436 PARAMETER Experiment Name: At_Drought_P Parameter: Timepoint (hr) Value: 12
  misc_feature: MA Experiment 20000436 PARAMETER Experiment Name: At_Drought_P Parameter: Tissue Value: Whole Plant
  misc_feature: MA Experiment 20000436 PARAMETER Experiment Name: At_Drought_P Parameter: Treatment Value: Drought vs. No Drought
  misc_feature: MA Experiment ID: 20000438 Result: Up-regulated in Transcription
  misc_feature: MA Experiment 20000438 PARAMETER Experiment Name: At_Shoots__P Parameter: Age (day) Value: 14
  misc_feature: MA Experiment 20000438 PARAMETER Experiment Name: At_Shoots__P Parameter: Tissue Value: Shoots vs. Whole Plant
  misc_feature: MA Experiment ID: 20000439 Result: Down-regulated in Transcription
  misc_feature: MA Experiment 20000439 PARAMETER Experiment Name: At_Roots__P Parameter: Age (day) Value: 14 vs. 21
  misc_feature: MA Experiment 20000439 PARAMETER Experiment Name: At_Roots__P Parameter: Organism Value: A. thaliana
  misc_feature: MA Experiment 20000439 PARAMETER Experiment Name: At_Roots__P Parameter: Tissue Value: Roots vs. Whole Plant
  misc_feature: MA Experiment ID: 20000794 Result: Down-regulated in Transcription
  misc_feature: MA Experiment 20000794 PARAMETER Experiment Name: At_Petals_P Parameter: Age (day) Value: 23-25 days
  misc_feature: MA Experiment 20000794 PARAMETER Experiment Name: At_Petals_P Parameter: Plant Line Value: WS
  misc_feature: MA Experiment 20000794 PARAMETER Experiment Name: At_Petals_P Parameter: Tissue Value: Petals vs. Whole plant
  misc_feature: MA Experiment ID: 20001757 Result: Up-regulated in Transcription
  misc_feature: MA Experiment 20001757 PARAMETER Experiment Name: At_50mM_NH4NO3_L-to-H_P Parameter: Timepoint (hr) Value: 6
  misc_feature: MA Experiment 20001757 PARAMETER Experiment Name: At_50mM_NH4NO3_L-to-H_P Parameter: Tissue Value: Leaf
  misc_feature: MA Experiment 20001757 PARAMETER Experiment Name: At_50mM_NH4NO3_L-to-H_P Parameter: Treatment Value: 50mM NH4NO3 vs 100mM Mannitol
  misc_feature: MA Experiment ID: 20001905 Result: Down-regulated in Transcription
  misc_feature: MA Experiment 20001905 PARAMETER Experiment Name: At_Drought_Reproduction_P Parameter: Age (day) Value: 40
  misc_feature: MA Experiment 20001905 PARAMETER Experiment Name: At_Drought_Reproduction_P Parameter: Organism Value: A. thaliana
  misc_feature: MA Experiment 20001905 PARAMETER Experiment Name: At_Drought_Reproduction_P Parameter: Plant Line Value: WS
  misc_feature: MA Experiment 20001905 PARAMETER Experiment Name: At_Drought_Reproduction_P Parameter: Timepoint (day) Value: 10
  misc_feature: MA Experiment 20001905 PARAMETER Experiment Name: At_Drought_Reproduction_P Parameter: Tissue Value: Rosettes
  misc_feature: MA Experiment 20001905 PARAMETER Experiment Name: At_Drought_Reproduction_P Parameter: Treatment Value: Drought vs. No Drought
gataaggctcttttccactgtcttccctccattttctccgagtaactgagagtttgctgcagctatggcgatgagctttcatcgtcttcctcaggcattgcatatgatacccagaaaccctacgcaatcatcgaagaatttagggttttcttcgtttctatcgtgtgcaccatcgatggattctcgtatatcagtttctaggctttctctgaatcatcccggctcgaaatttgggttctcactcgatactagggtgagaaatgagtttatcgttagagcagaagaaggtaacacagaagctgaatctgaagaatttgttgctgaaatcgctgatacggaaggaaatgtagaggaagtggtcgaagctaaacctacaagaaaacctaggatcaagctcggagatgtcatggggatactgaaccagaaagcaattgaggtagcagagaaagtgagacctgttccagaaatcaggacaggagatattgtagaaatcaaattggaagttcctgagaacaaacgtaggctatctatctacaaaggcatagtgatgtcgagacaaaatgcaggcatacacactaccattcgtattcggagaattattgcgggtatcggtgttgaaattgtgtttcccatatactctcccaacatcaaagagataaaagtggtgagtcacaggaaagtaagaagagcaaggctttactatctgagggacaagcttcctcgtctgtccactttcaagtgaacaccatccaccgtgctgtgtttgacctccagaggtagtaatcttccgcattgtgctctttttttgtaagaattgtttctttctttcttttttttaagcctgtaagtcattccctgcacattttctgagaaagtaaattaagattagttgaacttccggttgatggatgtagacctgttccttgtttgataatgaatgatatatggcttaggatgacctaaagtccatactttaatagaaactatgtatgaatgagtctgtgttctgtg

SEQ ID NO: 26215 - protein, 225 aa, Arabidopsis thaliana
  peptide (1)..(225): Ceres Seq. ID no. 12323754
  misc_feature (120)..(225): Pfam Name: Ribosomal protein L19 Pfam Description: Ribosomal protein L19
  misc_feature (114)..(221): Homolog of NCBI NO: 18395422 NR Description: expressed protein
  misc_feature (114)..(221): Homolog of NCBI NO: 15239778 NR Description: putative protein
  misc_feature (23)..(221): Homolog of NCBI NO: 15234249 NR Description: putative protein
  misc_feature (1)..(225): Homolog of NCBI NO: 14140122 NR Description: putative plastid ribosomal protein L19 precursor
  misc_feature (8)..(225): Homolog of NCBI NO: 7582403 NR Description: plastid ribosomal protein L19 precursor [Spinacia
  misc_feature (38)..(152): Homolog of NCBI NO: 7485084 NR Description: hypothetical protein - Arabidopsis thaliana
  misc_feature (5)..(225): Homolog of NCBI NO: 8809601 NR Description: contains similarity to plastid ribosomal protein
  misc_feature (1)..(225): Homolog of NCBI NO: 21592584 NR Description: contains similarity to plastid ribosomal protein
  misc_feature (1)..(225): Homolog of NCBI NO: 18422764 NR Description: putative protein
  misc_feature (1)..(225): Homolog of NCBI NO: 18414915 NR Description: putative protein
MAMSFHRLPQALHMIPRNPTQSSKNLGFSSFLSCAPSMDSRISVSRLSLNHPGSKFGFSLDTRVRNEFIVRAEEGNTEAESEEFVAEIADTEGNVEEVVEAKPTRKPRIKLGDVMGILNQKAIEVAEKVRPVPEIRTGDIVEIKLEVPENKRRLSIYKGIVMSRQNAGIHTTIRIRRIIAGIGVEIVFPIYSPNIKEIKVVSHRKVRRARLYYLRDKLPRLSTFK

SEQ ID NO: 26216 - protein, 223 aa, Arabidopsis thaliana
  peptide (1)..(223): Ceres Seq. ID no. 12323755
  misc_feature (118)..(223): Pfam Name: Ribosomal protein L19 Pfam Description: Ribosomal protein L19
  misc_feature (112)..(219): Homolog of NCBI NO: 18395422 NR Description: expressed protein
  misc_feature (112)..(219): Homolog of NCBI NO: 15239778 NR Description: putative protein
  misc_feature (21)..(219): Homolog of NCBI NO: 15234249 NR Description: putative protein
  misc_feature (1)..(223): Homolog of NCBI NO: 14140122 NR Description: putative plastid ribosomal protein L19 precursor
  misc_feature (6)..(223): Homolog of NCBI NO: 7582403 NR Description: plastid ribosomal protein L19 precursor [Spinacia
  misc_feature (36)..(150): Homolog of NCBI NO: 7485084 NR Description: hypothetical protein - Arabidopsis thaliana
  misc_feature (3)..(223): Homolog of NCBI NO: 8809601 NR Description: contains similarity to plastid ribosomal protein
  misc_feature (1)..(223): Homolog of NCBI NO: 21592584 NR Description: contains similarity to plastid ribosomal protein
  misc_feature (1)..(223): Homolog of NCBI NO: 18422764 NR Description: putative protein
  misc_feature (1)..(223): Homolog of NCBI NO: 18414915 NR Description: putative protein
MSFHRLPQALHMIPRNPTQSSKNLGFSSFLSCAPSMDSRISVSRLSLNHPGSKFGFSLDTRVRNEFIVRAEEGNTEAESEEFVAEIADTEGNVEEVVEAKPTRKPRIKLGDVMGILNQKAIEVAEKVRPVPEIRTGDIVEIKLEVPENKRRLSIYKGIVMSRQNAGIHTTIRIRRIIAGIGVEIVFPIYSPNIKEIKVVSHRKVRRARLYYLRDKLPRLSTFK

SEQ ID NO: 26217 - protein, 212 aa, Arabidopsis thaliana
  peptide (1)..(212): Ceres Seq. ID no. 12323756
  misc_feature (107)..(212): Pfam Name: Ribosomal protein L19 Pfam Description: Ribosomal protein L19
  misc_feature (101)..(208): Homolog of NCBI NO: 18395422 NR Description: expressed protein
  misc_feature (101)..(208): Homolog of NCBI NO: 15239778 NR Description: putative protein
  misc_feature (10)..(208): Homolog of NCBI NO: 15234249 NR Description: putative protein
  misc_feature (1)..(212): Homolog of NCBI NO: 14140122 NR Description: putative plastid ribosomal protein L19 precursor
  misc_feature (1)..(212): Homolog of NCBI NO: 7582403 NR Description: plastid ribosomal protein L19 precursor [Spinacia
  misc_feature (25)..(139): Homolog of NCBI NO: 7485084 NR Description: hypothetical protein - Arabidopsis thaliana
  misc_feature (1)..(212): Homolog of NCBI NO: 8809601 NR Description: contains similarity to plastid ribosomal protein
  misc_feature (1)..(212): Homolog of NCBI NO: 21592584 NR Description: contains similarity to plastid ribosomal protein
  misc_feature (1)..(212): Homolog of NCBI NO: 18422764 NR Description: putative protein
  misc_feature (1)..(212): Homolog of NCBI NO: 18414915 NR Description: putative protein
MIPRNPTQSSKNLGFSSFLSCAPSMDSRISVSRLSLNHPGSKFGFSLDTRVRNEFIVRAEEGNTEAESEEFVAEIADTEGNVEEVVEAKPTRKPRIKLGDVMGILNQKAIEVAEKVRPVPEIRTGDIVEIKLEVPENKRRLSIYKGIVMSRQNAGIHTTIRIRRIIAGIGVEIVFPIYSPNIKEIKVVSHRKVRRARLYYLRDKLPRLSTFK

SEQ ID NO: 26218 - DNA, 1029 bp, Arabidopsis thaliana
  misc_feature (1)..(1029): Ceres Seq. ID no. 12370220
  misc_feature: MA Experiment ID: 108434 Result: Up-regulated in Transcription
  misc_feature: MA Experiment 108434 PARAMETER Experiment Name: At_Root_Tips_cDNA_P Parameter: Tissue Value: Root Tips
  misc_feature: MA Experiment ID: 108435 Result: Up-regulated in Transcription
  misc_feature: MA Experiment 108435 PARAMETER Experiment Name: At_stm_Mutants_cDNA_P Parameter: Plant Line Value: wt Landsburg vs stm
  misc_feature: MA Experiment 108435 PARAMETER Experiment Name: At_stm_Mutants_cDNA_P Parameter: Tissue Value: Shoot Apical Meristem Region
  misc_feature: MA Experiment ID: 108461 Result: Down-regulated in Transcription
  misc_feature: MA Experiment 108461 PARAMETER Experiment Name: At_Germinating_Seeds_cDNA_P Parameter: Age (day) Value: 1 vs. 0
  misc_feature: MA Experiment 108461 PARAMETER Experiment Name: At_Germinating_Seeds_cDNA_P Parameter: Tissue Value: Germinating Seeds
  misc_feature: MA Experiment ID: 108462 Result: Down-regulated in Transcription
  misc_feature: MA Experiment 108462 PARAMETER Experiment Name: At_Germinating_Seeds_cDNA_P Parameter: Age (day) Value: 2 vs. 0
  misc_feature: MA Experiment 108462 PARAMETER Experiment Name: At_Germinating_Seeds_cDNA_P Parameter: Tissue Value: Germinating Seeds
  misc_feature: MA Experiment ID: 108463 Result: Down-regulated in Transcription
  misc_feature: MA Experiment 108463 PARAMETER Experiment Name: At_Germinating_Seeds_cDNA_P Parameter: Age (day) Value: 3 vs. 0
  misc_feature: MA Experiment 108463 PARAMETER Experiment Name: At_Germinating_Seeds_cDNA_P Parameter: Tissue Value: Germinating Seeds
  misc_feature: MA Experiment ID: 108569 Result: Up-regulated in Transcription
  misc_feature: MA Experiment 108569 PARAMETER Experiment Name: At_0.001%_MeJA__cDNA_P Parameter: Timepoint (hr) Value: 6
  misc_feature: MA Experiment 108569 PARAMETER Experiment Name: At_0.001%_MeJA__cDNA_P Parameter: Tissue Value: Aerial
  misc_feature: MA Experiment 108569 PARAMETER Experiment Name: At_0.001%_MeJA__cDNA_P Parameter: Treatment Value: 0.001% MeJA vs. No Treatment
  misc_feature: MA Experiment ID: 108579 Result: Up-regulated in Transcription
  misc_feature: MA Experiment 108579 PARAMETER Experiment Name: At_4deg_Cold_cDNA_P Parameter: Temperature (deg C) Value: 4 vs. 22
  misc_feature: MA Experiment 108579 PARAMETER Experiment Name: At_4deg_Cold_cDNA_P Parameter: Timepoint (hr) Value: 6
  misc_feature: MA Experiment 108579 PARAMETER Experiment Name: At_4deg_Cold_cDNA_P Parameter: Tissue Value: Aerial
  misc_feature: MA Experiment ID: 108595 Result: Up-regulated in Transcription
  misc_feature: MA Experiment 108595 PARAMETER Experiment Name: At_Ler-pi_Ovule_cDNA_P Parameter: Plant Line Value: null
aagttcacaagtttcgttaaatcaagcaccaagttctcagcgaaatcaaggaatcgaaaacccagaagagaactcagagtagaaaattttctccagctttttcaaaatgtctcggaggtatgatagtcgcaccacgatcttctcaccggaaggtcgtctctaccaagttgaatatgctatggaagctattggcaatgctggttctgcgattggaatcttagcaaaagatggagttgtgttgattggtgagaagaaagtcacttctaaacttcttcaaacctcttcatccatggagaaaatgtacaagatcgatggccatgtggcttgtgcagtggctggtataatgtctgatgccaacattctgattaacactgctcgagttcaagctcagcgttacacctttatgtaccaagagccaatgcctgttgagcagctggttcagtctctatgtgacaccaagcaaggatacacccagtttggtggtctccgcccgtttggagtttcctttctatttgcaggctgggacaggaaccacgggtttcagctgtatatgagtgacccaagtggaaactatggtggatggaaagctgcagctgttggagcaaataatcaagcggctcagtctattcttaagcaagactataaggatgatgcaacgagggaagaagtggttcagctcgctatcaaggttttgagcaagacgatggacagcacgagcttgacagctgaaaaactcgagcttgctgagttgtatctgactccttcaaaatgtgttaagtaccatgttcactcgcctgactcgctcactaagctcttggttaagcatggtgtgactcaaccagccgcagaaacttcctaagcttgaaactggtgacagttttatctgacccgcctggttactgtagatgtccatttgatttatttccctttggatttaaagatatcgtatcagaaacaatttaccactctgattatgtcatgtgattcatttgggttgactatcttttatcttgagattgatcttcttcc

SEQ ID NO: 26219 - protein, 250 aa, Arabidopsis thaliana
  peptide (1)..(250): Ceres Seq. ID no. 12370221
  misc_feature (28)..(215): Pfam Name: Proteasome A-type and B-type Pfam Description: Proteasome A-type and B-type
  misc_feature (1)..(244): Homolog of NCBI NO: 464458 NR Description: Proteasome subunit alpha type 4 (Proteasome
  misc_feature (1)..(244): Homolog of NCBI NO: 40744887 NR Description: conserved hypothetical protein [Aspergillus
  misc_feature (6)..(172): Homolog of NCBI NO: 14594915 NR Description: putative alpha3 proteasome subunit [Nicotiana
  misc_feature (1)..(248): Homolog of NCBI NO: 34898458 NR Description: ESTs AU058081(E3082),AU075427(E30384) correspond a region of the predicted gene.~Similar to Spinacia oleracea
  misc_feature (1)..(248): Homolog of NCBI NO: 34898416 NR Description: ESTs AU058081(E30812),AU058365(E50679), correspond to a region of the predicted gene.~Similar to Spinacia
  misc_feature (9)..(250): Homolog of NCBI NO: 6984140 NR Description: proteasome 27 kDa subunit [Euphorbia esula]
  misc_feature (1)..(250): Homolog of NCBI NO: 12229904 NR Description: Proteasome subunit alpha type 4 (20S proteasome
  misc_feature (1)..(250): Homolog of NCBI NO: 1709761 NR Description: Proteasome subunit alpha type 4 (20S proteasome subunit C) (20S proteasome subunit alpha-3) (Proteasome 27 kDa
  misc_feature (1)..(250): Homolog of NCBI NO: 2511584 NR Description: multicatalytic endopeptidase [Arabidopsis
  misc_feature (1)..(250): Homolog of NCBI NO: 15233268 NR Description: 20S proteasome alpha subunit C (PAC1)
MSRRYDSRTTIFSPEGRLYQVEYAMEAIGNAGSAIGILAKDGVVLIGEKKVTSKLLQTSSSMEKMYKIDGHVACAVAGIMSDANILINTARVQAQRYTFMYQEPMPVEQLVQSLCDTKQGYTQFGGLRPFGVSFLFAGWDRNHGFQLYMSDPSGNYGGWKAAAVGANNQAAQSILKQDYKDDATREEVVQLAIKVLSKTMDSTSLTAEKLELAELYLTPSKCVKYHVHSPDSLTKLLVKHGVTQPAAETS

SEQ ID NO: 26220 - protein, 226 aa, Arabidopsis thaliana
  peptide (1)..(226): Ceres Seq. ID no. 12370222
  misc_feature (4)..(191): Pfam Name: Proteasome A-type and B-type Pfam Description: Proteasome A-type and B-type
  misc_feature (1)..(220): Homolog of NCBI NO: 464458 NR Description: Proteasome subunit alpha type 4 (Proteasome
  misc_feature (1)..(220): Homolog of NCBI NO: 40744887 NR Description: conserved hypothetical protein [Aspergillus
  misc_feature (1)..(148): Homolog of NCBI NO: 14594915 NR Description: putative alpha3 proteasome subunit [Nicotiana
  misc_feature (1)..(224): Homolog of NCBI NO: 34898458 NR Description: ESTs AU058081(E3082),AU075427(E30384) correspond a region of the predicted gene.~Similar to Spinacia oleracea
  misc_feature (1)..(224): Homolog of NCBI NO: 34898416 NR Description: ESTs AU058081(E30812),AU058365(E50679), correspond to a region of the predicted gene.~Similar to Spinacia
  misc_feature (1)..(226): Homolog of NCBI NO: 6984140 NR Description: proteasome 27 kDa subunit [Euphorbia esula]
  misc_feature (1)..(226): Homolog of NCBI NO: 12229904 NR Description: Proteasome subunit alpha type 4 (20S proteasome
  misc_feature (1)..(226): Homolog of NCBI NO: 1709761 NR Description: Proteasome subunit alpha type 4 (20S proteasome subunit C) (20S proteasome subunit alpha-3) (Proteasome 27 kDa
  misc_feature (1)..(226): Homolog of NCBI NO: 2511584 NR Description: multicatalytic endopeptidase [Arabidopsis
  misc_feature (1)..(226): Homolog of NCBI NO: 15233268 NR Description: 20S proteasome alpha subunit C (PAC1)
MEAIGNAGSAIGILAKDGVVLIGEKKVTSKLLQTSSSMEKMYKIDGHVACAVAGIMSDANILINTARVQAQRYTFMYQEPMPVEQLVQSLCDTKQGYTQFGGLRPFGVSFLFAGWDRNHGFQLYMSDPSGNYGGWKAAAVGANNQAAQSILKQDYKDDATREEVVQLAIKVLSKTMDSTSLTAEKLELAELYLTPSKCVKYHVHSPDSLTKLLVKHGVTQPAAETS

SEQ ID NO: 26221 - protein, 189 aa, Arabidopsis thaliana
  peptide (1)..(189): Ceres Seq. ID no. 12370223
  misc_feature (1)..(154): Pfam Name: Proteasome A-type and B-type Pfam Description: Proteasome A-type and B-type
  misc_feature (1)..(189): Homolog of NCBI NO: 2511584 NR Description: multicatalytic endopeptidase [Arabidopsis
  misc_feature (1)..(183): Homolog of NCBI NO: 464458 NR Description: Proteasome subunit alpha type 4 (Proteasome
  misc_feature (1)..(111): Homolog of NCBI NO: 14594915 NR Description: putative alpha3 proteasome subunit [Nicotiana
  misc_feature (1)..(187): Homolog of NCBI NO: 34898416 NR Description: ESTs AU058081(E30812),AU058365(E50679), correspond to a region of the predicted gene.~Similar to Spinacia
  misc_feature (1)..(189): Homolog of NCBI NO: 12229904 NR Description: Proteasome subunit alpha type 4 (20S proteasome
  misc_feature (1)..(189): Homolog of NCBI NO: 1709761 NR Description: Proteasome subunit alpha type 4 (20S proteasome subunit C) (20S proteasome subunit alpha-3) (Proteasome 27 kDa
  misc_feature (1)..(189): Homolog of NCBI NO: 6984140 NR Description: proteasome 27 kDa subunit [Euphorbia esula]
  misc_feature (1)..(187): Homolog of NCBI NO: 34898458 NR Description: ESTs AU058081(E3082),AU075427(E30384) correspond a region of the predicted gene.~Similar to Spinacia oleracea
  misc_feature (1)..(183): Homolog of NCBI NO: 40744887 NR Description: conserved hypothetical protein [Aspergillus
  misc_feature (1)..(189): Homolog of NCBI NO: 15233268 NR Description: 20S proteasome alpha subunit C (PAC1)
MEKMYKIDGHVACAVAGIMSDANILINTARVQAQRYTFMYQEPMPVEQLVQSLCDTKQGYTQFGGLRPFGVSFLFAGWDRNHGFQLYMSDPSGNYGGWKAAAVGANNQAAQSILKQDYKDDATREEVVQLAIKVLSKTMDSTSLTAEKLELAELYLTPSKCVKYHVHSPDSLTKLLVKHGVTQPAAETS

SEQ ID NO: 26222 - DNA, 557 bp, Arabidopsis thaliana
  misc_feature (1)..(557): Ceres Seq. ID no. 12331723
  misc_feature: MA Experiment ID: 108434 Result: Down-regulated in Transcription
  misc_feature: MA Experiment 108434 PARAMETER Experiment Name: At_Root_Tips_cDNA_P Parameter: Tissue Value: Root Tips
  misc_feature: MA Experiment ID: 108435 Result: Down-regulated in Transcription
  misc_feature: MA Experiment 108435 PARAMETER Experiment Name: At_stm_Mutants_cDNA_P Parameter: Plant Line Value: wt Landsburg vs stm
  misc_feature: MA Experiment 108435 PARAMETER Experiment Name: At_stm_Mutants_cDNA_P Parameter: Tissue Value: Shoot Apical Meristem Region
  misc_feature: MA Experiment ID: 108488 Result: Down-regulated in Transcription
  misc_feature: MA Experiment ID: 108579 Result: Down-regulated in Transcription
  misc_feature: MA Experiment 108579 PARAMETER Experiment Name: At_4deg_Cold_cDNA_P Parameter: Temperature (deg C) Value: 4 vs. 22
  misc_feature: MA Experiment 108579 PARAMETER Experiment Name: At_4deg_Cold_cDNA_P Parameter: Timepoint (hr) Value: 6
  misc_feature: MA Experiment 108579 PARAMETER Experiment Name: At_4deg_Cold_cDNA_P Parameter: Tissue Value: Aerial
  misc_feature: MA Experiment ID: 20000069 Result: Up-regulated in Transcription
  misc_feature: MA Experiment 20000069 PARAMETER Experiment Name: At_100uM_ABA_Mutants_cDNA_P Parameter: Plant Line Value: CS23
  misc_feature: MA Experiment 20000069 PARAMETER Experiment Name: At_100uM_ABA_Mutants_cDNA_P Parameter: Timepoint (hr) Value: 6
  misc_feature: MA Experiment 20000069 PARAMETER Experiment Name: At_100uM_ABA_Mutants_cDNA_P Parameter: Tissue Value: Aerial
  misc_feature: MA Experiment 20000069 PARAMETER Experiment Name: At_100uM_ABA_Mutants_cDNA_P Parameter: Treatment Value: 100uM ABA vs. No Treatment
  misc_feature: MA Experiment ID: 20000113 Result: Up-regulated in Transcription
  misc_feature: MA Experiment 20000113 PARAMETER Experiment Name: At_42deg_Heat_cDNA_P Parameter: Temperature (deg C) Value: 42 vs. 22
  misc_feature: MA Experiment 20000113 PARAMETER Experiment Name: At_42deg_Heat_cDNA_P Parameter: Timepoint (hr) Value: 8
  misc_feature: MA Experiment 20000113 PARAMETER Experiment Name: At_42deg_Heat_cDNA_P Parameter: Tissue Value: Aerial
  misc_feature: MA Experiment ID: 20000117 Result: Up-regulated in Transcription
  misc_feature: MA Experiment 20000117 PARAMETER Experiment Name: At_100uM_ABA_Mutants_cDNA_P Parameter: Plant Line Value: Columbia
  misc_feature: MA Experiment 20000117 PARAMETER Experiment Name: At_100uM_ABA_Mutants_cDNA_P Parameter: Timepoint (hr) Value: 6
  misc_feature: MA Experiment 20000117 PARAMETER Experiment Name: At_100uM_ABA_Mutants_cDNA_P Parameter: Tissue Value: Aerial
  misc_feature: MA Experiment 20000117 PARAMETER Experiment Name: At_100uM_ABA_Mutants_cDNA_P Parameter: Treatment Value: 100uM ABA vs. No Treatment
  misc_feature: MA Experiment ID: 20000184 Result: Down-regulated in Transcription
  misc_feature: MA Experiment 20000184 PARAMETER Experiment Name: At_Shoots__P Parameter: Age (day) Value: 7
  misc_feature: MA Experiment 20000184 PARAMETER Experiment Name: At_Shoots__P Parameter: Tissue Value: Shoots vs. Whole Plant
  misc_feature: MA Experiment ID: 20000224 Result: Down-regulated in Transcription
  misc_feature: MA Experiment ID: 20000234 Result: Down-regulated in Transcription
  misc_feature: MA Experiment 20000234 PARAMETER Experiment Name: At_Siliques_P Parameter: Age (day) Value: 21
  misc_feature: MA Experiment 20000234 PARAMETER Experiment Name: At_Siliques_P Parameter: Organism Value: A. thaliana
  misc_feature: MA Experiment 20000234 PARAMETER Experiment Name: At_Siliques_P Parameter: Plant Line Value: WS
  misc_feature: MA Experiment 20000234 PARAMETER Experiment Name: At_Siliques_P Parameter: Tissue Value: Less Than 5mm Siliques vs. Whole Plant
  misc_feature: MA Experiment ID: 20000235 Result: Down-regulated in Transcription
  misc_feature: MA Experiment 20000235 PARAMETER Experiment Name: At_Siliques_P Parameter: Age (day) Value: 21
  misc_feature: MA Experiment 20000235 PARAMETER Experiment Name: At_Siliques_P Parameter: Organism Value: A. thaliana
  misc_feature: MA Experiment 20000235 PARAMETER Experiment Name: At_Siliques_P Parameter: Plant Line Value: WS
  misc_feature: MA Experiment 20000235 PARAMETER Experiment Name: At_Siliques_P Parameter: Tissue Value: 5-10mm Siliques vs. Whole Plant
  misc_feature: MA Experiment ID: 20000286 Result: Down-regulated in Transcription
  misc_feature: MA Experiment 20000286 PARAMETER Experiment Name: At_Open_Flower_P Parameter: Age (day) Value: 21
  misc_feature: MA Experiment 20000286 PARAMETER Experiment Name: At_Open_Flower_P Parameter: Plant Line Value: WS
  misc_feature: MA Experiment 20000286 PARAMETER Experiment Name: At_Open_Flower_P Parameter: Tissue Value: Half Open vs. Whole Plant
  misc_feature: MA Experiment ID: 20000437 Result: Up-regulated in Transcription
  misc_feature: MA Experiment 20000437 PARAMETER Experiment Name: At_Drought_P Parameter: Age (day) Value: 8
  misc_feature: MA Experiment 20000437 PARAMETER Experiment Name: At_Drought_P Parameter: Organism Value: A. thaliana
  misc_feature: MA Experiment 20000437 PARAMETER Experiment Name: At_Drought_P Parameter: Plant Line Value: WS
  misc_feature: MA Experiment 20000437 PARAMETER Experiment Name: At_Drought_P Parameter: Timepoint (hr) Value: 24
  misc_feature: MA Experiment 20000437 PARAMETER Experiment Name: At_Drought_P Parameter: Tissue Value: Whole Plant
  misc_feature: MA Experiment 20000437 PARAMETER Experiment Name: At_Drought_P Parameter: Treatment Value: Drought vs. No Drought
  misc_feature: MA Experiment ID: 20001450 Result: Up-regulated in Transcription
  misc_feature: MA Experiment 20001450 PARAMETER Experiment Name: At_Far-red-induction_P Parameter: Age (day) Value: 7
  misc_feature: MA Experiment 20001450 PARAMETER Experiment Name: At_Far-red-induction_P Parameter: Light Value: Far-red vs. White
  misc_feature: MA Experiment 20001450 PARAMETER Experiment Name: At_Far-red-induction_P Parameter: Organism Value: A. thaliana
  misc_feature: MA Experiment 20001450 PARAMETER Experiment Name: At_Far-red-induction_P Parameter: Plant Line Value: Columbia
  misc_feature: MA Experiment 20001450 PARAMETER Experiment Name: At_Far-red-induction_P Parameter: Timepoint (hr) Value: 8
  misc_feature: MA Experiment 20001450 PARAMETER Experiment Name: At_Far-red-induction_P Parameter: Tissue Value: Whole Plant
  misc_feature: MA Experiment ID: 20001557 Result: Down-regulated in Transcription
  misc_feature: MA Experiment 20001557 PARAMETER Experiment Name: At_Drought_Soil_Dry_P Parameter: Age (day) Value: 27
  misc_feature: MA Experiment 20001557 PARAMETER Experiment Name: At_Drought_Soil_Dry_P Parameter: Organism Value: A. thaliana
  misc_feature: MA Experiment 20001557 PARAMETER Experiment Name: At_Drought_Soil_Dry_P Parameter: Plant Line Value: WS
  misc_feature: MA Experiment 20001557 PARAMETER Experiment Name: At_Drought_Soil_Dry_P Parameter: Post Timepoint (hr) Value: 3
  misc_feature: MA Experiment 20001557 PARAMETER Experiment Name: At_Drought_Soil_Dry_P Parameter: Post-Treatment Value: Re-Water vs. No Drought
  misc_feature: MA Experiment 20001557 PARAMETER Experiment Name: At_Drought_Soil_Dry_P Parameter: Timepoint (day) Value: 13
  misc_feature: MA Experiment 20001557 PARAMETER Experiment Name: At_Drought_Soil_Dry_P Parameter: Treatment Value: Drought vs. No Drought
  misc_feature: MA Experiment ID: 20001558 Result: Down-regulated in Transcription
  misc_feature: MA Experiment 20001558 PARAMETER Experiment Name: At_Drought_Soil_Dry_P Parameter: Age (day) Value: 27
  misc_feature: MA Experiment 20001558 PARAMETER Experiment Name: At_Drought_Soil_Dry_P Parameter: Organism Value: A. thaliana
  misc_feature: MA Experiment 20001558 PARAMETER Experiment Name: At_Drought_Soil_Dry_P Parameter: Plant Line Value: WS
  misc_feature: MA Experiment 20001558 PARAMETER Experiment Name: At_Drought_Soil_Dry_P Parameter: Post Timepoint (hr) Value: 6
  misc_feature: MA Experiment 20001558 PARAMETER Experiment Name: At_Drought_Soil_Dry_P Parameter: Post-Treatment Value: Re-Water vs. No Drought
  misc_feature: MA Experiment 20001558 PARAMETER Experiment Name: At_Drought_Soil_Dry_P Parameter: Timepoint (day) Value: 13
  misc_feature: MA Experiment 20001558 PARAMETER Experiment Name: At_Drought_Soil_Dry_P Parameter: Treatment Value: Drought vs. No Drought
attttctcaattattccttttgacttcgccgcttgcttttgagagacggagacaaaaacacacacgacgaagaaatctccgggcggtcgaagaagatgaaatcgttcaaggaacaatacacgttggatgaaaggctcgcggagtcgcgggagataatcgctaagtaccctactcggattccagtaattgctgagaagtattgcaaaacggatctgcctgccatcgagaaaaagaagtttctggttccaagagatatgtcagttggccaattcatctacatattgagtgctaggttacatttgtctcctggtaaagccttattcgtgtttgtcaacaacactctccctcaaactgctgctctgatggactcggtctacgaatcttacaaagatgatgatggattcgtttacatgtgctatagcagtgagaaaacctttggttgatccaataatgatgttagtgtctgtgtacatatactttaaacataagatgttcactacatcaaaagacatcaaacacttgttaagctttatatgactgctgcttgttttatcctt

SEQ ID NO: 26223 - protein, 115 aa, Arabidopsis thaliana
  peptide (1)..(115): Ceres Seq. ID no. 12331724
  misc_feature (12)..(115): Pfam Name: Microtubule associated protein 1A/1B, light chain 3 Pfam Description: Microtubule associated protein 1A/1B, light
  misc_feature (3)..(115): Homolog of NCBI NO: 15233593 NR Description: putative symbiosis-related protein
  misc_feature (3)..(115): Homolog of NCBI NO: 18414683 NR Description: symbiosis-related like protein
  misc_feature (3)..(115): Homolog of NCBI NO: 38344173 NR Description: OSJNBa0053K19.12 [Oryza sativa (japonica
  misc_feature (1)..(115): Homolog of NCBI NO: 15224577 NR Description: putative microtubule-associated protein
  misc_feature (1)..(115): Homolog of NCBI NO: 21592920 NR Description: putative microtubule-associated protein
  misc_feature (3)..(115): Homolog of NCBI NO: 33146967 NR Description: putative microtubule associated protein
  misc_feature (1)..(115): Homolog of NCBI NO: 23394382 NR Description: microtubial binding protein [Phytophthora
  misc_feature (1)..(115): Homolog of NCBI NO: 6437547 NR Description: hypothetical protein [Arabidopsis thaliana]
  misc_feature (1)..(115): Homolog of NCBI NO: 18397569 NR Description: expressed protein
  misc_feature (1)..(115): Homolog of NCBI NO: 18400815 NR Description: expressed protein
MKSFKEQYTLDERLAESREIIAKYPTRIPVIAEKYCKTDLPAIEKKKFLVPRDMSVGQFIYILSARLHLSPGKALFVFVNNTLPQTAALMDSVYESYKDDDGFVYMCYSSEKTFG

SEQ ID NO: 26224 - protein, 62 aa, Arabidopsis thaliana
  peptide (1)..(62): Ceres Seq. ID no. 12331725
  misc_feature (1)..(62): Pfam Name: Microtubule associated protein 1A/1B, light chain 3 Pfam Description: Microtubule associated protein 1A/1B, light
  misc_feature (1)..(62): Homolog of NCBI NO: 15233593 NR Description: putative symbiosis-related protein
  misc_feature (1)..(62): Homolog of NCBI NO: 18414683 NR Description: symbiosis-related like protein
  misc_feature (1)..(62): Homolog of NCBI NO: 38344173 NR Description: OSJNBa0053K19.12 [Oryza sativa (japonica
  misc_feature (1)..(62): Homolog of NCBI NO: 15224577 NR Description: putative microtubule-associated protein
  misc_feature (1)..(62): Homolog of NCBI NO: 21592920 NR Description: putative microtubule-associated protein
  misc_feature (1)..(62): Homolog of NCBI NO: 33146967 NR Description: putative microtubule associated protein
  misc_feature (1)..(62): Homolog of NCBI NO: 23394382 NR Description: microtubial binding protein [Phytophthora
  misc_feature (1)..(62): Homolog of NCBI NO: 6437547 NR Description: hypothetical protein [Arabidopsis thaliana]
  misc_feature (1)..(62): Homolog of NCBI NO: 18397569 NR Description: expressed protein
  misc_feature (1)..(62): Homolog of NCBI NO: 18400815 NR Description: expressed protein
MSVGQFIYILSARLHLSPGKALFVFVNNTLPQTAALMDSVYESYKDDDGFVYMCYSSEKTFG

SEQ ID NO: 26225 - DNA, 717 bp, Arabidopsis thaliana
  misc_feature (1)..(717): Ceres Seq. ID no. 12338728
  misc_feature: MA Experiment ID: 108435 Result: Down-regulated in Transcription
  misc_feature: MA Experiment 108435 PARAMETER Experiment Name: At_stm_Mutants_cDNA_P Parameter: Plant Line Value: wt Landsburg vs stm
  misc_feature: MA Experiment 108435 PARAMETER Experiment Name: At_stm_Mutants_cDNA_P Parameter: Tissue Value: Shoot Apical Meristem Region
  misc_feature: MA Experiment ID: 108461 Result: Up-regulated in Transcription
  misc_feature: MA Experiment 108461 PARAMETER Experiment Name: At_Germinating_Seeds_cDNA_P Parameter: Age (day) Value: 1 vs. 0
  misc_feature: MA Experiment 108461 PARAMETER Experiment Name: At_Germinating_Seeds_cDNA_P Parameter: Tissue Value: Germinating Seeds
  misc_feature: MA Experiment ID: 108462 Result: Up-regulated in Transcription
  misc_feature: MA Experiment 108462 PARAMETER Experiment Name: At_Germinating_Seeds_cDNA_P Parameter: Age (day) Value: 2 vs. 0
  misc_feature: MA Experiment 108462 PARAMETER Experiment Name: At_Germinating_Seeds_cDNA_P Parameter: Tissue Value: Germinating Seeds
  misc_feature: MA Experiment ID: 108463 Result: Up-regulated in Transcription
  misc_feature: MA Experiment 108463 PARAMETER Experiment Name: At_Germinating_Seeds_cDNA_P Parameter: Age (day) Value: 3 vs. 0
  misc_feature: MA Experiment 108463 PARAMETER Experiment Name: At_Germinating_Seeds_cDNA_P Parameter: Tissue Value: Germinating Seeds
  misc_feature: MA Experiment ID: 108464 Result: Up-regulated in Transcription
  misc_feature: MA Experiment 108464 PARAMETER Experiment Name: At_Germinating_Seeds_cDNA_P Parameter: Age (day) Value: 4 vs. 0
  misc_feature: MA Experiment 108464 PARAMETER Experiment Name: At_Germinating_Seeds_cDNA_P Parameter: Tissue Value: Germinating Seeds
  misc_feature: MA Experiment ID: 108488 Result: Up-regulated in Transcription
  misc_feature: MA Experiment ID: 108577 Result: Down-regulated in Transcription
  misc_feature: MA Experiment 108577 PARAMETER Experiment Name: At_42deg_Heat_cDNA_P Parameter: Temperature (deg C) Value: 42 vs. 22
  misc_feature: MA Experiment 108577 PARAMETER Experiment Name: At_42deg_Heat_cDNA_P Parameter: Timepoint (hr) Value: 6
  misc_feature: MA Experiment 108577 PARAMETER Experiment Name: At_42deg_Heat_cDNA_P Parameter: Tissue Value: Aerial
  misc_feature: MA Experiment ID: 108579 Result: Down-regulated in Transcription
  misc_feature: MA Experiment 108579 PARAMETER Experiment Name: At_4deg_Cold_cDNA_P Parameter: Temperature (deg C) Value: 4 vs. 22
  misc_feature: MA Experiment 108579 PARAMETER Experiment Name: At_4deg_Cold_cDNA_P Parameter: Timepoint (hr) Value: 6
  misc_feature: MA Experiment 108579 PARAMETER Experiment Name: At_4deg_Cold_cDNA_P Parameter: Tissue Value: Aerial
  misc_feature: MA Experiment ID: 20000071 Result: Up-regulated in Transcription
  misc_feature: MA Experiment 20000071 PARAMETER Experiment Name: At_100uM_ABA_Mutants_cDNA_P Parameter: Plant Line Value: CS8104
  misc_feature: MA Experiment 20000071 PARAMETER Experiment Name: At_100uM_ABA_Mutants_cDNA_P Parameter: Timepoint (hr) Value: 6
  misc_feature: MA Experiment 20000071 PARAMETER Experiment Name: At_100uM_ABA_Mutants_cDNA_P Parameter: Tissue Value: Aerial
  misc_feature: MA Experiment 20000071 PARAMETER Experiment Name: At_100uM_ABA_Mutants_cDNA_P Parameter: Treatment Value: 100uM ABA vs. No Treatment
  misc_feature: MA Experiment ID: 20000072 Result: Up-regulated in Transcription
  misc_feature: MA Experiment 20000072 PARAMETER Experiment Name: At_100uM_ABA_Mutants_cDNA_P Parameter: Plant Line Value: CS8105
  misc_feature: MA Experiment 20000072 PARAMETER Experiment Name: At_100uM_ABA_Mutants_cDNA_P Parameter: Timepoint (hr) Value: 6
  misc_feature: MA Experiment 20000072 PARAMETER Experiment Name: At_100uM_ABA_Mutants_cDNA_P Parameter: Tissue Value: Aerial
  misc_feature: MA Experiment 20000072 PARAMETER Experiment Name: At_100uM_ABA_Mutants_cDNA_P Parameter: Treatment Value: 100uM ABA vs. No Treatment
  misc_feature: MA Experiment ID: 20000087 Result: Up-regulated in Transcription
  misc_feature: MA Experiment 20000087 PARAMETER Experiment Name: At_100uM_ABA_Mutants_cDNA_P Parameter: Plant Line Value: WS
  misc_feature: MA Experiment 20000087 PARAMETER Experiment Name: At_100uM_ABA_Mutants_cDNA_P Parameter: Timepoint (hr) Value: 6
  misc_feature: MA Experiment 20000087 PARAMETER Experiment Name: At_100uM_ABA_Mutants_cDNA_P Parameter: Tissue Value: Aerial
  misc_feature: MA Experiment 20000087 PARAMETER Experiment Name: At_100uM_ABA_Mutants_cDNA_P Parameter: Treatment Value: 100uM ABA vs. No Treatment
  misc_feature: MA Experiment ID: 20000088 Result: Up-regulated in Transcription
  misc_feature: MA Experiment 20000088 PARAMETER Experiment Name: At_100uM_ABA_Mutants_cDNA_P Parameter: Plant Line Value: Landsberg
  misc_feature: MA Experiment 20000088 PARAMETER Experiment Name: At_100uM_ABA_Mutants_cDNA_P Parameter: Timepoint (hr) Value: 6
  misc_feature: MA Experiment 20000088 PARAMETER Experiment Name: At_100uM_ABA_Mutants_cDNA_P Parameter: Tissue Value: Aerial
  misc_feature: MA Experiment 20000088 PARAMETER Experiment Name: At_100uM_ABA_Mutants_cDNA_P Parameter: Treatment Value: 100uM ABA vs. No Treatment
  misc_feature: MA Experiment ID: 20000089 Result: Up-regulated in Transcription
  misc_feature: MA Experiment ID: 20000090 Result: Up-regulated in Transcription
  misc_feature: MA Experiment ID: 20000111 Result: Down-regulated in Transcription
  misc_feature: MA Experiment 20000111 PARAMETER Experiment Name: At_42deg_Heat_cDNA_P Parameter: Temperature (deg C) Value: 42 vs. 22
  misc_feature: MA Experiment 20000111 PARAMETER Experiment Name: At_42deg_Heat_cDNA_P Parameter: Timepoint (hr) Value: 6
  misc_feature: MA Experiment 20000111 PARAMETER Experiment Name: At_42deg_Heat_cDNA_P Parameter: Tissue Value: Aerial
  misc_feature: MA Experiment ID: 20000113 Result: Down-regulated in Transcription
  misc_feature: MA Experiment 20000113 PARAMETER Experiment Name: At_42deg_Heat_cDNA_P Parameter: Temperature (deg C) Value: 42 vs. 22
  misc_feature: MA Experiment 20000113 PARAMETER Experiment Name: At_42deg_Heat_cDNA_P Parameter: Timepoint (hr) Value: 8
  misc_feature: MA Experiment 20000113 PARAMETER Experiment Name: At_42deg_Heat_cDNA_P Parameter: Tissue Value: Aerial
  misc_feature: MA Experiment ID: 20000179 Result: Up-regulated in Transcription
  misc_feature: MA Experiment 20000179 PARAMETER Experiment Name: At_Germinating_Seeds_P Parameter: Age (hr) Value: 6 vs. 0
  misc_feature: MA Experiment 20000179 PARAMETER Experiment Name: At_Germinating_Seeds_P Parameter: Tissue Value: Germinating Seeds
  misc_feature: MA Experiment ID: 20000180 Result: Up-regulated in Transcription
  misc_feature: MA Experiment 20000180 PARAMETER Experiment Name: At_Germinating_Seeds_P Parameter: Age (hr) Value: 24 vs. 0
  misc_feature: MA Experiment 20000180 PARAMETER Experiment Name: At_Germinating_Seeds_P Parameter: Tissue Value: Germinating Seeds
  misc_feature: MA Experiment ID: 20000185 Result: Down-regulated in Transcription
  misc_feature: MA Experiment 20000185 PARAMETER Experiment Name: At_Roots__P Parameter: Age (day) Value: 7 vs. 21
  misc_feature: MA Experiment 20000185 PARAMETER Experiment Name: At_Roots__P Parameter: Organism Value: A. thaliana
  misc_feature: MA Experiment 20000185 PARAMETER Experiment Name: At_Roots__P Parameter: Tissue Value: Roots vs. Whole Plant
  misc_feature: MA Experiment ID: 20000439 Result: Down-regulated in Transcription
  misc_feature: MA Experiment 20000439 PARAMETER Experiment Name: At_Roots__P Parameter: Age (day) Value: 14 vs. 21
  misc_feature: MA Experiment 20000439 PARAMETER Experiment Name: At_Roots__P Parameter: Organism Value: A. thaliana
  misc_feature: MA Experiment 20000439 PARAMETER Experiment Name: At_Roots__P Parameter: Tissue Value: Roots vs. Whole Plant
  misc_feature: MA Experiment ID: 20000794 Result: Down-regulated in Transcription
  misc_feature: MA Experiment 20000794 PARAMETER Experiment Name: At_Petals_P Parameter: Age (day) Value: 23-25 days
  misc_feature: MA Experiment 20000794 PARAMETER Experiment Name: At_Petals_P Parameter: Plant Line Value: WS
  misc_feature: MA Experiment 20000794 PARAMETER Experiment Name: At_Petals_P Parameter: Tissue Value: Petals vs. Whole plant
  misc_feature: MA Experiment ID: 20001247 Result: Down-regulated in Transcription
  misc_feature: MA Experiment 20001247 PARAMETER Experiment Name: At_Far-red-induction_P Parameter: Age (day) Value: 7
  misc_feature: MA Experiment 20001247 PARAMETER Experiment Name: At_Far-red-induction_P Parameter: Light Value: Far-red vs. White
  misc_feature: MA Experiment 20001247 PARAMETER Experiment Name: At_Far-red-induction_P Parameter: Organism Value: A. thaliana
  misc_feature: MA Experiment 20001247 PARAMETER Experiment Name: At_Far-red-induction_P Parameter: Plant Line Value: Columbia
  misc_feature: MA Experiment 20001247 PARAMETER Experiment Name: At_Far-red-induction_P Parameter: Timepoint (hr) Value: 1
  misc_feature: MA Experiment 20001247 PARAMETER Experiment Name: At_Far-red-induction_P Parameter: Tissue Value: Whole Plant
  misc_feature: MA Experiment ID: 20001450 Result: Down-regulated in Transcription
  misc_feature: MA Experiment 20001450 PARAMETER Experiment Name: At_Far-red-induction_P Parameter: Age (day) Value: 7
  misc_feature: MA Experiment 20001450 PARAMETER Experiment Name: At_Far-red-induction_P Parameter: Light Value: Far-red vs. White
  misc_feature: MA Experiment 20001450 PARAMETER Experiment Name: At_Far-red-induction_P Parameter: Organism Value: A. thaliana
  misc_feature: MA Experiment 20001450 PARAMETER Experiment Name: At_Far-red-induction_P Parameter: Plant Line Value: Columbia
  misc_feature: MA Experiment 20001450 PARAMETER Experiment Name: At_Far-red-induction_P Parameter: Timepoint (hr) Value: 8
  misc_feature: MA Experiment 20001450 PARAMETER Experiment Name: At_Far-red-induction_P Parameter: Tissue Value: Whole Plant
  misc_feature: MA Experiment ID: 20001451 Result: Down-regulated in Transcription
  misc_feature: MA Experiment 20001451 PARAMETER Experiment Name: At_Far-red-induction_P Parameter: Age (day) Value: 7
  misc_feature: MA Experiment 20001451 PARAMETER Experiment Name: At_Far-red-induction_P Parameter: Light Value: Far-red vs. White
  misc_feature: MA Experiment 20001451 PARAMETER Experiment Name: At_Far-red-induction_P Parameter: Organism Value: A. thaliana
  misc_feature: MA Experiment 20001451 PARAMETER Experiment Name: At_Far-red-induction_P Parameter: Plant Line Value: Columbia
  misc_feature: MA Experiment 20001451 PARAMETER Experiment Name: At_Far-red-induction_P Parameter: Timepoint (hr) Value: 24
  misc_feature: MA Experiment 20001451 PARAMETER Experiment Name: At_Far-red-induction_P Parameter: Tissue Value: Whole Plant
  misc_feature: MA Experiment ID: 20001557 Result: Down-regulated in Transcription
  misc_feature: MA Experiment 20001557 PARAMETER Experiment Name: At_Drought_Soil_Dry_P Parameter: Age (day) Value: 27
  misc_feature: MA Experiment 20001557 PARAMETER Experiment Name: At_Drought_Soil_Dry_P Parameter: Organism Value: A. thaliana
  misc_feature: MA Experiment 20001557 PARAMETER Experiment Name: At_Drought_Soil_Dry_P Parameter: Plant Line Value: WS
  misc_feature: MA Experiment 20001557 PARAMETER Experiment Name: At_Drought_Soil_Dry_P Parameter: Post Timepoint (hr) Value: 3
  misc_feature: MA Experiment 20001557 PARAMETER Experiment Name: At_Drought_Soil_Dry_P Parameter: Post-Treatment Value: Re-Water vs. No Drought
  misc_feature: MA Experiment 20001557 PARAMETER Experiment Name: At_Drought_Soil_Dry_P Parameter: Timepoint (day) Value: 13
  misc_feature: MA Experiment 20001557 PARAMETER Experiment Name: At_Drought_Soil_Dry_P Parameter: Treatment Value: Drought vs. No Drought
  misc_feature: MA Experiment ID: 20001906 Result: Down-regulated in Transcription
  misc_feature: MA Experiment 20001906 PARAMETER Experiment Name: At_Drought_Reproduction_P Parameter: Age (day) Value: 35
  misc_feature: MA Experiment 20001906 PARAMETER Experiment Name: At_Drought_Reproduction_P Parameter: Organism Value: A. thaliana
  misc_feature: MA Experiment 20001906 PARAMETER Experiment Name: At_Drought_Reproduction_P Parameter: Plant Line Value: WS
  misc_feature: MA Experiment 20001906 PARAMETER Experiment Name: At_Drought_Reproduction_P Parameter: Timepoint (day) Value: 5
  misc_feature: MA Experiment 20001906 PARAMETER Experiment Name: At_Drought_Reproduction_P Parameter: Tissue Value: Siliques
  misc_feature: MA Experiment 20001906 PARAMETER Experiment Name: At_Drought_Reproduction_P Parameter: Treatment Value: Drought vs. No Drought
  misc_feature: MA Experiment ID: 20001908 Result: Down-regulated in Transcription
  misc_feature: MA Experiment 20001908 PARAMETER Experiment Name: At_Drought_Reproduction_P Parameter: Age (day) Value: 40
  misc_feature: MA Experiment 20001908 PARAMETER Experiment Name: At_Drought_Reproduction_P Parameter: Organism Value: A. thaliana
  misc_feature: MA Experiment 20001908 PARAMETER Experiment Name: At_Drought_Reproduction_P Parameter: Plant Line Value: WS
  misc_feature: MA Experiment 20001908 PARAMETER Experiment Name: At_Drought_Reproduction_P Parameter: Timepoint (day) Value: 10
  misc_feature: MA Experiment 20001908 PARAMETER Experiment Name: At_Drought_Reproduction_P Parameter: Tissue Value: Siliques
  misc_feature: MA Experiment 20001908 PARAMETER Experiment Name: At_Drought_Reproduction_P Parameter: Treatment Value: Drought vs. No Drought
cttgtttatactaatgaccaaggagagactgttaaaggagtttgctcaaatttcttgtgtgatttggcacccggaagtgatgttaagctgactggtcctgtaggcaaagaaatgcttatgcctaaggatccaaacgccaccgtaattatgcttgccacagggacaggaattgctcctttcaggtctttcttatggaagatgttctttgagaaacatgatgactacaagttcaatggcttagcttggttgttcttgggtgtaccaaccactagctcattgctctaccaagaggagtttgataagatgaaagcaaaggcccccgagaacttcagggtggattacgcgataagcagagaacaagcgaacgataaaggagagaaaatgtatatccagactcggatggcacagtacgcagctgaattatgggagttgttgaagaaagacaacacttttgtttacatgtgtggactcaagggaatggagaaaggaattgatgacattatggtctcattggctgcaaatgacggtattgactggtttgattacaagaagcagttgaagaaggcagagcaatggaacgttgaagtctactgatcaaaaagcctttgacatttctgtagcaaagtatagctgaacaaaactgtaattttcgcttccgaatttctgtattttgaagataagttttttagatatgttatactaaaaaaagagttcttt

SEQ ID NO: 26226 - protein, 197 aa, Arabidopsis thaliana
  peptide (1)..(197): Ceres Seq. ID no. 12338729
  misc_feature (45)..(167): Pfam Name: Oxidoreductase NAD-binding domain Pfam Description: Oxidoreductase NAD-binding domain
  misc_feature (1)..(197): Homolog of NCBI NO: 4930128 NR Description: Chain A, Pea Fnr Y308w Mutant In Complex With
  misc_feature (1)..(197): Homolog of NCBI NO: 9954947 NR Description: Chain A, Crystal Structure Analysis Of The
  misc_feature (1)..(197): Homolog of NCBI NO: 6899972 NR Description: chloroplast ferredoxin-NADP+ oxidoreductase
  misc_feature (1)..(197): Homolog of NCBI NO: 1065268 NR Description: Ferredoxin:nadp+ Oxidoreductase (Ferredoxin
  misc_feature (1)..(197): Homolog of NCBI NO: 170111 NR Description: ferredoxin-NADP oxidoreductase
  misc_feature (1)..(197): Homolog of NCBI NO: 4930123 NR Description: Chain A, Wild-Type Pea Fnr
  misc_feature (1)..(197): Homolog of NCBI NO: 119905 NR Description: Ferredoxin--NADP reductase, leaf isozyme,
  misc_feature (1)..(197): Homolog of NCBI NO: 34897776 NR Description: ESTs AU078647(E1557),C72400(E1557) correspond to region of the predicted gene.~Similar to Oryza sativa,
  misc_feature (1)..(197): Homolog of NCBI NO: 729477 NR Description: Ferredoxin--NADP reductase, chloroplast precursor
  misc_feature (1)..(197): Homolog of NCBI NO: 15223753 NR Description: ferredoxin--NADP reductase precursor, putative
LVYTNDQGETVKGVCSNFLCDLAPGSDVKLTGPVGKEMLMPKDPNATVIMLATGTGIAPFRSFLWKMFFEKHDDYKFNGLAWLFLGVPTTSSLLYQEEFDKMKAKAPENFRVDYAISREQANDKGEKMYIQTRMAQYAAELWELLKKDNTFVYMCGLKGMEKGIDDIMVSLAANDGIDWFDYKKQLKKAEQWNVEVY

SEQ ID NO: 26227 - protein, 160 aa, Arabidopsis thaliana
  peptide (1)..(160): Ceres Seq. ID no. 12338731
  misc_feature (8)..(130): Pfam Name: Oxidoreductase NAD-binding domain Pfam Description: Oxidoreductase NAD-binding domain
  misc_feature (1)..(160): Homolog of NCBI NO: 4930128 NR Description: Chain A, Pea Fnr Y308w Mutant In Complex With
  misc_feature (1)..(160): Homolog of NCBI NO: 9954947 NR Description: Chain A, Crystal Structure Analysis Of The
  misc_feature (1)..(160): Homolog of NCBI NO: 6899972 NR Description: chloroplast ferredoxin-NADP+ oxidoreductase
  misc_feature (1)..(160): Homolog of NCBI NO: 1065268 NR Description: Ferredoxin:nadp+ Oxidoreductase (Ferredoxin
  misc_feature (1)..(160): Homolog of NCBI NO: 170111 NR Description: ferredoxin-NADP oxidoreductase
  misc_feature (1)..(160): Homolog of NCBI NO: 4930123 NR Description: Chain A, Wild-Type Pea Fnr
  misc_feature (1)..(160): Homolog of NCBI NO: 119905 NR Description: Ferredoxin--NADP reductase, leaf isozyme,
  misc_feature (1)..(160): Homolog of NCBI NO: 34897776 NR Description: ESTs AU078647(E1557),C72400(E1557) correspond to region of the predicted gene.~Similar to Oryza sativa,
  misc_feature (1)..(160): Homolog of NCBI NO: 729477 NR Description: Ferredoxin--NADP reductase, chloroplast precursor
  misc_feature (1)..(160): Homolog of NCBI NO: 15223753 NR Description: ferredoxin--NADP reductase precursor, putative
MLMPKDPNATVIMLATGTGIAPFRSFLWKMFFEKHDDYKFNGLAWLFLGVPTTSSLLYQEEFDKMKAKAPENFRVDYAISREQANDKGEKMYIQTRMAQYAAELWELLKKDNTFVYMCGLKGMEKGIDDIMVSLAANDGIDWFDYKKQLKKAEQWNVEVY

SEQ ID NO: 26228 - protein, 158 aa, Arabidopsis thaliana
  peptide (1)..(158): Ceres Seq. ID no. 12338732
  misc_feature (6)..(128): Pfam Name: Oxidoreductase NAD-binding domain Pfam Description: Oxidoreductase NAD-binding domain
  misc_feature (1)..(158): Homolog of NCBI NO: 4930128 NR Description: Chain A, Pea Fnr Y308w Mutant In Complex With
  misc_feature (1)..(158): Homolog of NCBI NO: 9954947 NR Description: Chain A, Crystal Structure Analysis Of The
  misc_feature (1)..(158): Homolog of NCBI NO: 6899972 NR Description: chloroplast ferredoxin-NADP+ oxidoreductase
  misc_feature (1)..(158): Homolog of NCBI NO: 1065268 NR Description: Ferredoxin:nadp+ Oxidoreductase (Ferredoxin
  misc_feature (1)..(158): Homolog of NCBI NO: 170111 NR Description: ferredoxin-NADP oxidoreductase
  misc_feature (1)..(158): Homolog of NCBI NO: 4930123 NR Description: Chain A, Wild-Type Pea Fnr
  misc_feature (1)..(158): Homolog of NCBI NO: 119905 NR Description: Ferredoxin--NADP reductase, leaf isozyme,
  misc_feature (1)..(158): Homolog of NCBI NO: 34897776 NR Description: ESTs AU078647(E1557),C72400(E1557) correspond to region of the predicted gene.~Similar to Oryza sativa,
  misc_feature (1)..(158): Homolog of NCBI NO: 729477 NR Description: Ferredoxin--NADP reductase, chloroplast precursor
  misc_feature (1)..(158): Homolog of NCBI NO: 15223753 NR Description: ferredoxin--NADP reductase precursor, putative
MPKDPNATVIMLATGTGIAPFRSFLWKMFFEKHDDYKFNGLAWLFLGVPTTSSLLYQEEFDKMKAKAPENFRVDYAISREQANDKGEKMYIQTRMAQYAAELWELLKKDNTFVYMCGLKGMEKGIDDIMVSLAANDGIDWFDYKKQLKKAEQWNVEVY

SEQ ID NO: 26229 - DNA, 1294 bp, Arabidopsis thaliana
  misc_feature (1)..(1294): Ceres Seq. ID no. 12325578
  misc_feature: MA Experiment ID: 108594 Result: Up-regulated in Transcription
  misc_feature: MA Experiment 108594 PARAMETER Experiment Name: At_Ler-rhl_Root_cDNA_P Parameter: Plant Line Value: null
  misc_feature: MA Experiment ID: 20000794 Result: Up-regulated in Transcription
  misc_feature: MA Experiment 20000794 PARAMETER Experiment Name: At_Petals_P Parameter: Age (day) Value: 23-25 days
  misc_feature: MA Experiment 20000794 PARAMETER Experiment Name: At_Petals_P Parameter: Plant Line Value: WS
  misc_feature: MA Experiment 20000794 PARAMETER Experiment Name: At_Petals_P Parameter: Tissue Value: Petals vs. Whole plant
  misc_feature: MA Experiment ID: 20001905 Result: Up-regulated in Transcription
  misc_feature: MA Experiment 20001905 PARAMETER Experiment Name: At_Drought_Reproduction_P Parameter: Age (day) Value: 40
  misc_feature: MA Experiment 20001905 PARAMETER Experiment Name: At_Drought_Reproduction_P Parameter: Organism Value: A. thaliana
  misc_feature: MA Experiment 20001905 PARAMETER Experiment Name: At_Drought_Reproduction_P Parameter: Plant Line Value: WS
  misc_feature: MA Experiment 20001905 PARAMETER Experiment Name: At_Drought_Reproduction_P Parameter: Timepoint (day) Value: 10
  misc_feature: MA Experiment 20001905 PARAMETER Experiment Name: At_Drought_Reproduction_P Parameter: Tissue Value: Rosettes
  misc_feature: MA Experiment 20001905 PARAMETER Experiment Name: At_Drought_Reproduction_P Parameter: Treatment Value: Drought vs. No Drought
  misc_feature: MA Experiment ID: 20001911 Result: Up-regulated in Transcription
  misc_feature: MA Experiment 20001911 PARAMETER Experiment Name: At_Drought_Reproduction_P Parameter: Age (day) Value: 40
  misc_feature: MA Experiment 20001911 PARAMETER Experiment Name: At_Drought_Reproduction_P Parameter: Organism Value: A. thaliana
  misc_feature: MA Experiment 20001911 PARAMETER Experiment Name: At_Drought_Reproduction_P Parameter: Plant Line Value: WS
  misc_feature: MA Experiment 20001911 PARAMETER Experiment Name: At_Drought_Reproduction_P Parameter: Timepoint (day) Value: 10
  misc_feature: MA Experiment 20001911 PARAMETER Experiment Name: At_Drought_Reproduction_P Parameter: Tissue Value: Flowers
  misc_feature: MA Experiment 20001911 PARAMETER Experiment Name: At_Drought_Reproduction_P Parameter: Treatment Value: Drought vs. No Drought
acccgtaatctcaatcacaaactatttccccccttcgttcatcaaatcctcaagagaaaaaaaaaatccccaaaagcttcctcaaaaccctaacacagatctctcgatcttctccgatctgtcttttctcctaatctggtttagtttgatttaattggattgaagatgtcagacgctttgaatatgactcttgatgaaattgtgaagaagagtaagagtgaaaggtctgcagctgcaaggtctggaggtaaaggagtttcccgtaagagtggacgtggacgtggtggacctaatggtgttgtaggagctggaagaggaggtggacctgttcgtagaggtcctcttgctgttaatactcggccatcatcatccttctccataaacaagcttgcccgcaggaagaggagcttgccatggcagaatcagaatgattgtatgaagaaacccttagagctgttggggtgtcaggagtggaagtcggaaccacagtttatattaccaaccttgatcagggagtgacaaatgaagatataagggaactctatgctgagattggagagctgaaaagatatgcaattcactatgacaaaaatgggcgtccaagtggatcggctgaagttgtgtatatgagaagaagtgatgcaattcaagctatgaggaaatacaacaatgtacttttggatggaaggcctatgaaactggagattctgggtggaagtactgaatctgctcctgtcgcagctcgtgttaatgtgactggattgaatggaaggatgaagaggagtgtcttcattggacaaggagttagaggtgggagagtaggaagaggaagaggttcaggtccttctggaagacgccttccagtccaacaaaaccaacaaggtggtcgaggtggtcgaggcggggtccgtggtagaggcagaggtgctggtggaggcagagggaataaaagtggtggccgaggtggaaagaagccggtggagaagtctgctgcggatctcgacaaagatctcgaaagctatcatgctgaagctatgaacatctcttaaagcaagacttcgcatcttgtcatgtacttttgtgttctttattcgtagtctctgactaaatatgtgccaaagtctggtttggtttaattacgtttaggatggctctactctgctttcgttttcctcttttcttgtttcacactttcacagtcacttttggttattgaagttaaaagagatttagctgtaaatgagaaagctgttcttgttagttggttgaatctaatcatatacgaatttatctt

SEQ ID NO: 26230 - protein, 140 aa, Arabidopsis thaliana
  peptide (1)..(140): Ceres Seq. ID no. 12325579
  misc_feature (1)..(77): Homolog of NCBI NO: 6755763 NR Description: RNA and export factor binding protein 1
  misc_feature (1)..(137): Homolog of NCBI NO: 38175495 NR Description: putative transcriptional coactivator(DIP2)
  misc_feature (1)..(140): Homolog of NCBI NO: 11358209 NR Description: hypothetical protein T22P11.120 - Arabidopsis
  misc_feature (1)..(140): Homolog of NCBI NO: 30679669 NR Description: RNA and export factor binding protein, putative
  misc_feature (1)..(140): Homolog of NCBI NO: 9757981 NR Description: gene_id:K12B20.19~unknown protein [Arabidopsis
  misc_feature (1)..(140): Homolog of NCBI NO: 9663025 NR Description: DIP2 protein [Arabidopsis thaliana]
  misc_feature (1)..(140): Homolog of NCBI NO: 30693141 NR Description: RNA and export factor binding protein, putative
  misc_feature (1)..(140): Homolog of NCBI NO: 25404603 NR Description: hypothetical protein T6J19.1 [imported] -
  misc_feature (1)..(140): Homolog of NCBI NO: 9663023 NR Description: DIP1 protein [Arabidopsis thaliana]
  misc_feature (1)..(140): Homolog of NCBI NO: 18408471 NR Description: RNA and export factor binding protein, putative
MRRSDAIQAMRKYNNVLLDGRPMKLEILGGSTESAPVAARVNVTGLNGRMKRSVFIGQGVRGGRVGRGRGSGPSGRRLPVQQNQQGGRGGRGGVRGRGRGAGGGRGNKSGGRGGKKPVEKSAADLDKDLESYHAEAMNIS

SEQ ID NO: 26231 - protein, 131 aa, Arabidopsis thaliana
  peptide (1)..(131): Ceres Seq. ID no. 12325580
  misc_feature (1)..(128): Homolog of NCBI NO: 38175495 NR Description: putative transcriptional coactivator(DIP2)
  misc_feature (1)..(131): Homolog of NCBI NO: 11358209 NR Description: hypothetical protein T22P11.120 - Arabidopsis
  misc_feature (1)..(131): Homolog of NCBI NO: 30679669 NR Description: RNA and export factor binding protein, putative
  misc_feature (1)..(131): Homolog of NCBI NO: 9757981 NR Description: gene_id:K12B20.19~unknown protein [Arabidopsis
  misc_feature (1)..(131): Homolog of NCBI NO: 9663025 NR Description: DIP2 protein [Arabidopsis thaliana]
  misc_feature (1)..(131): Homolog of NCBI NO: 30693141 NR Description: RNA and export factor binding protein, putative
  misc_feature (1)..(131): Homolog of NCBI NO: 25404603 NR Description: hypothetical protein T6J19.1 [imported] -
  misc_feature (1)..(131): Homolog of NCBI NO: 9663023 NR Description: DIP1 protein [Arabidopsis thaliana]
  misc_feature (1)..(131): Homolog of NCBI NO: 18408471 NR Description: RNA and export factor binding protein, putative
  misc_feature (1)..(68): Homolog of NCBI NO: 6755763 NR Description: RNA and export factor binding protein 1
MRKYNNVLLDGRPMKLEILGGSTESAPVAARVNVTGLNGRMKRSVFIGQGVRGGRVGRGRGSGPSGRRLPVQQNQQGGRGGRGGVRGRGRGAGGGRGNKSGGRGGKKPVEKSAADLDKDLESYHAEAMNIS

SEQ ID NO: 26232 - protein, 118 aa, Arabidopsis thaliana
  peptide (1)..(118): Ceres Seq. ID no. 12325581
  misc_feature (1)..(55): Homolog of NCBI NO: 6755763 NR Description: RNA and export factor binding protein 1
  misc_feature (1)..(115): Homolog of NCBI NO: 38175495 NR Description: putative transcriptional coactivator(DIP2)
  misc_feature (1)..(118): Homolog of NCBI NO: 11358209 NR Description: hypothetical protein T22P11.120 - Arabidopsis
  misc_feature (1)..(118): Homolog of NCBI NO: 30679669 NR Description: RNA and export factor binding protein, putative
  misc_feature (1)..(118): Homolog of NCBI NO: 9757981 NR Description: gene_id:K12B20.19~unknown protein [Arabidopsis
  misc_feature (1)..(118): Homolog of NCBI NO: 9663025 NR Description: DIP2 protein [Arabidopsis thaliana]
  misc_feature (1)..(118): Homolog of NCBI NO: 30693141 NR Description: RNA and export factor binding protein, putative
  misc_feature (1)..(118): Homolog of NCBI NO: 25404603 NR Description: hypothetical protein T6J19.1 [imported] -
  misc_feature (1)..(118): Homolog of NCBI NO: 9663023 NR Description: DIP1 protein [Arabidopsis thaliana]
  misc_feature (1)..(118): Homolog of NCBI NO: 18408471 NR Description: RNA and export factor binding protein, putative
MKLEILGGSTESAPVAARVNVTGLNGRMKRSVFIGQGVRGGRVGRGRGSGPSGRRLPVQQNQQGGRGGRGGVRGRGRGAGGGRGNKSGGRGGKKPVEKSAADLDKDLESYHAEAMNIS

SEQ ID NO: 26233 - DNA, 1524 bp, Arabidopsis thaliana
  misc_feature (1)..(1524): Ceres Seq. ID no. 13489966
  misc_feature: MA Experiment ID: 108462 Result: Down-regulated in Transcription
  misc_feature: MA Experiment 108462 PARAMETER Experiment Name: At_Germinating_Seeds_cDNA_P Parameter: Age (day) Value: 2 vs. 0
  misc_feature: MA Experiment 108462 PARAMETER Experiment Name: At_Germinating_Seeds_cDNA_P Parameter: Tissue Value: Germinating Seeds
  misc_feature: MA Experiment ID: 108463 Result: Down-regulated in Transcription
  misc_feature: MA Experiment 108463 PARAMETER Experiment Name: At_Germinating_Seeds_cDNA_P Parameter: Age (day) Value: 3 vs. 0
  misc_feature: MA Experiment 108463 PARAMETER Experiment Name: At_Germinating_Seeds_cDNA_P Parameter: Tissue Value: Germinating Seeds
  misc_feature: MA Experiment ID: 108464 Result: Down-regulated in Transcription
  misc_feature: MA Experiment 108464 PARAMETER Experiment Name: At_Germinating_Seeds_cDNA_P Parameter: Age (day) Value: 4 vs. 0
  misc_feature: MA Experiment 108464 PARAMETER Experiment Name: At_Germinating_Seeds_cDNA_P Parameter: Tissue Value: Germinating Seeds
  misc_feature: MA Experiment ID: 108607 Result: Down-regulated in Transcription
  misc_feature: MA Experiment 108607 PARAMETER Experiment Name: At_100uM_ABA_cDNA_P Parameter: Timepoint (hr) Value: 4
  misc_feature: MA Experiment 108607 PARAMETER Experiment Name: At_100uM_ABA_cDNA_P Parameter: Tissue Value: Aerial
  misc_feature: MA Experiment 108607 PARAMETER Experiment Name: At_100uM_ABA_cDNA_P Parameter: Treatment Value: 100uM ABA vs. No Treatment
  misc_feature: MA Experiment ID: 20000087 Result: Down-regulated in Transcription
  misc_feature: MA Experiment 20000087 PARAMETER Experiment Name: At_100uM_ABA_Mutants_cDNA_P Parameter: Plant Line Value: WS
  misc_feature: MA Experiment 20000087 PARAMETER Experiment Name: At_100uM_ABA_Mutants_cDNA_P Parameter: Timepoint (hr) Value: 6
  misc_feature: MA Experiment 20000087 PARAMETER Experiment Name: At_100uM_ABA_Mutants_cDNA_P Parameter: Tissue Value: Aerial
  misc_feature: MA Experiment 20000087 PARAMETER Experiment Name: At_100uM_ABA_Mutants_cDNA_P Parameter: Treatment Value: 100uM ABA vs. No Treatment
  misc_feature: MA Experiment ID: 20000089 Result: Up-regulated in Transcription
  misc_feature: MA Experiment ID: 20000227 Result: Up-regulated in Transcription
  misc_feature: MA Experiment 20000227 PARAMETER Experiment Name: At_Root-Tips-vs-Tops_P Parameter: Tissue Value: Root Tips vs. Root Tops
  misc_feature: MA Experiment ID: 20000437 Result: Down-regulated in Transcription
  misc_feature: MA Experiment 20000437 PARAMETER Experiment Name: At_Drought_P Parameter: Age (day) Value: 8
  misc_feature: MA Experiment 20000437 PARAMETER Experiment Name: At_Drought_P Parameter: Organism Value: A. thaliana
  misc_feature: MA Experiment 20000437 PARAMETER Experiment Name: At_Drought_P Parameter: Plant Line Value: WS
  misc_feature: MA Experiment 20000437 PARAMETER Experiment Name: At_Drought_P Parameter: Timepoint (hr) Value: 24
  misc_feature: MA Experiment 20000437 PARAMETER Experiment Name: At_Drought_P Parameter: Tissue Value: Whole Plant
  misc_feature: MA Experiment 20000437 PARAMETER Experiment Name: At_Drought_P Parameter: Treatment Value: Drought vs. No Drought
  misc_feature: MA Experiment ID: 20000495 Result: Down-regulated in Transcription
  misc_feature: MA Experiment 20000495 PARAMETER Experiment Name: At_Guard_Cells_P Parameter: Harvest Date Value: 8/2/2002
  misc_feature: MA Experiment 20000495 PARAMETER Experiment Name: At_Guard_Cells_P Parameter: Organism Value: A. thaliana
  misc_feature: MA Experiment 20000495 PARAMETER Experiment Name: At_Guard_Cells_P Parameter: Tissue Value: Guard Cells vs. Leaves
  misc_feature: MA Experiment ID: 20000496 Result: Down-regulated in Transcription
  misc_feature: MA Experiment 20000496 PARAMETER Experiment Name: At_Guard_Cells_P Parameter: Harvest Date Value: 7/19/2002
  misc_feature: MA Experiment 20000496 PARAMETER Experiment Name: At_Guard_Cells_P Parameter: Organism Value: Canola
  misc_feature: MA Experiment 20000496 PARAMETER Experiment Name: At_Guard_Cells_P Parameter: Tissue Value: Guard Cells vs. Leaves
  misc_feature: MA Experiment ID: 20001451 Result: Down-regulated in Transcription
  misc_feature: MA Experiment 20001451 PARAMETER Experiment Name: At_Far-red-induction_P Parameter: Age (day) Value: 7
  misc_feature: MA Experiment 20001451 PARAMETER Experiment Name: At_Far-red-induction_P Parameter: Light Value: Far-red vs. White
  misc_feature: MA Experiment 20001451 PARAMETER Experiment Name: At_Far-red-induction_P Parameter: Organism Value: A. thaliana
  misc_feature: MA Experiment 20001451 PARAMETER Experiment Name: At_Far-red-induction_P Parameter: Plant Line Value: Columbia
  misc_feature: MA Experiment 20001451 PARAMETER Experiment Name: At_Far-red-induction_P Parameter: Timepoint (hr) Value: 24
  misc_feature: MA Experiment 20001451 PARAMETER Experiment Name: At_Far-red-induction_P Parameter: Tissue Value: Whole Plant
  misc_feature: MA Experiment ID: 20001558 Result: Up-regulated in Transcription
  misc_feature: MA Experiment 20001558 PARAMETER Experiment Name: At_Drought_Soil_Dry_P Parameter: Age (day) Value: 27
  misc_feature: MA Experiment 20001558 PARAMETER Experiment Name: At_Drought_Soil_Dry_P Parameter: Organism Value: A. thaliana
  misc_feature: MA Experiment 20001558 PARAMETER Experiment Name: At_Drought_Soil_Dry_P Parameter: Plant Line Value: WS
  misc_feature: MA Experiment 20001558 PARAMETER Experiment Name: At_Drought_Soil_Dry_P Parameter: Post Timepoint (hr) Value: 6
  misc_feature: MA Experiment 20001558 PARAMETER Experiment Name: At_Drought_Soil_Dry_P Parameter: Post-Treatment Value: Re-Water vs. No Drought
  misc_feature: MA Experiment 20001558 PARAMETER Experiment Name: At_Drought_Soil_Dry_P Parameter: Timepoint (day) Value: 13
  misc_feature: MA Experiment 20001558 PARAMETER Experiment Name: At_Drought_Soil_Dry_P Parameter: Treatment Value: Drought vs. No Drought
  misc_feature: MA Experiment ID: 20001757 Result: Up-regulated in Transcription
  misc_feature: MA Experiment 20001757 PARAMETER Experiment Name: At_50mM_NH4NO3_L-to-H_P Parameter: Timepoint (hr) Value: 6
  misc_feature: MA Experiment 20001757 PARAMETER Experiment Name: At_50mM_NH4NO3_L-to-H_P Parameter: Tissue Value: Leaf
  misc_feature: MA Experiment 20001757 PARAMETER Experiment Name: At_50mM_NH4NO3_L-to-H_P Parameter: Treatment Value: 50mM NH4NO3 vs 100mM Mannitol
aaaatcacatttcacacgaaaaacctcgagtgagtgaagaaacaatggcagctatgaagctcctactctctcaagctcgccgccaaggtctaatcaaacccttttcgtctccatttcaacaaatcccaagactcttctcttcatcttcatcttcatcttcatcttcatcttcatcatccgattcgaatccatctcccgattcaaacgaatctcgcaaaaaggctgttacaatcgagccagtatcgtacgcggccaaacccaaggatcagaaatctgaaccgaaaaatgttgaatcgacggagaaccttcagtctccagaatcagcgaactggactcgtgaagaaatccgatatgtgaaagactctccttcgatcaatccggtttcttacgctcagcgtgtggctccacttccggaggatcgtgtcgccggtgagaatgaaggagatagaactccagaggagatggagagggagaggaagaggattgaattagagaatcgagctagaagaaggtttttaagagctaatgctgttgaagaagatacttcttcacttcctttgccaactttgcttaaaccagagttgaagcatggaaagaaacctattttcgatctcatggaggccattagagagattaagggcaatgccaaggcgaaatttgatgaaactcttgaggcgcatgtgagattgggcattgaaaaaggaagatctgagctgatagttcgtggtactttggctctaccccactctgttaagaaggatgtgaaagtggctttctttgccgagggagctgatgcagaggatgcaaaagctgcaggagctgatgtcgttggtggtcttgagcttattgaagagatcttgaaaagtggcaagattgactttgatagatgtcttgcaactccaaaaatgatgccccgtgtttacaagatatcaagaattcttaacaatcatggtttgatgccaaaccccaaacaaggtagtgtgaccaaggatgttacgaaagcagtcaaagacgcaaaagctggacataccaaatttagaatggataaaacgtctattcttcatgtgccacttggaaagatgagcttttctgaagaggctttacgagagaatgttggtgcgtttatgaacgcccttttgctagcgaagcctgctggattgaaaaagacttcaaaatatgctggttatgtgaatgcattccacttatgcagtacgatgggaaagggttatccagtatcgatacagtcgttatccagagcagcggacctccataccaaattgcagctcaagtgagctagtggagtccaaaagattaatcttaatcatcccgtaaaagttttttttactgttttccaaatgctgaatctttgaaaacattatgatttgttgtctcttaggtagtctattgctcaattgatcgaattggcttctgtccttttctcctttgtttttgttgtttgagagcttatcatccactttccatagaggcccttcacttgaataaaacatcataaatttttgtccg

SEQ ID NO: 26234 - protein, 429 aa, Arabidopsis thaliana
  peptide (1)..(429): Ceres Seq. ID no. 13489967
  misc_feature (198)..(408): Pfam Name: Ribosomal protein L1p/L10e family Pfam Description: Ribosomal protein L1p/L10e family
  misc_feature (202)..(417): Homolog of NCBI NO: 13470539 NR Description: 50S ribosomal protein L1 [Mesorhizobium loti]
  misc_feature (202)..(417): Homolog of NCBI NO: 9957210 NR Description: L1 [EDTA-degrading bacterium BNC1]
  misc_feature (199)..(415): Homolog of NCBI NO: 22957081 NR Description: hypothetical protein [Rhodobacter sphaeroides]
  misc_feature (193)..(417): Homolog of NCBI NO: 17935849 NR Description: 50S ribosomal protein L1
  misc_feature (193)..(417): Homolog of NCBI NO: 15889253 NR Description: AGR_C_3573p [Agrobacterium tumefaciens]
  misc_feature (198)..(411): Homolog of NCBI NO: 27380525 NR Description: 50S ribosomal protein L1 [Bradyrhizobium
  misc_feature (198)..(420): Homolog of NCBI NO: 22966133 NR Description: hypothetical protein [Rhodospirillum rubrum]
  misc_feature (195)..(419): Homolog of NCBI NO: 15965098 NR Description: PROBABLE 50S RIBOSOMAL PROTEIN L1 [Sinorhizobium
  misc_feature (15)..(288): Homolog of NCBI NO: 25408807 NR Description: hypothetical protein At2g42710 [imported] -
  misc_feature (15)..(429): Homolog of NCBI NO: 30689119 NR Description: ribosomal protein L1p family [Arabidopsis
NHISHEKPRVSEETMAAMKLLLSQARRQGLIKPFSSPFQQIPRLFSSSSSSSSSSSSSSDSNPSPDSNESRKKAVTIEPVSYAAKPKDQKSEPKNVESTENLQSPESANWTREEIRYVKDSPSINPVSYAQRVAPLPEDRVAGENEGDRTPEEMERERKRIELENRARRRFLRANAVEEDTSSLPLPTLLKPELKHGKKPIFDLMEAIREIKGNAKAKFDETLEAHVRLGIEKGRSELIVRGTLALPHSVKKDVKVAFFAEGADAEDAKAAGADVVGGLELIEEILKSGKIDFDRCLATPKMMPRVYKISRILNNHGLMPNPKQGSVTKDVTKAVKDAKAGHTKFRMDKTSILHVPLGKMSFSEEALRENVGAFMNALLLAKPAGLKKTSKYAGYVNAFHLCSTMGKGYPVSIQSLSRAADLHTKLQLK

SEQ ID NO: 26235 - protein, 415 aa, Arabidopsis thaliana
  peptide (1)..(415): Ceres Seq. ID no. 13489968
  misc_feature (184)..(394): Pfam Name: Ribosomal protein L1p/L10e family Pfam Description: Ribosomal protein L1p/L10e family
  misc_feature (188)..(403): Homolog of NCBI NO: 13470539 NR Description: 50S ribosomal protein L1 [Mesorhizobium loti]
  misc_feature (188)..(403): Homolog of NCBI NO: 9957210 NR Description: L1 [EDTA-degrading bacterium BNC1]
  misc_feature (185)..(401): Homolog of NCBI NO: 22957081 NR Description: hypothetical protein [Rhodobacter sphaeroides]
  misc_feature (179)..(403): Homolog of NCBI NO: 17935849 NR Description: 50S ribosomal protein L1
  misc_feature (179)..(403): Homolog of NCBI NO: 15889253 NR Description: AGR_C_3573p [Agrobacterium tumefaciens]
  misc_feature (184)..(397): Homolog of NCBI NO: 27380525 NR Description: 50S ribosomal protein L1 [Bradyrhizobium
  misc_feature (184)..(406): Homolog of NCBI NO: 22966133 NR Description: hypothetical protein [Rhodospirillum rubrum]
  misc_feature (181)..(405): Homolog of NCBI NO: 15965098 NR Description: PROBABLE 50S RIBOSOMAL PROTEIN L1 [Sinorhizobium
  misc_feature (1)..(274): Homolog of NCBI NO: 25408807 NR Description: hypothetical protein At2g42710 [imported] -
  misc_feature (1)..(415): Homolog of NCBI NO: 30689119 NR Description: ribosomal protein L1p family [Arabidopsis
MAAMKLLLSQARRQGLIKPFSSPFQQIPRLFSSSSSSSSSSSSSSDSNPSPDSNESRKKAVTIEPVSYAAKPKDQKSEPKNVESTENLQSPESANWTREEIRYVKDSPSINPVSYAQRVAPLPEDRVAGENEGDRTPEEMERERKRIELENRARRRFLRANAVEEDTSSLPLPTLLKPELKHGKKPIFDLMEAIREIKGNAKAKFDETLEAHVRLGIEKGRSELIVRGTLALPHSVKKDVKVAFFAEGADAEDAKAAGADVVGGLELIEEILKSGKIDFDRCLATPKMMPRVYKISRILNNHGLMPNPKQGSVTKDVTKAVKDAKAGHTKFRMDKTSILHVPLGKMSFSEEALRENVGAFMNALLLAKPAGLKKTSKYAGYVNAFHLCSTMGKGYPVSIQSLSRAADLHTKLQLK

SEQ ID NO: 26236 - protein, 412 aa, Arabidopsis thaliana
  peptide (1)..(412): Ceres Seq. ID no. 13489969
  misc_feature (181)..(391): Pfam Name: Ribosomal protein L1p/L10e family Pfam Description: Ribosomal protein L1p/L10e family
  misc_feature (185)..(400): Homolog of NCBI NO: 13470539 NR Description: 50S ribosomal protein L1 [Mesorhizobium loti]
  misc_feature (185)..(400): Homolog of NCBI NO: 9957210 NR Description: L1 [EDTA-degrading bacterium BNC1]
  misc_feature (182)..(398): Homolog of NCBI NO: 22957081 NR Description: hypothetical protein [Rhodobacter sphaeroides]
  misc_feature (176)..(400): Homolog of NCBI NO: 17935849 NR Description: 50S ribosomal protein L1
  misc_feature (176)..(400): Homolog of NCBI NO: 15889253 NR Description: AGR_C_3573p [Agrobacterium tumefaciens]
  misc_feature (181)..(394): Homolog of NCBI NO: 27380525 NR Description: 50S ribosomal protein L1 [Bradyrhizobium
  misc_feature (181)..(403): Homolog of NCBI NO: 22966133 NR Description: hypothetical protein [Rhodospirillum rubrum]
  misc_feature (178)..(402): Homolog of NCBI NO: 15965098 NR Description: PROBABLE 50S RIBOSOMAL PROTEIN L1 [Sinorhizobium
  misc_feature (1)..(271): Homolog of NCBI NO: 25408807 NR Description: hypothetical protein At2g42710 [imported] -
  misc_feature (1)..(412): Homolog of NCBI NO: 30689119 NR Description: ribosomal protein L1p family [Arabidopsis
MKLLLSQARRQGLIKPFSSPFQQIPRLFSSSSSSSSSSSSSSDSNPSPDSNESRKKAVTIEPVSYAAKPKDQKSEPKNVESTENLQSPESANWTREEIRYVKDSPSINPVSYAQRVAPLPEDRVAGENEGDRTPEEMERERKRIELENRARRRFLRANAVEEDTSSLPLPTLLKPELKHGKKPIFDLMEAIREIKGNAKAKFDETLEAHVRLGIEKGRSELIVRGTLALPHSVKKDVKVAFFAEGADAEDAKAAGADVVGGLELIEEILKSGKIDFDRCLATPKMMPRVYKISRILNNHGLMPNPKQGSVTKDVTKAVKDAKAGHTKFRMDKTSILHVPLGKMSFSEEALRENVGAFMNALLLAKPAGLKKTSKYAGYVNAFHLCSTMGKGYPVSIQSLSRAADLHTKLQLK

SEQ ID NO: 26237 - DNA, 2062 bp, Arabidopsis thaliana
  misc_feature (1)..(2062): Ceres Seq. ID no. 13491352
  misc_feature: MA Experiment ID: 20000111 Result: Down-regulated in Transcription
  misc_feature: MA Experiment 20000111 PARAMETER Experiment Name: At_42deg_Heat_cDNA_P Parameter: Temperature (deg C) Value: 42 vs. 22
  misc_feature: MA Experiment 20000111 PARAMETER Experiment Name: At_42deg_Heat_cDNA_P Parameter: Timepoint (hr) Value: 6
  misc_feature: MA Experiment 20000111 PARAMETER Experiment Name: At_42deg_Heat_cDNA_P Parameter: Tissue Value: Aerial
  misc_feature: MA Experiment ID: 20000144 Result: Down-regulated in Transcription
  misc_feature: MA Experiment 20000144 PARAMETER Experiment Name: At_42deg_Heat_cDNA_P Parameter: Temperature (deg C) Value: 42 vs. 22
  misc_feature: MA Experiment 20000144 PARAMETER Experiment Name: At_42deg_Heat_cDNA_P Parameter: Timepoint (hr) Value: 1
  misc_feature: MA Experiment 20000144 PARAMETER Experiment Name: At_42deg_Heat_cDNA_P Parameter: Tissue Value: Aerial
  misc_feature: MA Experiment ID: 20000171 Result: Down-regulated in Transcription
  misc_feature: MA Experiment 20000171 PARAMETER Experiment Name: At_42deg_Heat_P Parameter: Age (day) Value: 14
  misc_feature: MA Experiment 20000171 PARAMETER Experiment Name: At_42deg_Heat_P Parameter: Organism Value: A. thaliana
  misc_feature: MA Experiment 20000171 PARAMETER Experiment Name: At_42deg_Heat_P Parameter: Plant Line Value: WS
  misc_feature: MA Experiment 20000171 PARAMETER Experiment Name: At_42deg_Heat_P Parameter: Temperature (deg C) Value: 42 vs. 22
  misc_feature: MA Experiment 20000171 PARAMETER Experiment Name: At_42deg_Heat_P Parameter: Timepoint (hr) Value: 1
  misc_feature: MA Experiment 20000171 PARAMETER Experiment Name: At_42deg_Heat_P Parameter: Tissue Value: Aerial
  misc_feature: MA Experiment ID: 20000173 Result: Down-regulated in Transcription
  misc_feature: MA Experiment 20000173 PARAMETER Experiment Name: At_42deg_Heat_P Parameter: Age (day) Value: 14
  misc_feature: MA Experiment 20000173 PARAMETER Experiment Name: At_42deg_Heat_P Parameter: Organism Value: A. thaliana
  misc_feature: MA Experiment 20000173 PARAMETER Experiment Name: At_42deg_Heat_P Parameter: Plant Line Value: WS
  misc_feature: MA Experiment 20000173 PARAMETER Experiment Name: At_42deg_Heat_P Parameter: Temperature (deg C) Value: 42 vs. 22
  misc_feature: MA Experiment 20000173 PARAMETER Experiment Name: At_42deg_Heat_P Parameter: Timepoint (hr) Value: 6
  misc_feature: MA Experiment 20000173 PARAMETER Experiment Name: At_42deg_Heat_P Parameter: Tissue Value: Aerial
  misc_feature: MA Experiment ID: 20000179 Result: Up-regulated in Transcription
  misc_feature: MA Experiment 20000179 PARAMETER Experiment Name: At_Germinating_Seeds_P Parameter: Age (hr) Value: 6 vs. 0
  misc_feature: MA Experiment 20000179 PARAMETER Experiment Name: At_Germinating_Seeds_P Parameter: Tissue Value: Germinating Seeds
  misc_feature: MA Experiment ID: 20000180 Result: Up-regulated in Transcription
  misc_feature: MA Experiment 20000180 PARAMETER Experiment Name: At_Germinating_Seeds_P Parameter: Age (hr) Value: 24 vs. 0
  misc_feature: MA Experiment 20000180 PARAMETER Experiment Name: At_Germinating_Seeds_P Parameter: Tissue Value: Germinating Seeds
  misc_feature: MA Experiment ID: 20000184 Result: Down-regulated in Transcription
  misc_feature: MA Experiment 20000184 PARAMETER Experiment Name: At_Shoots__P Parameter: Age (day) Value: 7
  misc_feature: MA Experiment 20000184 PARAMETER Experiment Name: At_Shoots__P Parameter: Tissue Value: Shoots vs. Whole Plant
  misc_feature: MA Experiment ID: 20000224 Result: Up-regulated in Transcription
  misc_feature: MA Experiment ID: 20000235 Result: Up-regulated in Transcription
  misc_feature: MA Experiment 20000235 PARAMETER Experiment Name: At_Siliques_P Parameter: Age (day) Value: 21
  misc_feature: MA Experiment 20000235 PARAMETER Experiment Name: At_Siliques_P Parameter: Organism Value: A. thaliana
  misc_feature: MA Experiment 20000235 PARAMETER Experiment Name: At_Siliques_P Parameter: Plant Line Value: WS
  misc_feature: MA Experiment 20000235 PARAMETER Experiment Name: At_Siliques_P Parameter: Tissue Value: 5-10mm Siliques vs. Whole Plant
  misc_feature: MA Experiment ID: 20000286 Result: Up-regulated in Transcription
  misc_feature: MA Experiment 20000286 PARAMETER Experiment Name: At_Open_Flower_P Parameter: Age (day) Value: 21
  misc_feature: MA Experiment 20000286 PARAMETER Experiment Name: At_Open_Flower_P Parameter: Plant Line Value: WS
  misc_feature: MA Experiment 20000286 PARAMETER Experiment Name: At_Open_Flower_P Parameter: Tissue Value: Half Open vs. Whole Plant
  misc_feature: MA Experiment ID: 20000794 Result: Up-regulated in Transcription
  misc_feature: MA Experiment 20000794 PARAMETER Experiment Name: At_Petals_P Parameter: Age (day) Value: 23-25 days
  misc_feature: MA Experiment 20000794 PARAMETER Experiment Name: At_Petals_P Parameter: Plant Line Value: WS
  misc_feature: MA Experiment 20000794 PARAMETER Experiment Name: At_Petals_P Parameter: Tissue Value: Petals vs. Whole plant
  misc_feature: MA Experiment ID: 20001557 Result: Up-regulated in Transcription
  misc_feature: MA Experiment 20001557 PARAMETER Experiment Name: At_Drought_Soil_Dry_P Parameter: Age (day) Value: 27
  misc_feature: MA Experiment 20001557 PARAMETER Experiment Name: At_Drought_Soil_Dry_P Parameter: Organism Value: A. thaliana
  misc_feature: MA Experiment 20001557 PARAMETER Experiment Name: At_Drought_Soil_Dry_P Parameter: Plant Line Value: WS
  misc_feature: MA Experiment 20001557 PARAMETER Experiment Name: At_Drought_Soil_Dry_P Parameter: Post Timepoint (hr) Value: 3
  misc_feature: MA Experiment 20001557 PARAMETER Experiment Name: At_Drought_Soil_Dry_P Parameter: Post-Treatment Value: Re-Water vs. No Drought
  misc_feature: MA Experiment 20001557 PARAMETER Experiment Name: At_Drought_Soil_Dry_P Parameter: Timepoint (day) Value: 13
  misc_feature: MA Experiment 20001557 PARAMETER Experiment Name: At_Drought_Soil_Dry_P Parameter: Treatment Value: Drought vs. No Drought
  misc_feature: MA Experiment ID: 20001905 Result: Up-regulated in Transcription
  misc_feature: MA Experiment 20001905 PARAMETER Experiment Name: At_Drought_Reproduction_P Parameter: Age (day) Value: 40
  misc_feature: MA Experiment 20001905 PARAMETER Experiment Name: At_Drought_Reproduction_P Parameter: Organism Value: A. thaliana
  misc_feature: MA Experiment 20001905 PARAMETER Experiment Name: At_Drought_Reproduction_P Parameter: Plant Line Value: WS
  misc_feature: MA Experiment 20001905 PARAMETER Experiment Name: At_Drought_Reproduction_P Parameter: Timepoint (day) Value: 10
  misc_feature: MA Experiment 20001905 PARAMETER Experiment Name: At_Drought_Reproduction_P Parameter: Tissue Value: Rosettes
  misc_feature: MA Experiment 20001905 PARAMETER Experiment Name: At_Drought_Reproduction_P Parameter: Treatment Value: Drought vs. No Drought
atgcggtctgggagaagaccacaaggaagaagaatagctataaggaacgaaacagagacggaattgagatcgagaatcggagagaaatcgggatcggagaagcggaatctgatcggatctgatgttgggatgcagcttcacatatcgccgagtatgagaagcattacgatttcgagcagcaatgagtttattgacttgatgaagatcaaggtcgcagctcgtcacatctcttaccgaactctcttccacaccatcttaatcctcgctttcttgttgccttttgttttcattctcaccgctgttgttacccttgagggtgtcaacaaatgctcctccattgggaggcggataggtccacgtcttcttggtagggtagatgattcagagagactagctagagacttttataaaattctaaacgaagtaagcactcaagaaattccagatggtttgaagcttccaaattcttttagtcaacttgtttccgatatgaagaataaccactatgatgcaaaaacatttgctcttgtgctgcgagccatgatggagaagtttgaacgtgatatgagggaatcgaaatttgcagaacttatgaacaagcactttgcagcaagttccattcccaaaggcattcattgtctctctctaagactgacagatgaatattcctccaatgctcatgctcgaagacagcttccttcaccagagtttctccctgttctttcagataatgcttaccaccactttattttgtccacggacaatattttggctgcctcagttgtggtctcatccgctgttcagtcatcttcaaaacccgagaaaattgtctttcacatcattacagacaagaaaacctatgcgggtatgcattcatggtttgcgcttaattctgttgcaccagcaattgttgaggttaaaggtgttcatcagtttgactggttgacgagagagaatgttccggttttggaagctgtggaaagccataatggtgtcagggactattatcatgggaatcatgtcgctggggcaaacctcaccgaaacaactcctcgaacatttgcttcaaaattgcagtctagaagtccaaaatacatatctttgctcaaccatcttagaatatatataccagagcttttcccgaacttggacaaggtggttttcttagacgatgatatagttgtccagggagacttaactccactttgggatgttgacctcggtggtaaggtcaatggggcagtagagacttgcaggggtgaagatgaatgggtgatgtcaaagcgtttaaggaactacttcaatttctctcacccgctcatcgcaaagcatttagatcctgaagaatgtgcttgggcatatggtatgaatatcttcgatctacaagcttggaggaaaacaaatatcagagaaacgtatcactcttggcttagagagaatctaaagtcaaatctgacaatgtggaaacttggaaccttgcctcctgctcttatcgcgttcaagggtcacgtacacataatagactcgtcatggcatatgctaggattaggctaccagagcaagaccaacatagaaaatgtgaagaaagcagcagtgatccactacaatgggcagtcaaagccatggctggagattggtttcgagcatctgcggccattctggaccaaatacgtcaactactcaaatgatttcatcaagaactgtcacatattggagtaggaaaaccgaaactttgagatgatcatgaaggtaagagttacaggtgtatgatcatgaaggtagttacaggtgtaaaagaggagaagtagtaaaaaagacaaggcagtctgcagatattacactcagtctaaagaaggaagaatcagaaatttagtttgccacatacataagagaaacttggttgcagcgaagggaaggttgcataacagaaagagagagagagagataaagattcattctttctgtaaaatagaaggttaccctttttttgaaattcttttggagaatccaattcttgaatctttttataagaatggggaaagaaagattgggtttataattc

SEQ ID NO: 26238 - protein, 572 aa, Arabidopsis thaliana
  peptide (1)..(572): Ceres Seq. ID no. 13491353
  misc_feature (143)..(572): Homolog of NCBI NO: 7485958 NR Description: hypothetical protein F22I13.40 - Arabidopsis
  misc_feature (203)..(569): Homolog of NCBI NO: 15230806 NR Description: glycosyltransferase family 8 [Arabidopsis
  misc_feature (168)..(569): Homolog of NCBI NO: 18399484 NR Description: glycosyltransferase family 8 [Arabidopsis
  misc_feature (71)..(571): Homolog of NCBI NO: 11358146 NR Description: hypothetical protein T20N10.140 - Arabidopsis
  misc_feature (71)..(571): Homolog of NCBI NO: 22331857 NR Description: glycosyltransferase family 8 [Arabidopsis
  misc_feature (44)..(570): Homolog of NCBI NO: 15239707 NR Description: glycosyltransferase family 8 [Arabidopsis
  misc_feature (67)..(572): Homolog of NCBI NO: 6714484 NR Description: unknown protein [Arabidopsis thaliana]
  misc_feature (44)..(572): Homolog of NCBI NO: 30678270 NR Description: glycosyltransferase family 8 [Arabidopsis
  misc_feature (44)..(572): Homolog of NCBI NO: 30685369 NR Description: glycosyltransferase family 8 [Arabidopsis
  misc_feature (1)..(572): Homolog of NCBI NO: 11358133 NR Description: hypothetical protein T20K14_80 - Arabidopsis
MRSGRRPQGRRIAIRNETETELRSRIGEKSGSEKRNLIGSDVGMQLHISPSMRSITISSSNEFIDLMKIKVAARHISYRTLFHTILILAFLLPFVFILTAVVTLEGVNKCSSIGRRIGPRLLGRVDDSERLARDFYKILNEVSTQEIPDGLKLPNSFSQLVSDMKNNHYDAKTFALVLRAMMEKFERDMRESKFAELMNKHFAASSIPKGIHCLSLRLTDEYSSNAHARRQLPSPEFLPVLSDNAYHHFILSTDNILAASVVVSSAVQSSSKPEKIVFHIITDKKTYAGMHSWFALNSVAPAIVEVKGVHQFDWLTRENVPVLEAVESHNGVRDYYHGNHVAGANLTETTPRTFASKLQSRSPKYISLLNHLRIYIPELFPNLDKVVFLDDDIVVQGDLTPLWDVDLGGKVNGAVETCRGEDEWVMSKRLRNYFNFSHPLIAKHLDPEECAWAYGMNIFDLQAWRKTNIRETYHSWLRENLKSNLTMWKLGTLPPALIAFKGHVHIIDSSWHMLGLGYQSKTNIENVKKAAVIHYNGQSKPWLEIGFEHLRPFWTKYVNYSNDFIKNCHILE

SEQ ID NO: 26239 - protein, 529 aa, Arabidopsis thaliana
  peptide (1)..(529): Ceres Seq. ID no. 13491354
  misc_feature (100)..(529): Homolog of NCBI NO: 7485958 NR Description: hypothetical protein F22I13.40 - Arabidopsis
  misc_feature (160)..(526): Homolog of NCBI NO: 15230806 NR Description: glycosyltransferase family 8 [Arabidopsis
  misc_feature (125)..(526): Homolog of NCBI NO: 18399484 NR Description: glycosyltransferase family 8 [Arabidopsis
  misc_feature (28)..(528): Homolog of NCBI NO: 11358146 NR Description: hypothetical protein T20N10.140 - Arabidopsis
  misc_feature (28)..(528): Homolog of NCBI NO: 22331857 NR Description: glycosyltransferase family 8 [Arabidopsis
  misc_feature (1)..(527): Homolog of NCBI NO: 15239707 NR Description: glycosyltransferase family 8 [Arabidopsis
  misc_feature (24)..(529): Homolog of NCBI NO: 6714484 NR Description: unknown protein [Arabidopsis thaliana]
  misc_feature (1)..(529): Homolog of NCBI NO: 30678270 NR Description: glycosyltransferase family 8 [Arabidopsis
  misc_feature (1)..(529): Homolog of NCBI NO: 30685369 NR Description: glycosyltransferase family 8 [Arabidopsis
  misc_feature (1)..(529): Homolog of NCBI NO: 11358133 NR Description: hypothetical protein T20K14_80 - Arabidopsis
MQLHISPSMRSITISSSNEFIDLMKIKVAARHISYRTLFHTILILAFLLPFVFILTAVVTLEGVNKCSSIGRRIGPRLLGRVDDSERLARDFYKILNEVSTQEIPDGLKLPNSFSQLVSDMKNNHYDAKTFALVLRAMMEKFERDMRESKFAELMNKHFAASSIPKGIHCLSLRLTDEYSSNAHARRQLPSPEFLPVLSDNAYHHFILSTDNILAASVVVSSAVQSSSKPEKIVFHIITDKKTYAGMHSWFALNSVAPAIVEVKGVHQFDWLTRENVPVLEAVESHNGVRDYYHGNHVAGANLTETTPRTFASKLQSRSPKYISLLNHLRIYIPELFPNLDKVVFLDDDIVVQGDLTPLWDVDLGGKVNGAVETCRGEDEWVMSKRLRNYFNFSHPLIAKHLDPEECAWAYGMNIFDLQAWRKTNIRETYHSWLRENLKSNLTMWKLGTLPPALIAFKGHVHIIDSSWHMLGLGYQSKTNIENVKKAAVIHYNGQSKPWLEIGFEHLRPFWTKYVNYSNDFIKNCHILE

SEQ ID NO: 26240 - protein, 521 aa, Arabidopsis thaliana
  peptide (1)..(521): Ceres Seq. ID no. 13491355
  misc_feature (92)..(521): Homolog of NCBI NO: 7485958 NR Description: hypothetical protein F22I13.40 - Arabidopsis
  misc_feature (152)..(518): Homolog of NCBI NO: 15230806 NR Description: glycosyltransferase family 8 [Arabidopsis
  misc_feature (117)..(518): Homolog of NCBI NO: 18399484 NR Description: glycosyltransferase family 8 [Arabidopsis
  misc_feature (20)..(520): Homolog of NCBI NO: 11358146 NR Description: hypothetical protein T20N10.140 - Arabidopsis
  misc_feature (20)..(520): Homolog of NCBI NO: 22331857 NR Description: glycosyltransferase family 8 [Arabidopsis
  misc_feature (1)..(519): Homolog of NCBI NO: 15239707 NR Description: glycosyltransferase family 8 [Arabidopsis
  misc_feature (16)..(521): Homolog of NCBI NO: 6714484 NR Description: unknown protein [Arabidopsis thaliana]
  misc_feature (1)..(521): Homolog of NCBI NO: 30678270 NR Description: glycosyltransferase family 8 [Arabidopsis
  misc_feature (1)..(521): Homolog of NCBI NO: 30685369 NR Description: glycosyltransferase family 8 [Arabidopsis
  misc_feature (1)..(521): Homolog of NCBI NO: 11358133 NR Description: hypothetical protein T20K14_80 - Arabidopsis
MRSITISSSNEFIDLMKIKVAARHISYRTLFHTILILAFLLPFVFILTAVVTLEGVNKCSSIGRRIGPRLLGRVDDSERLARDFYKILNEVSTQEIPDGLKLPNSFSQLVSDMKNNHYDAKTFALVLRAMMEKFERDMRESKFAELMNKHFAASSIPKGIHCLSLRLTDEYSSNAHARRQLPSPEFLPVLSDNAYHHFILSTDNILAASVVVSSAVQSSSKPEKIVFHIITDKKTYAGMHSWFALNSVAPAIVEVKGVHQFDWLTRENVPVLEAVESHNGVRDYYHGNHVAGANLTETTPRTFASKLQSRSPKYISLLNHLRIYIPELFPNLDKVVFLDDDIVVQGDLTPLWDVDLGGKVNGAVETCRGEDEWVMSKRLRNYFNFSHPLIAKHLDPEECAWAYGMNIFDLQAWRKTNIRETYHSWLRENLKSNLTMWKLGTLPPALIAFKGHVHIIDSSWHMLGLGYQSKTNIENVKKAAVIHYNGQSKPWLEIGFEHLRPFWTKYVNYSNDFIKNCHILE

SEQ ID NO: 26241 - DNA, 1053 bp, Arabidopsis thaliana
  misc_feature (1)..(1053): Ceres Seq. ID no. 12331743
  misc_feature: MA Experiment ID: 108462 Result: Down-regulated in Transcription
  misc_feature: MA Experiment 108462 PARAMETER Experiment Name: At_Germinating_Seeds_cDNA_P Parameter: Age (day) Value: 2 vs. 0
  misc_feature: MA Experiment 108462 PARAMETER Experiment Name: At_Germinating_Seeds_cDNA_P Parameter: Tissue Value: Germinating Seeds
  misc_feature: MA Experiment ID: 108463 Result: Down-regulated in Transcription
  misc_feature: MA Experiment 108463 PARAMETER Experiment Name: At_Germinating_Seeds_cDNA_P Parameter: Age (day) Value: 3 vs. 0
  misc_feature: MA Experiment 108463 PARAMETER Experiment Name: At_Germinating_Seeds_cDNA_P Parameter: Tissue Value: Germinating Seeds
  misc_feature: MA Experiment ID: 108585 Result: Up-regulated in Transcription
  misc_feature: MA Experiment 108585 PARAMETER Experiment Name: At_5mM_NaNP_cDNA_P Parameter: Timepoint (hr) Value: 6
  misc_feature: MA Experiment 108585 PARAMETER Experiment Name: At_5mM_NaNP_cDNA_P Parameter: Tissue Value: Aerial
  misc_feature: MA Experiment 108585 PARAMETER Experiment Name: At_5mM_NaNP_cDNA_P Parameter: Treatment Value: null
  misc_feature: MA Experiment ID: 20000069 Result: Up-regulated in Transcription
  misc_feature: MA Experiment 20000069 PARAMETER Experiment Name: At_100uM_ABA_Mutants_cDNA_P Parameter: Plant Line Value: CS23
  misc_feature: MA Experiment 20000069 PARAMETER Experiment Name: At_100uM_ABA_Mutants_cDNA_P Parameter: Timepoint (hr) Value: 6
  misc_feature: MA Experiment 20000069 PARAMETER Experiment Name: At_100uM_ABA_Mutants_cDNA_P Parameter: Tissue Value: Aerial
  misc_feature: MA Experiment 20000069 PARAMETER Experiment Name: At_100uM_ABA_Mutants_cDNA_P Parameter: Treatment Value: 100uM ABA vs. No Treatment
  misc_feature: MA Experiment ID: 20000070 Result: Up-regulated in Transcription
  misc_feature: MA Experiment 20000070 PARAMETER Experiment Name: At_100uM_ABA_Mutants_cDNA_P Parameter: Plant Line Value: CS24
  misc_feature: MA Experiment 20000070 PARAMETER Experiment Name: At_100uM_ABA_Mutants_cDNA_P Parameter: Timepoint (hr) Value: 6
  misc_feature: MA Experiment 20000070 PARAMETER Experiment Name: At_100uM_ABA_Mutants_cDNA_P Parameter: Tissue Value: Aerial
  misc_feature: MA Experiment 20000070 PARAMETER Experiment Name: At_100uM_ABA_Mutants_cDNA_P Parameter: Treatment Value: 100uM ABA vs. No Treatment
  misc_feature: MA Experiment ID: 20000071 Result: Up-regulated in Transcription
  misc_feature: MA Experiment 20000071 PARAMETER Experiment Name: At_100uM_ABA_Mutants_cDNA_P Parameter: Plant Line Value: CS8104
  misc_feature: MA Experiment 20000071 PARAMETER Experiment Name: At_100uM_ABA_Mutants_cDNA_P Parameter: Timepoint (hr) Value: 6
  misc_feature: MA Experiment 20000071 PARAMETER Experiment Name: At_100uM_ABA_Mutants_cDNA_P Parameter: Tissue Value: Aerial
  misc_feature: MA Experiment 20000071 PARAMETER Experiment Name: At_100uM_ABA_Mutants_cDNA_P Parameter: Treatment Value: 100uM ABA vs. No Treatment
  misc_feature: MA Experiment ID: 20000072 Result: Up-regulated in Transcription
  misc_feature: MA Experiment 20000072 PARAMETER Experiment Name: At_100uM_ABA_Mutants_cDNA_P Parameter: Plant Line Value: CS8105
  misc_feature: MA Experiment 20000072 PARAMETER Experiment Name: At_100uM_ABA_Mutants_cDNA_P Parameter: Timepoint (hr) Value: 6
  misc_feature: MA Experiment 20000072 PARAMETER Experiment Name: At_100uM_ABA_Mutants_cDNA_P Parameter: Tissue Value: Aerial
  misc_feature: MA Experiment 20000072 PARAMETER Experiment Name: At_100uM_ABA_Mutants_cDNA_P Parameter: Treatment Value: 100uM ABA vs. No Treatment
  misc_feature: MA Experiment ID: 20000088 Result: Up-regulated in Transcription
  misc_feature: MA Experiment 20000088 PARAMETER Experiment Name: At_100uM_ABA_Mutants_cDNA_P Parameter: Plant Line Value: Landsberg
  misc_feature: MA Experiment 20000088 PARAMETER Experiment Name: At_100uM_ABA_Mutants_cDNA_P Parameter: Timepoint (hr) Value: 6
  misc_feature: MA Experiment 20000088 PARAMETER Experiment Name: At_100uM_ABA_Mutants_cDNA_P Parameter: Tissue Value: Aerial
  misc_feature: MA Experiment 20000088 PARAMETER Experiment Name: At_100uM_ABA_Mutants_cDNA_P Parameter: Treatment Value: 100uM ABA vs. No Treatment
  misc_feature: MA Experiment ID: 20000180 Result: Down-regulated in Transcription
  misc_feature: MA Experiment 20000180 PARAMETER Experiment Name: At_Germinating_Seeds_P Parameter: Age (hr) Value: 24 vs. 0
  misc_feature: MA Experiment 20000180 PARAMETER Experiment Name: At_Germinating_Seeds_P Parameter: Tissue Value: Germinating Seeds
  misc_feature: MA Experiment ID: 20000794 Result: Up-regulated in Transcription
  misc_feature: MA Experiment 20000794 PARAMETER Experiment Name: At_Petals_P Parameter: Age (day) Value: 23-25 days
  misc_feature: MA Experiment 20000794 PARAMETER Experiment Name: At_Petals_P Parameter: Plant Line Value: WS
  misc_feature: MA Experiment 20000794 PARAMETER Experiment Name: At_Petals_P Parameter: Tissue Value: Petals vs. Whole plant
acagatcacacagaagcaaaaattccaactccgatttcagaagaaagttcttctcttctctgagaagaagaagaagatgagcagaggaagcggcgctggttacgatcgtcacattactattttctcaccggaaggtcgtctcttccaagtcgagtatgctttcaaagccgtgaaagcagctggaatcacatcgatcggtgtccgagggaaagattcagtatgcgtcgttacgcagaagaaagttccggacaagcttttggatcagtctagtgtatctcaccttttccctgttacaaagtaccttggattgttagccactggcatgacagctgattcaaggtcattggtacaacaagcaaggaatgaggctgctgagtttaggttccaatatggttatgagatgcctgcagatattcttgctaaatggattgcagataagtctcaggtttacacacaacatgcttacatgagaccccttggagtagttgccatggttctaggtattgatgaagagagaggacctctactttacaagtgtgacccagctggacatttttacggtcacaaggcaactagtgctggtatgaaagaacaagaagcagtcaatttcttggagaagaaaatgaaagaaaaccctgccttcacatatgatgaaacagtacagactgctatatccgctctccaatctgttcttcaagaagacttcaaagcaactgaaattgaggtgggagttgtgagagctgatgaccctctcttccgttccctgagaacagaggagatcgacgagcacttgacggccattagtgaacgtgactgatcactttcactggaacattcagtcgggactttgcatctctttcttttgctttaattctatctaagatgattcacgtttcagagaaacgtgtttccattagtcatgagtcgtgtagttttcatttgaatcatctgcttcctcctaataggagttacatgtaagggtgtcaaattaaggtcgaatgagatggtttaaggttttgaattttaaaaggcaaaacaaagaaagttatttgc

SEQ ID NO: 26242 - protein, 271 aa, Arabidopsis thaliana
  peptide (1)..(271): Ceres Seq. ID no. 12331744
  misc_feature (57)..(245): Pfam Name: Proteasome A-type and B-type Pfam Description: Proteasome A-type and B-type
  misc_feature (26)..(271): Homolog of NCBI NO: 12229948 NR Description: Proteasome subunit alpha type 6 (20S proteasome
  misc_feature (26)..(271): Homolog of NCBI NO: 3421070 NR Description: 20S proteasome subunit PAA1 [Arabidopsis thaliana]
  misc_feature (27)..(271): Homolog of NCBI NO: 2511588 NR Description: multicatalytic endopeptidase complex, proteasome
  misc_feature (26)..(271): Homolog of NCBI NO: 20260140 NR Description: multicatalytic endopeptidase complex alpha
  misc_feature (26)..(271): Homolog of NCBI NO: 15238554 NR Description: 20S proteasome alpha subunit A1 (PAA1)
  misc_feature (26)..(271): Homolog of NCBI NO: 15224993 NR Description: 20S proteasome alpha subunit A2 (PAA2)
QITQKQKFQLRFQKKVLLFSEKKKKMSRGSGAGYDRHITIFSPEGRLFQVEYAFKAVKAAGITSIGVRGKDSVCVVTQKKVPDKLLDQSSVSHLFPVTKYLGLLATGMTADSRSLVQQARNEAAEFRFQYGYEMPADILAKWIADKSQVYTQHAYMRPLGVVAMVLGIDEERGPLLYKCDPAGHFYGHKATSAGMKEQEAVNFLEKKMKENPAFTYDETVQTAISALQSVLQEDFKATEIEVGVVRADDPLFRSLRTEEIDEHLTAISERD

SEQ ID NO: 26243 - protein, 246 aa, Arabidopsis thaliana
  peptide (1)..(246): Ceres Seq. ID no. 12331745
  misc_feature (32)..(220): Pfam Name: Proteasome A-type and B-type Pfam Description: Proteasome A-type and B-type
  misc_feature (1)..(246): Homolog of NCBI NO: 12229948 NR Description: Proteasome subunit alpha type 6 (20S proteasome
  misc_feature (1)..(246): Homolog of NCBI NO: 3421070 NR Description: 20S proteasome subunit PAA1 [Arabidopsis thaliana]
  misc_feature (2)..(246): Homolog of NCBI NO: 2511588 NR Description: multicatalytic endopeptidase complex, proteasome
  misc_feature (1)..(246): Homolog of NCBI NO: 20260140 NR Description: multicatalytic endopeptidase complex alpha
  misc_feature (1)..(246): Homolog of NCBI NO: 15238554 NR Description: 20S proteasome alpha subunit A1 (PAA1)
  misc_feature (1)..(246): Homolog of NCBI NO: 15224993 NR Description: 20S proteasome alpha subunit A2 (PAA2)
MSRGSGAGYDRHITIFSPEGRLFQVEYAFKAVKAAGITSIGVRGKDSVCVVTQKKVPDKLLDQSSVSHLFPVTKYLGLLATGMTADSRSLVQQARNEAAEFRFQYGYEMPADILAKWIADKSQVYTQHAYMRPLGVVAMVLGIDEERGPLLYKCDPAGHFYGHKATSAGMKEQEAVNFLEKKMKENPAFTYDETVQTAISALQSVLQEDFKATEIEVGVVRADDPLFRSLRTEEIDEHLTAISERD

SEQ ID NO: 26244 - protein, 164 aa, Arabidopsis thaliana
  peptide (1)..(164): Ceres Seq. ID no. 12331746
  misc_feature (1)..(138): Pfam Name: Proteasome A-type and B-type Pfam Description: Proteasome A-type and B-type
  misc_feature (1)..(164): Homolog of NCBI NO: 12229948 NR Description: Proteasome subunit alpha type 6 (20S proteasome
  misc_feature (1)..(164): Homolog of NCBI NO: 3421070 NR Description: 20S proteasome subunit PAA1 [Arabidopsis thaliana]
  misc_feature (1)..(164): Homolog of NCBI NO: 2511588 NR Description: multicatalytic endopeptidase complex, proteasome
  misc_feature (1)..(164): Homolog of NCBI NO: 20260140 NR Description: multicatalytic endopeptidase complex alpha
  misc_feature (1)..(164): Homolog of NCBI NO: 15238554 NR Description: 20S proteasome alpha subunit A1 (PAA1)
  misc_feature (1)..(164): Homolog of NCBI NO: 15224993 NR Description: 20S proteasome alpha subunit A2 (PAA2)
MTADSRSLVQQARNEAAEFRFQYGYEMPADILAKWIADKSQVYTQHAYMRPLGVVAMVLGIDEERGPLLYKCDPAGHFYGHKATSAGMKEQEAVNFLEKKMKENPAFTYDETVQTAISALQSVLQEDFKATEIEVGVVRADDPLFRSLRTEEIDEHLTAISERD

SEQ ID NO: 26245 - DNA, 937 bp, Arabidopsis thaliana
  misc_feature (1)..(937): Ceres Seq. ID no. 12331739
  misc_feature: MA Experiment ID: 108434 Result: Up-regulated in Transcription
  misc_feature: MA Experiment 108434 PARAMETER Experiment Name: At_Root_Tips_cDNA_P Parameter: Tissue Value: Root Tips
  misc_feature: MA Experiment ID: 108463 Result: Down-regulated in Transcription
  misc_feature: MA Experiment 108463 PARAMETER Experiment Name: At_Germinating_Seeds_cDNA_P Parameter: Age (day) Value: 3 vs. 0
  misc_feature: MA Experiment 108463 PARAMETER Experiment Name: At_Germinating_Seeds_cDNA_P Parameter: Tissue Value: Germinating Seeds
  misc_feature: MA Experiment ID: 108464 Result: Down-regulated in Transcription
  misc_feature: MA Experiment 108464 PARAMETER Experiment Name: At_Germinating_Seeds_cDNA_P Parameter: Age (day) Value: 4 vs. 0
  misc_feature: MA Experiment 108464 PARAMETER Experiment Name: At_Germinating_Seeds_cDNA_P Parameter: Tissue Value: Germinating Seeds
  misc_feature: MA Experiment ID: 108561 Result: Down-regulated in Transcription
  misc_feature: MA Experiment 108561 PARAMETER Experiment Name: At_100uM_ABA_cDNA_P Parameter: Timepoint (hr) Value: 6
  misc_feature: MA Experiment 108561 PARAMETER Experiment Name: At_100uM_ABA_cDNA_P Parameter: Tissue Value: Aerial
  misc_feature: MA Experiment 108561 PARAMETER Experiment Name: At_100uM_ABA_cDNA_P Parameter: Treatment Value: 100uM ABA vs. No Treatment
  misc_feature: MA Experiment ID: 108595 Result: Down-regulated in Transcription
  misc_feature: MA Experiment 108595 PARAMETER Experiment Name: At_Ler-pi_Ovule_cDNA_P Parameter: Plant Line Value: null
  misc_feature: MA Experiment ID: 108605 Result: Down-regulated in Transcription
  misc_feature: MA Experiment 108605 PARAMETER Experiment Name: At_100uM_ABA_cDNA_P Parameter: Timepoint (hr) Value: 6
  misc_feature: MA Experiment 108605 PARAMETER Experiment Name: At_100uM_ABA_cDNA_P Parameter: Tissue Value: Aerial
  misc_feature: MA Experiment 108605 PARAMETER Experiment Name: At_100uM_ABA_cDNA_P Parameter: Treatment Value: 100uM ABA vs. No Treatment
  misc_feature: MA Experiment ID: 108607 Result: Down-regulated in Transcription
  misc_feature: MA Experiment 108607 PARAMETER Experiment Name: At_100uM_ABA_cDNA_P Parameter: Timepoint (hr) Value: 4
  misc_feature: MA Experiment 108607 PARAMETER Experiment Name: At_100uM_ABA_cDNA_P Parameter: Tissue Value: Aerial
  misc_feature: MA Experiment 108607 PARAMETER Experiment Name: At_100uM_ABA_cDNA_P Parameter: Treatment Value: 100uM ABA vs. No Treatment
  misc_feature: MA Experiment ID: 108609 Result: Down-regulated in Transcription
  misc_feature: MA Experiment 108609 PARAMETER Experiment Name: At_100uM_ABA_cDNA_P Parameter: Timepoint (hr) Value: 24
  misc_feature: MA Experiment 108609 PARAMETER Experiment Name: At_100uM_ABA_cDNA_P Parameter: Tissue Value: Aerial
  misc_feature: MA Experiment 108609 PARAMETER Experiment Name: At_100uM_ABA_cDNA_P Parameter: Treatment Value: 100uM ABA vs. No Treatment
  misc_feature: MA Experiment ID: 20000069 Result: Down-regulated in Transcription
  misc_feature: MA Experiment 20000069 PARAMETER Experiment Name: At_100uM_ABA_Mutants_cDNA_P Parameter: Plant Line Value: CS23
  misc_feature: MA Experiment 20000069 PARAMETER Experiment Name: At_100uM_ABA_Mutants_cDNA_P Parameter: Timepoint (hr) Value: 6
  misc_feature: MA Experiment 20000069 PARAMETER Experiment Name: At_100uM_ABA_Mutants_cDNA_P Parameter: Tissue Value: Aerial
  misc_feature: MA Experiment 20000069 PARAMETER Experiment Name: At_100uM_ABA_Mutants_cDNA_P Parameter: Treatment Value: 100uM ABA vs. No Treatment
  misc_feature: MA Experiment ID: 20000070 Result: Down-regulated in Transcription
  misc_feature: MA Experiment 20000070 PARAMETER Experiment Name: At_100uM_ABA_Mutants_cDNA_P Parameter: Plant Line Value: CS24
  misc_feature: MA Experiment 20000070 PARAMETER Experiment Name: At_100uM_ABA_Mutants_cDNA_P Parameter: Timepoint (hr) Value: 6
  misc_feature: MA Experiment 20000070 PARAMETER Experiment Name: At_100uM_ABA_Mutants_cDNA_P Parameter: Tissue Value: Aerial
  misc_feature: MA Experiment 20000070 PARAMETER Experiment Name: At_100uM_ABA_Mutants_cDNA_P Parameter: Treatment Value: 100uM ABA vs. No Treatment
  misc_feature: MA Experiment ID: 20000071 Result: Down-regulated in Transcription
  misc_feature: MA Experiment 20000071 PARAMETER Experiment Name: At_100uM_ABA_Mutants_cDNA_P Parameter: Plant Line Value: CS8104
  misc_feature: MA Experiment 20000071 PARAMETER Experiment Name: At_100uM_ABA_Mutants_cDNA_P Parameter: Timepoint (hr) Value: 6
  misc_feature: MA Experiment 20000071 PARAMETER Experiment Name: At_100uM_ABA_Mutants_cDNA_P Parameter: Tissue Value: Aerial
  misc_feature: MA Experiment 20000071 PARAMETER Experiment Name: At_100uM_ABA_Mutants_cDNA_P Parameter: Treatment Value: 100uM ABA vs. No Treatment
  misc_feature: MA Experiment ID: 20000072 Result: Down-regulated in Transcription
  misc_feature: MA Experiment 20000072 PARAMETER Experiment Name: At_100uM_ABA_Mutants_cDNA_P Parameter: Plant Line Value: CS8105
  misc_feature: MA Experiment 20000072 PARAMETER Experiment Name: At_100uM_ABA_Mutants_cDNA_P Parameter: Timepoint (hr) Value: 6
  misc_feature: MA Experiment 20000072 PARAMETER Experiment Name: At_100uM_ABA_Mutants_cDNA_P Parameter: Tissue Value: Aerial
  misc_feature: MA Experiment 20000072 PARAMETER Experiment Name: At_100uM_ABA_Mutants_cDNA_P Parameter: Treatment Value: 100uM ABA vs. No Treatment
  misc_feature: MA Experiment ID: 20000086 Result: Down-regulated in Transcription
  misc_feature: MA Experiment 20000086 PARAMETER Experiment Name: At_100uM_ABA_Mutants_cDNA_P Parameter: Plant Line Value: CS22
  misc_feature: MA Experiment 20000086 PARAMETER Experiment Name: At_100uM_ABA_Mutants_cDNA_P Parameter: Timepoint (hr) Value: 6
  misc_feature: MA Experiment 20000086 PARAMETER Experiment Name: At_100uM_ABA_Mutants_cDNA_P Parameter: Tissue Value: Aerial
  misc_feature: MA Experiment 20000086 PARAMETER Experiment Name: At_100uM_ABA_Mutants_cDNA_P Parameter: Treatment Value: 100uM ABA vs. No Treatment
  misc_feature: MA Experiment ID: 20000087 Result: Down-regulated in Transcription
  misc_feature: MA Experiment 20000087 PARAMETER Experiment Name: At_100uM_ABA_Mutants_cDNA_P Parameter: Plant Line Value: WS
  misc_feature: MA Experiment 20000087 PARAMETER Experiment Name: At_100uM_ABA_Mutants_cDNA_P Parameter: Timepoint (hr) Value: 6
  misc_feature: MA Experiment 20000087 PARAMETER Experiment Name: At_100uM_ABA_Mutants_cDNA_P Parameter: Tissue Value: Aerial
  misc_feature: MA Experiment 20000087 PARAMETER Experiment Name: At_100uM_ABA_Mutants_cDNA_P Parameter: Treatment Value: 100uM ABA vs. No Treatment
  misc_feature: MA Experiment ID: 20000088 Result: Down-regulated in Transcription
  misc_feature: MA Experiment 20000088 PARAMETER Experiment Name: At_100uM_ABA_Mutants_cDNA_P Parameter: Plant Line Value: Landsberg
  misc_feature: MA Experiment 20000088 PARAMETER Experiment Name: At_100uM_ABA_Mutants_cDNA_P Parameter: Timepoint (hr) Value: 6
  misc_feature: MA Experiment 20000088 PARAMETER Experiment Name: At_100uM_ABA_Mutants_cDNA_P Parameter: Tissue Value: Aerial
  misc_feature: MA Experiment 20000088 PARAMETER Experiment Name: At_100uM_ABA_Mutants_cDNA_P Parameter: Treatment Value: 100uM ABA vs. No Treatment
  misc_feature: MA Experiment ID: 20000113 Result: Up-regulated in Transcription
  misc_feature: MA Experiment 20000113 PARAMETER Experiment Name: At_42deg_Heat_cDNA_P Parameter: Temperature (deg C) Value: 42 vs. 22
  misc_feature: MA Experiment 20000113 PARAMETER Experiment Name: At_42deg_Heat_cDNA_P Parameter: Timepoint (hr) Value: 8
  misc_feature: MA Experiment 20000113 PARAMETER Experiment Name: At_42deg_Heat_cDNA_P Parameter: Tissue Value: Aerial
  misc_feature: MA Experiment ID: 20000117 Result: Down-regulated in Transcription
  misc_feature: MA Experiment 20000117 PARAMETER Experiment Name: At_100uM_ABA_Mutants_cDNA_P Parameter: Plant Line Value: Columbia
  misc_feature: MA Experiment 20000117 PARAMETER Experiment Name: At_100uM_ABA_Mutants_cDNA_P Parameter: Timepoint (hr) Value: 6
  misc_feature: MA Experiment 20000117 PARAMETER Experiment Name: At_100uM_ABA_Mutants_cDNA_P Parameter: Tissue Value: Aerial
  misc_feature: MA Experiment 20000117 PARAMETER Experiment Name: At_100uM_ABA_Mutants_cDNA_P Parameter: Treatment Value: 100uM ABA vs. No Treatment
  misc_feature: MA Experiment ID: 20000180 Result: Up-regulated in Transcription
  misc_feature: MA Experiment 20000180 PARAMETER Experiment Name: At_Germinating_Seeds_P Parameter: Age (hr) Value: 24 vs. 0
  misc_feature: MA Experiment 20000180 PARAMETER Experiment Name: At_Germinating_Seeds_P Parameter: Tissue Value: Germinating Seeds
  misc_feature: MA Experiment ID: 20000185 Result: Down-regulated in Transcription
  misc_feature: MA Experiment 20000185 PARAMETER Experiment Name: At_Roots__P Parameter: Age (day) Value: 7 vs. 21
  misc_feature: MA Experiment 20000185 PARAMETER Experiment Name: At_Roots__P Parameter: Organism Value: A. thaliana
  misc_feature: MA Experiment 20000185 PARAMETER Experiment Name: At_Roots__P Parameter: Tissue Value: Roots vs. Whole Plant
  misc_feature: MA Experiment ID: 20000227 Result: Down-regulated in Transcription
  misc_feature: MA Experiment 20000227 PARAMETER Experiment Name: At_Root-Tips-vs-Tops_P Parameter: Tissue Value: Root Tips vs. Root Tops
  misc_feature: MA Experiment ID: 20000436 Result: Down-regulated in Transcription
  misc_feature: MA Experiment 20000436 PARAMETER Experiment Name: At_Drought_P Parameter: Age (day) Value: 7
  misc_feature: MA Experiment 20000436 PARAMETER Experiment Name: At_Drought_P Parameter: Organism Value: A. thaliana
  misc_feature: MA Experiment 20000436 PARAMETER Experiment Name: At_Drought_P Parameter: Plant Line Value: WS
  misc_feature: MA Experiment 20000436 PARAMETER Experiment Name: At_Drought_P Parameter: Timepoint (hr) Value: 12
  misc_feature: MA Experiment 20000436 PARAMETER Experiment Name: At_Drought_P Parameter: Tissue Value: Whole Plant
  misc_feature: MA Experiment 20000436 PARAMETER Experiment Name: At_Drought_P Parameter: Treatment Value: Drought vs. No Drought
  misc_feature: MA Experiment ID: 20000437 Result: Down-regulated in Transcription
  misc_feature: MA Experiment 20000437 PARAMETER Experiment Name: At_Drought_P Parameter: Age (day) Value: 8
  misc_feature: MA Experiment 20000437 PARAMETER Experiment Name: At_Drought_P Parameter: Organism Value: A. thaliana
  misc_feature: MA Experiment 20000437 PARAMETER Experiment Name: At_Drought_P Parameter: Plant Line Value: WS
  misc_feature: MA Experiment 20000437 PARAMETER Experiment Name: At_Drought_P Parameter: Timepoint (hr) Value: 24
  misc_feature: MA Experiment 20000437 PARAMETER Experiment Name: At_Drought_P Parameter: Tissue Value: Whole Plant
  misc_feature: MA Experiment 20000437 PARAMETER Experiment Name: At_Drought_P Parameter: Treatment Value: Drought vs. No Drought
  misc_feature: MA Experiment ID: 20000439 Result: Down-regulated in Transcription
  misc_feature: MA Experiment 20000439 PARAMETER Experiment Name: At_Roots__P Parameter: Age (day) Value: 14 vs. 21
  misc_feature: MA Experiment 20000439 PARAMETER Experiment Name: At_Roots__P Parameter: Organism Value: A. thaliana
  misc_feature: MA Experiment 20000439 PARAMETER Experiment Name: At_Roots__P Parameter: Tissue Value: Roots vs. Whole Plant
  misc_feature: MA Experiment ID: 20000453 Result: Down-regulated in Transcription
  misc_feature: MA Experiment 20000453 PARAMETER Experiment Name: At_100uM_ABA_P Parameter: Age (day) Value: 15
  misc_feature: MA Experiment 20000453 PARAMETER Experiment Name: At_100uM_ABA_P Parameter: Organism Value: A. thaliana
  misc_feature: MA Experiment 20000453 PARAMETER Experiment Name: At_100uM_ABA_P Parameter: Plant Line Value: WS
  misc_feature: MA Experiment 20000453 PARAMETER Experiment Name: At_100uM_ABA_P Parameter: Timepoint (hr) Value: 24
  misc_feature: MA Experiment 20000453 PARAMETER Experiment Name: At_100uM_ABA_P Parameter: Tissue Value: Aerial
  misc_feature: MA Experiment 20000453 PARAMETER Experiment Name: At_100uM_ABA_P Parameter: Treatment Value: 100uM ABA vs. No Treatment
  misc_feature: MA Experiment ID: 20000527 Result: Up-regulated in Transcription
  misc_feature: MA Experiment 20000527 PARAMETER Experiment Name: At_10percent_PEG_P Parameter: Age (day) Value: 20
  misc_feature: MA Experiment 20000527 PARAMETER Experiment Name: At_10percent_PEG_P Parameter: Organism Value: A. thaliana
  misc_feature: MA Experiment 20000527 PARAMETER Experiment Name: At_10percent_PEG_P Parameter: Plant Line Value: WS
  misc_feature: MA Experiment 20000527 PARAMETER Experiment Name: At_10percent_PEG_P Parameter: Timepoint (day) Value: 20
  misc_feature: MA Experiment 20000527 PARAMETER Experiment Name: At_10percent_PEG_P Parameter: Tissue Value: Whole Plant
  misc_feature: MA Experiment 20000527 PARAMETER Experiment Name: At_10percent_PEG_P Parameter: Treatment Value: 10percent PEG vs. No Treatment
  misc_feature: MA Experiment ID: 20000794 Result: Down-regulated in Transcription
  misc_feature: MA Experiment 20000794 PARAMETER Experiment Name: At_Petals_P Parameter: Age (day) Value: 23-25 days
  misc_feature: MA Experiment 20000794 PARAMETER Experiment Name: At_Petals_P Parameter: Plant Line Value: WS
  misc_feature: MA Experiment 20000794 PARAMETER Experiment Name: At_Petals_P Parameter: Tissue Value: Petals vs. Whole plant
  misc_feature: MA Experiment ID: 20001248 Result: Down-regulated in Transcription
  misc_feature: MA Experiment 20001248 PARAMETER Experiment Name: At_Far-red-induction_P Parameter: Age (day) Value: 7
  misc_feature: MA Experiment 20001248 PARAMETER Experiment Name: At_Far-red-induction_P Parameter: Light Value: Far-red vs. White
  misc_feature: MA Experiment 20001248 PARAMETER Experiment Name: At_Far-red-induction_P Parameter: Organism Value: A. thaliana
  misc_feature: MA Experiment 20001248 PARAMETER Experiment Name: At_Far-red-induction_P Parameter: Plant Line Value: Columbia
  misc_feature: MA Experiment 20001248 PARAMETER Experiment Name: At_Far-red-induction_P Parameter: Timepoint (hr) Value: 4
  misc_feature: MA Experiment 20001248 PARAMETER Experiment Name: At_Far-red-induction_P Parameter: Tissue Value: Whole Plant
  misc_feature: MA Experiment ID: 20001450 Result: Down-regulated in Transcription
  misc_feature: MA Experiment 20001450 PARAMETER Experiment Name: At_Far-red-induction_P Parameter: Age (day) Value: 7
  misc_feature: MA Experiment 20001450 PARAMETER Experiment Name: At_Far-red-induction_P Parameter: Light Value: Far-red vs. White
  misc_feature: MA Experiment 20001450 PARAMETER Experiment Name: At_Far-red-induction_P Parameter: Organism Value: A. thaliana
  misc_feature: MA Experiment 20001450 PARAMETER Experiment Name: At_Far-red-induction_P Parameter: Plant Line Value: Columbia
  misc_feature: MA Experiment 20001450 PARAMETER Experiment Name: At_Far-red-induction_P Parameter: Timepoint (hr) Value: 8
  misc_feature: MA Experiment 20001450 PARAMETER Experiment Name: At_Far-red-induction_P Parameter: Tissue Value: Whole Plant
  misc_feature: MA Experiment ID: 20001451 Result: Down-regulated in Transcription
  misc_feature: MA Experiment 20001451 PARAMETER Experiment Name: At_Far-red-induction_P Parameter: Age (day) Value: 7
  misc_feature: MA Experiment 20001451 PARAMETER Experiment Name: At_Far-red-induction_P Parameter: Light Value: Far-red vs. White
  misc_feature: MA Experiment 20001451 PARAMETER Experiment Name: At_Far-red-induction_P Parameter: Organism Value: A. thaliana
  misc_feature: MA Experiment 20001451 PARAMETER Experiment Name: At_Far-red-induction_P Parameter: Plant Line Value: Columbia
  misc_feature: MA Experiment 20001451 PARAMETER Experiment Name: At_Far-red-induction_P Parameter: Timepoint (hr) Value: 24
  misc_feature: MA Experiment 20001451 PARAMETER Experiment Name: At_Far-red-induction_P Parameter: Tissue Value: Whole Plant
  misc_feature: MA Experiment ID: 20001458 Result: Up-regulated in Transcription
  misc_feature: MA Experiment 20001458 PARAMETER Experiment Name: At_50mM_NH4NO3_L-to-H_P Parameter: Age (day) Value: Undefined
  misc_feature: MA Experiment 20001458 PARAMETER Experiment Name: At_50mM_NH4NO3_L-to-H_P Parameter: Organism Value: Undefined
  misc_feature: MA Experiment 20001458 PARAMETER Experiment Name: At_50mM_NH4NO3_L-to-H_P Parameter: Plant Line Value: Undefined
  misc_feature: MA Experiment 20001458 PARAMETER Experiment Name: At_50mM_NH4NO3_L-to-H_P Parameter: Timepoint (hr) Value: 2
  misc_feature: MA Experiment 20001458 PARAMETER Experiment Name: At_50mM_NH4NO3_L-to-H_P Parameter: Tissue Value: Siliques
  misc_feature: MA Experiment 20001458 PARAMETER Experiment Name: At_50mM_NH4NO3_L-to-H_P Parameter: Treatment Value: 50mM NH4NO3 vs. 100mM Manitol
  misc_feature: MA Experiment ID: 20001556 Result: Up-regulated in Transcription
  misc_feature: MA Experiment 20001556 PARAMETER Experiment Name: At_Drought_Soil_Dry_P Parameter: Age (day) Value: 26
  misc_feature: MA Experiment 20001556 PARAMETER Experiment Name: At_Drought_Soil_Dry_P Parameter: Organism Value: A. thaliana
  misc_feature: MA Experiment 20001556 PARAMETER Experiment Name: At_Drought_Soil_Dry_P Parameter: Plant Line Value: WS
  misc_feature: MA Experiment 20001556 PARAMETER Experiment Name: At_Drought_Soil_Dry_P Parameter: Post Timepoint (hr) Value: None
  misc_feature: MA Experiment 20001556 PARAMETER Experiment Name: At_Drought_Soil_Dry_P Parameter: Post-Treatment Value: None
  misc_feature: MA Experiment 20001556 PARAMETER Experiment Name: At_Drought_Soil_Dry_P Parameter: Timepoint (day) Value: 12
  misc_feature: MA Experiment 20001556 PARAMETER Experiment Name: At_Drought_Soil_Dry_P Parameter: Treatment Value: Drought vs. No Drought
  misc_feature: MA Experiment ID: 20001558 Result: Up-regulated in Transcription
  misc_feature: MA Experiment 20001558 PARAMETER Experiment Name: At_Drought_Soil_Dry_P Parameter: Age (day) Value: 27
  misc_feature: MA Experiment 20001558 PARAMETER Experiment Name: At_Drought_Soil_Dry_P Parameter: Organism Value: A. thaliana
  misc_feature: MA Experiment 20001558 PARAMETER Experiment Name: At_Drought_Soil_Dry_P Parameter: Plant Line Value: WS
  misc_feature: MA Experiment 20001558 PARAMETER Experiment Name: At_Drought_Soil_Dry_P Parameter: Post Timepoint (hr) Value: 6
  misc_feature: MA Experiment 20001558 PARAMETER Experiment Name: At_Drought_Soil_Dry_P Parameter: Post-Treatment Value: Re-Water vs. No Drought
  misc_feature: MA Experiment 20001558 PARAMETER Experiment Name: At_Drought_Soil_Dry_P Parameter: Timepoint (day) Value: 13
  misc_feature: MA Experiment 20001558 PARAMETER Experiment Name: At_Drought_Soil_Dry_P Parameter: Treatment Value: Drought vs. No Drought
  misc_feature: MA Experiment ID: 20001560 Result: Up-regulated in Transcription
  misc_feature: MA Experiment 20001560 PARAMETER Experiment Name: At_Drought_Soil_Dry_P Parameter: Age (day) Value: 28
  misc_feature: MA Experiment 20001560 PARAMETER Experiment Name: At_Drought_Soil_Dry_P Parameter: Organism Value: A. thaliana
  misc_feature: MA Experiment 20001560 PARAMETER Experiment Name: At_Drought_Soil_Dry_P Parameter: Plant Line Value: WS
  misc_feature: MA Experiment 20001560 PARAMETER Experiment Name: At_Drought_Soil_Dry_P Parameter: Post Timepoint (hr) Value: None
  misc_feature: MA Experiment 20001560 PARAMETER Experiment Name: At_Drought_Soil_Dry_P Parameter: Post-Treatment Value: None
  misc_feature: MA Experiment 20001560 PARAMETER Experiment Name: At_Drought_Soil_Dry_P Parameter: Timepoint (day) Value: 14
  misc_feature: MA Experiment 20001560 PARAMETER Experiment Name: At_Drought_Soil_Dry_P Parameter: Treatment Value: Drought vs. No Drought
  misc_feature: MA Experiment ID: 20001757 Result: Up-regulated in Transcription
  misc_feature: MA Experiment 20001757 PARAMETER Experiment Name: At_50mM_NH4NO3_L-to-H_P Parameter: Timepoint (hr) Value: 6
  misc_feature: MA Experiment 20001757 PARAMETER Experiment Name: At_50mM_NH4NO3_L-to-H_P Parameter: Tissue Value: Leaf
  misc_feature: MA Experiment 20001757 PARAMETER Experiment Name: At_50mM_NH4NO3_L-to-H_P Parameter: Treatment Value: 50mM NH4NO3 vs 100mM Mannitol
cctcctcgagtcctttccatcaggaccttatccacagtccacacacagcgagactctatttactcgccggcggaagaacaaaatggcgggaagagcgattttctctgtatcttgttcatctactccttccttgtgtatcccttattcaactgcttcgttttcatcgatgaatcgactggcgctccccgccgtccggatttctccccgaaccaacagatttcccaggattcactgctctatgtctgctaacgacatcaaagcgggaaccaatatcgaagtcgatggtgctccttggcgtgttcttgagtttcttcatgttaaaccaggaaaaggtgcggcatttgtgagaactaagatcaggaactatgtgaatggtagcacagtcgagagaacatttcgtgctggaatttctgttgaggaagctaatatatataaagaaaccaaacaattcacatacaaagatgggtctcagtttgttttcatggatttgaccacatacgaagaaacacgtcttaacgaatctgatatgggtgagaagacgaaatggttgaaagaaggaatggattgcattttgctctattggaaagacaaggttatcgatttcgatctaccgattacagttaagctaaaagtggttgacgttgatcctggccttcgcggtgatactgtgcaaggtggatcaaaaccggcgacaatggaaacgggtgcaatagttgctgtaccactctttattaacgtcggtgaagagatatttgtggacacaagaactggtgcatacatgaaccgagcgtgatccgggtctactacacctagttaattgggtcgttaacaacaaggcaatgatacatcttttttgtatatgagaatgttcgaatccggggacacatgtttgtttttctgaacatcgagagacaatttttcgattaaataaatttat

SEQ ID NO: 26246 - protein, 263 aa, Arabidopsis thaliana
  peptide (1)..(263): Ceres Seq. ID no. 12331740
  misc_feature (79)..(263): Pfam Name: Elongation factor P (EF-P) Pfam Description: Elongation factor P (EF-P)
  misc_feature (80)..(263): Homolog of NCBI NO: 30022280 NR Description: Protein Translation Elongation Factor P (EF-P)
  misc_feature (80)..(262): Homolog of NCBI NO: 33239478 NR Description: Translation elongation factor P
  misc_feature (80)..(262): Homolog of NCBI NO: 37520854 NR Description: elongation factor P [Gloeobacter violaceus]
  misc_feature (80)..(262): Homolog of NCBI NO: 16331453 NR Description: elongation factor P [Synechocystis sp. PCC 6803]
  misc_feature (80)..(262): Homolog of NCBI NO: 22298837 NR Description: translation elongation factor EF-P
  misc_feature (80)..(262): Homolog of NCBI NO: 23125000 NR Description: hypothetical protein [Nostoc punctiforme]
  misc_feature (80)..(262): Homolog of NCBI NO: 23042812 NR Description: hypothetical protein [Trichodesmium erythraeum
  misc_feature (80)..(262): Homolog of NCBI NO: 2494275 NR Description: Elongation factor P (EF-P)
  misc_feature (80)..(263): Homolog of NCBI NO: 12322730 NR Description: putative elongation factor P (EF-P); 66839-65711
  misc_feature (28)..(263): Homolog of NCBI NO: 18398225 NR Description: putative elongation factor P (EF-P)
LLESFPSGPYPQSTHSETLFTRRRKNKMAGRAIFSVSCSSTPSLCIPYSTASFSSMNRLALPAVRISPRTNRFPRIHCSMSANDIKAGTNIEVDGAPWRVLEFLHVKPGKGAAFVRTKIRNYVNGSTVERTFRAGISVEEANIYKETKQFTYKDGSQFVFMDLTTYEETRLNESDMGEKTKWLKEGMDCILLYWKDKVIDFDLPITVKLKVVDVDPGLRGDTVQGGSKPATMETGAIVAVPLFINVGEEIFVDTRTGAYMNRA

SEQ ID NO: 26247 - protein, 236 aa, Arabidopsis thaliana
  peptide (1)..(236): Ceres Seq. ID no. 12331741
  misc_feature (52)..(236): Pfam Name: Elongation factor P (EF-P) Pfam Description: Elongation factor P (EF-P)
  misc_feature (53)..(236): Homolog of NCBI NO: 30022280 NR Description: Protein Translation Elongation Factor P (EF-P)
  misc_feature (53)..(235): Homolog of NCBI NO: 33239478 NR Description: Translation elongation factor P
  misc_feature (53)..(235): Homolog of NCBI NO: 37520854 NR Description: elongation factor P [Gloeobacter violaceus]
  misc_feature (53)..(235): Homolog of NCBI NO: 16331453 NR Description: elongation factor P [Synechocystis sp. PCC 6803]
  misc_feature (53)..(235): Homolog of NCBI NO: 22298837 NR Description: translation elongation factor EF-P
  misc_feature (53)..(235): Homolog of NCBI NO: 23125000 NR Description: hypothetical protein [Nostoc punctiforme]
  misc_feature (53)..(235): Homolog of NCBI NO: 23042812 NR Description: hypothetical protein [Trichodesmium erythraeum
  misc_feature (53)..(235): Homolog of NCBI NO: 2494275 NR Description: Elongation factor P (EF-P)
  misc_feature (53)..(236): Homolog of NCBI NO: 12322730 NR Description: putative elongation factor P (EF-P); 66839-65711
  misc_feature (1)..(236): Homolog of NCBI NO: 18398225 NR Description: putative elongation factor P (EF-P)
MAGRAIFSVSCSSTPSLCIPYSTASFSSMNRLALPAVRISPRTNRFPRIHCSMSANDIKAGTNIEVDGAPWRVLEFLHVKPGKGAAFVRTKIRNYVNGSTVERTFRAGISVEEANIYKETKQFTYKDGSQFVFMDLTTYEETRLNESDMGEKTKWLKEGMDCILLYWKDKVIDFDLPITVKLKVVDVDPGLRGDTVQGGSKPATMETGAIVAVPLFINVGEEIFVDTRTGAYMNRA

SEQ ID NO: 26248 - protein, 208 aa, Arabidopsis thaliana
  peptide (1)..(208): Ceres Seq. ID no. 12331742
  misc_feature (24)..(208): Pfam Name: Elongation factor P (EF-P) Pfam Description: Elongation factor P (EF-P)
  misc_feature (25)..(208): Homolog of NCBI NO: 30022280 NR Description: Protein Translation Elongation Factor P (EF-P)
  misc_feature (25)..(207): Homolog of NCBI NO: 33239478 NR Description: Translation elongation factor P
  misc_feature (25)..(207): Homolog of NCBI NO: 37520854 NR Description: elongation factor P [Gloeobacter violaceus]
  misc_feature (25)..(207): Homolog of NCBI NO: 16331453 NR Description: elongation factor P [Synechocystis sp. PCC 6803]
  misc_feature (25)..(207): Homolog of NCBI NO: 22298837 NR Description: translation elongation factor EF-P
  misc_feature (25)..(207): Homolog of NCBI NO: 23125000 NR Description: hypothetical protein [Nostoc punctiforme]
  misc_feature (25)..(207): Homolog of NCBI NO: 23042812 NR Description: hypothetical protein [Trichodesmium erythraeum
  misc_feature (25)..(207): Homolog of NCBI NO: 2494275 NR Description: Elongation factor P (EF-P)
  misc_feature (25)..(208): Homolog of NCBI NO: 12322730 NR Description: putative elongation factor P (EF-P); 66839-65711
  misc_feature (1)..(208): Homolog of NCBI NO: 18398225 NR Description: putative elongation factor P (EF-P)
MNRLALPAVRISPRTNRFPRIHCSMSANDIKAGTNIEVDGAPWRVLEFLHVKPGKGAAFVRTKIRNYVNGSTVERTFRAGISVEEANIYKETKQFTYKDGSQFVFMDLTTYEETRLNESDMGEKTKWLKEGMDCILLYWKDKVIDFDLPITVKLKVVDVDPGLRGDTVQGGSKPATMETGAIVAVPLFINVGEEIFVDTRTGAYMNRA

SEQ ID NO: 26249 - DNA, 1013 bp, Arabidopsis thaliana
  misc_feature (1)..(1013): Ceres Seq. ID no. 12580328
  misc_feature: MA Experiment ID: 108434 Result: Up-regulated in Transcription
  misc_feature: MA Experiment 108434 PARAMETER Experiment Name: At_Root_Tips_cDNA_P Parameter: Tissue Value: Root Tips
  misc_feature: MA Experiment ID: 108461 Result: Up-regulated in Transcription
  misc_feature: MA Experiment 108461 PARAMETER Experiment Name: At_Germinating_Seeds_cDNA_P Parameter: Age (day) Value: 1 vs. 0
  misc_feature: MA Experiment 108461 PARAMETER Experiment Name: At_Germinating_Seeds_cDNA_P Parameter: Tissue Value: Germinating Seeds
  misc_feature: MA Experiment ID: 108462 Result: Up-regulated in Transcription
  misc_feature: MA Experiment 108462 PARAMETER Experiment Name: At_Germinating_Seeds_cDNA_P Parameter: Age (day) Value: 2 vs. 0
  misc_feature: MA Experiment 108462 PARAMETER Experiment Name: At_Germinating_Seeds_cDNA_P Parameter: Tissue Value: Germinating Seeds
  misc_feature: MA Experiment ID: 20000113 Result: Down-regulated in Transcription
  misc_feature: MA Experiment 20000113 PARAMETER Experiment Name: At_42deg_Heat_cDNA_P Parameter: Temperature (deg C) Value: 42 vs. 22
  misc_feature: MA Experiment 20000113 PARAMETER Experiment Name: At_42deg_Heat_cDNA_P Parameter: Timepoint (hr) Value: 8
  misc_feature: MA Experiment 20000113 PARAMETER Experiment Name: At_42deg_Heat_cDNA_P Parameter: Tissue Value: Aerial
  misc_feature: MA Experiment ID: 20000179 Result: Up-regulated in Transcription
  misc_feature: MA Experiment 20000179 PARAMETER Experiment Name: At_Germinating_Seeds_P Parameter: Age (hr) Value: 6 vs. 0
  misc_feature: MA Experiment 20000179 PARAMETER Experiment Name: At_Germinating_Seeds_P Parameter: Tissue Value: Germinating Seeds
ataagaaagaaagtcgtgaagatgagaggcgtaacaccaaactattaccattcttacactttcttcttcttcttcttcgttgtcttattagctctgtttcttcatgttttctcgataaacactttgtcatctacagaaactctaacaatctcaagcaaccgaaccattgtgtctcccggtaacatcttcgagctaggtttctgtagatgacaaagtgtttatcgagaaaagaagaagaaaagatctgagaggtggtcgaatgatccaagagaagaagaacaatctctcttagatcgtttgatctgatccaatcgaagaagaagaagaagatgggaatcttattcacgcggatgttctcttccgtctttggtaacaaagaagctcgaatcctcgtcctcggtctcgacaatgctggaaaaaccacaatcctctatcggcttcagatgggggaagttgtctctacgattccgactattggatttaacgttgagactgtgcagtacaacaatatcaagtttcaggtctgggatttaggtggacaaacaagcatcaggccatactggcgatgctatttcccgaatacacaagcagtgatctatgttgttgactcgagtgatacagatagaatcggggtggcgaaagaggagtttcatgcaattttagaggaagatgaattgaaaggtgcggtggttctgatatttgcaaacaagcaggatcttcccggtgcactcgatgatgcggctgttacagaagccttggagttgcataagataaagagtcgtcaatgggcaatcttcaaaacttgtgctgtgaaaggcgagggacttttcgagggattggactggttgagtaatacattgaagtcgggaagtggctaaaatcatcgtcatacaccaatctgtcacatttctcaagagtgtaactttgatcatttttacttattggtttgtttagtatttttttttgtcttagttcttcatcttaaagagttaatatcaatgacatgttcactc

SEQ ID NO: 26250 - protein, 182 aa, Arabidopsis thaliana
  peptide (1)..(182): Ceres Seq. ID no. 12580329
  misc_feature (4)..(177): Pfam Name: ADP-ribosylation factor family Pfam Description: ADP-ribosylation factor family
  misc_feature (4)..(177): Pfam Name: ADP-ribosylation factor family Pfam Description: ADP-ribosylation factor family
  misc_feature (4)..(177): Pfam Name: ADP-ribosylation factor family Pfam Description: ADP-ribosylation factor family
  misc_feature (1)..(179): Homolog of NCBI NO: 11131023 NR Description: ADP-ribosylation factor 1
  misc_feature (1)..(179): Homolog of NCBI NO: 39653273 NR Description: ADP-ribosylation factor [Medicago sativa]
  misc_feature (1)..(181): Homolog of NCBI NO: 31240205 NR Description: ENSANGP00000015770 [Anopheles gambiae]
  misc_feature (1)..(179): Homolog of NCBI NO: 29124979 NR Description: ADP-ribosylation factor 1 [Populus tremuloides]
  misc_feature (1)..(179): Homolog of NCBI NO: 4502227 NR Description: ADP-ribosylation factor-like 1 [Homo sapiens]
  misc_feature (1)..(179): Homolog of NCBI NO: 11131023 NR Description: ADP-ribosylation factor 1
  misc_feature (1)..(181): Homolog of NCBI NO: 31240205 NR Description: ENSANGP00000015770 [Anopheles gambiae]
  misc_feature (1)..(179): Homolog of NCBI NO: 4502227 NR Description: ADP-ribosylation factor-like 1 [Homo sapiens]
  misc_feature (1)..(179): Homolog of NCBI NO: 29124979 NR Description: ADP-ribosylation factor 1 [Populus tremuloides]
  misc_feature (1)..(181): Homolog of NCBI NO: 31240205 NR Description: ENSANGP00000015770 [Anopheles gambiae]
  misc_feature (1)..(179): Homolog of NCBI NO: 39653273 NR Description: ADP-ribosylation factor [Medicago sativa]
  misc_feature (1)..(179): Homolog of NCBI NO: 11131023 NR Description: ADP-ribosylation factor 1
  misc_feature (1)..(182): Homolog of NCBI NO: 30682545 NR Description: ADP-ribosylation factor 3 (ARF3) [Arabidopsis
  misc_feature (1)..(182): Homolog of NCBI NO: 3182922 NR Description: ADP-ribosylation factor 1
  misc_feature (1)..(181): Homolog of NCBI NO: 40253742 NR Description: putative ADP-ribosylation factor 3
  misc_feature (1)..(179): Homolog of NCBI NO: 13385340 NR Description: ADP-ribosylation-like 1 [Mus musculus]
  misc_feature (1)..(179): Homolog of NCBI NO: 11693150 NR Description: ADP-ribosylation factor-like 1 [Rattus
  misc_feature (1)..(182): Homolog of NCBI NO: 30682545 NR Description: ADP-ribosylation factor 3 (ARF3) [Arabidopsis
  misc_feature (1)..(182): Homolog of NCBI NO: 3182922 NR Description: ADP-ribosylation factor 1
  misc_feature (1)..(181): Homolog of NCBI NO: 40253742 NR Description: putative ADP-ribosylation factor 3
  misc_feature (1)..(179): Homolog of NCBI NO: 13385340 NR Description: ADP-ribosylation-like 1 [Mus musculus]
  misc_feature (1)..(179): Homolog of NCBI NO: 11693150 NR Description: ADP-ribosylation factor-like 1 [Rattus
  misc_feature (1)..(179): Homolog of NCBI NO: 4502227 NR Description: ADP-ribosylation factor-like 1 [Homo sapiens]
  misc_feature (1)..(179): Homolog of NCBI NO: 29124979 NR Description: ADP-ribosylation factor 1 [Populus tremuloides]
  misc_feature (1)..(179): Homolog of NCBI NO: 39653273 NR Description: ADP-ribosylation factor [Medicago sativa]
  misc_feature (1)..(179): Homolog of NCBI NO: 11693150 NR Description: ADP-ribosylation factor-like 1 [Rattus
  misc_feature (1)..(179): Homolog of NCBI NO: 13385340 NR Description: ADP-ribosylation-like 1 [Mus musculus]
  misc_feature (1)..(181): Homolog of NCBI NO: 40253742 NR Description: putative ADP-ribosylation factor 3
  misc_feature (1)..(182): Homolog of NCBI NO: 3182922 NR Description: ADP-ribosylation factor 1
  misc_feature (1)..(182): Homolog of NCBI NO: 30682545 NR Description: ADP-ribosylation factor 3 (ARF3) [Arabidopsis
MGILFTRMFSSVFGNKEARILVLGLDNAGKTTILYRLQMGEVVSTIPTIGFNVETVQYNNIKFQVWDLGGQTSIRPYWRCYFPNTQAVIYVVDSSDTDRIGVAKEEFHAILEEDELKGAVVLIFANKQDLPGALDDAAVTEALELHKIKSRQWAIFKTCAVKGEGLFEGLDWLSNTLKSGSG

SEQ ID NO: 26251 - protein, 175 aa, Arabidopsis thaliana
  peptide (1)..(175): Ceres Seq. ID no. 12580330
  misc_feature (1)..(170): Pfam Name: ADP-ribosylation factor family Pfam Description: ADP-ribosylation factor family
  misc_feature (1)..(170): Pfam Name: ADP-ribosylation factor family Pfam Description: ADP-ribosylation factor family
  misc_feature (1)..(170): Pfam Name: ADP-ribosylation factor family Pfam Description: ADP-ribosylation factor family
  misc_feature (1)..(172): Homolog of NCBI NO: 11131023 NR Description: ADP-ribosylation factor 1
  misc_feature (1)..(172): Homolog of NCBI NO: 39653273 NR Description: ADP-ribosylation factor [Medicago sativa]
  misc_feature (1)..(174): Homolog of NCBI NO: 31240205 NR Description: ENSANGP00000015770 [Anopheles gambiae]
  misc_feature (1)..(172): Homolog of NCBI NO: 29124979 NR Description: ADP-ribosylation factor 1 [Populus tremuloides]
  misc_feature (1)..(172): Homolog of NCBI NO: 4502227 NR Description: ADP-ribosylation factor-like 1 [Homo sapiens]
  misc_feature (1)..(172): Homolog of NCBI NO: 11131023 NR Description: ADP-ribosylation factor 1
  misc_feature (1)..(174): Homolog of NCBI NO: 31240205 NR Description: ENSANGP00000015770 [Anopheles gambiae]
  misc_feature (1)..(172): Homolog of NCBI NO: 4502227 NR Description: ADP-ribosylation factor-like 1 [Homo sapiens]
  misc_feature (1)..(172): Homolog of NCBI NO: 29124979 NR Description: ADP-ribosylation factor 1 [Populus tremuloides]
  misc_feature (1)..(174): Homolog of NCBI NO: 31240205 NR Description: ENSANGP00000015770 [Anopheles gambiae]
  misc_feature (1)..(172): Homolog of NCBI NO: 39653273 NR Description: ADP-ribosylation factor [Medicago sativa]
  misc_feature (1)..(172): Homolog of NCBI NO: 11131023 NR Description: ADP-ribosylation factor 1
  misc_feature (1)..(175): Homolog of NCBI NO: 30682545 NR Description: ADP-ribosylation factor 3 (ARF3) [Arabidopsis
  misc_feature (1)..(175): Homolog of NCBI NO: 3182922 NR Description: ADP-ribosylation factor 1
  misc_feature (1)..(174): Homolog of NCBI NO: 40253742 NR Description: putative ADP-ribosylation factor 3
  misc_feature (1)..(172): Homolog of NCBI NO: 13385340 NR Description: ADP-ribosylation-like 1 [Mus musculus]
  misc_feature (1)..(172): Homolog of NCBI NO: 11693150 NR Description: ADP-ribosylation factor-like 1 [Rattus
  misc_feature (1)..(175): Homolog of NCBI NO: 30682545 NR Description: ADP-ribosylation factor 3 (ARF3) [Arabidopsis
  misc_feature (1)..(175): Homolog of NCBI NO: 3182922 NR Description: ADP-ribosylation factor 1
  misc_feature (1)..(174): Homolog of NCBI NO: 40253742 NR Description: putative ADP-ribosylation factor 3
  misc_feature (1)..(172): Homolog of NCBI NO: 13385340 NR Description: ADP-ribosylation-like 1 [Mus musculus]
  misc_feature (1)..(172): Homolog of NCBI NO: 11693150 NR Description: ADP-ribosylation factor-like 1 [Rattus
  misc_feature (1)..(172): Homolog of NCBI NO: 4502227 NR Description: ADP-ribosylation factor-like 1 [Homo sapiens]
  misc_feature (1)..(172): Homolog of NCBI NO: 29124979 NR Description: ADP-ribosylation factor 1 [Populus tremuloides]
  misc_feature (1)..(172): Homolog of NCBI NO: 39653273 NR Description: ADP-ribosylation factor [Medicago sativa]
  misc_feature (1)..(172): Homolog of NCBI NO: 11693150 NR Description: ADP-ribosylation factor-like 1 [Rattus
  misc_feature (1)..(172): Homolog of NCBI NO: 13385340 NR Description: ADP-ribosylation-like 1 [Mus musculus]
  misc_feature (1)..(174): Homolog of NCBI NO: 40253742 NR Description: putative ADP-ribosylation factor 3
  misc_feature (1)..(175): Homolog of NCBI NO: 3182922 NR Description: ADP-ribosylation factor 1
  misc_feature (1)..(175): Homolog of NCBI NO: 30682545 NR Description: ADP-ribosylation factor 3 (ARF3) [Arabidopsis
MFSSVFGNKEARILVLGLDNAGKTTILYRLQMGEVVSTIPTIGFNVETVQYNNIKFQVWDLGGQTSIRPYWRCYFPNTQAVIYVVDSSDTDRIGVAKEEFHAILEEDELKGAVVLIFANKQDLPGALDDAAVTEALELHKIKSRQWAIFKTCAVKGEGLFEGLDWLSNTLKSGSG

SEQ ID NO: 26252 - protein, 144 aa, Arabidopsis thaliana
  peptide (1)..(144): Ceres Seq. ID no. 12580331
  misc_feature (1)..(139): Pfam Name: ADP-ribosylation factor family Pfam Description: ADP-ribosylation factor family
  misc_feature (1)..(139): Pfam Name: ADP-ribosylation factor family Pfam Description: ADP-ribosylation factor family
  misc_feature (1)..(139): Pfam Name: ADP-ribosylation factor family Pfam Description: ADP-ribosylation factor family
  misc_feature (1)..(141): Homolog of NCBI NO: 11131023 NR Description: ADP-ribosylation factor 1
  misc_feature (1)..(141): Homolog of NCBI NO: 39653273 NR Description: ADP-ribosylation factor [Medicago sativa]
  misc_feature (1)..(143): Homolog of NCBI NO: 31240205 NR Description: ENSANGP00000015770 [Anopheles gambiae]
  misc_feature (1)..(141): Homolog of NCBI NO: 29124979 NR Description: ADP-ribosylation factor 1 [Populus tremuloides]
  misc_feature (1)..(141): Homolog of NCBI NO: 4502227 NR Description: ADP-ribosylation factor-like 1 [Homo sapiens]
  misc_feature (1)..(141): Homolog of NCBI NO: 11131023 NR Description: ADP-ribosylation factor 1
  misc_feature (1)..(143): Homolog of NCBI NO: 31240205 NR Description: ENSANGP00000015770 [Anopheles gambiae]
  misc_feature (1)..(141): Homolog of NCBI NO: 4502227 NR Description: ADP-ribosylation factor-like 1 [Homo sapiens]
  misc_feature (1)..(141): Homolog of NCBI NO: 29124979 NR Description: ADP-ribosylation factor 1 [Populus tremuloides]
  misc_feature (1)..(143): Homolog of NCBI NO: 31240205 NR Description: ENSANGP00000015770 [Anopheles gambiae]
  misc_feature (1)..(141): Homolog of NCBI NO: 39653273 NR Description: ADP-ribosylation factor [Medicago sativa]
  misc_feature (1)..(141): Homolog of NCBI NO: 11131023 NR Description: ADP-ribosylation factor 1
  misc_feature (1)..(144): Homolog of NCBI NO: 30682545 NR Description: ADP-ribosylation factor 3 (ARF3) [Arabidopsis
  misc_feature (1)..(144): Homolog of NCBI NO: 3182922 NR Description: ADP-ribosylation factor 1
  misc_feature (1)..(143): Homolog of NCBI NO: 40253742 NR Description: putative ADP-ribosylation factor 3
  misc_feature (1)..(141): Homolog of NCBI NO: 13385340 NR Description: ADP-ribosylation-like 1 [Mus musculus]
  misc_feature (1)..(141): Homolog of NCBI NO: 11693150 NR Description: ADP-ribosylation factor-like 1 [Rattus
  misc_feature (1)..(144): Homolog of NCBI NO: 30682545 NR Description: ADP-ribosylation factor 3 (ARF3) [Arabidopsis
  misc_feature (1)..(144): Homolog of NCBI NO: 3182922 NR Description: ADP-ribosylation factor 1
  misc_feature (1)..(143): Homolog of NCBI NO: 40253742 NR Description: putative ADP-ribosylation factor 3
  misc_feature (1)..(141): Homolog of NCBI NO: 13385340 NR Description: ADP-ribosylation-like 1 [Mus musculus]
  misc_feature (1)..(141): Homolog of NCBI NO: 11693150 NR Description: ADP-ribosylation factor-like 1 [Rattus
  misc_feature (1)..(141): Homolog of NCBI NO: 4502227 NR Description: ADP-ribosylation factor-like 1 [Homo sapiens]
  misc_feature (1)..(141): Homolog of NCBI NO: 29124979 NR Description: ADP-ribosylation factor 1 [Populus tremuloides]
  misc_feature (1)..(141): Homolog of NCBI NO: 39653273 NR Description: ADP-ribosylation factor [Medicago sativa]
  misc_feature (1)..(141): Homolog of NCBI NO: 11693150 NR Description: ADP-ribosylation factor-like 1 [Rattus
  misc_feature (1)..(141): Homolog of NCBI NO: 13385340 NR Description: ADP-ribosylation-like 1 [Mus musculus]
  misc_feature (1)..(143): Homolog of NCBI NO: 40253742 NR Description: putative ADP-ribosylation factor 3
  misc_feature (1)..(144): Homolog of NCBI NO: 3182922 NR Description: ADP-ribosylation factor 1
  misc_feature (1)..(144): Homolog of NCBI NO: 30682545 NR Description: ADP-ribosylation factor 3 (ARF3) [Arabidopsis
MGEVVSTIPTIGFNVETVQYNNIKFQVWDLGGQTSIRPYWRCYFPNTQAVIYVVDSSDTDRIGVAKEEFHAILEEDELKGAVVLIFANKQDLPGALDDAAVTEALELHKIKSRQWAIFKTCAVKGEGLFEGLDWLSNTLKSGSG

SEQ ID NO: 26253 - DNA, 734 bp, Arabidopsis thaliana
  misc_feature (1)..(734): Ceres Seq. ID no. 13486941
  misc_feature: MA Experiment ID: 108434 Result: Up-regulated in Transcription
  misc_feature: MA Experiment 108434 PARAMETER Experiment Name: At_Root_Tips_cDNA_P Parameter: Tissue Value: Root Tips
  misc_feature: MA Experiment ID: 108461 Result: Down-regulated in Transcription
  misc_feature: MA Experiment 108461 PARAMETER Experiment Name: At_Germinating_Seeds_cDNA_P Parameter: Age (day) Value: 1 vs. 0
  misc_feature: MA Experiment 108461 PARAMETER Experiment Name: At_Germinating_Seeds_cDNA_P Parameter: Tissue Value: Germinating Seeds
  misc_feature: MA Experiment ID: 108469 Result: Up-regulated in Transcription
  misc_feature: MA Experiment ID: 108489 Result: Down-regulated in Transcription
  misc_feature: MA Experiment ID: 108561 Result: Up-regulated in Transcription
  misc_feature: MA Experiment 108561 PARAMETER Experiment Name: At_100uM_ABA_cDNA_P Parameter: Timepoint (hr) Value: 6
  misc_feature: MA Experiment 108561 PARAMETER Experiment Name: At_100uM_ABA_cDNA_P Parameter: Tissue Value: Aerial
  misc_feature: MA Experiment 108561 PARAMETER Experiment Name: At_100uM_ABA_cDNA_P Parameter: Treatment Value: 100uM ABA vs. No Treatment
  misc_feature: MA Experiment ID: 108576 Result: Up-regulated in Transcription
  misc_feature: MA Experiment 108576 PARAMETER Experiment Name: At_42deg_Heat_cDNA_P Parameter: Temperature (deg C) Value: 42 vs. 22
  misc_feature: MA Experiment 108576 PARAMETER Experiment Name: At_42deg_Heat_cDNA_P Parameter: Timepoint (hr) Value: 1
  misc_feature: MA Experiment 108576 PARAMETER Experiment Name: At_42deg_Heat_cDNA_P Parameter: Tissue Value: Aerial
  misc_feature: MA Experiment ID: 108577 Result: Up-regulated in Transcription
  misc_feature: MA Experiment 108577 PARAMETER Experiment Name: At_42deg_Heat_cDNA_P Parameter: Temperature (deg C) Value: 42 vs. 22
  misc_feature: MA Experiment 108577 PARAMETER Experiment Name: At_42deg_Heat_cDNA_P Parameter: Timepoint (hr) Value: 6
  misc_feature: MA Experiment 108577 PARAMETER Experiment Name: At_42deg_Heat_cDNA_P Parameter: Tissue Value: Aerial
  misc_feature: MA Experiment ID: 108667 Result: Up-regulated in Transcription
  misc_feature: MA Experiment 108667 PARAMETER Experiment Name: At_2mM_SA_cDNA_P Parameter: Plant Line Value: WS
  misc_feature: MA Experiment 108667 PARAMETER Experiment Name: At_2mM_SA_cDNA_P Parameter: Timepoint (hr) Value: 1
  misc_feature: MA Experiment 108667 PARAMETER Experiment Name: At_2mM_SA_cDNA_P Parameter: Treatment Value: 2mM SA vs. No Treatment
  misc_feature: MA Experiment ID: 20000087 Result: Up-regulated in Transcription
  misc_feature: MA Experiment 20000087 PARAMETER Experiment Name: At_100uM_ABA_Mutants_cDNA_P Parameter: Plant Line Value: WS
  misc_feature: MA Experiment 20000087 PARAMETER Experiment Name: At_100uM_ABA_Mutants_cDNA_P Parameter: Timepoint (hr) Value: 6
  misc_feature: MA Experiment 20000087 PARAMETER Experiment Name: At_100uM_ABA_Mutants_cDNA_P Parameter: Tissue Value: Aerial
  misc_feature: MA Experiment 20000087 PARAMETER Experiment Name: At_100uM_ABA_Mutants_cDNA_P Parameter: Treatment Value: 100uM ABA vs. No Treatment
  misc_feature: MA Experiment ID: 20000090 Result: Up-regulated in Transcription
  misc_feature: MA Experiment ID: 20000093 Result: Up-regulated in Transcription
  misc_feature: MA Experiment 20000093 PARAMETER Experiment Name: At_42deg_Heat_cDNA_P Parameter: Temperature (deg C) Value: 42 vs. 22
  misc_feature: MA Experiment 20000093 PARAMETER Experiment Name: At_42deg_Heat_cDNA_P Parameter: Timepoint (hr) Value: 0.5
  misc_feature: MA Experiment 20000093 PARAMETER Experiment Name: At_42deg_Heat_cDNA_P Parameter: Tissue Value: Aerial
  misc_feature: MA Experiment ID: 20000112 Result: Up-regulated in Transcription
  misc_feature: MA Experiment 20000112 PARAMETER Experiment Name: At_42deg_Heat_cDNA_P Parameter: Temperature (deg C) Value: 42 vs. 22
  misc_feature: MA Experiment 20000112 PARAMETER Experiment Name: At_42deg_Heat_cDNA_P Parameter: Timepoint (hr) Value: 2
  misc_feature: MA Experiment 20000112 PARAMETER Experiment Name: At_42deg_Heat_cDNA_P Parameter: Tissue Value: Aerial
  misc_feature: MA Experiment ID: 20000113 Result: Up-regulated in Transcription
  misc_feature: MA Experiment 20000113 PARAMETER Experiment Name: At_42deg_Heat_cDNA_P Parameter: Temperature (deg C) Value: 42 vs. 22
  misc_feature: MA Experiment 20000113 PARAMETER Experiment Name: At_42deg_Heat_cDNA_P Parameter: Timepoint (hr) Value: 8
  misc_feature: MA Experiment 20000113 PARAMETER Experiment Name: At_42deg_Heat_cDNA_P Parameter: Tissue Value: Aerial
  misc_feature: MA Experiment ID: 20000171 Result: Up-regulated in Transcription
  misc_feature: MA Experiment 20000171 PARAMETER Experiment Name: At_42deg_Heat_P Parameter: Age (day) Value: 14
  misc_feature: MA Experiment 20000171 PARAMETER Experiment Name: At_42deg_Heat_P Parameter: Organism Value: A. thaliana
  misc_feature: MA Experiment 20000171 PARAMETER Experiment Name: At_42deg_Heat_P Parameter: Plant Line Value: WS
  misc_feature: MA Experiment 20000171 PARAMETER Experiment Name: At_42deg_Heat_P Parameter: Temperature (deg C) Value: 42 vs. 22
  misc_feature: MA Experiment 20000171 PARAMETER Experiment Name: At_42deg_Heat_P Parameter: Timepoint (hr) Value: 1
  misc_feature: MA Experiment 20000171 PARAMETER Experiment Name: At_42deg_Heat_P Parameter: Tissue Value: Aerial
  misc_feature: MA Experiment ID: 20000173 Result: Up-regulated in Transcription
  misc_feature: MA Experiment 20000173 PARAMETER Experiment Name: At_42deg_Heat_P Parameter: Age (day) Value: 14
  misc_feature: MA Experiment 20000173 PARAMETER Experiment Name: At_42deg_Heat_P Parameter: Organism Value: A. thaliana
  misc_feature: MA Experiment 20000173 PARAMETER Experiment Name: At_42deg_Heat_P Parameter: Plant Line Value: WS
  misc_feature: MA Experiment 20000173 PARAMETER Experiment Name: At_42deg_Heat_P Parameter: Temperature (deg C) Value: 42 vs. 22
  misc_feature: MA Experiment 20000173 PARAMETER Experiment Name: At_42deg_Heat_P Parameter: Timepoint (hr) Value: 6
  misc_feature: MA Experiment 20000173 PARAMETER Experiment Name: At_42deg_Heat_P Parameter: Tissue Value: Aerial
  misc_feature: MA Experiment ID: 20000182 Result: Up-regulated in Transcription
  misc_feature: MA Experiment 20000182 PARAMETER Experiment Name: At_2mM_SA_P Parameter: Age (day) Value: 14
  misc_feature: MA Experiment 20000182 PARAMETER Experiment Name: At_2mM_SA_P Parameter: Organism Value: A. thaliana
  misc_feature: MA Experiment 20000182 PARAMETER Experiment Name: At_2mM_SA_P Parameter: Plant Line Value: WS
  misc_feature: MA Experiment 20000182 PARAMETER Experiment Name: At_2mM_SA_P Parameter: Timepoint (hr) Value: 6
  misc_feature: MA Experiment 20000182 PARAMETER Experiment Name: At_2mM_SA_P Parameter: Tissue Value: Aerial
  misc_feature: MA Experiment 20000182 PARAMETER Experiment Name: At_2mM_SA_P Parameter: Treatment Value: 2mM SA vs. No Treatment
  misc_feature: MA Experiment ID: 20000443 Result: Up-regulated in Transcription
  misc_feature: MA Experiment 20000443 PARAMETER Experiment Name: At_1uM_BR-BRZ__P Parameter: Tissue Value: Shoot Apices
  misc_feature: MA Experiment 20000443 PARAMETER Experiment Name: At_1uM_BR-BRZ__P Parameter: Treatment Value: 1uM BRZ vs. No Treatment
  misc_feature: MA Experiment ID: 20000453 Result: Up-regulated in Transcription
  misc_feature: MA Experiment 20000453 PARAMETER Experiment Name: At_100uM_ABA_P Parameter: Age (day) Value: 15
  misc_feature: MA Experiment 20000453 PARAMETER Experiment Name: At_100uM_ABA_P Parameter: Organism Value: A. thaliana
  misc_feature: MA Experiment 20000453 PARAMETER Experiment Name: At_100uM_ABA_P Parameter: Plant Line Value: WS
  misc_feature: MA Experiment 20000453 PARAMETER Experiment Name: At_100uM_ABA_P Parameter: Timepoint (hr) Value: 24
  misc_feature: MA Experiment 20000453 PARAMETER Experiment Name: At_100uM_ABA_P Parameter: Tissue Value: Aerial
  misc_feature: MA Experiment 20000453 PARAMETER Experiment Name: At_100uM_ABA_P Parameter: Treatment Value: 100uM ABA vs. No Treatment
  misc_feature: MA Experiment ID: 20000456 Result: Up-regulated in Transcription
  misc_feature: MA Experiment 20000456 PARAMETER Experiment Name: At_100uM_BA_P Parameter: Age (day) Value: 14
  misc_feature: MA Experiment 20000456 PARAMETER Experiment Name: At_100uM_BA_P Parameter: Organism Value: A. thaliana
  misc_feature: MA Experiment 20000456 PARAMETER Experiment Name: At_100uM_BA_P Parameter: Plant Line Value: WS
  misc_feature: MA Experiment 20000456 PARAMETER Experiment Name: At_100uM_BA_P Parameter: Timepoint (hr) Value: 6
  misc_feature: MA Experiment 20000456 PARAMETER Experiment Name: At_100uM_BA_P Parameter: Tissue Value: Aerial
  misc_feature: MA Experiment 20000456 PARAMETER Experiment Name: At_100uM_BA_P Parameter: Treatment Value: 100uM BA vs. No Treatment
  misc_feature: MA Experiment ID: 20000709 Result: Up-regulated in Transcription
  misc_feature: MA Experiment 20000709 PARAMETER Experiment Name: At_15mM_NH4NO3_L-to-H_P Parameter: Age (hr) Value: 14
  misc_feature: MA Experiment 20000709 PARAMETER Experiment Name: At_15mM_NH4NO3_L-to-H_P Parameter: Organism Value: A. thaliana
  misc_feature: MA Experiment 20000709 PARAMETER Experiment Name: At_15mM_NH4NO3_L-to-H_P Parameter: Plant Line Value: WS
  misc_feature: MA Experiment 20000709 PARAMETER Experiment Name: At_15mM_NH4NO3_L-to-H_P Parameter: Timepoint (hr) Value: 4
  misc_feature: MA Experiment 20000709 PARAMETER Experiment Name: At_15mM_NH4NO3_L-to-H_P Parameter: Tissue Value: Aerial
  misc_feature: MA Experiment 20000709 PARAMETER Experiment Name: At_15mM_NH4NO3_L-to-H_P Parameter: Treatment Value: 15mM NH4NO3 vs. 30mM Mannitol
  misc_feature: MA Experiment ID: 20001248 Result: Down-regulated in Transcription
  misc_feature: MA Experiment 20001248 PARAMETER Experiment Name: At_Far-red-induction_P Parameter: Age (day) Value: 7
  misc_feature: MA Experiment 20001248 PARAMETER Experiment Name: At_Far-red-induction_P Parameter: Light Value: Far-red vs. White
  misc_feature: MA Experiment 20001248 PARAMETER Experiment Name: At_Far-red-induction_P Parameter: Organism Value: A. thaliana
  misc_feature: MA Experiment 20001248 PARAMETER Experiment Name: At_Far-red-induction_P Parameter: Plant Line Value: Columbia
  misc_feature: MA Experiment 20001248 PARAMETER Experiment Name: At_Far-red-induction_P Parameter: Timepoint (hr) Value: 4
  misc_feature: MA Experiment 20001248 PARAMETER Experiment Name: At_Far-red-induction_P Parameter: Tissue Value: Whole Plant
  misc_feature: MA Experiment ID: 20001768 Result: Up-regulated in Transcription
  misc_feature: MA Experiment 20001768 PARAMETER Experiment Name: At_Far-red-enriched-adult_P Parameter: Age (day) Value: 28
  misc_feature: MA Experiment 20001768 PARAMETER Experiment Name: At_Far-red-enriched-adult_P Parameter: Light Value: Far-red enriched vs. White
  misc_feature: MA Experiment 20001768 PARAMETER Experiment Name: At_Far-red-enriched-adult_P Parameter: Organism Value: A. thaliana
  misc_feature: MA Experiment 20001768 PARAMETER Experiment Name: At_Far-red-enriched-adult_P Parameter: Plant Line Value: Columbia
  misc_feature: MA Experiment 20001768 PARAMETER Experiment Name: At_Far-red-enriched-adult_P Parameter: Timepoint (hr) Value: 1
  misc_feature: MA Experiment 20001768 PARAMETER Experiment Name: At_Far-red-enriched-adult_P Parameter: Tissue Value: Aerial
  misc_feature: MA Experiment ID: 20001772 Result: Up-regulated in Transcription
  misc_feature: MA Experiment 20001772 PARAMETER Experiment Name: At_Far-red-enriched-adult_P Parameter: Age (day) Value: 29
  misc_feature: MA Experiment 20001772 PARAMETER Experiment Name: At_Far-red-enriched-adult_P Parameter: Light Value: Far-red enriched vs. White
  misc_feature: MA Experiment 20001772 PARAMETER Experiment Name: At_Far-red-enriched-adult_P Parameter: Organism Value: A. thaliana
  misc_feature: MA Experiment 20001772 PARAMETER Experiment Name: At_Far-red-enriched-adult_P Parameter: Plant Line Value: Columbia
  misc_feature: MA Experiment 20001772 PARAMETER Experiment Name: At_Far-red-enriched-adult_P Parameter: Timepoint (hr) Value: 24
  misc_feature: MA Experiment 20001772 PARAMETER Experiment Name: At_Far-red-enriched-adult_P Parameter: Tissue Value: Aerial
  misc_feature: MA Experiment ID: 20001773 Result: Up-regulated in Transcription
  misc_feature: MA Experiment 20001773 PARAMETER Experiment Name: At_Far-red-enriched-adult_P Parameter: Age (day) Value: 30
  misc_feature: MA Experiment 20001773 PARAMETER Experiment Name: At_Far-red-enriched-adult_P Parameter: Light Value: Far-red enriched vs. White
  misc_feature: MA Experiment 20001773 PARAMETER Experiment Name: At_Far-red-enriched-adult_P Parameter: Organism Value: A. thaliana
  misc_feature: MA Experiment 20001773 PARAMETER Experiment Name: At_Far-red-enriched-adult_P Parameter: Plant Line Value: Columbia
  misc_feature: MA Experiment 20001773 PARAMETER Experiment Name: At_Far-red-enriched-adult_P Parameter: Timepoint (hr) Value: 48
  misc_feature: MA Experiment 20001773 PARAMETER Experiment Name: At_Far-red-enriched-adult_P Parameter: Tissue Value: Aerial
catcgctgtctggaacagcgatgactcgagaaccgaaagaaaacaaaaagccaagaatcaaagaatcaggaaagcaaacacaacacaactaacaatggatttaggaaggtttccaataatctcaatcctcgaagacatgcttgaagtccccgaagaccacaacaacgagaagacccgcaacaacccttcacgagtttacatgcgagacgctaaggcaatggctgctacacctgctgacgtcatcgagcaccctaacgcatatgcattcgtcgtggacatgcctggaatcaaaggagatgagatcaaggttcaggtcgagaacgacaatgtgcttgtggtgagtggagagaggcagagagagaacaaagaaaacgaaggtgtgaagtatgtgaggatggagagaagaatgggtaagttcatgaggaagtttcagttgcctgaaaatgcagatttggacaagatctctgctgtttgtcatgacggtgtgttgaaggttactgttcagaaacttcctcctccggaaccaaagaaaccaaagacaattcaagttcaagttgcttgagtttgttttgtgattgtgtgttggatttatctattttgttttgatttatggatttgatgaatgtaatcggaatgcgtgagggatatggtgttttgttctaagatgaaataaaagtttgttctgtttctttcattctcctttgggatattcaaattaatgaagttgttataag

SEQ ID NO: 26254 - protein, 186 aa, Arabidopsis thaliana
  peptide (1)..(186): Ceres Seq. ID no. 13486942
  misc_feature (30)..(186): Homolog of NCBI NO: 15239849 NR Description: heat shock protein 17.6A [Arabidopsis thaliana]
  misc_feature (32)..(168): Homolog of NCBI NO: 26452718 NR Description: putative heat shock protein 17.6-II [Arabidopsis
  misc_feature (32)..(186): Homolog of NCBI NO: 15239846 NR Description: class II heat shock protein [Arabidopsis
  misc_feature (32)..(186): Homolog of NCBI NO: 123550 NR Description: 17.1 KD CLASS II HEAT SHOCK PROTEIN
  misc_feature (32)..(186): Homolog of NCBI NO: 71498 NR Description: heat shock protein 17.7 - garden pea
  misc_feature (38)..(186): Homolog of NCBI NO: 3336894 NR Description: Hsp20.2 protein [Lycopersicon peruvianum]
  misc_feature (38)..(186): Homolog of NCBI NO: 7441320 NR Description: heat shock protein, 17.9K - parsley
  misc_feature (38)..(186): Homolog of NCBI NO: 7441328 NR Description: heat shock protein 17.6 - tomato
  misc_feature (34)..(186): Homolog of NCBI NO: 1170365 NR Description: 17.9 KD CLASS II HEAT SHOCK PROTEIN
  misc_feature (30)..(186): Homolog of NCBI NO: 2129610 NR Description: heat shock protein 17.7 - Arabidopsis thaliana
IAVWNSDDSRTERKQKAKNQRIRKANTTQLTMDLGRFPIISILEDMLEVPEDHNNEKTRNNPSRVYMRDAKAMAATPADVIEHPNAYAFVVDMPGIKGDEIKVQVENDNVLVVSGERQRENKENEGVKYVRMERRMGKFMRKFQLPENADLDKISAVCHDGVLKVTVQKLPPPEPKKPKTIQVQVA

SEQ ID NO: 26255 - protein, 155 aa, Arabidopsis thaliana
  peptide (1)..(155): Ceres Seq. ID no. 13486943
  misc_feature (1)..(155): Homolog of NCBI NO: 123550 NR Description: 17.1 KD CLASS II HEAT SHOCK PROTEIN
  misc_feature (1)..(155): Homolog of NCBI NO: 71498 NR Description: heat shock protein 17.7 - garden pea
  misc_feature (7)..(155): Homolog of NCBI NO: 3336894 NR Description: Hsp20.2 protein [Lycopersicon peruvianum]
  misc_feature (7)..(155): Homolog of NCBI NO: 7441320 NR Description: heat shock protein, 17.9K - parsley
  misc_feature (7)..(155): Homolog of NCBI NO: 7441328 NR Description: heat shock protein 17.6 - tomato
  misc_feature (3)..(155): Homolog of NCBI NO: 1170365 NR Description: 17.9 KD CLASS II HEAT SHOCK PROTEIN
  misc_feature (1)..(155): Homolog of NCBI NO: 2129610 NR Description: heat shock protein 17.7 - Arabidopsis thaliana
  misc_feature (1)..(155): Homolog of NCBI NO: 15239849 NR Description: heat shock protein 17.6A [Arabidopsis thaliana]
  misc_feature (1)..(137): Homolog of NCBI NO: 26452718 NR Description: putative heat shock protein 17.6-II [Arabidopsis
  misc_feature (1)..(155): Homolog of NCBI NO: 15239846 NR Description: class II heat shock protein [Arabidopsis
MDLGRFPIISILEDMLEVPEDHNNEKTRNNPSRVYMRDAKAMAATPADVIEHPNAYAFVVDMPGIKGDEIKVQVENDNVLVVSGERQRENKENEGVKYVRMERRMGKFMRKFQLPENADLDKISAVCHDGVLKVTVQKLPPPEPKKPKTIQVQVA

SEQ ID NO: 26256 - protein, 141 aa, Arabidopsis thaliana
  peptide (1)..(141): Ceres Seq. ID no. 13486944
  misc_feature (1)..(141): Homolog of NCBI NO: 123550 NR Description: 17.1 KD CLASS II HEAT SHOCK PROTEIN
  misc_feature (1)..(141): Homolog of NCBI NO: 71498 NR Description: heat shock protein 17.7 - garden pea
  misc_feature (1)..(141): Homolog of NCBI NO: 3336894 NR Description: Hsp20.2 protein [Lycopersicon peruvianum]
  misc_feature (1)..(141): Homolog of NCBI NO: 7441320 NR Description: heat shock protein, 17.9K - parsley
  misc_feature (1)..(141): Homolog of NCBI NO: 7441328 NR Description: heat shock protein 17.6 - tomato
  misc_feature (1)..(141): Homolog of NCBI NO: 1170365 NR Description: 17.9 KD CLASS II HEAT SHOCK PROTEIN
  misc_feature (1)..(141): Homolog of NCBI NO: 2129610 NR Description: heat shock protein 17.7 - Arabidopsis thaliana
  misc_feature (1)..(141): Homolog of NCBI NO: 15239849 NR Description: heat shock protein 17.6A [Arabidopsis thaliana]
  misc_feature (1)..(123): Homolog of NCBI NO: 26452718 NR Description: putative heat shock protein 17.6-II [Arabidopsis
  misc_feature (1)..(141): Homolog of NCBI NO: 15239846 NR Description: class II heat shock protein [Arabidopsis
MLEVPEDHNNEKTRNNPSRVYMRDAKAMAATPADVIEHPNAYAFVVDMPGIKGDEIKVQVENDNVLVVSGERQRENKENEGVKYVRMERRMGKFMRKFQLPENADLDKISAVCHDGVLKVTVQKLPPPEPKKPKTIQVQVA

SEQ ID NO: 26257 - DNA, 1168 bp, Arabidopsis thaliana
  misc_feature (1)..(1168): Ceres Seq. ID no. 13504863
  misc_feature: MA Experiment ID: 108577 Result: Down-regulated in Transcription
  misc_feature: MA Experiment 108577 PARAMETER Experiment Name: At_42deg_Heat_cDNA_P Parameter: Temperature (deg C) Value: 42 vs. 22
  misc_feature: MA Experiment 108577 PARAMETER Experiment Name: At_42deg_Heat_cDNA_P Parameter: Timepoint (hr) Value: 6
  misc_feature: MA Experiment 108577 PARAMETER Experiment Name: At_42deg_Heat_cDNA_P Parameter: Tissue Value: Aerial
  misc_feature: MA Experiment ID: 108668 Result: Up-regulated in Transcription
  misc_feature: MA Experiment 108668 PARAMETER Experiment Name: At_2mM_SA_cDNA_P Parameter: Plant Line Value: WS
  misc_feature: MA Experiment 108668 PARAMETER Experiment Name: At_2mM_SA_cDNA_P Parameter: Timepoint (hr) Value: 6
  misc_feature: MA Experiment 108668 PARAMETER Experiment Name: At_2mM_SA_cDNA_P Parameter: Treatment Value: 2mM SA vs. No Treatment
  misc_feature: MA Experiment ID: 20000069 Result: Up-regulated in Transcription
  misc_feature: MA Experiment 20000069 PARAMETER Experiment Name: At_100uM_ABA_Mutants_cDNA_P Parameter: Plant Line Value: CS23
  misc_feature: MA Experiment 20000069 PARAMETER Experiment Name: At_100uM_ABA_Mutants_cDNA_P Parameter: Timepoint (hr) Value: 6
  misc_feature: MA Experiment 20000069 PARAMETER Experiment Name: At_100uM_ABA_Mutants_cDNA_P Parameter: Tissue Value: Aerial
  misc_feature: MA Experiment 20000069 PARAMETER Experiment Name: At_100uM_ABA_Mutants_cDNA_P Parameter: Treatment Value: 100uM ABA vs. No Treatment
  misc_feature: MA Experiment ID: 20000111 Result: Down-regulated in Transcription
  misc_feature: MA Experiment 20000111 PARAMETER Experiment Name: At_42deg_Heat_cDNA_P Parameter: Temperature (deg C) Value: 42 vs. 22
  misc_feature: MA Experiment 20000111 PARAMETER Experiment Name: At_42deg_Heat_cDNA_P Parameter: Timepoint (hr) Value: 6
  misc_feature: MA Experiment 20000111 PARAMETER Experiment Name: At_42deg_Heat_cDNA_P Parameter: Tissue Value: Aerial
  misc_feature: MA Experiment ID: 20000180 Result: Up-regulated in Transcription
  misc_feature: MA Experiment 20000180 PARAMETER Experiment Name: At_Germinating_Seeds_P Parameter: Age (hr) Value: 24 vs. 0
  misc_feature: MA Experiment 20000180 PARAMETER Experiment Name: At_Germinating_Seeds_P Parameter: Tissue Value: Germinating Seeds
  misc_feature: MA Experiment ID: 20000182 Result: Up-regulated in Transcription
  misc_feature: MA Experiment 20000182 PARAMETER Experiment Name: At_2mM_SA_P Parameter: Age (day) Value: 14
  misc_feature: MA Experiment 20000182 PARAMETER Experiment Name: At_2mM_SA_P Parameter: Organism Value: A. thaliana
  misc_feature: MA Experiment 20000182 PARAMETER Experiment Name: At_2mM_SA_P Parameter: Plant Line Value: WS
  misc_feature: MA Experiment 20000182 PARAMETER Experiment Name: At_2mM_SA_P Parameter: Timepoint (hr) Value: 6
  misc_feature: MA Experiment 20000182 PARAMETER Experiment Name: At_2mM_SA_P Parameter: Tissue Value: Aerial
  misc_feature: MA Experiment 20000182 PARAMETER Experiment Name: At_2mM_SA_P Parameter: Treatment Value: 2mM SA vs. No Treatment
  misc_feature: MA Experiment ID: 20000184 Result: Down-regulated in Transcription
  misc_feature: MA Experiment 20000184 PARAMETER Experiment Name: At_Shoots__P Parameter: Age (day) Value: 7
  misc_feature: MA Experiment 20000184 PARAMETER Experiment Name: At_Shoots__P Parameter: Tissue Value: Shoots vs. Whole Plant
  misc_feature: MA Experiment ID: 20000437 Result: Up-regulated in Transcription
  misc_feature: MA Experiment 20000437 PARAMETER Experiment Name: At_Drought_P Parameter: Age (day) Value: 8
  misc_feature: MA Experiment 20000437 PARAMETER Experiment Name: At_Drought_P Parameter: Organism Value: A. thaliana
  misc_feature: MA Experiment 20000437 PARAMETER Experiment Name: At_Drought_P Parameter: Plant Line Value: WS
  misc_feature: MA Experiment 20000437 PARAMETER Experiment Name: At_Drought_P Parameter: Timepoint (hr) Value: 24
  misc_feature: MA Experiment 20000437 PARAMETER Experiment Name: At_Drought_P Parameter: Tissue Value: Whole Plant
  misc_feature: MA Experiment 20000437 PARAMETER Experiment Name: At_Drought_P Parameter: Treatment Value: Drought vs. No Drought
  misc_feature: MA Experiment ID: 20001905 Result: Up-regulated in Transcription
  misc_feature: MA Experiment 20001905 PARAMETER Experiment Name: At_Drought_Reproduction_P Parameter: Age (day) Value: 40
  misc_feature: MA Experiment 20001905 PARAMETER Experiment Name: At_Drought_Reproduction_P Parameter: Organism Value: A. thaliana
  misc_feature: MA Experiment 20001905 PARAMETER Experiment Name: At_Drought_Reproduction_P Parameter: Plant Line Value: WS
  misc_feature: MA Experiment 20001905 PARAMETER Experiment Name: At_Drought_Reproduction_P Parameter: Timepoint (day) Value: 10
  misc_feature: MA Experiment 20001905 PARAMETER Experiment Name: At_Drought_Reproduction_P Parameter: Tissue Value: Rosettes
  misc_feature: MA Experiment 20001905 PARAMETER Experiment Name: At_Drought_Reproduction_P Parameter: Treatment Value: Drought vs. No Drought
aaatagaaatttgtggtgcttcattggatcgacgaaaggcgtcccgatattgaggttcgttacgccggcgaagattttcatcggaaacttatctgatcgtttacgccggcgaagatttccatcggaaacttaatctgatcggaaggaagaaggctcgatgaagagcagattgaagagctacaggaggaagaagctagggttagccacagttatcgtcttctgttctctctgtttcctcttcggtttctatggctccactctactttctcagaatgtgcctcgtgttaaacccaggttgagaatgttggatatggttgagaatggggaagaagaagctagctcgatgcctcatggtgttactggagaagaatctattggatcgattccttttcaggtacttagttggagacctagggctatatattttccgaattttgcaactgcagaacaatgccaagctattattgagagagcaaaggttaatctgaaaccttctgctttggctctccggaaaggagaaactgctgagaacactaagggcactagaacaagctcaggaacttttatcagtgcttcagaagagagtactggtgctctggattttgttgaaaggaaaatcgcaagagctacgatgatcccaaggtcccatggagagtcattcaatattttacggtatgaacttggccaaaagtatgattcccactatgatgttttcaacccaacagaatatggaccacaatcaagccaaaggattgcctccttcctgttgtacttatctgatgttgaagaaggcggtgaaaccatgttcccatttgagaacggttctaatatgggcatcggatacgattacaagcaatgtattgggttgaaagtaaagcctcggaaaggagatggtcttcttttttattccgtgtttccaaatggaacgattgatcagacttcgcttcacgggagctgcccggtgaccaaaggagagaaatgggtggcaaccaaatggatcagagaccaagaccaggaagaataagttaggtttttttccatatatctatctcactctcacagcttctatcttttgactaaaaatctgctgctggatccctcgtgtacagttcttcgctgaaacagtgtaactatttagctttcttataatgcgaatgatacaaaaatc

SEQ ID NO: 26258 - protein, 288 aa, Arabidopsis thaliana
  peptide (1)..(288): Ceres Seq. ID no. 13504864
  misc_feature (164)..(283): Pfam Name: 2OG-Fe(II) oxygenase superfamily Pfam Description: 2OG-Fe(II) oxygenase superfamily
  misc_feature (68)..(281): Homolog of NCBI NO: 9294583 NR Description: prolyl 4-hydroxylase alpha subunit-like protein
  misc_feature (23)..(281): Homolog of NCBI NO: 18405808 NR Description: oxidoreductase, 2OG-Fe(II) oxygenase family
  misc_feature (23)..(281): Homolog of NCBI NO: 18086437 NR Description: AT3g28480/MFJ20_16 [Arabidopsis thaliana]
  misc_feature (79)..(281): Homolog of NCBI NO: 18394842 NR Description: oxidoreductase, 2OG-Fe(II) oxygenase family
  misc_feature (79)..(281): Homolog of NCBI NO: 21537370 NR Description: putative prolyl 4-hydroxylase, alpha subunit
  misc_feature (5)..(284): Homolog of NCBI NO: 30681957 NR Description: oxidoreductase -related [Arabidopsis thaliana]
  misc_feature (10)..(286): Homolog of NCBI NO: 14488368 NR Description: putative dioxygenase [Oryza sativa (japonica
  misc_feature (1)..(288): Homolog of NCBI NO: 40809925 NR Description: prolyl 4-hydroxylase [Nicotiana tabacum]
  misc_feature (52)..(262): Homolog of NCBI NO: 7485609 NR Description: hypothetical protein F17I5.100 - Arabidopsis
  misc_feature (1)..(288): Homolog of NCBI NO: 18418321 NR Description: oxidoreductase, 2OG-Fe(II) oxygenase family
MKSRLKSYRRKKLGLATVIVFCSLCFLFGFYGSTLLSQNVPRVKPRLRMLDMVENGEEEASSMPHGVTGEESIGSIPFQVLSWRPRAIYFPNFATAEQCQAIIERAKVNLKPSALALRKGETAENTKGTRTSSGTFISASEESTGALDFVERKIARATMIPRSHGESFNILRYELGQKYDSHYDVFNPTEYGPQSSQRIASFLLYLSDVEEGGETMFPFENGSNMGIGYDYKQCIGLKVKPRKGDGLLFYSVFPNGTIDQTSLHGSCPVTKGEKWVATKWIRDQDQEE

SEQ ID NO: 26259 - protein, 240 aa, Arabidopsis thaliana
  peptide (1)..(240): Ceres Seq. ID no. 13504865
  misc_feature (116)..(235): Pfam Name: 2OG-Fe(II) oxygenase superfamily Pfam Description: 2OG-Fe(II) oxygenase superfamily
  misc_feature (20)..(233): Homolog of NCBI NO: 9294583 NR Description: prolyl 4-hydroxylase alpha subunit-like protein
  misc_feature (1)..(233): Homolog of NCBI NO: 18405808 NR Description: oxidoreductase, 2OG-Fe(II) oxygenase family
  misc_feature (1)..(233): Homolog of NCBI NO: 18086437 NR Description: AT3g28480/MFJ20_16 [Arabidopsis thaliana]
  misc_feature (31)..(233): Homolog of NCBI NO: 18394842 NR Description: oxidoreductase, 2OG-Fe(II) oxygenase family
  misc_feature (31)..(233): Homolog of NCBI NO: 21537370 NR Description: putative prolyl 4-hydroxylase, alpha subunit
  misc_feature (1)..(236): Homolog of NCBI NO: 30681957 NR Description: oxidoreductase -related [Arabidopsis thaliana]
  misc_feature (1)..(238): Homolog of NCBI NO: 14488368 NR Description: putative dioxygenase [Oryza sativa (japonica
  misc_feature (1)..(240): Homolog of NCBI NO: 40809925 NR Description: prolyl 4-hydroxylase [Nicotiana tabacum]
  misc_feature (4)..(214): Homolog of NCBI NO: 7485609 NR Description: hypothetical protein F17I5.100 - Arabidopsis
  misc_feature (1)..(240): Homolog of NCBI NO: 18418321 NR Description: oxidoreductase, 2OG-Fe(II) oxygenase family
MLDMVENGEEEASSMPHGVTGEESIGSIPFQVLSWRPRAIYFPNFATAEQCQAIIERAKVNLKPSALALRKGETAENTKGTRTSSGTFISASEESTGALDFVERKIARATMIPRSHGESFNILRYELGQKYDSHYDVFNPTEYGPQSSQRIASFLLYLSDVEEGGETMFPFENGSNMGIGYDYKQCIGLKVKPRKGDGLLFYSVFPNGTIDQTSLHGSCPVTKGEKWVATKWIRDQDQEE

SEQ ID NO: 26260 - protein, 237 aa, Arabidopsis thaliana
  peptide (1)..(237): Ceres Seq. ID no. 13504866
  misc_feature (113)..(232): Pfam Name: 2OG-Fe(II) oxygenase superfamily Pfam Description: 2OG-Fe(II) oxygenase superfamily
  misc_feature (17)..(230): Homolog of NCBI NO: 9294583 NR Description: prolyl 4-hydroxylase alpha subunit-like protein
  misc_feature (1)..(230): Homolog of NCBI NO: 18405808 NR Description: oxidoreductase, 2OG-Fe(II) oxygenase family
  misc_feature (1)..(230): Homolog of NCBI NO: 18086437 NR Description: AT3g28480/MFJ20_16 [Arabidopsis thaliana]
  misc_feature (28)..(230): Homolog of NCBI NO: 18394842 NR Description: oxidoreductase, 2OG-Fe(II) oxygenase family
  misc_feature (28)..(230): Homolog of NCBI NO: 21537370 NR Description: putative prolyl 4-hydroxylase, alpha subunit
  misc_feature (1)..(233): Homolog of NCBI NO: 30681957 NR Description: oxidoreductase -related [Arabidopsis thaliana]
  misc_feature (1)..(235): Homolog of NCBI NO: 14488368 NR Description: putative dioxygenase [Oryza sativa (japonica
  misc_feature (1)..(237): Homolog of NCBI NO: 40809925 NR Description: prolyl 4-hydroxylase [Nicotiana tabacum]
  misc_feature (1)..(211): Homolog of NCBI NO: 7485609 NR Description: hypothetical protein F17I5.100 - Arabidopsis
  misc_feature (1)..(237): Homolog of NCBI NO: 18418321 NR Description: oxidoreductase, 2OG-Fe(II) oxygenase family
MVENGEEEASSMPHGVTGEESIGSIPFQVLSWRPRAIYFPNFATAEQCQAIIERAKVNLKPSALALRKGETAENTKGTRTSSGTFISASEESTGALDFVERKIARATMIPRSHGESFNILRYELGQKYDSHYDVFNPTEYGPQSSQRIASFLLYLSDVEEGGETMFPFENGSNMGIGYDYKQCIGLKVKPRKGDGLLFYSVFPNGTIDQTSLHGSCPVTKGEKWVATKWIRDQDQEE

SEQ ID NO: 26261 - DNA, 1067 bp, Arabidopsis thaliana
  misc_feature (1)..(1067): Ceres Seq. ID no. 12335644
  misc_feature: MA Experiment ID: 108501 Result: Down-regulated in Transcription
  misc_feature: MA Experiment 108501 PARAMETER Experiment Name: At_ap2_floral_buds_cDNA_P Parameter: Plant Line Value: ap2 (Ler.)
  misc_feature: MA Experiment 108501 PARAMETER Experiment Name: At_ap2_floral_buds_cDNA_P Parameter: Tissue Value: Closed Flower
  misc_feature: MA Experiment ID: 108561 Result: Down-regulated in Transcription
  misc_feature: MA Experiment 108561 PARAMETER Experiment Name: At_100uM_ABA_cDNA_P Parameter: Timepoint (hr) Value: 6
  misc_feature: MA Experiment 108561 PARAMETER Experiment Name: At_100uM_ABA_cDNA_P Parameter: Tissue Value: Aerial
  misc_feature: MA Experiment 108561 PARAMETER Experiment Name: At_100uM_ABA_cDNA_P Parameter: Treatment Value: 100uM ABA vs. No Treatment
  misc_feature: MA Experiment ID: 108572 Result: Up-regulated in Transcription
  misc_feature: MA Experiment 108572 PARAMETER Experiment Name: At_Drought_cDNA_P Parameter: Timepoint (hr) Value: 1
  misc_feature: MA Experiment 108572 PARAMETER Experiment Name: At_Drought_cDNA_P Parameter: Tissue Value: Aerial
  misc_feature: MA Experiment 108572 PARAMETER Experiment Name: At_Drought_cDNA_P Parameter: Treatment Value: Drought vs. No Drought
  misc_feature: MA Experiment ID: 108574 Result: Down-regulated in Transcription
  misc_feature: MA Experiment 108574 PARAMETER Experiment Name: At_Wounding__cDNA_P Parameter: Timepoint (hr) Value: 1
  misc_feature: MA Experiment 108574 PARAMETER Experiment Name: At_Wounding__cDNA_P Parameter: Tissue Value: Aerial
  misc_feature: MA Experiment 108574 PARAMETER Experiment Name: At_Wounding__cDNA_P Parameter: Treatment Value: Wounding vs. No Wounding
  misc_feature: MA Experiment ID: 108579 Result: Down-regulated in Transcription
  misc_feature: MA Experiment 108579 PARAMETER Experiment Name: At_4deg_Cold_cDNA_P Parameter: Temperature (deg C) Value: 4 vs. 22
  misc_feature: MA Experiment 108579 PARAMETER Experiment Name: At_4deg_Cold_cDNA_P Parameter: Timepoint (hr) Value: 6
  misc_feature: MA Experiment 108579 PARAMETER Experiment Name: At_4deg_Cold_cDNA_P Parameter: Tissue Value: Aerial
  misc_feature: MA Experiment ID: 108585 Result: Down-regulated in Transcription
  misc_feature: MA Experiment 108585 PARAMETER Experiment Name: At_5mM_NaNP_cDNA_P Parameter: Timepoint (hr) Value: 6
  misc_feature: MA Experiment 108585 PARAMETER Experiment Name: At_5mM_NaNP_cDNA_P Parameter: Tissue Value: Aerial
  misc_feature: MA Experiment 108585 PARAMETER Experiment Name: At_5mM_NaNP_cDNA_P Parameter: Treatment Value: null
  misc_feature: MA Experiment ID: 108595 Result: Down-regulated in Transcription
  misc_feature: MA Experiment 108595 PARAMETER Experiment Name: At_Ler-pi_Ovule_cDNA_P Parameter: Plant Line Value: null
  misc_feature: MA Experiment ID: 108605 Result: Down-regulated in Transcription
  misc_feature: MA Experiment 108605 PARAMETER Experiment Name: At_100uM_ABA_cDNA_P Parameter: Timepoint (hr) Value: 6
  misc_feature: MA Experiment 108605 PARAMETER Experiment Name: At_100uM_ABA_cDNA_P Parameter: Tissue Value: Aerial
  misc_feature: MA Experiment 108605 PARAMETER Experiment Name: At_100uM_ABA_cDNA_P Parameter: Treatment Value: 100uM ABA vs. No Treatment
  misc_feature: MA Experiment ID: 108607 Result: Down-regulated in Transcription
  misc_feature: MA Experiment 108607 PARAMETER Experiment Name: At_100uM_ABA_cDNA_P Parameter: Timepoint (hr) Value: 4
  misc_feature: MA Experiment 108607 PARAMETER Experiment Name: At_100uM_ABA_cDNA_P Parameter: Tissue Value: Aerial
  misc_feature: MA Experiment 108607 PARAMETER Experiment Name: At_100uM_ABA_cDNA_P Parameter: Treatment Value: 100uM ABA vs. No Treatment
  misc_feature: MA Experiment ID: 20000113 Result: Down-regulated in Transcription
  misc_feature: MA Experiment 20000113 PARAMETER Experiment Name: At_42deg_Heat_cDNA_P Parameter: Temperature (deg C) Value: 42 vs. 22
  misc_feature: MA Experiment 20000113 PARAMETER Experiment Name: At_42deg_Heat_cDNA_P Parameter: Timepoint (hr) Value: 8
  misc_feature: MA Experiment 20000113 PARAMETER Experiment Name: At_42deg_Heat_cDNA_P Parameter: Tissue Value: Aerial
  misc_feature: MA Experiment ID: 20000169 Result: Down-regulated in Transcription
  misc_feature: MA Experiment 20000169 PARAMETER Experiment Name: At_100uM_ABA_P Parameter: Age (day) Value: 14
  misc_feature: MA Experiment 20000169 PARAMETER Experiment Name: At_100uM_ABA_P Parameter: Organism Value: A. thaliana
  misc_feature: MA Experiment 20000169 PARAMETER Experiment Name: At_100uM_ABA_P Parameter: Plant Line Value: WS
  misc_feature: MA Experiment 20000169 PARAMETER Experiment Name: At_100uM_ABA_P Parameter: Timepoint (hr) Value: 6
  misc_feature: MA Experiment 20000169 PARAMETER Experiment Name: At_100uM_ABA_P Parameter: Tissue Value: Aerial
  misc_feature: MA Experiment 20000169 PARAMETER Experiment Name: At_100uM_ABA_P Parameter: Treatment Value: 100uM ABA vs. No Treatment
  misc_feature: MA Experiment ID: 20000173 Result: Down-regulated in Transcription
  misc_feature: MA Experiment 20000173 PARAMETER Experiment Name: At_42deg_Heat_P Parameter: Age (day) Value: 14
  misc_feature: MA Experiment 20000173 PARAMETER Experiment Name: At_42deg_Heat_P Parameter: Organism Value: A. thaliana
  misc_feature: MA Experiment 20000173 PARAMETER Experiment Name: At_42deg_Heat_P Parameter: Plant Line Value: WS
  misc_feature: MA Experiment 20000173 PARAMETER Experiment Name: At_42deg_Heat_P Parameter: Temperature (deg C) Value: 42 vs. 22
  misc_feature: MA Experiment 20000173 PARAMETER Experiment Name: At_42deg_Heat_P Parameter: Timepoint (hr) Value: 6
  misc_feature: MA Experiment 20000173 PARAMETER Experiment Name: At_42deg_Heat_P Parameter: Tissue Value: Aerial
  misc_feature: MA Experiment ID: 20000184 Result: Down-regulated in Transcription
  misc_feature: MA Experiment 20000184 PARAMETER Experiment Name: At_Shoots__P Parameter: Age (day) Value: 7
  misc_feature: MA Experiment 20000184 PARAMETER Experiment Name: At_Shoots__P Parameter: Tissue Value: Shoots vs. Whole Plant
  misc_feature: MA Experiment ID: 20000185 Result: Down-regulated in Transcription
  misc_feature: MA Experiment 20000185 PARAMETER Experiment Name: At_Roots__P Parameter: Age (day) Value: 7 vs. 21
  misc_feature: MA Experiment 20000185 PARAMETER Experiment Name: At_Roots__P Parameter: Organism Value: A. thaliana
  misc_feature: MA Experiment 20000185 PARAMETER Experiment Name: At_Roots__P Parameter: Tissue Value: Roots vs. Whole Plant
  misc_feature: MA Experiment ID: 20000213 Result: Down-regulated in Transcription
  misc_feature: MA Experiment 20000213 PARAMETER Experiment Name: At_4deg_Cold_P Parameter: Timepoint (hr) Value: 2
  misc_feature: MA Experiment ID: 20000234 Result: Down-regulated in Transcription
  misc_feature: MA Experiment 20000234 PARAMETER Experiment Name: At_Siliques_P Parameter: Age (day) Value: 21
  misc_feature: MA Experiment 20000234 PARAMETER Experiment Name: At_Siliques_P Parameter: Organism Value: A. thaliana
  misc_feature: MA Experiment 20000234 PARAMETER Experiment Name: At_Siliques_P Parameter: Plant Line Value: WS
  misc_feature: MA Experiment 20000234 PARAMETER Experiment Name: At_Siliques_P Parameter: Tissue Value: Less Than 5mm Siliques vs. Whole Plant
  misc_feature: MA Experiment ID: 20000235 Result: Down-regulated in Transcription
  misc_feature: MA Experiment 20000235 PARAMETER Experiment Name: At_Siliques_P Parameter: Age (day) Value: 21
  misc_feature: MA Experiment 20000235 PARAMETER Experiment Name: At_Siliques_P Parameter: Organism Value: A. thaliana
  misc_feature: MA Experiment 20000235 PARAMETER Experiment Name: At_Siliques_P Parameter: Plant Line Value: WS
  misc_feature: MA Experiment 20000235 PARAMETER Experiment Name: At_Siliques_P Parameter: Tissue Value: 5-10mm Siliques vs. Whole Plant
  misc_feature: MA Experiment ID: 20000265 Result: Down-regulated in Transcription
  misc_feature: MA Experiment 20000265 PARAMETER Experiment Name: At_Open_Flower_P Parameter: Age (day) Value: 21
  misc_feature: MA Experiment 20000265 PARAMETER Experiment Name: At_Open_Flower_P Parameter: Plant Line Value: WS
  misc_feature: MA Experiment 20000265 PARAMETER Experiment Name: At_Open_Flower_P Parameter: Tissue Value: Closed Flower vs. Whole Plant
  misc_feature: MA Experiment ID: 20000286 Result: Down-regulated in Transcription
  misc_feature: MA Experiment 20000286 PARAMETER Experiment Name: At_Open_Flower_P Parameter: Age (day) Value: 21
  misc_feature: MA Experiment 20000286 PARAMETER Experiment Name: At_Open_Flower_P Parameter: Plant Line Value: WS
  misc_feature: MA Experiment 20000286 PARAMETER Experiment Name: At_Open_Flower_P Parameter: Tissue Value: Half Open vs. Whole Plant
  misc_feature: MA Experiment ID: 20000438 Result: Down-regulated in Transcription
  misc_feature: MA Experiment 20000438 PARAMETER Experiment Name: At_Shoots__P Parameter: Age (day) Value: 14
  misc_feature: MA Experiment 20000438 PARAMETER Experiment Name: At_Shoots__P Parameter: Tissue Value: Shoots vs. Whole Plant
  misc_feature: MA Experiment ID: 20000439 Result: Down-regulated in Transcription
  misc_feature: MA Experiment 20000439 PARAMETER Experiment Name: At_Roots__P Parameter: Age (day) Value: 14 vs. 21
  misc_feature: MA Experiment 20000439 PARAMETER Experiment Name: At_Roots__P Parameter: Organism Value: A. thaliana
  misc_feature: MA Experiment 20000439 PARAMETER Experiment Name: At_Roots__P Parameter: Tissue Value: Roots vs. Whole Plant
  misc_feature: MA Experiment ID: 20000451 Result: Down-regulated in Transcription
  misc_feature: MA Experiment 20000451 PARAMETER Experiment Name: At_CS6879_Shoots-Roots_P Parameter: Age (day) Value: 14
  misc_feature: MA Experiment 20000451 PARAMETER Experiment Name: At_CS6879_Shoots-Roots_P Parameter: Organism Value: A. thaliana
  misc_feature: MA Experiment 20000451 PARAMETER Experiment Name: At_CS6879_Shoots-Roots_P Parameter: Plant Line Value: CS6879 vs. WS
  misc_feature: MA Experiment 20000451 PARAMETER Experiment Name: At_CS6879_Shoots-Roots_P Parameter: Tissue Value: Roots
  misc_feature: MA Experiment ID: 20001450 Result: Up-regulated in Transcription
  misc_feature: MA Experiment 20001450 PARAMETER Experiment Name: At_Far-red-induction_P Parameter: Age (day) Value: 7
  misc_feature: MA Experiment 20001450 PARAMETER Experiment Name: At_Far-red-induction_P Parameter: Light Value: Far-red vs. White
  misc_feature: MA Experiment 20001450 PARAMETER Experiment Name: At_Far-red-induction_P Parameter: Organism Value: A. thaliana
  misc_feature: MA Experiment 20001450 PARAMETER Experiment Name: At_Far-red-induction_P Parameter: Plant Line Value: Columbia
  misc_feature: MA Experiment 20001450 PARAMETER Experiment Name: At_Far-red-induction_P Parameter: Timepoint (hr) Value: 8
  misc_feature: MA Experiment 20001450 PARAMETER Experiment Name: At_Far-red-induction_P Parameter: Tissue Value: Whole Plant
  misc_feature: MA Experiment ID: 20001557 Result: Down-regulated in Transcription
  misc_feature: MA Experiment 20001557 PARAMETER Experiment Name: At_Drought_Soil_Dry_P Parameter: Age (day) Value: 27
  misc_feature: MA Experiment 20001557 PARAMETER Experiment Name: At_Drought_Soil_Dry_P Parameter: Organism Value: A. thaliana
  misc_feature: MA Experiment 20001557 PARAMETER Experiment Name: At_Drought_Soil_Dry_P Parameter: Plant Line Value: WS
  misc_feature: MA Experiment 20001557 PARAMETER Experiment Name: At_Drought_Soil_Dry_P Parameter: Post Timepoint (hr) Value: 3
  misc_feature: MA Experiment 20001557 PARAMETER Experiment Name: At_Drought_Soil_Dry_P Parameter: Post-Treatment Value: Re-Water vs. No Drought
  misc_feature: MA Experiment 20001557 PARAMETER Experiment Name: At_Drought_Soil_Dry_P Parameter: Timepoint (day) Value: 13
  misc_feature: MA Experiment 20001557 PARAMETER Experiment Name: At_Drought_Soil_Dry_P Parameter: Treatment Value: Drought vs. No Drought
  misc_feature: MA Experiment ID: 20001558 Result: Down-regulated in Transcription
  misc_feature: MA Experiment 20001558 PARAMETER Experiment Name: At_Drought_Soil_Dry_P Parameter: Age (day) Value: 27
  misc_feature: MA Experiment 20001558 PARAMETER Experiment Name: At_Drought_Soil_Dry_P Parameter: Organism Value: A. thaliana
  misc_feature: MA Experiment 20001558 PARAMETER Experiment Name: At_Drought_Soil_Dry_P Parameter: Plant Line Value: WS
  misc_feature: MA Experiment 20001558 PARAMETER Experiment Name: At_Drought_Soil_Dry_P Parameter: Post Timepoint (hr) Value: 6
  misc_feature: MA Experiment 20001558 PARAMETER Experiment Name: At_Drought_Soil_Dry_P Parameter: Post-Treatment Value: Re-Water vs. No Drought
  misc_feature: MA Experiment 20001558 PARAMETER Experiment Name: At_Drought_Soil_Dry_P Parameter: Timepoint (day) Value: 13
  misc_feature: MA Experiment 20001558 PARAMETER Experiment Name: At_Drought_Soil_Dry_P Parameter: Treatment Value: Drought vs. No Drought
  misc_feature: MA Experiment ID: 20001560 Result: Down-regulated in Transcription
  misc_feature: MA Experiment 20001560 PARAMETER Experiment Name: At_Drought_Soil_Dry_P Parameter: Age (day) Value: 28
  misc_feature: MA Experiment 20001560 PARAMETER Experiment Name: At_Drought_Soil_Dry_P Parameter: Organism Value: A. thaliana
  misc_feature: MA Experiment 20001560 PARAMETER Experiment Name: At_Drought_Soil_Dry_P Parameter: Plant Line Value: WS
  misc_feature: MA Experiment 20001560 PARAMETER Experiment Name: At_Drought_Soil_Dry_P Parameter: Post Timepoint (hr) Value: None
  misc_feature: MA Experiment 20001560 PARAMETER Experiment Name: At_Drought_Soil_Dry_P Parameter: Post-Treatment Value: None
  misc_feature: MA Experiment 20001560 PARAMETER Experiment Name: At_Drought_Soil_Dry_P Parameter: Timepoint (day) Value: 14
  misc_feature: MA Experiment 20001560 PARAMETER Experiment Name: At_Drought_Soil_Dry_P Parameter: Treatment Value: Drought vs. No Drought
  misc_feature: MA Experiment ID: 20001904 Result: Down-regulated in Transcription
  misc_feature: MA Experiment 20001904 PARAMETER Experiment Name: At_Drought_Reproduction_P Parameter: Age (day) Value: 37
  misc_feature: MA Experiment 20001904 PARAMETER Experiment Name: At_Drought_Reproduction_P Parameter: Organism Value: A. thaliana
  misc_feature: MA Experiment 20001904 PARAMETER Experiment Name: At_Drought_Reproduction_P Parameter: Plant Line Value: WS
  misc_feature: MA Experiment 20001904 PARAMETER Experiment Name: At_Drought_Reproduction_P Parameter: Timepoint (day) Value: 7
  misc_feature: MA Experiment 20001904 PARAMETER Experiment Name: At_Drought_Reproduction_P Parameter: Tissue Value: Rosettes
  misc_feature: MA Experiment 20001904 PARAMETER Experiment Name: At_Drought_Reproduction_P Parameter: Treatment Value: Drought vs. No Drought
  misc_feature: MA Experiment ID: 20001905 Result: Down-regulated in Transcription
  misc_feature: MA Experiment 20001905 PARAMETER Experiment Name: At_Drought_Reproduction_P Parameter: Age (day) Value: 40
  misc_feature: MA Experiment 20001905 PARAMETER Experiment Name: At_Drought_Reproduction_P Parameter: Organism Value: A. thaliana
  misc_feature: MA Experiment 20001905 PARAMETER Experiment Name: At_Drought_Reproduction_P Parameter: Plant Line Value: WS
  misc_feature: MA Experiment 20001905 PARAMETER Experiment Name: At_Drought_Reproduction_P Parameter: Timepoint (day) Value: 10
  misc_feature: MA Experiment 20001905 PARAMETER Experiment Name: At_Drought_Reproduction_P Parameter: Tissue Value: Rosettes
  misc_feature: MA Experiment 20001905 PARAMETER Experiment Name: At_Drought_Reproduction_P Parameter: Treatment Value: Drought vs. No Drought
  misc_feature: MA Experiment ID: 20001906 Result: Down-regulated in Transcription
  misc_feature: MA Experiment 20001906 PARAMETER Experiment Name: At_Drought_Reproduction_P Parameter: Age (day) Value: 35
  misc_feature: MA Experiment 20001906 PARAMETER Experiment Name: At_Drought_Reproduction_P Parameter: Organism Value: A. thaliana
  misc_feature: MA Experiment 20001906 PARAMETER Experiment Name: At_Drought_Reproduction_P Parameter: Plant Line Value: WS
  misc_feature: MA Experiment 20001906 PARAMETER Experiment Name: At_Drought_Reproduction_P Parameter: Timepoint (day) Value: 5
  misc_feature: MA Experiment 20001906 PARAMETER Experiment Name: At_Drought_Reproduction_P Parameter: Tissue Value: Siliques
  misc_feature: MA Experiment 20001906 PARAMETER Experiment Name: At_Drought_Reproduction_P Parameter: Treatment Value: Drought vs. No Drought
aatctatcaaccaaaagcaaagaaagagagggggaaaaaatggctcaattggctgctttgtcgggaaagcaagctgatgagtacttgaacgcaaggccaaaatatcctacaatatggtacaaagtgttggctggtcgaaccagcaaccataaggtggcttgggatgttgggaccggcaacggtcaggctgctattggggtcgctgagtactaccagaaagtggtggcaactgatataaatgaatcacaactccaacgtgcaatgaagcacccaaaagtcacttactatcacactccatcatcaatgtccgacgacgatctagtgactctactcggtggagaaaactccatagatatcataatagccgctcaagctcttcactacttcgacctaaagagattctaccccatagtgaaacgtgttcttcgtaaacaaggcggtatcatcgtagtttgggtttacaacgatctcatcatcaccccaaaggttgattccatcatgaaacgtcttgtggattcaacattaccttacagaaacccgactatgaatttggcgtttgatggttataaaacaatagagtttccttttaaaaacattaggatggggactcaaggaaggcctaaagctcttgacatcccacatatgctttcgctagatggatttctagggttcttaaaatcatggcagcctctagtgaaagcaaaggagcaaggagaggatcttttaacttcttatatgattgatgagtttaaggaagcttggggtgatgatgaacaagtcaaggatgttcactacaaggcatttatgcttgcagggaaactttaggtaattaatatatgttcccctttgagatatatattaactatatgtcatacacgcatgtcatcaatgatcaatcgaattaggattgaaaacttatgtttaacaggtcttgagagcaacctggttgatttacaagcggatcattactttgtataactttcgtttctgtataaattaatatattaattaatatatttatagcactgtaaatataaagatgttatatataaataaaaggttaatat

SEQ ID NO: 26262 - protein, 274 aa, Arabidopsis thaliana
  peptide (1)..(274): Ceres Seq. ID no. 12335645
  misc_feature (17)..(274): Homolog of NCBI NO: 34910604 NR Description: putative embryonic abundant protein-like
  misc_feature (187)..(272): Homolog of NCBI NO: 34912212 NR Description: P0415C01.8 [Oryza sativa (japonica
  misc_feature (17)..(177): Homolog of NCBI NO: 34912212 NR Description: P0415C01.8 [Oryza sativa (japonica
  misc_feature (43)..(272): Homolog of NCBI NO: 20258825 NR Description: unknown protein [Arabidopsis thaliana]
  misc_feature (17)..(272): Homolog of NCBI NO: 15235684 NR Description: putative protein; protein id: At4g22530.1
  misc_feature (17)..(274): Homolog of NCBI NO: 15238280 NR Description: embryonic abundant protein -like; protein id:
  misc_feature (17)..(274): Homolog of NCBI NO: 15232436 NR Description: embryonic abundant protein -like
  misc_feature (17)..(274): Homolog of NCBI NO: 18405387 NR Description: expressed protein
  misc_feature (17)..(274): Homolog of NCBI NO: 21594033 NR Description: embryonic abundant protein-like [Arabidopsis
  misc_feature (14)..(274): Homolog of NCBI NO: 15233061 NR Description: putative protein; protein id: At3g61210.1
NLSTKSKEREGEKMAQLAALSGKQADEYLNARPKYPTIWYKVLAGRTSNHKVAWDVGTGNGQAAIGVAEYYQKVVATDINESQLQRAMKHPKVTYYHTPSSMSDDDLVTLLGGENSIDIIIAAQALHYFDLKRFYPIVKRVLRKQGGIIVVWVYNDLIITPKVDSIMKRLVDSTLPYRNPTMNLAFDGYKTIEFPFKNIRMGTQGRPKALDIPHMLSLDGFLGFLKSWQPLVKAKEQGEDLLTSYMIDEFKEAWGDDEQVKDVHYKAFMLAGKL

SEQ ID NO: 26263 - protein, 261 aa, Arabidopsis thaliana
  peptide (1)..(261): Ceres Seq. ID no. 12335646
  misc_feature (4)..(261): Homolog of NCBI NO: 34910604 NR Description: putative embryonic abundant protein-like
  misc_feature (174)..(259): Homolog of NCBI NO: 34912212 NR Description: P0415C01.8 [Oryza sativa (japonica
  misc_feature (4)..(164): Homolog of NCBI NO: 34912212 NR Description: P0415C01.8 [Oryza sativa (japonica
  misc_feature (30)..(259): Homolog of NCBI NO: 20258825 NR Description: unknown protein [Arabidopsis thaliana]
  misc_feature (4)..(259): Homolog of NCBI NO: 15235684 NR Description: putative protein; protein id: At4g22530.1
  misc_feature (4)..(261): Homolog of NCBI NO: 15238280 NR Description: embryonic abundant protein -like; protein id:
  misc_feature (4)..(261): Homolog of NCBI NO: 15232436 NR Description: embryonic abundant protein -like
  misc_feature (4)..(261): Homolog of NCBI NO: 18405387 NR Description: expressed protein
  misc_feature (4)..(261): Homolog of NCBI NO: 21594033 NR Description: embryonic abundant protein-like [Arabidopsis
  misc_feature (1)..(261): Homolog of NCBI NO: 15233061 NR Description: putative protein; protein id: At3g61210.1
MAQLAALSGKQADEYLNARPKYPTIWYKVLAGRTSNHKVAWDVGTGNGQAAIGVAEYYQKVVATDINESQLQRAMKHPKVTYYHTPSSMSDDDLVTLLGGENSIDIIIAAQALHYFDLKRFYPIVKRVLRKQGGIIVVWVYNDLIITPKVDSIMKRLVDSTLPYRNPTMNLAFDGYKTIEFPFKNIRMGTQGRPKALDIPHMLSLDGFLGFLKSWQPLVKAKEQGEDLLTSYMIDEFKEAWGDDEQVKDVHYKAFMLAGKL

SEQ ID NO: 26264 - protein, 187 aa, Arabidopsis thaliana
  peptide (1)..(187): Ceres Seq. ID no. 12335647
  misc_feature (1)..(187): Homolog of NCBI NO: 15232436 NR Description: embryonic abundant protein -like
  misc_feature (1)..(187): Homolog of NCBI NO: 18405387 NR Description: expressed protein
  misc_feature (1)..(187): Homolog of NCBI NO: 21594033 NR Description: embryonic abundant protein-like [Arabidopsis
  misc_feature (1)..(187): Homolog of NCBI NO: 15233061 NR Description: putative protein; protein id: At3g61210.1
  misc_feature (1)..(187): Homolog of NCBI NO: 34910604 NR Description: putative embryonic abundant protein-like
  misc_feature (100)..(185): Homolog of NCBI NO: 34912212 NR Description: P0415C01.8 [Oryza sativa (japonica
  misc_feature (1)..(90): Homolog of NCBI NO: 34912212 NR Description: P0415C01.8 [Oryza sativa (japonica
  misc_feature (1)..(185): Homolog of NCBI NO: 20258825 NR Description: unknown protein [Arabidopsis thaliana]
  misc_feature (1)..(185): Homolog of NCBI NO: 15235684 NR Description: putative protein; protein id: At4g22530.1
  misc_feature (1)..(187): Homolog of NCBI NO: 15238280 NR Description: embryonic abundant protein -like; protein id:
MKHPKVTYYHTPSSMSDDDLVTLLGGENSIDIIIAAQALHYFDLKRFYPIVKRVLRKQGGIIVVWVYNDLIITPKVDSIMKRLVDSTLPYRNPTMNLAFDGYKTIEFPFKNIRMGTQGRPKALDIPHMLSLDGFLGFLKSWQPLVKAKEQGEDLLTSYMIDEFKEAWGDDEQVKDVHYKAFMLAGKL

SEQ ID NO: 26265 - DNA, 1775 bp, Arabidopsis thaliana
  misc_feature (1)..(1775): Ceres Seq. ID no. 12335880
  misc_feature: MA Experiment ID: 108574 Result: Up-regulated in Transcription
  misc_feature: MA Experiment 108574 PARAMETER Experiment Name: At_Wounding__cDNA_P Parameter: Timepoint (hr) Value: 1
  misc_feature: MA Experiment 108574 PARAMETER Experiment Name: At_Wounding__cDNA_P Parameter: Tissue Value: Aerial
  misc_feature: MA Experiment 108574 PARAMETER Experiment Name: At_Wounding__cDNA_P Parameter: Treatment Value: Wounding vs. No Wounding
  misc_feature: MA Experiment ID: 108576 Result: Up-regulated in Transcription
  misc_feature: MA Experiment 108576 PARAMETER Experiment Name: At_42deg_Heat_cDNA_P Parameter: Temperature (deg C) Value: 42 vs. 22
  misc_feature: MA Experiment 108576 PARAMETER Experiment Name: At_42deg_Heat_cDNA_P Parameter: Timepoint (hr) Value: 1
  misc_feature: MA Experiment 108576 PARAMETER Experiment Name: At_42deg_Heat_cDNA_P Parameter: Tissue Value: Aerial
  misc_feature: MA Experiment ID: 20000111 Result: Down-regulated in Transcription
  misc_feature: MA Experiment 20000111 PARAMETER Experiment Name: At_42deg_Heat_cDNA_P Parameter: Temperature (deg C) Value: 42 vs. 22
  misc_feature: MA Experiment 20000111 PARAMETER Experiment Name: At_42deg_Heat_cDNA_P Parameter: Timepoint (hr) Value: 6
  misc_feature: MA Experiment 20000111 PARAMETER Experiment Name: At_42deg_Heat_cDNA_P Parameter: Tissue Value: Aerial
  misc_feature: MA Experiment ID: 20000180 Result: Down-regulated in Transcription
  misc_feature: MA Experiment 20000180 PARAMETER Experiment Name: At_Germinating_Seeds_P Parameter: Age (hr) Value: 24 vs. 0
  misc_feature: MA Experiment 20000180 PARAMETER Experiment Name: At_Germinating_Seeds_P Parameter: Tissue Value: Germinating Seeds
acacgcgcagtcttcttcatcttgcttgcttctggttgcttaaccaaaacaccatggaatctccctaaatttcctcacctactcacttccaatttcaacctgctcgattcttcccctcttcttcgcaaaagccctagttttgatcatcgcacttcactctcctccgcatgagaaatcgagaaatccgctcgacgtagtagatagataaaaccacaaagttagggttttttcaattgggtatggaacctcgtgttgggaacaagtttcgccttggccgcaaaattgggagcggctctttcggagagatttacctcggaactgatgttcagactaacgaagaagttgctattaagcttgaaagtgtgaagactgcgcatccgcaattgtcatatgagtcgaggatatatagagttcttcagggtggaactgggattccaaatatgaaatggtatggtgttgagggggactacaatgtcttagtcatggatttgcttggtccaagtcttgaagatttgtttagttattgcaagaggcagtttagcttgaagactgttcttatgcttgctgatcaaatgataaatcgtctcgagttcattcattctaagtcgtatcttcatcgtgatataaagccggataattttctcatgggcttagggaggcgggcaaatcaggtctacatcatagactatggtttggctaagaaatatagagacagctcaactcatagacatatcccatacagggagaataaaagtctaattgggactccgaggtatgccagcttgaacactcacctagggattgagcaaagtcggagagatgatatagaatcgcttggttacatcctcatgtatttcctcaagggaagtctcccttggcaagggctgaaagctggaaacaagaaacagaagtatgataagatcagcgaaaagaaggtttcaacttccatcgaaacgttatgcagaggtcatccaacagagtttgcatcttacttccattactgccgctcacttaggtttgatgataagccagactatgcatatttgaagagactattccgcaacctttttatccgggaaggttttcagtttgattttgtgtttgactggacagtatacaagtatcagcaatcacaatctggaaaccctcaacctcgtccccatgatggtggtgttggaactagttctggattaaaccctgcggttggcaattctgagaagcgtccagatgtcccaaatcagaggacaaatccggattttaccctgaagcagaaagacaagaatggaaatgattctgcaattgcaaaggacaagctgctacctggatctttgaacttgggccgatcagagggatcatcgtcaagacgagttgtggacacgagcagtcgtgaaccatttagtggcgggagtgacaatgcaaactatgaaaccgcactcaaaggcattgatggtttacggatcaataacaatgcaggcgatgagacagcagcaacgccacaatcaaatggagacgatgtagaaccccaaagcaaagctctctgactgattcatacaaagcagctataaaacaaaacctgtactcactcagtgacgttgtctatgattcttctgaagaaaggctattttcacagctagagaactgatgatatataagagagagataatatagatttattataccaaacgaaagtgcttaaactatgattcttcaaatattcatttgtctcctccatttgtatagagaaactcttcgaattttaagatccttcctctctg

SEQ ID NO: 26266 - protein, 433 aa, Arabidopsis thaliana
  peptide (1)..(433): Ceres Seq. ID no. 12335881
  misc_feature (1)..(390): Homolog of NCBI NO: 15240091 NR Description: casein kinase I
  misc_feature (40)..(392): Homolog of NCBI NO: 6635385 NR Description: casein kinase I-like protein [Brassica oleracea]
  misc_feature (1)..(371): Homolog of NCBI NO: 549973 NR Description: casein kinase I-like protein
  misc_feature (1)..(401): Homolog of NCBI NO: 22327902 NR Description: similar to Col-0 casein kinase I-like protein
  misc_feature (1)..(167): Homolog of NCBI NO: 20161073 NR Description: putative casein kinase [Oryza sativa (japonica
  misc_feature (168)..(397): Homolog of NCBI NO: 20161073 NR Description: putative casein kinase [Oryza sativa (japonica
  misc_feature (1)..(391): Homolog of NCBI NO: 15236114 NR Description: Col-0 casein kinase I-like protein
  misc_feature (1)..(384): Homolog of NCBI NO: 34910448 NR Description: putative casein kinase I [Oryza sativa (japonica
  misc_feature (1)..(392): Homolog of NCBI NO: 15218569 NR Description: putative casein kinase I
  misc_feature (1)..(433): Homolog of NCBI NO: 15224781 NR Description: putative casein kinase I
MEPRVGNKFRLGRKIGSGSFGEIYLGTDVQTNEEVAIKLESVKTAHPQLSYESRIYRVLQGGTGIPNMKWYGVEGDYNVLVMDLLGPSLEDLFSYCKRQFSLKTVLMLADQMINRLEFIHSKSYLHRDIKPDNFLMGLGRRANQVYIIDYGLAKKYRDSSTHRHIPYRENKSLIGTPRYASLNTHLGIEQSRRDDIESLGYILMYFLKGSLPWQGLKAGNKKQKYDKISEKKVSTSIETLCRGHPTEFASYFHYCRSLRFDDKPDYAYLKRLFRNLFIREGFQFDFVFDWTVYKYQQSQSGNPQPRPHDGGVGTSSGLNPAVGNSEKRPDVPNQRTNPDFTLKQKDKNGNDSAIAKDKLLPGSLNLGRSEGSSSRRVVDTSSREPFSGGSDNANYETALKGIDGLRINNNAGDETAATPQSNGDDVEPQSKAL

SEQ ID NO: 26267 - protein, 366 aa, Arabidopsis thaliana
  peptide (1)..(366): Ceres Seq. ID no. 12335882
  misc_feature (1)..(323): Homolog of NCBI NO: 15240091 NR Description: casein kinase I
  misc_feature (1)..(325): Homolog of NCBI NO: 6635385 NR Description: casein kinase I-like protein [Brassica oleracea]
  misc_feature (1)..(304): Homolog of NCBI NO: 549973 NR Description: casein kinase I-like protein
  misc_feature (1)..(334): Homolog of NCBI NO: 22327902 NR Description: similar to Col-0 casein kinase I-like protein
  misc_feature (1)..(100): Homolog of NCBI NO: 20161073 NR Description: putative casein kinase [Oryza sativa (japonica
  misc_feature (101)..(330): Homolog of NCBI NO: 20161073 NR Description: putative casein kinase [Oryza sativa (japonica
  misc_feature (1)..(324): Homolog of NCBI NO: 15236114 NR Description: Col-0 casein kinase I-like protein
  misc_feature (1)..(317): Homolog of NCBI NO: 34910448 NR Description: putative casein kinase I [Oryza sativa (japonica
  misc_feature (1)..(325): Homolog of NCBI NO: 15218569 NR Description: putative casein kinase I
  misc_feature (1)..(366): Homolog of NCBI NO: 15224781 NR Description: putative casein kinase I
MKWYGVEGDYNVLVMDLLGPSLEDLFSYCKRQFSLKTVLMLADQMINRLEFIHSKSYLHRDIKPDNFLMGLGRRANQVYIIDYGLAKKYRDSSTHRHIPYRENKSLIGTPRYASLNTHLGIEQSRRDDIESLGYILMYFLKGSLPWQGLKAGNKKQKYDKISEKKVSTSIETLCRGHPTEFASYFHYCRSLRFDDKPDYAYLKRLFRNLFIREGFQFDFVFDWTVYKYQQSQSGNPQPRPHDGGVGTSSGLNPAVGNSEKRPDVPNQRTNPDFTLKQKDKNGNDSAIAKDKLLPGSLNLGRSEGSSSRRVVDTSSREPFSGGSDNANYETALKGIDGLRINNNAGDETAATPQSNGDDVEPQSKAL

SEQ ID NO: 26268 - protein, 352 aa, Arabidopsis thaliana
  peptide (1)..(352): Ceres Seq. ID no. 12335883
  misc_feature (1)..(309): Homolog of NCBI NO: 15240091 NR Description: casein kinase I
  misc_feature (1)..(311): Homolog of NCBI NO: 6635385 NR Description: casein kinase I-like protein [Brassica oleracea]
  misc_feature (1)..(290): Homolog of NCBI NO: 549973 NR Description: casein kinase I-like protein
  misc_feature (1)..(320): Homolog of NCBI NO: 22327902 NR Description: similar to Col-0 casein kinase I-like protein
  misc_feature (1)..(86): Homolog of NCBI NO: 20161073 NR Description: putative casein kinase [Oryza sativa (japonica
  misc_feature (87)..(316): Homolog of NCBI NO: 20161073 NR Description: putative casein kinase [Oryza sativa (japonica
  misc_feature (1)..(310): Homolog of NCBI NO: 15236114 NR Description: Col-0 casein kinase I-like protein
  misc_feature (1)..(303): Homolog of NCBI NO: 34910448 NR Description: putative casein kinase I [Oryza sativa (japonica
  misc_feature (1)..(311): Homolog of NCBI NO: 15218569 NR Description: putative casein kinase I
  misc_feature (1)..(352): Homolog of NCBI NO: 15224781 NR Description: putative casein kinase I
MDLLGPSLEDLFSYCKRQFSLKTVLMLADQMINRLEFIHSKSYLHRDIKPDNFLMGLGRRANQVYIIDYGLAKKYRDSSTHRHIPYRENKSLIGTPRYASLNTHLGIEQSRRDDIESLGYILMYFLKGSLPWQGLKAGNKKQKYDKISEKKVSTSIETLCRGHPTEFASYFHYCRSLRFDDKPDYAYLKRLFRNLFIREGFQFDFVFDWTVYKYQQSQSGNPQPRPHDGGVGTSSGLNPAVGNSEKRPDVPNQRTNPDFTLKQKDKNGNDSAIAKDKLLPGSLNLGRSEGSSSRRVVDTSSREPFSGGSDNANYETALKGIDGLRINNNAGDETAATPQSNGDDVEPQSKAL

SEQ ID NO: 26269 - DNA, 1664 bp, Arabidopsis thaliana
  misc_feature (1)..(1664): Ceres Seq. ID no. 13591642
  misc_feature: MA Experiment ID: 108434 Result: Down-regulated in Transcription
  misc_feature: MA Experiment 108434 PARAMETER Experiment Name: At_Root_Tips_cDNA_P Parameter: Tissue Value: Root Tips
  misc_feature: MA Experiment ID: 108462 Result: Up-regulated in Transcription
  misc_feature: MA Experiment 108462 PARAMETER Experiment Name: At_Germinating_Seeds_cDNA_P Parameter: Age (day) Value: 2 vs. 0
  misc_feature: MA Experiment 108462 PARAMETER Experiment Name: At_Germinating_Seeds_cDNA_P Parameter: Tissue Value: Germinating Seeds
  misc_feature: MA Experiment ID: 108463 Result: Up-regulated in Transcription
  misc_feature: MA Experiment 108463 PARAMETER Experiment Name: At_Germinating_Seeds_cDNA_P Parameter: Age (day) Value: 3 vs. 0
  misc_feature: MA Experiment 108463 PARAMETER Experiment Name: At_Germinating_Seeds_cDNA_P Parameter: Tissue Value: Germinating Seeds
  misc_feature: MA Experiment ID: 108595 Result: Down-regulated in Transcription
  misc_feature: MA Experiment 108595 PARAMETER Experiment Name: At_Ler-pi_Ovule_cDNA_P Parameter: Plant Line Value: null
  misc_feature: MA Experiment ID: 20000069 Result: Down-regulated in Transcription
  misc_feature: MA Experiment 20000069 PARAMETER Experiment Name: At_100uM_ABA_Mutants_cDNA_P Parameter: Plant Line Value: CS23
  misc_feature: MA Experiment 20000069 PARAMETER Experiment Name: At_100uM_ABA_Mutants_cDNA_P Parameter: Timepoint (hr) Value: 6
  misc_feature: MA Experiment 20000069 PARAMETER Experiment Name: At_100uM_ABA_Mutants_cDNA_P Parameter: Tissue Value: Aerial
  misc_feature: MA Experiment 20000069 PARAMETER Experiment Name: At_100uM_ABA_Mutants_cDNA_P Parameter: Treatment Value: 100uM ABA vs. No Treatment
  misc_feature: MA Experiment ID: 20000072 Result: Down-regulated in Transcription
  misc_feature: MA Experiment 20000072 PARAMETER Experiment Name: At_100uM_ABA_Mutants_cDNA_P Parameter: Plant Line Value: CS8105
  misc_feature: MA Experiment 20000072 PARAMETER Experiment Name: At_100uM_ABA_Mutants_cDNA_P Parameter: Timepoint (hr) Value: 6
  misc_feature: MA Experiment 20000072 PARAMETER Experiment Name: At_100uM_ABA_Mutants_cDNA_P Parameter: Tissue Value: Aerial
  misc_feature: MA Experiment 20000072 PARAMETER Experiment Name: At_100uM_ABA_Mutants_cDNA_P Parameter: Treatment Value: 100uM ABA vs. No Treatment
  misc_feature: MA Experiment ID: 20000087 Result: Down-regulated in Transcription
  misc_feature: MA Experiment 20000087 PARAMETER Experiment Name: At_100uM_ABA_Mutants_cDNA_P Parameter: Plant Line Value: WS
  misc_feature: MA Experiment 20000087 PARAMETER Experiment Name: At_100uM_ABA_Mutants_cDNA_P Parameter: Timepoint (hr) Value: 6
  misc_feature: MA Experiment 20000087 PARAMETER Experiment Name: At_100uM_ABA_Mutants_cDNA_P Parameter: Tissue Value: Aerial
  misc_feature: MA Experiment 20000087 PARAMETER Experiment Name: At_100uM_ABA_Mutants_cDNA_P Parameter: Treatment Value: 100uM ABA vs. No Treatment
  misc_feature: MA Experiment ID: 20000180 Result: Up-regulated in Transcription
  misc_feature: MA Experiment 20000180 PARAMETER Experiment Name: At_Germinating_Seeds_P Parameter: Age (hr) Value: 24 vs. 0
  misc_feature: MA Experiment 20000180 PARAMETER Experiment Name: At_Germinating_Seeds_P Parameter: Tissue Value: Germinating Seeds
  misc_feature: MA Experiment ID: 20000184 Result: Up-regulated in Transcription
  misc_feature: MA Experiment 20000184 PARAMETER Experiment Name: At_Shoots__P Parameter: Age (day) Value: 7
  misc_feature: MA Experiment 20000184 PARAMETER Experiment Name: At_Shoots__P Parameter: Tissue Value: Shoots vs. Whole Plant
  misc_feature: MA Experiment ID: 20000185 Result: Down-regulated in Transcription
  misc_feature: MA Experiment 20000185 PARAMETER Experiment Name: At_Roots__P Parameter: Age (day) Value: 7 vs. 21
  misc_feature: MA Experiment 20000185 PARAMETER Experiment Name: At_Roots__P Parameter: Organism Value: A. thaliana
  misc_feature: MA Experiment 20000185 PARAMETER Experiment Name: At_Roots__P Parameter: Tissue Value: Roots vs. Whole Plant
  misc_feature: MA Experiment ID: 20000438 Result: Up-regulated in Transcription
  misc_feature: MA Experiment 20000438 PARAMETER Experiment Name: At_Shoots__P Parameter: Age (day) Value: 14
  misc_feature: MA Experiment 20000438 PARAMETER Experiment Name: At_Shoots__P Parameter: Tissue Value: Shoots vs. Whole Plant
  misc_feature: MA Experiment ID: 20000439 Result: Down-regulated in Transcription
  misc_feature: MA Experiment 20000439 PARAMETER Experiment Name: At_Roots__P Parameter: Age (day) Value: 14 vs. 21
  misc_feature: MA Experiment 20000439 PARAMETER Experiment Name: At_Roots__P Parameter: Organism Value: A. thaliana
  misc_feature: MA Experiment 20000439 PARAMETER Experiment Name: At_Roots__P Parameter: Tissue Value: Roots vs. Whole Plant
  misc_feature: MA Experiment ID: 20000794 Result: Down-regulated in Transcription
  misc_feature: MA Experiment 20000794 PARAMETER Experiment Name: At_Petals_P Parameter: Age (day) Value: 23-25 days
  misc_feature: MA Experiment 20000794 PARAMETER Experiment Name: At_Petals_P Parameter: Plant Line Value: WS
  misc_feature: MA Experiment 20000794 PARAMETER Experiment Name: At_Petals_P Parameter: Tissue Value: Petals vs. Whole plant
  misc_feature: MA Experiment ID: 20001905 Result: Down-regulated in Transcription
  misc_feature: MA Experiment 20001905 PARAMETER Experiment Name: At_Drought_Reproduction_P Parameter: Age (day) Value: 40
  misc_feature: MA Experiment 20001905 PARAMETER Experiment Name: At_Drought_Reproduction_P Parameter: Organism Value: A. thaliana
  misc_feature: MA Experiment 20001905 PARAMETER Experiment Name: At_Drought_Reproduction_P Parameter: Plant Line Value: WS
  misc_feature: MA Experiment 20001905 PARAMETER Experiment Name: At_Drought_Reproduction_P Parameter: Timepoint (day) Value: 10
  misc_feature: MA Experiment 20001905 PARAMETER Experiment Name: At_Drought_Reproduction_P Parameter: Tissue Value: Rosettes
  misc_feature: MA Experiment 20001905 PARAMETER Experiment Name: At_Drought_Reproduction_P Parameter: Treatment Value: Drought vs. No Drought
  misc_feature: MA Experiment ID: 20001906 Result: Down-regulated in Transcription
  misc_feature: MA Experiment 20001906 PARAMETER Experiment Name: At_Drought_Reproduction_P Parameter: Age (day) Value: 35
  misc_feature: MA Experiment 20001906 PARAMETER Experiment Name: At_Drought_Reproduction_P Parameter: Organism Value: A. thaliana
  misc_feature: MA Experiment 20001906 PARAMETER Experiment Name: At_Drought_Reproduction_P Parameter: Plant Line Value: WS
  misc_feature: MA Experiment 20001906 PARAMETER Experiment Name: At_Drought_Reproduction_P Parameter: Timepoint (day) Value: 5
  misc_feature: MA Experiment 20001906 PARAMETER Experiment Name: At_Drought_Reproduction_P Parameter: Tissue Value: Siliques
  misc_feature: MA Experiment 20001906 PARAMETER Experiment Name: At_Drought_Reproduction_P Parameter: Treatment Value: Drought vs. No Drought
  misc_feature: MA Experiment ID: 20001908 Result: Down-regulated in Transcription
  misc_feature: MA Experiment 20001908 PARAMETER Experiment Name: At_Drought_Reproduction_P Parameter: Age (day) Value: 40
  misc_feature: MA Experiment 20001908 PARAMETER Experiment Name: At_Drought_Reproduction_P Parameter: Organism Value: A. thaliana
  misc_feature: MA Experiment 20001908 PARAMETER Experiment Name: At_Drought_Reproduction_P Parameter: Plant Line Value: WS
  misc_feature: MA Experiment 20001908 PARAMETER Experiment Name: At_Drought_Reproduction_P Parameter: Timepoint (day) Value: 10
  misc_feature: MA Experiment 20001908 PARAMETER Experiment Name: At_Drought_Reproduction_P Parameter: Tissue Value: Siliques
  misc_feature: MA Experiment 20001908 PARAMETER Experiment Name: At_Drought_Reproduction_P Parameter: Treatment Value: Drought vs. No Drought
  misc_feature: MA Experiment ID: 20001911 Result: Down-regulated in Transcription
  misc_feature: MA Experiment 20001911 PARAMETER Experiment Name: At_Drought_Reproduction_P Parameter: Age (day) Value: 40
  misc_feature: MA Experiment 20001911 PARAMETER Experiment Name: At_Drought_Reproduction_P Parameter: Organism Value: A. thaliana
  misc_feature: MA Experiment 20001911 PARAMETER Experiment Name: At_Drought_Reproduction_P Parameter: Plant Line Value: WS
  misc_feature: MA Experiment 20001911 PARAMETER Experiment Name: At_Drought_Reproduction_P Parameter: Timepoint (day) Value: 10
  misc_feature: MA Experiment 20001911 PARAMETER Experiment Name: At_Drought_Reproduction_P Parameter: Tissue Value: Flowers
  misc_feature: MA Experiment 20001911 PARAMETER Experiment Name: At_Drought_Reproduction_P Parameter: Treatment Value: Drought vs. No Drought
gatatcatcaccttccccactaatactctatagtttgtttttgttcttcttataatctttatattttcagcaaacgaaagggaagtgtgtcagaaatctcagagggtgagaatcccaatgaggatcttacccgaacctcgaggttcggttccgtgtcttctccttcttgtgtcggttctcttatcagcgactctctcactcgctcgtgtcgtcgaagttgtcggttacgccgagagcaagatcaaaaccccccatgcattttcaggacttcgagtgacgatcgactgtaaggtgaataaaggccattttgttacaaaaggttcgggaaacattgacgacaaaggaaagtttggtcttaatattcctcatgacattgtctccgacaacggagcgttaaaggaggagtgttacgctcagcttcacagcgcggcgggaacaccttgtccggctcacgacggccttgagtccaccaagatcgtgtttttatccaaatccggggataaacacattttgggtctcaaacaaaatctgaaattttcaccggagatttgcgtttccaaattcttctggcctatgcctaagttgcctccttttaagggctttgatcatcctttccctttacctccacctttggaacttccaccgtttctcaagaagccatgtccacctaaatacagtcctcctgtggaggttccacccccggtaccagtttacgagccgccgccaaagaaagagattcccccgccggttccggtttacgatccaccgcctaagaaagaggttccaccacctgtcccagtttacaagccaccaccaaaggtggagcttccaccgcctattcctaagaagccttgtccacctaaaccgccgaagatagagcacccacctccggttccggtttacaagccaccgccaaagatagagaagccacctccggttccggtttacaagcccccgccaaagatagagcacccacctcccgttccggtacacaagctaccgaagaagccatgtccgcctaagaaagttgatccaccgccggtgccagtccacaaaccaccaacgaagaagccttgtccgcctaagaaagttgatccaccgccggttccagtccacaagccgccgccaaagatagtcattccaccgccgaagatagagcacccacctccagttccggtttacaagccgccgccgaagatagagcatccaccaatctacataccaccaattgtgaagaagccgtgtcctccgccggtaccaatatacaaaccaccggttgtgatccccaagaagccatgccctccgccggtaccagtatacaaaccaccggtagtggtgattccaaagaagccatgtccgccacttccacagctcccaccacttccaaagtttccacctcttcctcctaaatacattcaccaccccaagttcgggaaatggcctccgttgcctccacacccttgagaaacattaaatacgtatatatagatatacgtatactcatgtataatcaacgtgtttgcctttttttaatattttatctttgcatatgttttatatcttgtttcttttgttggctttgagttctctttgtgtagactggttgtttatattcccgcaatcttccaacaataatatggtaatgatacgtttctcttttatct

SEQ ID NO: 26270 - protein, 448 aa, Arabidopsis thaliana
  peptide (1)..(448): Ceres Seq. ID no. 13591643
  misc_feature (152)..(447): Pfam Name: Extensin-like region Pfam Description: Extensin-like region
  misc_feature (152)..(447): Pfam Name: Extensin-like region Pfam Description: Extensin-like region
  misc_feature (152)..(447): Pfam Name: Extensin-like region Pfam Description: Extensin-like region
  misc_feature (152)..(445): Homolog of NCBI NO: 5917664 NR Description: extensin-like protein [Lycopersicon esculentum]
  misc_feature (151)..(434): Homolog of NCBI NO: 7489265 NR Description: proline-rich protein GPP1 - potato
  misc_feature (152)..(448): Homolog of NCBI NO: 7489265 NR Description: proline-rich protein GPP1 - potato
  misc_feature (1)..(286): Homolog of NCBI NO: 7620011 NR Description: proline-rich protein 2 [Arabidopsis thaliana]
  misc_feature (1)..(286): Homolog of NCBI NO: 15226468 NR Description: proline-rich protein family [Arabidopsis
  misc_feature (152)..(445): Homolog of NCBI NO: 5917664 NR Description: extensin-like protein [Lycopersicon esculentum]
  misc_feature (152)..(448): Homolog of NCBI NO: 7489265 NR Description: proline-rich protein GPP1 - potato
  misc_feature (1)..(286): Homolog of NCBI NO: 15226468 NR Description: proline-rich protein family [Arabidopsis
  misc_feature (1)..(286): Homolog of NCBI NO: 7620011 NR Description: proline-rich protein 2 [Arabidopsis thaliana]
  misc_feature (152)..(448): Homolog of NCBI NO: 7489265 NR Description: proline-rich protein GPP1 - potato
  misc_feature (151)..(434): Homolog of NCBI NO: 7489265 NR Description: proline-rich protein GPP1 - potato
  misc_feature (152)..(445): Homolog of NCBI NO: 5917664 NR Description: extensin-like protein [Lycopersicon esculentum]
  misc_feature (1)..(448): Homolog of NCBI NO: 15234785 NR Description: proline-rich protein family [Arabidopsis
  misc_feature (1)..(448): Homolog of NCBI NO: 7620015 NR Description: proline-rich protein 4 [Arabidopsis thaliana]
  misc_feature (1)..(448): Homolog of NCBI NO: 6782442 NR Description: proline-rich protein [Arabidopsis thaliana]
  misc_feature (16)..(446): Homolog of NCBI NO: 7489265 NR Description: proline-rich protein GPP1 - potato
  misc_feature (10)..(448): Homolog of NCBI NO: 7489265 NR Description: proline-rich protein GPP1 - potato
  misc_feature (1)..(448): Homolog of NCBI NO: 15234785 NR Description: proline-rich protein family [Arabidopsis
  misc_feature (1)..(448): Homolog of NCBI NO: 7620015 NR Description: proline-rich protein 4 [Arabidopsis thaliana]
  misc_feature (1)..(448): Homolog of NCBI NO: 6782442 NR Description: proline-rich protein [Arabidopsis thaliana]
  misc_feature (16)..(446): Homolog of NCBI NO: 7489265 NR Description: proline-rich protein GPP1 - potato
  misc_feature (10)..(448): Homolog of NCBI NO: 7489265 NR Description: proline-rich protein GPP1 - potato
  misc_feature (1)..(286): Homolog of NCBI NO: 15226468 NR Description: proline-rich protein family [Arabidopsis
  misc_feature (1)..(286): Homolog of NCBI NO: 7620011 NR Description: proline-rich protein 2 [Arabidopsis thaliana]
  misc_feature (151)..(434): Homolog of NCBI NO: 7489265 NR Description: proline-rich protein GPP1 - potato
  misc_feature (10)..(448): Homolog of NCBI NO: 7489265 NR Description: proline-rich protein GPP1 - potato
  misc_feature (16)..(446): Homolog of NCBI NO: 7489265 NR Description: proline-rich protein GPP1 - potato
  misc_feature (1)..(448): Homolog of NCBI NO: 6782442 NR Description: proline-rich protein [Arabidopsis thaliana]
  misc_feature (1)..(448): Homolog of NCBI NO: 7620015 NR Description: proline-rich protein 4 [Arabidopsis thaliana]
  misc_feature (1)..(448): Homolog of NCBI NO: 15234785 NR Description: proline-rich protein family [Arabidopsis
MRILPEPRGSVPCLLLLVSVLLSATLSLARVVEVVGYAESKIKTPHAFSGLRVTIDCKVNKGHFVTKGSGNIDDKGKFGLNIPHDIVSDNGALKEECYAQLHSAAGTPCPAHDGLESTKIVFLSKSGDKHILGLKQNLKFSPEICVSKFFWPMPKLPPFKGFDHPFPLPPPLELPPFLKKPCPPKYSPPVEVPPPVPVYEPPPKKEIPPPVPVYDPPPKKEVPPPVPVYKPPPKVELPPPIPKKPCPPKPPKIEHPPPVPVYKPPPKIEKPPPVPVYKPPPKIEHPPPVPVHKLPKKPCPPKKVDPPPVPVHKPPTKKPCPPKKVDPPPVPVHKPPPKIVIPPPKIEHPPPVPVYKPPPKIEHPPIYIPPIVKKPCPPPVPIYKPPVVIPKKPCPPPVPVYKPPVVVIPKKPCPPLPQLPPLPKFPPLPPKYIHHPKFGKWPPLPPHP

SEQ ID NO: 26271 - protein, 296 aa, Arabidopsis thaliana
  peptide (1)..(296): Ceres Seq. ID no. 13591644
  misc_feature (1)..(295): Pfam Name: Extensin-like region Pfam Description: Extensin-like region
  misc_feature (1)..(295): Pfam Name: Extensin-like region Pfam Description: Extensin-like region
  misc_feature (1)..(295): Pfam Name: Extensin-like region Pfam Description: Extensin-like region
  misc_feature (1)..(293): Homolog of NCBI NO: 5917664 NR Description: extensin-like protein [Lycopersicon esculentum]
  misc_feature (1)..(282): Homolog of NCBI NO: 7489265 NR Description: proline-rich protein GPP1 - potato
  misc_feature (1)..(296): Homolog of NCBI NO: 7489265 NR Description: proline-rich protein GPP1 - potato
  misc_feature (1)..(134): Homolog of NCBI NO: 7620011 NR Description: proline-rich protein 2 [Arabidopsis thaliana]
  misc_feature (1)..(134): Homolog of NCBI NO: 15226468 NR Description: proline-rich protein family [Arabidopsis
  misc_feature (1)..(293): Homolog of NCBI NO: 5917664 NR Description: extensin-like protein [Lycopersicon esculentum]
  misc_feature (1)..(296): Homolog of NCBI NO: 7489265 NR Description: proline-rich protein GPP1 - potato
  misc_feature (1)..(134): Homolog of NCBI NO: 15226468 NR Description: proline-rich protein family [Arabidopsis
  misc_feature (1)..(134): Homolog of NCBI NO: 7620011 NR Description: proline-rich protein 2 [Arabidopsis thaliana]
  misc_feature (1)..(296): Homolog of NCBI NO: 7489265 NR Description: proline-rich protein GPP1 - potato
  misc_feature (1)..(282): Homolog of NCBI NO: 7489265 NR Description: proline-rich protein GPP1 - potato
  misc_feature (1)..(293): Homolog of NCBI NO: 5917664 NR Description: extensin-like protein [Lycopersicon esculentum]
  misc_feature (1)..(296): Homolog of NCBI NO: 15234785 NR Description: proline-rich protein family [Arabidopsis
  misc_feature (1)..(296): Homolog of NCBI NO: 7620015 NR Description: proline-rich protein 4 [Arabidopsis thaliana]
  misc_feature (1)..(296): Homolog of NCBI NO: 6782442 NR Description: proline-rich protein [Arabidopsis thaliana]
  misc_feature (1)..(294): Homolog of NCBI NO: 7489265 NR Description: proline-rich protein GPP1 - potato
  misc_feature (1)..(296): Homolog of NCBI NO: 7489265 NR Description: proline-rich protein GPP1 - potato
  misc_feature (1)..(296): Homolog of NCBI NO: 15234785 NR Description: proline-rich protein family [Arabidopsis
  misc_feature (1)..(296): Homolog of NCBI NO: 7620015 NR Description: proline-rich protein 4 [Arabidopsis thaliana]
  misc_feature (1)..(296): Homolog of NCBI NO: 6782442 NR Description: proline-rich protein [Arabidopsis thaliana]
  misc_feature (1)..(294): Homolog of NCBI NO: 7489265 NR Description: proline-rich protein GPP1 - potato
  misc_feature (1)..(296): Homolog of NCBI NO: 7489265 NR Description: proline-rich protein GPP1 - potato
  misc_feature (1)..(134): Homolog of NCBI NO: 15226468 NR Description: proline-rich protein family [Arabidopsis
  misc_feature (1)..(134): Homolog of NCBI NO: 7620011 NR Description: proline-rich protein 2 [Arabidopsis thaliana]
  misc_feature (1)..(282): Homolog of NCBI NO: 7489265 NR Description: proline-rich protein GPP1 - potato
  misc_feature (1)..(296): Homolog of NCBI NO: 7489265 NR Description: proline-rich protein GPP1 - potato
  misc_feature (1)..(294): Homolog of NCBI NO: 7489265 NR Description: proline-rich protein GPP1 - potato
  misc_feature (1)..(296): Homolog of NCBI NO: 6782442 NR Description: proline-rich protein [Arabidopsis thaliana]
  misc_feature (1)..(296): Homolog of NCBI NO: 7620015 NR Description: proline-rich protein 4 [Arabidopsis thaliana]
  misc_feature (1)..(296): Homolog of NCBI NO: 15234785 NR Description: proline-rich protein family [Arabidopsis
MPKLPPFKGFDHPFPLPPPLELPPFLKKPCPPKYSPPVEVPPPVPVYEPPPKKEIPPPVPVYDPPPKKEVPPPVPVYKPPPKVELPPPIPKKPCPPKPPKIEHPPPVPVYKPPPKIEKPPPVPVYKPPPKIEHPPPVPVHKLPKKPCPPKKVDPPPVPVHKPPTKKPCPPKKVDPPPVPVHKPPPKIVIPPPKIEHPPPVPVYKPPPKIEHPPIYIPPIVKKPCPPPVPIYKPPVVIPKKPCPPPVPVYKPPVVVIPKKPCPPLPQLPPLPKFPPLPPKYIHHPKFGKWPPLPPHP

SEQ ID NO: 26272 - DNA, 1271 bp, Arabidopsis thaliana
  misc_feature (1)..(1271): Ceres Seq. ID no. 12335648
  misc_feature: MA Experiment ID: 108434 Result: Up-regulated in Transcription
  misc_feature: MA Experiment 108434 PARAMETER Experiment Name: At_Root_Tips_cDNA_P Parameter: Tissue Value: Root Tips
  misc_feature: MA Experiment ID: 108461 Result: Up-regulated in Transcription
  misc_feature: MA Experiment 108461 PARAMETER Experiment Name: At_Germinating_Seeds_cDNA_P Parameter: Age (day) Value: 1 vs. 0
  misc_feature: MA Experiment 108461 PARAMETER Experiment Name: At_Germinating_Seeds_cDNA_P Parameter: Tissue Value: Germinating Seeds
  misc_feature: MA Experiment ID: 108579 Result: Down-regulated in Transcription
  misc_feature: MA Experiment 108579 PARAMETER Experiment Name: At_4deg_Cold_cDNA_P Parameter: Temperature (deg C) Value: 4 vs. 22
  misc_feature: MA Experiment 108579 PARAMETER Experiment Name: At_4deg_Cold_cDNA_P Parameter: Timepoint (hr) Value: 6
  misc_feature: MA Experiment 108579 PARAMETER Experiment Name: At_4deg_Cold_cDNA_P Parameter: Tissue Value: Aerial
  misc_feature: MA Experiment ID: 108595 Result: Down-regulated in Transcription
  misc_feature: MA Experiment 108595 PARAMETER Experiment Name: At_Ler-pi_Ovule_cDNA_P Parameter: Plant Line Value: null
  misc_feature: MA Experiment ID: 20000111 Result: Up-regulated in Transcription
  misc_feature: MA Experiment 20000111 PARAMETER Experiment Name: At_42deg_Heat_cDNA_P Parameter: Temperature (deg C) Value: 42 vs. 22
  misc_feature: MA Experiment 20000111 PARAMETER Experiment Name: At_42deg_Heat_cDNA_P Parameter: Timepoint (hr) Value: 6
  misc_feature: MA Experiment 20000111 PARAMETER Experiment Name: At_42deg_Heat_cDNA_P Parameter: Tissue Value: Aerial
  misc_feature: MA Experiment ID: 20000113 Result: Up-regulated in Transcription
  misc_feature: MA Experiment 20000113 PARAMETER Experiment Name: At_42deg_Heat_cDNA_P Parameter: Temperature (deg C) Value: 42 vs. 22
  misc_feature: MA Experiment 20000113 PARAMETER Experiment Name: At_42deg_Heat_cDNA_P Parameter: Timepoint (hr) Value: 8
  misc_feature: MA Experiment 20000113 PARAMETER Experiment Name: At_42deg_Heat_cDNA_P Parameter: Tissue Value: Aerial
  misc_feature: MA Experiment ID: 20000173 Result: Up-regulated in Transcription
  misc_feature: MA Experiment 20000173 PARAMETER Experiment Name: At_42deg_Heat_P Parameter: Age (day) Value: 14
  misc_feature: MA Experiment 20000173 PARAMETER Experiment Name: At_42deg_Heat_P Parameter: Organism Value: A. thaliana
  misc_feature: MA Experiment 20000173 PARAMETER Experiment Name: At_42deg_Heat_P Parameter: Plant Line Value: WS
  misc_feature: MA Experiment 20000173 PARAMETER Experiment Name: At_42deg_Heat_P Parameter: Temperature (deg C) Value: 42 vs. 22
  misc_feature: MA Experiment 20000173 PARAMETER Experiment Name: At_42deg_Heat_P Parameter: Timepoint (hr) Value: 6
  misc_feature: MA Experiment 20000173 PARAMETER Experiment Name: At_42deg_Heat_P Parameter: Tissue Value: Aerial
  misc_feature: MA Experiment ID: 20000179 Result: Up-regulated in Transcription
  misc_feature: MA Experiment 20000179 PARAMETER Experiment Name: At_Germinating_Seeds_P Parameter: Age (hr) Value: 6 vs. 0
  misc_feature: MA Experiment 20000179 PARAMETER Experiment Name: At_Germinating_Seeds_P Parameter: Tissue Value: Germinating Seeds
  misc_feature: MA Experiment ID: 20000180 Result: Up-regulated in Transcription
  misc_feature: MA Experiment 20000180 PARAMETER Experiment Name: At_Germinating_Seeds_P Parameter: Age (hr) Value: 24 vs. 0
  misc_feature: MA Experiment 20000180 PARAMETER Experiment Name: At_Germinating_Seeds_P Parameter: Tissue Value: Germinating Seeds
  misc_feature: MA Experiment ID: 20000234 Result: Up-regulated in Transcription
  misc_feature: MA Experiment 20000234 PARAMETER Experiment Name: At_Siliques_P Parameter: Age (day) Value: 21
  misc_feature: MA Experiment 20000234 PARAMETER Experiment Name: At_Siliques_P Parameter: Organism Value: A. thaliana
  misc_feature: MA Experiment 20000234 PARAMETER Experiment Name: At_Siliques_P Parameter: Plant Line Value: WS
  misc_feature: MA Experiment 20000234 PARAMETER Experiment Name: At_Siliques_P Parameter: Tissue Value: Less Than 5mm Siliques vs. Whole Plant
  misc_feature: MA Experiment ID: 20000265 Result: Up-regulated in Transcription
  misc_feature: MA Experiment 20000265 PARAMETER Experiment Name: At_Open_Flower_P Parameter: Age (day) Value: 21
  misc_feature: MA Experiment 20000265 PARAMETER Experiment Name: At_Open_Flower_P Parameter: Plant Line Value: WS
  misc_feature: MA Experiment 20000265 PARAMETER Experiment Name: At_Open_Flower_P Parameter: Tissue Value: Closed Flower vs. Whole Plant
  misc_feature: MA Experiment ID: 20000286 Result: Up-regulated in Transcription
  misc_feature: MA Experiment 20000286 PARAMETER Experiment Name: At_Open_Flower_P Parameter: Age (day) Value: 21
  misc_feature: MA Experiment 20000286 PARAMETER Experiment Name: At_Open_Flower_P Parameter: Plant Line Value: WS
  misc_feature: MA Experiment 20000286 PARAMETER Experiment Name: At_Open_Flower_P Parameter: Tissue Value: Half Open vs. Whole Plant
  misc_feature: MA Experiment ID: 20000438 Result: Up-regulated in Transcription
  misc_feature: MA Experiment 20000438 PARAMETER Experiment Name: At_Shoots__P Parameter: Age (day) Value: 14
  misc_feature: MA Experiment 20000438 PARAMETER Experiment Name: At_Shoots__P Parameter: Tissue Value: Shoots vs. Whole Plant
  misc_feature: MA Experiment ID: 20000794 Result: Down-regulated in Transcription
  misc_feature: MA Experiment 20000794 PARAMETER Experiment Name: At_Petals_P Parameter: Age (day) Value: 23-25 days
  misc_feature: MA Experiment 20000794 PARAMETER Experiment Name: At_Petals_P Parameter: Plant Line Value: WS
  misc_feature: MA Experiment 20000794 PARAMETER Experiment Name: At_Petals_P Parameter: Tissue Value: Petals vs. Whole plant
  misc_feature: MA Experiment ID: 20001451 Result: Down-regulated in Transcription
  misc_feature: MA Experiment 20001451 PARAMETER Experiment Name: At_Far-red-induction_P Parameter: Age (day) Value: 7
  misc_feature: MA Experiment 20001451 PARAMETER Experiment Name: At_Far-red-induction_P Parameter: Light Value: Far-red vs. White
  misc_feature: MA Experiment 20001451 PARAMETER Experiment Name: At_Far-red-induction_P Parameter: Organism Value: A. thaliana
  misc_feature: MA Experiment 20001451 PARAMETER Experiment Name: At_Far-red-induction_P Parameter: Plant Line Value: Columbia
  misc_feature: MA Experiment 20001451 PARAMETER Experiment Name: At_Far-red-induction_P Parameter: Timepoint (hr) Value: 24
  misc_feature: MA Experiment 20001451 PARAMETER Experiment Name: At_Far-red-induction_P Parameter: Tissue Value: Whole Plant
  misc_feature: MA Experiment ID: 20001757 Result: Up-regulated in Transcription
  misc_feature: MA Experiment 20001757 PARAMETER Experiment Name: At_50mM_NH4NO3_L-to-H_P Parameter: Timepoint (hr) Value: 6
  misc_feature: MA Experiment 20001757 PARAMETER Experiment Name: At_50mM_NH4NO3_L-to-H_P Parameter: Tissue Value: Leaf
  misc_feature: MA Experiment 20001757 PARAMETER Experiment Name: At_50mM_NH4NO3_L-to-H_P Parameter: Treatment Value: 50mM NH4NO3 vs 100mM Mannitol
  misc_feature: MA Experiment ID: 20001905 Result: Down-regulated in Transcription
  misc_feature: MA Experiment 20001905 PARAMETER Experiment Name: At_Drought_Reproduction_P Parameter: Age (day) Value: 40
  misc_feature: MA Experiment 20001905 PARAMETER Experiment Name: At_Drought_Reproduction_P Parameter: Organism Value: A. thaliana
  misc_feature: MA Experiment 20001905 PARAMETER Experiment Name: At_Drought_Reproduction_P Parameter: Plant Line Value: WS
  misc_feature: MA Experiment 20001905 PARAMETER Experiment Name: At_Drought_Reproduction_P Parameter: Timepoint (day) Value: 10
  misc_feature: MA Experiment 20001905 PARAMETER Experiment Name: At_Drought_Reproduction_P Parameter: Tissue Value: Rosettes
  misc_feature: MA Experiment 20001905 PARAMETER Experiment Name: At_Drought_Reproduction_P Parameter: Treatment Value: Drought vs. No Drought
gtcctcaatacttcggtgtcaatcatcctcttcctctaaattctcttcttctctttgctgctacagaaaaagaatcaagctttagaggcaagcaaggactcactcacccacaagtatcctcaccccatctactcatggacacagcattgacctcagaatcaggctgtgccgttatagccgataagggattcaatgtggatccttttttggtcgaggctcttcaaaaccctcgacatcgtctaacgattttgcggatggaacttgatgttcagaggttcttgcaaagccctgatcagcagcaattcgagttccagcatttccctacatcatacctccgtcttgcggctcatcgtgttgctaatcactatggactaattacatcagttcgagatggtggtgcagatggtaatgagagcagaattgtcgtgactaaatctagtgatagcagatttcctgctgctcgactatctgaaatccctgtgaaacagtcagaaactggcaagtttgagcatatgaaagttgttataaagccaagacctactaaaggatctggaatggaaggtgatgaactgaaaggtggtcttctgaaaagtgttgaagagaggaaagaagattacgacagggctcgagcacgcatatttaacggtcttgtgaacattgattgtaacgattcttcatctgaaactaatccttggagggtgaattgtagttctagcagagatgaaaatcaagtgttgaagaatggtaatatcgaagcagacaagaacaatatctctaggaagagcaatcctgcatctcgtattgcaattctcagagacagagagaaagatcgatatgaccctgactatgaccgcagcaattacaggtacattagtaacctcccagtcgatcaaaatttatgcgtggcacacttcaacattcagacaatggggacaccaatctatgatatgggatttagagggtatagtccaactgctcctccatctcttaacttgggtcaacattctgtcatgagcccctgcgtcaccacaggtttaaaccagccttcaagagatgctgctatgtacatgcaatggccaaatgcagcagctgtgatgtatactcattcatatgaccacttcagaaactccccttttcaggcgcagttctatccgcagccccttagtttcgattacatgcagaaccggtaattacttttctcatcatggctaaggatttgtgtaatccagattttgagacagtttgatgtcaaaaatagacaaacttaacct

SEQ ID NO: 26273 - protein, 395 aa, Arabidopsis thaliana
  peptide (1)..(395): Ceres Seq. ID no. 12335649
  misc_feature (64)..(383): Homolog of NCBI NO: 29367411 NR Description: unknown [Oryza sativa (japonica cultivar-group)]
  misc_feature (56)..(375): Homolog of NCBI NO: 18414788 NR Description: putative protein
  misc_feature (56)..(383): Homolog of NCBI NO: 10178049 NR Description: gb|AAF19572.1~gene_id:MUG13.4~strong similarity
  misc_feature (56)..(366): Homolog of NCBI NO: 21592735 NR Description: unknown [Arabidopsis thaliana]
  misc_feature (56)..(366): Homolog of NCBI NO: 18398995 NR Description: expressed protein
  misc_feature (56)..(366): Homolog of NCBI NO: 30681485 NR Description: expressed protein [Arabidopsis thaliana]
  misc_feature (43)..(395): Homolog of NCBI NO: 15228989 NR Description: putative protein
  misc_feature (45)..(292): Homolog of NCBI NO: 7487238 NR Description: hypothetical protein At2g40960 [imported] -
  misc_feature (45)..(395): Homolog of NCBI NO: 18405560 NR Description: expressed protein
  misc_feature (45)..(395): Homolog of NCBI NO: 21592404 NR Description: unknown [Arabidopsis thaliana]
PQYFGVNHPLPLNSLLLFAATEKESSFRGKQGLTHPQVSSPHLLMDTALTSESGCAVIADKGFNVDPFLVEALQNPRHRLTILRMELDVQRFLQSPDQQQFEFQHFPTSYLRLAAHRVANHYGLITSVRDGGADGNESRIVVTKSSDSRFPAARLSEIPVKQSETGKFEHMKVVIKPRPTKGSGMEGDELKGGLLKSVEERKEDYDRARARIFNGLVNIDCNDSSSETNPWRVNCSSSRDENQVLKNGNIEADKNNISRKSNPASRIAILRDREKDRYDPDYDRSNYRYISNLPVDQNLCVAHFNIQTMGTPIYDMGFRGYSPTAPPSLNLGQHSVMSPCVTTGLNQPSRDAAMYMQWPNAAAVMYTHSYDHFRNSPFQAQFYPQPLSFDYMQNR

SEQ ID NO: 26274 - protein, 351 aa, Arabidopsis thaliana
  peptide (1)..(351): Ceres Seq. ID no. 12335650
  misc_feature (20)..(339): Homolog of NCBI NO: 29367411 NR Description: unknown [Oryza sativa (japonica cultivar-group)]
  misc_feature (12)..(331): Homolog of NCBI NO: 18414788 NR Description: putative protein
  misc_feature (12)..(339): Homolog of NCBI NO: 10178049 NR Description: gb|AAF19572.1~gene_id:MUG13.4~strong similarity
  misc_feature (12)..(322): Homolog of NCBI NO: 21592735 NR Description: unknown [Arabidopsis thaliana]
  misc_feature (12)..(322): Homolog of NCBI NO: 18398995 NR Description: expressed protein
  misc_feature (12)..(322): Homolog of NCBI NO: 30681485 NR Description: expressed protein [Arabidopsis thaliana]
  misc_feature (1)..(351): Homolog of NCBI NO: 15228989 NR Description: putative protein
  misc_feature (1)..(248): Homolog of NCBI NO: 7487238 NR Description: hypothetical protein At2g40960 [imported] -
  misc_feature (1)..(351): Homolog of NCBI NO: 18405560 NR Description: expressed protein
  misc_feature (1)..(351): Homolog of NCBI NO: 21592404 NR Description: unknown [Arabidopsis thaliana]
MDTALTSESGCAVIADKGFNVDPFLVEALQNPRHRLTILRMELDVQRFLQSPDQQQFEFQHFPTSYLRLAAHRVANHYGLITSVRDGGADGNESRIVVTKSSDSRFPAARLSEIPVKQSETGKFEHMKVVIKPRPTKGSGMEGDELKGGLLKSVEERKEDYDRARARIFNGLVNIDCNDSSSETNPWRVNCSSSRDENQVLKNGNIEADKNNISRKSNPASRIAILRDREKDRYDPDYDRSNYRYISNLPVDQNLCVAHFNIQTMGTPIYDMGFRGYSPTAPPSLNLGQHSVMSPCVTTGLNQPSRDAAMYMQWPNAAAVMYTHSYDHFRNSPFQAQFYPQPLSFDYMQNR

SEQ ID NO: 26275 - protein, 311 aa, Arabidopsis thaliana
  peptide (1)..(311): Ceres Seq. ID no. 12335651
  misc_feature (1)..(291): Homolog of NCBI NO: 18414788 NR Description: putative protein
  misc_feature (1)..(299): Homolog of NCBI NO: 10178049 NR Description: gb|AAF19572.1~gene_id:MUG13.4~strong similarity
  misc_feature (1)..(282): Homolog of NCBI NO: 21592735 NR Description: unknown [Arabidopsis thaliana]
  misc_feature (1)..(282): Homolog of NCBI NO: 18398995 NR Description: expressed protein
  misc_feature (1)..(282): Homolog of NCBI NO: 30681485 NR Description: expressed protein [Arabidopsis thaliana]
  misc_feature (1)..(311): Homolog of NCBI NO: 15228989 NR Description: putative protein
  misc_feature (1)..(208): Homolog of NCBI NO: 7487238 NR Description: hypothetical protein At2g40960 [imported] -
  misc_feature (1)..(311): Homolog of NCBI NO: 18405560 NR Description: expressed protein
  misc_feature (1)..(311): Homolog of NCBI NO: 21592404 NR Description: unknown [Arabidopsis thaliana]
  misc_feature (1)..(299): Homolog of NCBI NO: 29367411 NR Description: unknown [Oryza sativa (japonica cultivar-group)]
MELDVQRFLQSPDQQQFEFQHFPTSYLRLAAHRVANHYGLITSVRDGGADGNESRIVVTKSSDSRFPAARLSEIPVKQSETGKFEHMKVVIKPRPTKGSGMEGDELKGGLLKSVEERKEDYDRARARIFNGLVNIDCNDSSSETNPWRVNCSSSRDENQVLKNGNIEADKNNISRKSNPASRIAILRDREKDRYDPDYDRSNYRYISNLPVDQNLCVAHFNIQTMGTPIYDMGFRGYSPTAPPSLNLGQHSVMSPCVTTGLNQPSRDAAMYMQWPNAAAVMYTHSYDHFRNSPFQAQFYPQPLSFDYMQNR

SEQ ID NO: 26276 - DNA, 1408 bp, Arabidopsis thaliana
  misc_feature (1)..(1408): Ceres Seq. ID no. 12335876
  misc_feature: MA Experiment ID: 20000179 Result: Up-regulated in Transcription
  misc_feature: MA Experiment 20000179 PARAMETER Experiment Name: At_Germinating_Seeds_P Parameter: Age (hr) Value: 6 vs. 0
  misc_feature: MA Experiment 20000179 PARAMETER Experiment Name: At_Germinating_Seeds_P Parameter: Tissue Value: Germinating Seeds
  misc_feature: MA Experiment ID: 20000224 Result: Down-regulated in Transcription
  misc_feature: MA Experiment ID: 20000496 Result: Up-regulated in Transcription
  misc_feature: MA Experiment 20000496 PARAMETER Experiment Name: At_Guard_Cells_P Parameter: Harvest Date Value: 7/19/2002
  misc_feature: MA Experiment 20000496 PARAMETER Experiment Name: At_Guard_Cells_P Parameter: Organism Value: Canola
  misc_feature: MA Experiment 20000496 PARAMETER Experiment Name: At_Guard_Cells_P Parameter: Tissue Value: Guard Cells vs. Leaves
gttccctttttcattgtattcctcaaatctctttacttgatcgttggttctctcaaaaatcagatttttatttctgggttttgttcgattttgtgatcatggcggtcattgagagcgtcggagctaatactactgtggaagctggtggtttgatctcgccgtcgccgccgtcttccgtcaccagtcaagaatcaggagcttcttctaacaacgatcacggtggaaatggaatccatgatgagatcggagtccacgtggcgagatccgacggtggtgagagttttaagcgtgatatgagagagcttcacgagctcttgtctaagcttaatcctatggctaaagagtttattcctccttcacttactaagccagttgttaatggttttaacggcggtttcttcgccgttaataatggctttgttgctgccggaaatttccccgtcaacgaagacggtagctttcgtcggaagaagtcgttcggacaacaagggaaacggagaatgaatcctaggacaagtttggctcagcgtgaagagatcataagaagaactgtctatgtgtctgatattgaccaacaggtcactgaggagcagcttgctggtttgtttatcggctttggacaggttgttgactgtcgtatatgtggtgatcccaactcagtacttaggtttgctttcatcgagttcactgatgaagtgggtgcaaggactgctctgaatttgtctgggacgatgcttggattctatcctgtgaaggttatgccgtctaagacagctattgcaccggttaacccaaccttcttgccaaggactgaagatgagcgtgagatgtgtgcaagaactatctactgcactaacattgacaagaagctcactcaaaccgacattaaactcttctttgagtctgtgtgtggcgaggtgtaccgtctgaggctactgggcgattatcatcatccaactcgcatcggcttcgtggagtttgtcatggctgaaagcgcgatagcggctctcaactgcagtggtgtccttcttggttctttaccgataagggtgagtccatcaaagacaccggttcgttcccgtgctatcccgcgacatcaaatgcattaaccgtagctacaagttttatatatatttctgctcctcacagacatgtaaagaatgtttgtctgaaacttctggttcttctgttttcccgtatgtaatgctagaagcttgatgatgcttctgttgccttttgcttttgggtaaatctcttagggagagttttttcgatttgggttcctacgtttagtagtttacacagagcagaagagtaaaacactgagagaggcttttgaagattgtctctgttttttagttatttatactcttacccctgaagttattagaaacttgctttggtgctt

SEQ ID NO: 26277 - protein, 368 aa, Arabidopsis thaliana
  peptide (1)..(368): Ceres Seq. ID no. 12335877
  misc_feature (281)..(350): Pfam Name: RNA recognition motif. (a.k.a. RRM, RBD, or RNP domain) Pfam Description: RNA recognition motif. (a.k.a. RRM, RBD, or RNP
  misc_feature (94)..(309): Homolog of NCBI NO: 34903832 NR Description: ATT4F9_7(AL049523|pid:g4539439) Arabidopsis
  misc_feature (104)..(350): Homolog of NCBI NO: 8671859 NR Description: Contains similarity to RNA-binding protein from thaliana gi|2129727 and contains RNA recognition PF|00076 domain.
  misc_feature (105)..(358): Homolog of NCBI NO: 15238531 NR Description: RNA-binding protein, putative; protein id:
  misc_feature (98)..(360): Homolog of NCBI NO: 15220902 NR Description: RNA-binding protein, putative; protein id:
  misc_feature (97)..(360): Homolog of NCBI NO: 15231858 NR Description: RNA-binding protein, putative; protein id:
  misc_feature (167)..(368): Homolog of NCBI NO: 14030687 NR Description: At1g32790 [Arabidopsis thaliana]
  misc_feature (88)..(364): Homolog of NCBI NO: 15229132 NR Description: RNA-binding protein, putative; protein id:
  misc_feature (54)..(368): Homolog of NCBI NO: 15223304 NR Description: RNA-binding protein, putative
  misc_feature (33)..(368): Homolog of NCBI NO: 1174153 NR Description: RNA-binding protein
  misc_feature (33)..(368): Homolog of NCBI NO: 15235177 NR Description: RNA-binding protein RBP37
SLFHCIPQISLLDRWFSQKSDFYFWVLFDFVIMAVIESVGANTTVEAGGLISPSPPSSVTSQESGASSNNDHGGNGIHDEIGVHVARSDGGESFKRDMRELHELLSKLNPMAKEFIPPSLTKPVVNGFNGGFFAVNNGFVAAGNFPVNEDGSFRRKKSFGQQGKRRMNPRTSLAQREEIIRRTVYVSDIDQQVTEEQLAGLFIGFGQVVDCRICGDPNSVLRFAFIEFTDEVGARTALNLSGTMLGFYPVKVMPSKTAIAPVNPTFLPRTEDEREMCARTIYCTNIDKKLTQTDIKLFFESVCGEVYRLRLLGDYHHPTRIGFVEFVMAESAIAALNCSGVLLGSLPIRVSPSKTPVRSRAIPRHQMH

SEQ ID NO: 26278 - protein, 336 aa, Arabidopsis thaliana
  peptide (1)..(336): Ceres Seq. ID no. 12335878
  misc_feature (249)..(318): Pfam Name: RNA recognition motif. (a.k.a. RRM, RBD, or RNP domain) Pfam Description: RNA recognition motif. (a.k.a. RRM, RBD, or RNP
  misc_feature (62)..(277): Homolog of NCBI NO: 34903832 NR Description: ATT4F9_7(AL049523|pid:g4539439) Arabidopsis
  misc_feature (72)..(318): Homolog of NCBI NO: 8671859 NR Description: Contains similarity to RNA-binding protein from thaliana gi|2129727 and contains RNA recognition PF|00076 domain.
  misc_feature (73)..(326): Homolog of NCBI NO: 15238531 NR Description: RNA-binding protein, putative; protein id:
  misc_feature (66)..(328): Homolog of NCBI NO: 15220902 NR Description: RNA-binding protein, putative; protein id:
  misc_feature (65)..(328): Homolog of NCBI NO: 15231858 NR Description: RNA-binding protein, putative; protein id:
  misc_feature (135)..(336): Homolog of NCBI NO: 14030687 NR Description: At1g32790 [Arabidopsis thaliana]
  misc_feature (56)..(332): Homolog of NCBI NO: 15229132 NR Description: RNA-binding protein, putative; protein id:
  misc_feature (22)..(336): Homolog of NCBI NO: 15223304 NR Description: RNA-binding protein, putative
  misc_feature (1)..(336): Homolog of NCBI NO: 1174153 NR Description: RNA-binding protein
  misc_feature (1)..(336): Homolog of NCBI NO: 15235177 NR Description: RNA-binding protein RBP37
MAVIESVGANTTVEAGGLISPSPPSSVTSQESGASSNNDHGGNGIHDEIGVHVARSDGGESFKRDMRELHELLSKLNPMAKEFIPPSLTKPVVNGFNGGFFAVNNGFVAAGNFPVNEDGSFRRKKSFGQQGKRRMNPRTSLAQREEIIRRTVYVSDIDQQVTEEQLAGLFIGFGQVVDCRICGDPNSVLRFAFIEFTDEVGARTALNLSGTMLGFYPVKVMPSKTAIAPVNPTFLPRTEDEREMCARTIYCTNIDKKLTQTDIKLFFESVCGEVYRLRLLGDYHHPTRIGFVEFVMAESAIAALNCSGVLLGSLPIRVSPSKTPVRSRAIPRHQMH

SEQ ID NO: 26279 - protein, 271 aa, Arabidopsis thaliana
  peptide (1)..(271): Ceres Seq. ID no. 12335879
  misc_feature (184)..(253): Pfam Name: RNA recognition motif. (a.k.a. RRM, RBD, or RNP domain) Pfam Description: RNA recognition motif. (a.k.a. RRM, RBD, or RNP
  misc_feature (1)..(212): Homolog of NCBI NO: 34903832 NR Description: ATT4F9_7(AL049523|pid:g4539439) Arabidopsis
  misc_feature (7)..(253): Homolog of NCBI NO: 8671859 NR Description: Contains similarity to RNA-binding protein from thaliana gi|2129727 and contains RNA recognition PF|00076 domain.
  misc_feature (8)..(261): Homolog of NCBI NO: 15238531 NR Description: RNA-binding protein, putative; protein id:
  misc_feature (1)..(263): Homolog of NCBI NO: 15220902 NR Description: RNA-binding protein, putative; protein id:
  misc_feature (1)..(263): Homolog of NCBI NO: 15231858 NR Description: RNA-binding protein, putative; protein id:
  misc_feature (70)..(271): Homolog of NCBI NO: 14030687 NR Description: At1g32790 [Arabidopsis thaliana]
  misc_feature (1)..(267): Homolog of NCBI NO: 15229132 NR Description: RNA-binding protein, putative; protein id:
  misc_feature (1)..(271): Homolog of NCBI NO: 15223304 NR Description: RNA-binding protein, putative
  misc_feature (1)..(271): Homolog of NCBI NO: 1174153 NR Description: RNA-binding protein
  misc_feature (1)..(271): Homolog of NCBI NO: 15235177 NR Description: RNA-binding protein RBP37
MRELHELLSKLNPMAKEFIPPSLTKPVVNGFNGGFFAVNNGFVAAGNFPVNEDGSFRRKKSFGQQGKRRMNPRTSLAQREEIIRRTVYVSDIDQQVTEEQLAGLFIGFGQVVDCRICGDPNSVLRFAFIEFTDEVGARTALNLSGTMLGFYPVKVMPSKTAIAPVNPTFLPRTEDEREMCARTIYCTNIDKKLTQTDIKLFFESVCGEVYRLRLLGDYHHPTRIGFVEFVMAESAIAALNCSGVLLGSLPIRVSPSKTPVRSRAIPRHQMH

SEQ ID NO: 26280 - DNA, 1165 bp, Arabidopsis thaliana
  misc_feature (1)..(1165): Ceres Seq. ID no. 12395664
  misc_feature: MA Experiment ID: 108434 Result: Down-regulated in Transcription
  misc_feature: MA Experiment 108434 PARAMETER Experiment Name: At_Root_Tips_cDNA_P Parameter: Tissue Value: Root Tips
  misc_feature: MA Experiment ID: 108574 Result: Up-regulated in Transcription
  misc_feature: MA Experiment 108574 PARAMETER Experiment Name: At_Wounding__cDNA_P Parameter: Timepoint (hr) Value: 1
  misc_feature: MA Experiment 108574 PARAMETER Experiment Name: At_Wounding__cDNA_P Parameter: Tissue Value: Aerial
  misc_feature: MA Experiment 108574 PARAMETER Experiment Name: At_Wounding__cDNA_P Parameter: Treatment Value: Wounding vs. No Wounding
  misc_feature: MA Experiment ID: 108579 Result: Up-regulated in Transcription
  misc_feature: MA Experiment 108579 PARAMETER Experiment Name: At_4deg_Cold_cDNA_P Parameter: Temperature (deg C) Value: 4 vs. 22
  misc_feature: MA Experiment 108579 PARAMETER Experiment Name: At_4deg_Cold_cDNA_P Parameter: Timepoint (hr) Value: 6
  misc_feature: MA Experiment 108579 PARAMETER Experiment Name: At_4deg_Cold_cDNA_P Parameter: Tissue Value: Aerial
  misc_feature: MA Experiment ID: 108585 Result: Up-regulated in Transcription
  misc_feature: MA Experiment 108585 PARAMETER Experiment Name: At_5mM_NaNP_cDNA_P Parameter: Timepoint (hr) Value: 6
  misc_feature: MA Experiment 108585 PARAMETER Experiment Name: At_5mM_NaNP_cDNA_P Parameter: Tissue Value: Aerial
  misc_feature: MA Experiment 108585 PARAMETER Experiment Name: At_5mM_NaNP_cDNA_P Parameter: Treatment Value: null
  misc_feature: MA Experiment ID: 108595 Result: Up-regulated in Transcription
  misc_feature: MA Experiment 108595 PARAMETER Experiment Name: At_Ler-pi_Ovule_cDNA_P Parameter: Plant Line Value: null
  misc_feature: MA Experiment ID: 20000113 Result: Up-regulated in Transcription
  misc_feature: MA Experiment 20000113 PARAMETER Experiment Name: At_42deg_Heat_cDNA_P Parameter: Temperature (deg C) Value: 42 vs. 22
  misc_feature: MA Experiment 20000113 PARAMETER Experiment Name: At_42deg_Heat_cDNA_P Parameter: Timepoint (hr) Value: 8
  misc_feature: MA Experiment 20000113 PARAMETER Experiment Name: At_42deg_Heat_cDNA_P Parameter: Tissue Value: Aerial
  misc_feature: MA Experiment ID: 20000171 Result: Down-regulated in Transcription
  misc_feature: MA Experiment 20000171 PARAMETER Experiment Name: At_42deg_Heat_P Parameter: Age (day) Value: 14
  misc_feature: MA Experiment 20000171 PARAMETER Experiment Name: At_42deg_Heat_P Parameter: Organism Value: A. thaliana
  misc_feature: MA Experiment 20000171 PARAMETER Experiment Name: At_42deg_Heat_P Parameter: Plant Line Value: WS
  misc_feature: MA Experiment 20000171 PARAMETER Experiment Name: At_42deg_Heat_P Parameter: Temperature (deg C) Value: 42 vs. 22
  misc_feature: MA Experiment 20000171 PARAMETER Experiment Name: At_42deg_Heat_P Parameter: Timepoint (hr) Value: 1
  misc_feature: MA Experiment 20000171 PARAMETER Experiment Name: At_42deg_Heat_P Parameter: Tissue Value: Aerial
  misc_feature: MA Experiment ID: 20000265 Result: Down-regulated in Transcription
  misc_feature: MA Experiment 20000265 PARAMETER Experiment Name: At_Open_Flower_P Parameter: Age (day) Value: 21
  misc_feature: MA Experiment 20000265 PARAMETER Experiment Name: At_Open_Flower_P Parameter: Plant Line Value: WS
  misc_feature: MA Experiment 20000265 PARAMETER Experiment Name: At_Open_Flower_P Parameter: Tissue Value: Closed Flower vs. Whole Plant
  misc_feature: MA Experiment ID: 20000495 Result: Down-regulated in Transcription
  misc_feature: MA Experiment 20000495 PARAMETER Experiment Name: At_Guard_Cells_P Parameter: Harvest Date Value: 8/2/2002
  misc_feature: MA Experiment 20000495 PARAMETER Experiment Name: At_Guard_Cells_P Parameter: Organism Value: A. thaliana
  misc_feature: MA Experiment 20000495 PARAMETER Experiment Name: At_Guard_Cells_P Parameter: Tissue Value: Guard Cells vs. Leaves
atttttgtcacaccacacaaagtcgtctttggagagagagaagggccaacgaccacacatacacacacagaccaataaaccatgagcccttccaagcagcgacatcgttgctctaccggagaaaacaagtcaaagccggtcagatccgcttcatcctccgccataccggaatggattaccgaatcaaccaacggcggatctctccgtcgcgtagatcccgatacaggtaccgacggctgggcttctcctcccggcgatgttttctctctccgctccgattcttacttgtccaaaaaacaaaaaactcccgccggtgattacctcctttctcccgccggcatggactggctcaaatcaagtaccaaactcgagaacgcgctcgctcgtcccgataaccgtgtagctcacgcgcttagaaaagctcaatctcgcggtcaatctctcaagagcttcatcttcgccgtgaatctccagattccaggtaaggatcatcacagcgccgtgttctacttcgcgacggaagaaccgattccttccggttcgcttctccaccggttcatcaacggcgacgatgccttccggaaccagagattcaaaatcgtgaatcggattgtgaaaggtccttgggtagttaaagccgcggtggggaactatagcgcttgtcttctaggtaaagccttgacgtgcaattaccacagaggtcctaactactttgaaattgacgtcgacattagcagctcagcgatcgcaacggcgattctacggctggctttagggtacgtgacgagcgtgacaatcgatatggggttcttagcagaggcacaaacggaagaggagctgccggagagattaatcggagctgttagagtttgccaaatggagatgtcgtcagcgtttgttgtcgacgcgccaccaccgcagcaactgccgtcacaaccgtgtagaacattaagttcggcgaaagttaaccatgacgaggacgaggattgagattaaaccacaacatgtcaatgaagtatttttctctttactgtctctcaaagaatctgaaacaattttcattaatctcaatcaaatttatattaattatttttttgttaatggattttgtaattaatcaagaggtttcatgatatatttaatggaattaaattgaagttcgacg

SEQ ID NO: 26281 - protein, 302 aa, Arabidopsis thaliana
  peptide (1)..(302): Ceres Seq. ID no. 12395665
  misc_feature (22)..(275): Homolog of NCBI NO: 21618178 NR Description: unknown [Arabidopsis thaliana]
  misc_feature (22)..(275): Homolog of NCBI NO: 25406892 NR Description: hypothetical protein [imported] - Arabidopsis
  misc_feature (22)..(275): Homolog of NCBI NO: 18390605 NR Description: expressed protein
  misc_feature (15)..(142): Homolog of NCBI NO: 15238675 NR Description: putative protein; protein id: At5g25020.1
  misc_feature (168)..(302): Homolog of NCBI NO: 15238675 NR Description: putative protein; protein id: At5g25020.1
  misc_feature (15)..(301): Homolog of NCBI NO: 15238674 NR Description: putative protein; protein id: At5g25010.1
  misc_feature (9)..(300): Homolog of NCBI NO: 15238672 NR Description: putative protein
  misc_feature (1)..(302): Homolog of NCBI NO: 21592409 NR Description: unknown [Arabidopsis thaliana]
  misc_feature (1)..(302): Homolog of NCBI NO: 15238248 NR Description: putative protein
  misc_feature (1)..(302): Homolog of NCBI NO: 22655107 NR Description: putative protein [Arabidopsis thaliana]
MSPSKQRHRCSTGENKSKPVRSASSSAIPEWITESTNGGSLRRVDPDTGTDGWASPPGDVFSLRSDSYLSKKQKTPAGDYLLSPAGMDWLKSSTKLENALARPDNRVAHALRKAQSRGQSLKSFIFAVNLQIPGKDHHSAVFYFATEEPIPSGSLLHRFINGDDAFRNQRFKIVNRIVKGPWVVKAAVGNYSACLLGKALTCNYHRGPNYFEIDVDISSSAIATAILRLALGYVTSVTIDMGFLAEAQTEEELPERLIGAVRVCQMEMSSAFVVDAPPPQQLPSQPCRTLSSAKVNHDEDED

SEQ ID NO: 26282 - protein, 216 aa, Arabidopsis thaliana
  peptide (1)..(216): Ceres Seq. ID no. 12395666
  misc_feature (1)..(189): Homolog of NCBI NO: 21618178 NR Description: unknown [Arabidopsis thaliana]
  misc_feature (1)..(189): Homolog of NCBI NO: 25406892 NR Description: hypothetical protein [imported] - Arabidopsis
  misc_feature (1)..(189): Homolog of NCBI NO: 18390605 NR Description: expressed protein
  misc_feature (1)..(56): Homolog of NCBI NO: 15238675 NR Description: putative protein; protein id: At5g25020.1
  misc_feature (82)..(216): Homolog of NCBI NO: 15238675 NR Description: putative protein; protein id: At5g25020.1
  misc_feature (1)..(215): Homolog of NCBI NO: 15238674 NR Description: putative protein; protein id: At5g25010.1
  misc_feature (1)..(214): Homolog of NCBI NO: 15238672 NR Description: putative protein
  misc_feature (1)..(216): Homolog of NCBI NO: 21592409 NR Description: unknown [Arabidopsis thaliana]
  misc_feature (1)..(216): Homolog of NCBI NO: 15238248 NR Description: putative protein
  misc_feature (1)..(216): Homolog of NCBI NO: 22655107 NR Description: putative protein [Arabidopsis thaliana]
MDWLKSSTKLENALARPDNRVAHALRKAQSRGQSLKSFIFAVNLQIPGKDHHSAVFYFATEEPIPSGSLLHRFINGDDAFRNQRFKIVNRIVKGPWVVKAAVGNYSACLLGKALTCNYHRGPNYFEIDVDISSSAIATAILRLALGYVTSVTIDMGFLAEAQTEEELPERLIGAVRVCQMEMSSAFVVDAPPPQQLPSQPCRTLSSAKVNHDEDED

SEQ ID NO: 26283 - DNA, 1214 bp, Arabidopsis thaliana
  misc_feature (1)..(1214): Ceres Seq. ID no. 12333771
  misc_feature: MA Experiment ID: 20000180 Result: Down-regulated in Transcription
  misc_feature: MA Experiment 20000180 PARAMETER Experiment Name: At_Germinating_Seeds_P Parameter: Age (hr) Value: 24 vs. 0
  misc_feature: MA Experiment 20000180 PARAMETER Experiment Name: At_Germinating_Seeds_P Parameter: Tissue Value: Germinating Seeds
aggttgttgagttttgtactaaaaccctaaatcagagaatttagcgttgtttcttcttcaatagacacaaaaaatggggaggaagagaaagcacagcgagactgttacggcggcaccggtgaaggattctgctccggagagacctcaaaggactcttttgggttggaaagataagaaggaagatgctgagaactctaaacctgcgtatgcgtctgtattcaggaataaagagaaggttctcgttacttgttcccgtcggatcaatttcaggtatcgacatttgatgttgaacatggtgtcacttttacctcactgtaagaaggatagtaaggtagaagctaagagcagtagaggtgccactcttaatgagctcatcgagcttaagggctcttcttcctgtttgtttttcgagtgtaggaagcacaaagatctttacatgtggatggtgaagtcccctggtggaccttccgttaagttcttggttaatgctgttcacacaatggaggagctgaaactcactggaaatcatctgaaaggttcacgcccacttttgacattctcatccaattttgaaaacgatgcacactggaaacttctgaaagagatgttaactcagatttttggaattcccgagggacataggaagtctaaaccttaccatgaccatgtgtttgttttctccattgttgatgaccatatatggttccgtaattaccagatatcggtacctcataacgagtcagacaagattgcacgaggcgatctggataaaatgactcttattgaggttggtccaaggttttgtttaaatccaattaagatatttggaggcagctttggaggtacaacgctttacgagaacccattctatgtatctccaaaccagattcgagctttggagaaaagaaataaagctgggaaatttgctaagaaaataaaggcaaaaacaagaagaaagatgcatgaactctcaaacccattggagcctgatgaatttacagacatgtggaacgatgaatgataaaagtcgaccaaagtttcttttttgctattgtaaacttctaaattcacaaaatcaacacagttttgtctttaccactgctttcttccctccctcttatctatcaaagagtgagattgcgaatttatcacacagttgtctaagtaaagactgctatgtcacgaagaagcaaatcaattttatttctttatcg

SEQ ID NO: 26284 - protein, 315 aa, Arabidopsis thaliana
  peptide (1)..(315): Ceres Seq. ID no. 12333772
  misc_feature (34)..(230): Homolog of NCBI NO: 32414967 NR Description: hypothetical protein [Neurospora crassa]
  misc_feature (18)..(306): Homolog of NCBI NO: 33604118 NR Description: Unknown (protein for IMAGE:6789379) [Danio rerio]
  misc_feature (33)..(305): Homolog of NCBI NO: 19311012 NR Description: BRIX [Homo sapiens]
  misc_feature (35)..(310): Homolog of NCBI NO: 6324496 NR Description: Essential nucleolar protein required for
  misc_feature (43)..(310): Homolog of NCBI NO: 30580353 NR Description: Ribosome biogenesis protein Brix (Bx24)
  misc_feature (43)..(310): Homolog of NCBI NO: 27370947 NR Description: Similar to BRIX [Xenopus laevis]
  misc_feature (3)..(298): Homolog of NCBI NO: 30580352 NR Description: Ribosome biogenesis protein Brix
  misc_feature (1)..(315): Homolog of NCBI NO: 18404250 NR Description: expressed protein
  misc_feature (1)..(315): Homolog of NCBI NO: 16648689 NR Description: AT3g15460/MJK13_12 [Arabidopsis thaliana]
  misc_feature (1)..(315): Homolog of NCBI NO: 18400776 NR Description: expressed protein
MGRKRKHSETVTAAPVKDSAPERPQRTLLGWKDKKEDAENSKPAYASVFRNKEKVLVTCSRRINFRYRHLMLNMVSLLPHCKKDSKVEAKSSRGATLNELIELKGSSSCLFFECRKHKDLYMWMVKSPGGPSVKFLVNAVHTMEELKLTGNHLKGSRPLLTFSSNFENDAHWKLLKEMLTQIFGIPEGHRKSKPYHDHVFVFSIVDDHIWFRNYQISVPHNESDKIARGDLDKMTLIEVGPRFCLNPIKIFGGSFGGTTLYENPFYVSPNQIRALEKRNKAGKFAKKIKAKTRRKMHELSNPLEPDEFTDMWNDE

SEQ ID NO: 26285 - protein, 245 aa, Arabidopsis thaliana
  peptide (1)..(245): Ceres Seq. ID no. 12333773
  misc_feature (1)..(160): Homolog of NCBI NO: 32414967 NR Description: hypothetical protein [Neurospora crassa]
  misc_feature (1)..(236): Homolog of NCBI NO: 33604118 NR Description: Unknown (protein for IMAGE:6789379) [Danio rerio]
  misc_feature (1)..(235): Homolog of NCBI NO: 19311012 NR Description: BRIX [Homo sapiens]
  misc_feature (1)..(240): Homolog of NCBI NO: 6324496 NR Description: Essential nucleolar protein required for
  misc_feature (1)..(240): Homolog of NCBI NO: 30580353 NR Description: Ribosome biogenesis protein Brix (Bx24)
  misc_feature (1)..(240): Homolog of NCBI NO: 27370947 NR Description: Similar to BRIX [Xenopus laevis]
  misc_feature (1)..(228): Homolog of NCBI NO: 30580352 NR Description: Ribosome biogenesis protein Brix
  misc_feature (1)..(245): Homolog of NCBI NO: 18404250 NR Description: expressed protein
  misc_feature (1)..(245): Homolog of NCBI NO: 16648689 NR Description: AT3g15460/MJK13_12 [Arabidopsis thaliana]
  misc_feature (1)..(245): Homolog of NCBI NO: 18400776 NR Description: expressed protein
MLNMVSLLPHCKKDSKVEAKSSRGATLNELIELKGSSSCLFFECRKHKDLYMWMVKSPGGPSVKFLVNAVHTMEELKLTGNHLKGSRPLLTFSSNFENDAHWKLLKEMLTQIFGIPEGHRKSKPYHDHVFVFSIVDDHIWFRNYQISVPHNESDKIARGDLDKMTLIEVGPRFCLNPIKIFGGSFGGTTLYENPFYVSPNQIRALEKRNKAGKFAKKIKAKTRRKMHELSNPLEPDEFTDMWNDE

SEQ ID NO: 26286 - protein, 242 aa, Arabidopsis thaliana
  peptide (1)..(242): Ceres Seq. ID no. 12333774
  misc_feature (1)..(233): Homolog of NCBI NO: 33604118 NR Description: Unknown (protein for IMAGE:6789379) [Danio rerio]
  misc_feature (1)..(232): Homolog of NCBI NO: 19311012 NR Description: BRIX [Homo sapiens]
  misc_feature (1)..(237): Homolog of NCBI NO: 6324496 NR Description: Essential nucleolar protein required for
  misc_feature (1)..(237): Homolog of NCBI NO: 30580353 NR Description: Ribosome biogenesis protein Brix (Bx24)
  misc_feature (1)..(237): Homolog of NCBI NO: 27370947 NR Description: Similar to BRIX [Xenopus laevis]
  misc_feature (1)..(225): Homolog of NCBI NO: 30580352 NR Description: Ribosome biogenesis protein Brix
  misc_feature (1)..(242): Homolog of NCBI NO: 18404250 NR Description: expressed protein
  misc_feature (1)..(242): Homolog of NCBI NO: 16648689 NR Description: AT3g15460/MJK13_12 [Arabidopsis thaliana]
  misc_feature (1)..(242): Homolog of NCBI NO: 18400776 NR Description: expressed protein
  misc_feature (1)..(157): Homolog of NCBI NO: 32414967 NR Description: hypothetical protein [Neurospora crassa]
MVSLLPHCKKDSKVEAKSSRGATLNELIELKGSSSCLFFECRKHKDLYMWMVKSPGGPSVKFLVNAVHTMEELKLTGNHLKGSRPLLTFSSNFENDAHWKLLKEMLTQIFGIPEGHRKSKPYHDHVFVFSIVDDHIWFRNYQISVPHNESDKIARGDLDKMTLIEVGPRFCLNPIKIFGGSFGGTTLYENPFYVSPNQIRALEKRNKAGKFAKKIKAKTRRKMHELSNPLEPDEFTDMWNDE

SEQ ID NO: 26287 - DNA, 845 bp, Arabidopsis thaliana
  misc_feature (1)..(845): Ceres Seq. ID no. 12333349
  misc_feature: MA Experiment ID: 108668 Result: Down-regulated in Transcription
  misc_feature: MA Experiment 108668 PARAMETER Experiment Name: At_2mM_SA_cDNA_P Parameter: Plant Line Value: WS
  misc_feature: MA Experiment 108668 PARAMETER Experiment Name: At_2mM_SA_cDNA_P Parameter: Timepoint (hr) Value: 6
  misc_feature: MA Experiment 108668 PARAMETER Experiment Name: At_2mM_SA_cDNA_P Parameter: Treatment Value: 2mM SA vs. No Treatment
  misc_feature: MA Experiment ID: 20000069 Result: Up-regulated in Transcription
  misc_feature: MA Experiment 20000069 PARAMETER Experiment Name: At_100uM_ABA_Mutants_cDNA_P Parameter: Plant Line Value: CS23
  misc_feature: MA Experiment 20000069 PARAMETER Experiment Name: At_100uM_ABA_Mutants_cDNA_P Parameter: Timepoint (hr) Value: 6
  misc_feature: MA Experiment 20000069 PARAMETER Experiment Name: At_100uM_ABA_Mutants_cDNA_P Parameter: Tissue Value: Aerial
  misc_feature: MA Experiment 20000069 PARAMETER Experiment Name: At_100uM_ABA_Mutants_cDNA_P Parameter: Treatment Value: 100uM ABA vs. No Treatment
  misc_feature: MA Experiment ID: 20000086 Result: Up-regulated in Transcription
  misc_feature: MA Experiment 20000086 PARAMETER Experiment Name: At_100uM_ABA_Mutants_cDNA_P Parameter: Plant Line Value: CS22
  misc_feature: MA Experiment 20000086 PARAMETER Experiment Name: At_100uM_ABA_Mutants_cDNA_P Parameter: Timepoint (hr) Value: 6
  misc_feature: MA Experiment 20000086 PARAMETER Experiment Name: At_100uM_ABA_Mutants_cDNA_P Parameter: Tissue Value: Aerial
  misc_feature: MA Experiment 20000086 PARAMETER Experiment Name: At_100uM_ABA_Mutants_cDNA_P Parameter: Treatment Value: 100uM ABA vs. No Treatment
  misc_feature: MA Experiment ID: 20000089 Result: Up-regulated in Transcription
  misc_feature: MA Experiment ID: 20000182 Result: Down-regulated in Transcription
  misc_feature: MA Experiment 20000182 PARAMETER Experiment Name: At_2mM_SA_P Parameter: Age (day) Value: 14
  misc_feature: MA Experiment 20000182 PARAMETER Experiment Name: At_2mM_SA_P Parameter: Organism Value: A. thaliana
  misc_feature: MA Experiment 20000182 PARAMETER Experiment Name: At_2mM_SA_P Parameter: Plant Line Value: WS
  misc_feature: MA Experiment 20000182 PARAMETER Experiment Name: At_2mM_SA_P Parameter: Timepoint (hr) Value: 6
  misc_feature: MA Experiment 20000182 PARAMETER Experiment Name: At_2mM_SA_P Parameter: Tissue Value: Aerial
  misc_feature: MA Experiment 20000182 PARAMETER Experiment Name: At_2mM_SA_P Parameter: Treatment Value: 2mM SA vs. No Treatment
  misc_feature: MA Experiment ID: 20000495 Result: Up-regulated in Transcription
  misc_feature: MA Experiment 20000495 PARAMETER Experiment Name: At_Guard_Cells_P Parameter: Harvest Date Value: 8/2/2002
  misc_feature: MA Experiment 20000495 PARAMETER Experiment Name: At_Guard_Cells_P Parameter: Organism Value: A. thaliana
  misc_feature: MA Experiment 20000495 PARAMETER Experiment Name: At_Guard_Cells_P Parameter: Tissue Value: Guard Cells vs. Leaves
  misc_feature: MA Experiment ID: 20001555 Result: Up-regulated in Transcription
  misc_feature: MA Experiment 20001555 PARAMETER Experiment Name: At_Drought_Soil_Dry_P Parameter: Age (day) Value: 24
  misc_feature: MA Experiment 20001555 PARAMETER Experiment Name: At_Drought_Soil_Dry_P Parameter: Organism Value: A. thaliana
  misc_feature: MA Experiment 20001555 PARAMETER Experiment Name: At_Drought_Soil_Dry_P Parameter: Plant Line Value: WS
  misc_feature: MA Experiment 20001555 PARAMETER Experiment Name: At_Drought_Soil_Dry_P Parameter: Post Timepoint (hr) Value: None
  misc_feature: MA Experiment 20001555 PARAMETER Experiment Name: At_Drought_Soil_Dry_P Parameter: Post-Treatment Value: None
  misc_feature: MA Experiment 20001555 PARAMETER Experiment Name: At_Drought_Soil_Dry_P Parameter: Timepoint (day) Value: 10
  misc_feature: MA Experiment 20001555 PARAMETER Experiment Name: At_Drought_Soil_Dry_P Parameter: Treatment Value: Drought vs. No Drought
aggacactttaacgtttcttcacttgcccaaagctctctgaagataaaagacaaaagagtaaagagagaaagaagcacgaaaaccaaatcaatggcggtttcagtttcaatcctcaccgtcgtcactgctcttcacctccttgctttcgtcttcgccttcggtgccgagcgtcgccgtagcaccgctgtgccggttccggatcagtacgatgagaagactatttgtaagtacggaactgaggcgtcgacagtgtacggtatgtcggcgtttgggttgcttcttgttagccaagcggtggttaacggtgttactaagtgtctctgttttggaaagggtcttgttactggtacttcttacactgtctgggctattgtcttcttcgttgtttcttgggtaagctttttaggagctgaggcgtgcttgttgggtggatcagcgaggaacgcgtaccacactaaaagtgaaggcatttacaaagggaaagagctttcgtgtgccgtcttacccgttggagtctttgctgctggagctgctttcactctcatgtctttgattgcaaccattctttactacttggctcattctaaggctgatactggcggatgggagaagcatcagaacgatggcattaacattggtatgaccactccttcagatgctccaaagcaacaaaacaccgagtttaacaaggtctaaaccagtttctgtttggtcttatgttggctatgcttttaaaaacagggtaaaactataaaaaaaatagttgtttgttaattgtcaatataaacttgtgtcgtcagatataatgttggcttatgtatgtctatgagaaatttggtttggc

SEQ ID NO: 26288 - protein, 231 aa, Arabidopsis thaliana
  peptide (1)..(231): Ceres Seq. ID no. 12333350
  misc_feature (34)..(197): Homolog of NCBI NO: 18407003 NR Description: Expressed protein
  misc_feature (34)..(212): Homolog of NCBI NO: 21554630 NR Description: unknown [Arabidopsis thaliana]
  misc_feature (31)..(197): Homolog of NCBI NO: 18416991 NR Description: Expressed protein
  misc_feature (37)..(197): Homolog of NCBI NO: 18400781 NR Description: expressed protein
  misc_feature (37)..(205): Homolog of NCBI NO: 18404242 NR Description: expressed protein
  misc_feature (34)..(197): Homolog of NCBI NO: 38344206 NR Description: OSJNBa0064G10.22 [Oryza sativa (japonica
  misc_feature (37)..(213): Homolog of NCBI NO: 38016521 NR Description: fiber protein Fb34 [Gossypium barbadense]
  misc_feature (34)..(214): Homolog of NCBI NO: 18391509 NR Description: expressed protein
  misc_feature (34)..(218): Homolog of NCBI NO: 34394069 NR Description: unknown protein [Oryza sativa (japonica
  misc_feature (31)..(231): Homolog of NCBI NO: 18408976 NR Description: expressed protein
GHFNVSSLAQSSLKIKDKRVKRERSTKTKSMAVSVSILTVVTALHLLAFVFAFGAERRRSTAVPVPDQYDEKTICKYGTEASTVYGMSAFGLLLVSQAVVNGVTKCLCFGKGLVTGTSYTVWAIVFFVVSWVSFLGAEACLLGGSARNAYHTKSEGIYKGKELSCAVLPVGVFAAGAAFTLMSLIATILYYLAHSKADTGGWEKHQNDGINIGMTTPSDAPKQQNTEFNKV

SEQ ID NO: 26289 - protein, 201 aa, Arabidopsis thaliana
  peptide (1)..(201): Ceres Seq. ID no. 12333351
  misc_feature (4)..(167): Homolog of NCBI NO: 18407003 NR Description: Expressed protein
  misc_feature (4)..(182): Homolog of NCBI NO: 21554630 NR Description: unknown [Arabidopsis thaliana]
  misc_feature (1)..(167): Homolog of NCBI NO: 18416991 NR Description: Expressed protein
  misc_feature (7)..(167): Homolog of NCBI NO: 18400781 NR Description: expressed protein
  misc_feature (7)..(175): Homolog of NCBI NO: 18404242 NR Description: expressed protein
  misc_feature (4)..(167): Homolog of NCBI NO: 38344206 NR Description: OSJNBa0064G10.22 [Oryza sativa (japonica
  misc_feature (7)..(183): Homolog of NCBI NO: 38016521 NR Description: fiber protein Fb34 [Gossypium barbadense]
  misc_feature (4)..(184): Homolog of NCBI NO: 18391509 NR Description: expressed protein
  misc_feature (4)..(188): Homolog of NCBI NO: 34394069 NR Description: unknown protein [Oryza sativa (japonica
  misc_feature (1)..(201): Homolog of NCBI NO: 18408976 NR Description: expressed protein
MAVSVSILTVVTALHLLAFVFAFGAERRRSTAVPVPDQYDEKTICKYGTEASTVYGMSAFGLLLVSQAVVNGVTKCLCFGKGLVTGTSYTVWAIVFFVVSWVSFLGAEACLLGGSARNAYHTKSEGIYKGKELSCAVLPVGVFAAGAAFTLMSLIATILYYLAHSKADTGGWEKHQNDGINIGMTTPSDAPKQQNTEFNKV

SEQ ID NO: 26290 - protein, 145 aa, Arabidopsis thaliana
  peptide (1)..(145): Ceres Seq. ID no. 12333352
  misc_feature (1)..(111): Homolog of NCBI NO: 18407003 NR Description: Expressed protein
  misc_feature (1)..(126): Homolog of NCBI NO: 21554630 NR Description: unknown [Arabidopsis thaliana]
  misc_feature (1)..(111): Homolog of NCBI NO: 18416991 NR Description: Expressed protein
  misc_feature (1)..(111): Homolog of NCBI NO: 18400781 NR Description: expressed protein
  misc_feature (1)..(119): Homolog of NCBI NO: 18404242 NR Description: expressed protein
  misc_feature (1)..(111): Homolog of NCBI NO: 38344206 NR Description: OSJNBa0064G10.22 [Oryza sativa (japonica
  misc_feature (1)..(127): Homolog of NCBI NO: 38016521 NR Description: fiber protein Fb34 [Gossypium barbadense]
  misc_feature (1)..(128): Homolog of NCBI NO: 18391509 NR Description: expressed protein
  misc_feature (1)..(132): Homolog of NCBI NO: 34394069 NR Description: unknown protein [Oryza sativa (japonica
  misc_feature (1)..(145): Homolog of NCBI NO: 18408976 NR Description: expressed protein
MSAFGLLLVSQAVVNGVTKCLCFGKGLVTGTSYTVWAIVFFVVSWVSFLGAEACLLGGSARNAYHTKSEGIYKGKELSCAVLPVGVFAAGAAFTLMSLIATILYYLAHSKADTGGWEKHQNDGINIGMTTPSDAPKQQNTEFNKV

SEQ ID NO: 26291 - DNA, 929 bp, Arabidopsis thaliana
  misc_feature (1)..(929): Ceres Seq. ID no. 13489769
  misc_feature: MA Experiment ID: 108434 Result: Up-regulated in Transcription
  misc_feature: MA Experiment 108434 PARAMETER Experiment Name: At_Root_Tips_cDNA_P Parameter: Tissue Value: Root Tips
  misc_feature: MA Experiment ID: 108488 Result: Down-regulated in Transcription
  misc_feature: MA Experiment ID: 108595 Result: Down-regulated in Transcription
  misc_feature: MA Experiment 108595 PARAMETER Experiment Name: At_Ler-pi_Ovule_cDNA_P Parameter: Plant Line Value: null
  misc_feature: MA Experiment ID: 20000113 Result: Up-regulated in Transcription
  misc_feature: MA Experiment 20000113 PARAMETER Experiment Name: At_42deg_Heat_cDNA_P Parameter: Temperature (deg C) Value: 42 vs. 22
  misc_feature: MA Experiment 20000113 PARAMETER Experiment Name: At_42deg_Heat_cDNA_P Parameter: Timepoint (hr) Value: 8
  misc_feature: MA Experiment 20000113 PARAMETER Experiment Name: At_42deg_Heat_cDNA_P Parameter: Tissue Value: Aerial
atcggtttaaagtattgaaccaatccaatatatgaggccggtttaataatccttcgatttcgattcgaactttggtttcatctccccaaatcgaagcgaaggtctctcaacaatggcgaaatcagtgtcgacggcggcttcctcgcttgtgcaaaaccttaggcggtacatcaagaagccatggcagatcaccggaccttgcgctcacccagaatacctcgaagctgttccaaaggcgacggagtatcgtctccgatgccccgctacgattgatgaagaagcaatcgtgccttcctcggatccagagaccgtatacaacatcgtataccacggcagagatcagcgcagaaaccgcccaccgatccggcgatacgtattgacgaaggacaacgtggttcagatgatgaacgagaagaagagttttgacgtctcggacttccctaaggtttacttgaccaccacagtcgaggaggatttggatacgcgtggtggaggctacgagaaataatcaggttttttgctcatctcgtctttctcttgtaacgtactgatgggggaaagactgcgcgtgacacatctctaccgacaaaaaatatctcccttgtttgattattcaataagatatctagtagctttatgaactacaaaacacttcattttccttcacaagaaacagattgttgttcagttgtattccctatctttatgatgaacccgtgatcgtgattgtttcaagtctgagtgatttagaaatggttaataatgtaatacaaagagagaaccagttagtagtagtctctgtgttcttggggaccctttcttctctccatcagtgactacctttcttctctgcatcagtgactaagaagaaggagaagaagcagaaacactatgtctccatcaatttgtgtttttatgaattttacccc

SEQ ID NO: 26292 - protein, 131 aa, Arabidopsis thaliana
  peptide (1)..(131): Ceres Seq. ID no. 13489770
  misc_feature (1)..(131): Homolog of NCBI NO: 34909786 NR Description: P0512C01.35 [Oryza sativa (japonica
  misc_feature (1)..(131): Homolog of NCBI NO: 21592443 NR Description: unknown [Arabidopsis thaliana]
  misc_feature (1)..(131): Homolog of NCBI NO: 15241510 NR Description: expressed protein [Arabidopsis thaliana]
MAKSVSTAASSLVQNLRRYIKKPWQITGPCAHPEYLEAVPKATEYRLRCPATIDEEAIVPSSDPETVYNIVYHGRDQRRNRPPIRRYVLTKDNVVQMMNEKKSFDVSDFPKVYLTTTVEEDLDTRGGGYEK

SEQ ID NO: 26293 - DNA, 1053 bp, Arabidopsis thaliana
  misc_feature (1)..(1053): Ceres Seq. ID no. 13488231
  misc_feature: MA Experiment ID: 108569 Result: Up-regulated in Transcription
  misc_feature: MA Experiment 108569 PARAMETER Experiment Name: At_0.001%_MeJA__cDNA_P Parameter: Timepoint (hr) Value: 6
  misc_feature: MA Experiment 108569 PARAMETER Experiment Name: At_0.001%_MeJA__cDNA_P Parameter: Tissue Value: Aerial
  misc_feature: MA Experiment 108569 PARAMETER Experiment Name: At_0.001%_MeJA__cDNA_P Parameter: Treatment Value: 0.001% MeJA vs. No Treatment
  misc_feature: MA Experiment ID: 108579 Result: Down-regulated in Transcription
  misc_feature: MA Experiment 108579 PARAMETER Experiment Name: At_4deg_Cold_cDNA_P Parameter: Temperature (deg C) Value: 4 vs. 22
  misc_feature: MA Experiment 108579 PARAMETER Experiment Name: At_4deg_Cold_cDNA_P Parameter: Timepoint (hr) Value: 6
  misc_feature: MA Experiment 108579 PARAMETER Experiment Name: At_4deg_Cold_cDNA_P Parameter: Tissue Value: Aerial
  misc_feature: MA Experiment ID: 108595 Result: Down-regulated in Transcription
  misc_feature: MA Experiment 108595 PARAMETER Experiment Name: At_Ler-pi_Ovule_cDNA_P Parameter: Plant Line Value: null
  misc_feature: MA Experiment ID: 20000224 Result: Down-regulated in Transcription
  misc_feature: MA Experiment ID: 20001560 Result: Down-regulated in Transcription
  misc_feature: MA Experiment 20001560 PARAMETER Experiment Name: At_Drought_Soil_Dry_P Parameter: Age (day) Value: 28
  misc_feature: MA Experiment 20001560 PARAMETER Experiment Name: At_Drought_Soil_Dry_P Parameter: Organism Value: A. thaliana
  misc_feature: MA Experiment 20001560 PARAMETER Experiment Name: At_Drought_Soil_Dry_P Parameter: Plant Line Value: WS
  misc_feature: MA Experiment 20001560 PARAMETER Experiment Name: At_Drought_Soil_Dry_P Parameter: Post Timepoint (hr) Value: None
  misc_feature: MA Experiment 20001560 PARAMETER Experiment Name: At_Drought_Soil_Dry_P Parameter: Post-Treatment Value: None
  misc_feature: MA Experiment 20001560 PARAMETER Experiment Name: At_Drought_Soil_Dry_P Parameter: Timepoint (day) Value: 14
  misc_feature: MA Experiment 20001560 PARAMETER Experiment Name: At_Drought_Soil_Dry_P Parameter: Treatment Value: Drought vs. No Drought
  misc_feature: MA Experiment ID: 20001905 Result: Down-regulated in Transcription
  misc_feature: MA Experiment 20001905 PARAMETER Experiment Name: At_Drought_Reproduction_P Parameter: Age (day) Value: 40
  misc_feature: MA Experiment 20001905 PARAMETER Experiment Name: At_Drought_Reproduction_P Parameter: Organism Value: A. thaliana
  misc_feature: MA Experiment 20001905 PARAMETER Experiment Name: At_Drought_Reproduction_P Parameter: Plant Line Value: WS
  misc_feature: MA Experiment 20001905 PARAMETER Experiment Name: At_Drought_Reproduction_P Parameter: Timepoint (day) Value: 10
  misc_feature: MA Experiment 20001905 PARAMETER Experiment Name: At_Drought_Reproduction_P Parameter: Tissue Value: Rosettes
  misc_feature: MA Experiment 20001905 PARAMETER Experiment Name: At_Drought_Reproduction_P Parameter: Treatment Value: Drought vs. No Drought
atccaactatccatccatcatcggtcagtccccaaagtcggcggaagaagatggtgtcgccgaaaatagcaccgtcgatgctgtcatcggacttcgcaaatctagcggcggaggccaatcggatgatcgatttgggcgccaactggcttcacatggatattatggacgggcattttgtccctaatcttacgattggtgctcctgtcatcgagagtttgcgaaagcacactaatgcatatcttgattgccaccttatggtgacgaaccccatggattacgttgcacagatggctaaagctggggcttctggtttcacattccacgtcgaggtggcccaagataattggcaacaacttgtcgagaagattaagtctactggaatgagaccaggcgtggctctaaagcctggaacacctgttgaacaagtctatcctctggttgaagggacaactccggttgaaatggttcttgtgatgactgtagaacctggatttggaggccagaagtttatgcctgacatgatggacaaggtccgggcattgaggcaaaaatacccaacacttgatattcaggtggatggcggcttaggcccttcaacgatcgacacagcggctgcagcaggcgccaactgtattgttgctggaagttcagtgtttggagctccggagccaggagatgtcatctcccttctgaggaccagtgttgagaaagcccaacccaccacttgaaagctgcacgtggtggcggtggtgctgagacggcgttgtattctcatcggaagatggtacctcttcgtttctctcaaggttaaaaagctggtcctttatgttttaaaatcatctcgtgaatcgtgatacttagtcttggttccaagaactgtataacgtcattttgagttattaattccctcaccacacagattatttcataggagttgggtaccaagagtagtgtgcaatgtataattagtaatttaataaacgtattaggttcagtcattttggaatggttataattatgaatacaagtatacaacatgaacattccagtgtt

SEQ ID NO: 26294 - protein, 241 aa, Arabidopsis thaliana
  peptide (1)..(241): Ceres Seq. ID no. 13488232
  misc_feature (21)..(221): Pfam Name: Ribulose-phosphate 3 epimerase family Pfam Description: Ribulose-phosphate 3 epimerase family
  misc_feature (20)..(237): Homolog of NCBI NO: 17552948 NR Description: D-ribulose-5-Phosphate 3-epimerase (24.4 kD)
  misc_feature (22)..(237): Homolog of NCBI NO: 39581355 NR Description: Hypothetical protein CBG15299 [Caenorhabditis
  misc_feature (21)..(237): Homolog of NCBI NO: 40385883 NR Description: ribulose-5-phosphate-3-epimerase isoform 1
  misc_feature (21)..(237): Homolog of NCBI NO: 27532955 NR Description: ribulose-5-phosphate-3-epimerase [Mus musculus]
  misc_feature (17)..(236): Homolog of NCBI NO: 6322341 NR Description: D-ribulose-5-Phosphate 3-epimerase; Rpe1p
  misc_feature (17)..(240): Homolog of NCBI NO: 19114917 NR Description: putative ribulose phosphate 3-epimerase
  misc_feature (21)..(238): Homolog of NCBI NO: 28373310 NR Description: Chain A, The Structure Of The Cytosolic
  misc_feature (18)..(241): Homolog of NCBI NO: 15221735 NR Description: D-ribulose-5-phosphate-3-epimerase -related
  misc_feature (17)..(241): Homolog of NCBI NO: 6091725 NR Description: putative D-ribulose-5-phosphate 3-epimerase
  misc_feature (17)..(241): Homolog of NCBI NO: 18395962 NR Description: D-ribulose-5-phosphate 3-epimerase -related
PTIHPSSVSPQSRRKKMVSPKIAPSMLSSDFANLAAEANRMIDLGANWLHMDIMDGHFVPNLTIGAPVIESLRKHTNAYLDCHLMVTNPMDYVAQMAKAGASGFTFHVEVAQDNWQQLVEKIKSTGMRPGVALKPGTPVEQVYPLVEGTTPVEMVLVMTVEPGFGGQKFMPDMMDKVRALRQKYPTLDIQVDGGLGPSTIDTAAAAGANCIVAGSSVFGAPEPGDVISLLRTSVEKAQPTT

SEQ ID NO: 26295 - protein, 225 aa, Arabidopsis thaliana
  peptide (1)..(225): Ceres Seq. ID no. 13488233
  misc_feature (5)..(205): Pfam Name: Ribulose-phosphate 3 epimerase family Pfam Description: Ribulose-phosphate 3 epimerase family
  misc_feature (4)..(221): Homolog of NCBI NO: 17552948 NR Description: D-ribulose-5-Phosphate 3-epimerase (24.4 kD)
  misc_feature (6)..(221): Homolog of NCBI NO: 39581355 NR Description: Hypothetical protein CBG15299 [Caenorhabditis
  misc_feature (5)..(221): Homolog of NCBI NO: 40385883 NR Description: ribulose-5-phosphate-3-epimerase isoform 1
  misc_feature (5)..(221): Homolog of NCBI NO: 27532955 NR Description: ribulose-5-phosphate-3-epimerase [Mus musculus]
  misc_feature (1)..(220): Homolog of NCBI NO: 6322341 NR Description: D-ribulose-5-Phosphate 3-epimerase; Rpe1p
  misc_feature (1)..(224): Homolog of NCBI NO: 19114917 NR Description: putative ribulose phosphate 3-epimerase
  misc_feature (5)..(222): Homolog of NCBI NO: 28373310 NR Description: Chain A, The Structure Of The Cytosolic
  misc_feature (2)..(225): Homolog of NCBI NO: 15221735 NR Description: D-ribulose-5-phosphate-3-epimerase -related
  misc_feature (1)..(225): Homolog of NCBI NO: 6091725 NR Description: putative D-ribulose-5-phosphate 3-epimerase
  misc_feature (1)..(225): Homolog of NCBI NO: 18395962 NR Description: D-ribulose-5-phosphate 3-epimerase -related
MVSPKIAPSMLSSDFANLAAEANRMIDLGANWLHMDIMDGHFVPNLTIGAPVIESLRKHTNAYLDCHLMVTNPMDYVAQMAKAGASGFTFHVEVAQDNWQQLVEKIKSTGMRPGVALKPGTPVEQVYPLVEGTTPVEMVLVMTVEPGFGGQKFMPDMMDKVRALRQKYPTLDIQVDGGLGPSTIDTAAAAGANCIVAGSSVFGAPEPGDVISLLRTSVEKAQPTT

SEQ ID NO: 26296 - protein, 216 aa, Arabidopsis thaliana
  peptide (1)..(216): Ceres Seq. ID no. 13488234
  misc_feature (1)..(196): Pfam Name: Ribulose-phosphate 3 epimerase family Pfam Description: Ribulose-phosphate 3 epimerase family
  misc_feature (1)..(212): Homolog of NCBI NO: 17552948 NR Description: D-ribulose-5-Phosphate 3-epimerase (24.4 kD)
  misc_feature (1)..(212): Homolog of NCBI NO: 39581355 NR Description: Hypothetical protein CBG15299 [Caenorhabditis
  misc_feature (1)..(212): Homolog of NCBI NO: 40385883 NR Description: ribulose-5-phosphate-3-epimerase isoform 1
  misc_feature (1)..(212): Homolog of NCBI NO: 27532955 NR Description: ribulose-5-phosphate-3-epimerase [Mus musculus]
  misc_feature (1)..(211): Homolog of NCBI NO: 6322341 NR Description: D-ribulose-5-Phosphate 3-epimerase; Rpe1p
  misc_feature (1)..(215): Homolog of NCBI NO: 19114917 NR Description: putative ribulose phosphate 3-epimerase
  misc_feature (1)..(213): Homolog of NCBI NO: 28373310 NR Description: Chain A, The Structure Of The Cytosolic
  misc_feature (1)..(216): Homolog of NCBI NO: 15221735 NR Description: D-ribulose-5-phosphate-3-epimerase -related
  misc_feature (1)..(216): Homolog of NCBI NO: 6091725 NR Description: putative D-ribulose-5-phosphate 3-epimerase
  misc_feature (1)..(216): Homolog of NCBI NO: 18395962 NR Description: D-ribulose-5-phosphate 3-epimerase -related
MLSSDFANLAAEANRMIDLGANWLHMDIMDGHFVPNLTIGAPVIESLRKHTNAYLDCHLMVTNPMDYVAQMAKAGASGFTFHVEVAQDNWQQLVEKIKSTGMRPGVALKPGTPVEQVYPLVEGTTPVEMVLVMTVEPGFGGQKFMPDMMDKVRALRQKYPTLDIQVDGGLGPSTIDTAAAAGANCIVAGSSVFGAPEPGDVISLLRTSVEKAQPTT

SEQ ID NO: 26297 - DNA, 770 bp, Arabidopsis thaliana
  misc_feature (1)..(770): Ceres Seq. ID no. 12331696
  misc_feature: MA Experiment ID: 108435 Result: Down-regulated in Transcription
  misc_feature: MA Experiment 108435 PARAMETER Experiment Name: At_stm_Mutants_cDNA_P Parameter: Plant Line Value: wt Landsburg vs stm
  misc_feature: MA Experiment 108435 PARAMETER Experiment Name: At_stm_Mutants_cDNA_P Parameter: Tissue Value: Shoot Apical Meristem Region
  misc_feature: MA Experiment ID: 108461 Result: Up-regulated in Transcription
  misc_feature: MA Experiment 108461 PARAMETER Experiment Name: At_Germinating_Seeds_cDNA_P Parameter: Age (day) Value: 1 vs. 0
  misc_feature: MA Experiment 108461 PARAMETER Experiment Name: At_Germinating_Seeds_cDNA_P Parameter: Tissue Value: Germinating Seeds
  misc_feature: MA Experiment ID: 108462 Result: Up-regulated in Transcription
  misc_feature: MA Experiment 108462 PARAMETER Experiment Name: At_Germinating_Seeds_cDNA_P Parameter: Age (day) Value: 2 vs. 0
  misc_feature: MA Experiment 108462 PARAMETER Experiment Name: At_Germinating_Seeds_cDNA_P Parameter: Tissue Value: Germinating Seeds
  misc_feature: MA Experiment ID: 108464 Result: Up-regulated in Transcription
  misc_feature: MA Experiment 108464 PARAMETER Experiment Name: At_Germinating_Seeds_cDNA_P Parameter: Age (day) Value: 4 vs. 0
  misc_feature: MA Experiment 108464 PARAMETER Experiment Name: At_Germinating_Seeds_cDNA_P Parameter: Tissue Value: Germinating Seeds
  misc_feature: MA Experiment ID: 108488 Result: Up-regulated in Transcription
  misc_feature: MA Experiment ID: 108561 Result: Down-regulated in Transcription
  misc_feature: MA Experiment 108561 PARAMETER Experiment Name: At_100uM_ABA_cDNA_P Parameter: Timepoint (hr) Value: 6
  misc_feature: MA Experiment 108561 PARAMETER Experiment Name: At_100uM_ABA_cDNA_P Parameter: Tissue Value: Aerial
  misc_feature: MA Experiment 108561 PARAMETER Experiment Name: At_100uM_ABA_cDNA_P Parameter: Treatment Value: 100uM ABA vs. No Treatment
  misc_feature: MA Experiment ID: 108573 Result: Down-regulated in Transcription
  misc_feature: MA Experiment 108573 PARAMETER Experiment Name: At_Drought_cDNA_P Parameter: Timepoint (hr) Value: 6
  misc_feature: MA Experiment 108573 PARAMETER Experiment Name: At_Drought_cDNA_P Parameter: Tissue Value: Aerial
  misc_feature: MA Experiment 108573 PARAMETER Experiment Name: At_Drought_cDNA_P Parameter: Treatment Value: Drought vs. No Drought
  misc_feature: MA Experiment ID: 108579 Result: Up-regulated in Transcription
  misc_feature: MA Experiment 108579 PARAMETER Experiment Name: At_4deg_Cold_cDNA_P Parameter: Temperature (deg C) Value: 4 vs. 22
  misc_feature: MA Experiment 108579 PARAMETER Experiment Name: At_4deg_Cold_cDNA_P Parameter: Timepoint (hr) Value: 6
  misc_feature: MA Experiment 108579 PARAMETER Experiment Name: At_4deg_Cold_cDNA_P Parameter: Tissue Value: Aerial
  misc_feature: MA Experiment ID: 108595 Result: Down-regulated in Transcription
  misc_feature: MA Experiment 108595 PARAMETER Experiment Name: At_Ler-pi_Ovule_cDNA_P Parameter: Plant Line Value: null
  misc_feature: MA Experiment ID: 108605 Result: Down-regulated in Transcription
  misc_feature: MA Experiment 108605 PARAMETER Experiment Name: At_100uM_ABA_cDNA_P Parameter: Timepoint (hr) Value: 6
  misc_feature: MA Experiment 108605 PARAMETER Experiment Name: At_100uM_ABA_cDNA_P Parameter: Tissue Value: Aerial
  misc_feature: MA Experiment 108605 PARAMETER Experiment Name: At_100uM_ABA_cDNA_P Parameter: Treatment Value: 100uM ABA vs. No Treatment
  misc_feature: MA Experiment ID: 20000069 Result: Down-regulated in Transcription
  misc_feature: MA Experiment 20000069 PARAMETER Experiment Name: At_100uM_ABA_Mutants_cDNA_P Parameter: Plant Line Value: CS23
  misc_feature: MA Experiment 20000069 PARAMETER Experiment Name: At_100uM_ABA_Mutants_cDNA_P Parameter: Timepoint (hr) Value: 6
  misc_feature: MA Experiment 20000069 PARAMETER Experiment Name: At_100uM_ABA_Mutants_cDNA_P Parameter: Tissue Value: Aerial
  misc_feature: MA Experiment 20000069 PARAMETER Experiment Name: At_100uM_ABA_Mutants_cDNA_P Parameter: Treatment Value: 100uM ABA vs. No Treatment
  misc_feature: MA Experiment ID: 20000070 Result: Down-regulated in Transcription
  misc_feature: MA Experiment 20000070 PARAMETER Experiment Name: At_100uM_ABA_Mutants_cDNA_P Parameter: Plant Line Value: CS24
  misc_feature: MA Experiment 20000070 PARAMETER Experiment Name: At_100uM_ABA_Mutants_cDNA_P Parameter: Timepoint (hr) Value: 6
  misc_feature: MA Experiment 20000070 PARAMETER Experiment Name: At_100uM_ABA_Mutants_cDNA_P Parameter: Tissue Value: Aerial
  misc_feature: MA Experiment 20000070 PARAMETER Experiment Name: At_100uM_ABA_Mutants_cDNA_P Parameter: Treatment Value: 100uM ABA vs. No Treatment
  misc_feature: MA Experiment ID: 20000071 Result: Down-regulated in Transcription
  misc_feature: MA Experiment 20000071 PARAMETER Experiment Name: At_100uM_ABA_Mutants_cDNA_P Parameter: Plant Line Value: CS8104
  misc_feature: MA Experiment 20000071 PARAMETER Experiment Name: At_100uM_ABA_Mutants_cDNA_P Parameter: Timepoint (hr) Value: 6
  misc_feature: MA Experiment 20000071 PARAMETER Experiment Name: At_100uM_ABA_Mutants_cDNA_P Parameter: Tissue Value: Aerial
  misc_feature: MA Experiment 20000071 PARAMETER Experiment Name: At_100uM_ABA_Mutants_cDNA_P Parameter: Treatment Value: 100uM ABA vs. No Treatment
  misc_feature: MA Experiment ID: 20000072 Result: Down-regulated in Transcription
  misc_feature: MA Experiment 20000072 PARAMETER Experiment Name: At_100uM_ABA_Mutants_cDNA_P Parameter: Plant Line Value: CS8105
  misc_feature: MA Experiment 20000072 PARAMETER Experiment Name: At_100uM_ABA_Mutants_cDNA_P Parameter: Timepoint (hr) Value: 6
  misc_feature: MA Experiment 20000072 PARAMETER Experiment Name: At_100uM_ABA_Mutants_cDNA_P Parameter: Tissue Value: Aerial
  misc_feature: MA Experiment 20000072 PARAMETER Experiment Name: At_100uM_ABA_Mutants_cDNA_P Parameter: Treatment Value: 100uM ABA vs. No Treatment
  misc_feature: MA Experiment ID: 20000086 Result: Down-regulated in Transcription
  misc_feature: MA Experiment 20000086 PARAMETER Experiment Name: At_100uM_ABA_Mutants_cDNA_P Parameter: Plant Line Value: CS22
  misc_feature: MA Experiment 20000086 PARAMETER Experiment Name: At_100uM_ABA_Mutants_cDNA_P Parameter: Timepoint (hr) Value: 6
  misc_feature: MA Experiment 20000086 PARAMETER Experiment Name: At_100uM_ABA_Mutants_cDNA_P Parameter: Tissue Value: Aerial
  misc_feature: MA Experiment 20000086 PARAMETER Experiment Name: At_100uM_ABA_Mutants_cDNA_P Parameter: Treatment Value: 100uM ABA vs. No Treatment
  misc_feature: MA Experiment ID: 20000087 Result: Down-regulated in Transcription
  misc_feature: MA Experiment 20000087 PARAMETER Experiment Name: At_100uM_ABA_Mutants_cDNA_P Parameter: Plant Line Value: WS
  misc_feature: MA Experiment 20000087 PARAMETER Experiment Name: At_100uM_ABA_Mutants_cDNA_P Parameter: Timepoint (hr) Value: 6
  misc_feature: MA Experiment 20000087 PARAMETER Experiment Name: At_100uM_ABA_Mutants_cDNA_P Parameter: Tissue Value: Aerial
  misc_feature: MA Experiment 20000087 PARAMETER Experiment Name: At_100uM_ABA_Mutants_cDNA_P Parameter: Treatment Value: 100uM ABA vs. No Treatment
  misc_feature: MA Experiment ID: 20000088 Result: Down-regulated in Transcription
  misc_feature: MA Experiment 20000088 PARAMETER Experiment Name: At_100uM_ABA_Mutants_cDNA_P Parameter: Plant Line Value: Landsberg
  misc_feature: MA Experiment 20000088 PARAMETER Experiment Name: At_100uM_ABA_Mutants_cDNA_P Parameter: Timepoint (hr) Value: 6
  misc_feature: MA Experiment 20000088 PARAMETER Experiment Name: At_100uM_ABA_Mutants_cDNA_P Parameter: Tissue Value: Aerial
  misc_feature: MA Experiment 20000088 PARAMETER Experiment Name: At_100uM_ABA_Mutants_cDNA_P Parameter: Treatment Value: 100uM ABA vs. No Treatment
  misc_feature: MA Experiment ID: 20000090 Result: Down-regulated in Transcription
  misc_feature: MA Experiment ID: 20000117 Result: Down-regulated in Transcription
  misc_feature: MA Experiment 20000117 PARAMETER Experiment Name: At_100uM_ABA_Mutants_cDNA_P Parameter: Plant Line Value: Columbia
  misc_feature: MA Experiment 20000117 PARAMETER Experiment Name: At_100uM_ABA_Mutants_cDNA_P Parameter: Timepoint (hr) Value: 6
  misc_feature: MA Experiment 20000117 PARAMETER Experiment Name: At_100uM_ABA_Mutants_cDNA_P Parameter: Tissue Value: Aerial
  misc_feature: MA Experiment 20000117 PARAMETER Experiment Name: At_100uM_ABA_Mutants_cDNA_P Parameter: Treatment Value: 100uM ABA vs. No Treatment
  misc_feature: MA Experiment ID: 20000180 Result: Up-regulated in Transcription
  misc_feature: MA Experiment 20000180 PARAMETER Experiment Name: At_Germinating_Seeds_P Parameter: Age (hr) Value: 24 vs. 0
  misc_feature: MA Experiment 20000180 PARAMETER Experiment Name: At_Germinating_Seeds_P Parameter: Tissue Value: Germinating Seeds
  misc_feature: MA Experiment ID: 20000184 Result: Up-regulated in Transcription
  misc_feature: MA Experiment 20000184 PARAMETER Experiment Name: At_Shoots__P Parameter: Age (day) Value: 7
  misc_feature: MA Experiment 20000184 PARAMETER Experiment Name: At_Shoots__P Parameter: Tissue Value: Shoots vs. Whole Plant
  misc_feature: MA Experiment ID: 20000185 Result: Down-regulated in Transcription
  misc_feature: MA Experiment 20000185 PARAMETER Experiment Name: At_Roots__P Parameter: Age (day) Value: 7 vs. 21
  misc_feature: MA Experiment 20000185 PARAMETER Experiment Name: At_Roots__P Parameter: Organism Value: A. thaliana
  misc_feature: MA Experiment 20000185 PARAMETER Experiment Name: At_Roots__P Parameter: Tissue Value: Roots vs. Whole Plant
  misc_feature: MA Experiment ID: 20000234 Result: Up-regulated in Transcription
  misc_feature: MA Experiment 20000234 PARAMETER Experiment Name: At_Siliques_P Parameter: Age (day) Value: 21
  misc_feature: MA Experiment 20000234 PARAMETER Experiment Name: At_Siliques_P Parameter: Organism Value: A. thaliana
  misc_feature: MA Experiment 20000234 PARAMETER Experiment Name: At_Siliques_P Parameter: Plant Line Value: WS
  misc_feature: MA Experiment 20000234 PARAMETER Experiment Name: At_Siliques_P Parameter: Tissue Value: Less Than 5mm Siliques vs. Whole Plant
  misc_feature: MA Experiment ID: 20000235 Result: Up-regulated in Transcription
  misc_feature: MA Experiment 20000235 PARAMETER Experiment Name: At_Siliques_P Parameter: Age (day) Value: 21
  misc_feature: MA Experiment 20000235 PARAMETER Experiment Name: At_Siliques_P Parameter: Organism Value: A. thaliana
  misc_feature: MA Experiment 20000235 PARAMETER Experiment Name: At_Siliques_P Parameter: Plant Line Value: WS
  misc_feature: MA Experiment 20000235 PARAMETER Experiment Name: At_Siliques_P Parameter: Tissue Value: 5-10mm Siliques vs. Whole Plant
  misc_feature: MA Experiment ID: 20000436 Result: Down-regulated in Transcription
  misc_feature: MA Experiment 20000436 PARAMETER Experiment Name: At_Drought_P Parameter: Age (day) Value: 7
  misc_feature: MA Experiment 20000436 PARAMETER Experiment Name: At_Drought_P Parameter: Organism Value: A. thaliana
  misc_feature: MA Experiment 20000436 PARAMETER Experiment Name: At_Drought_P Parameter: Plant Line Value: WS
  misc_feature: MA Experiment 20000436 PARAMETER Experiment Name: At_Drought_P Parameter: Timepoint (hr) Value: 12
  misc_feature: MA Experiment 20000436 PARAMETER Experiment Name: At_Drought_P Parameter: Tissue Value: Whole Plant
  misc_feature: MA Experiment 20000436 PARAMETER Experiment Name: At_Drought_P Parameter: Treatment Value: Drought vs. No Drought
  misc_feature: MA Experiment ID: 20000437 Result: Down-regulated in Transcription
  misc_feature: MA Experiment 20000437 PARAMETER Experiment Name: At_Drought_P Parameter: Age (day) Value: 8
  misc_feature: MA Experiment 20000437 PARAMETER Experiment Name: At_Drought_P Parameter: Organism Value: A. thaliana
  misc_feature: MA Experiment 20000437 PARAMETER Experiment Name: At_Drought_P Parameter: Plant Line Value: WS
  misc_feature: MA Experiment 20000437 PARAMETER Experiment Name: At_Drought_P Parameter: Timepoint (hr) Value: 24
  misc_feature: MA Experiment 20000437 PARAMETER Experiment Name: At_Drought_P Parameter: Tissue Value: Whole Plant
  misc_feature: MA Experiment 20000437 PARAMETER Experiment Name: At_Drought_P Parameter: Treatment Value: Drought vs. No Drought
  misc_feature: MA Experiment ID: 20000438 Result: Up-regulated in Transcription
  misc_feature: MA Experiment 20000438 PARAMETER Experiment Name: At_Shoots__P Parameter: Age (day) Value: 14
  misc_feature: MA Experiment 20000438 PARAMETER Experiment Name: At_Shoots__P Parameter: Tissue Value: Shoots vs. Whole Plant
  misc_feature: MA Experiment ID: 20000439 Result: Down-regulated in Transcription
  misc_feature: MA Experiment 20000439 PARAMETER Experiment Name: At_Roots__P Parameter: Age (day) Value: 14 vs. 21
  misc_feature: MA Experiment 20000439 PARAMETER Experiment Name: At_Roots__P Parameter: Organism Value: A. thaliana
  misc_feature: MA Experiment 20000439 PARAMETER Experiment Name: At_Roots__P Parameter: Tissue Value: Roots vs. Whole Plant
  misc_feature: MA Experiment ID: 20000495 Result: Down-regulated in Transcription
  misc_feature: MA Experiment 20000495 PARAMETER Experiment Name: At_Guard_Cells_P Parameter: Harvest Date Value: 8/2/2002
  misc_feature: MA Experiment 20000495 PARAMETER Experiment Name: At_Guard_Cells_P Parameter: Organism Value: A. thaliana
  misc_feature: MA Experiment 20000495 PARAMETER Experiment Name: At_Guard_Cells_P Parameter: Tissue Value: Guard Cells vs. Leaves
  misc_feature: MA Experiment ID: 20000527 Result: Up-regulated in Transcription
  misc_feature: MA Experiment 20000527 PARAMETER Experiment Name: At_10percent_PEG_P Parameter: Age (day) Value: 20
  misc_feature: MA Experiment 20000527 PARAMETER Experiment Name: At_10percent_PEG_P Parameter: Organism Value: A. thaliana
  misc_feature: MA Experiment 20000527 PARAMETER Experiment Name: At_10percent_PEG_P Parameter: Plant Line Value: WS
  misc_feature: MA Experiment 20000527 PARAMETER Experiment Name: At_10percent_PEG_P Parameter: Timepoint (day) Value: 20
  misc_feature: MA Experiment 20000527 PARAMETER Experiment Name: At_10percent_PEG_P Parameter: Tissue Value: Whole Plant
  misc_feature: MA Experiment 20000527 PARAMETER Experiment Name: At_10percent_PEG_P Parameter: Treatment Value: 10percent PEG vs. No Treatment
  misc_feature: MA Experiment ID: 20001248 Result: Down-regulated in Transcription
  misc_feature: MA Experiment 20001248 PARAMETER Experiment Name: At_Far-red-induction_P Parameter: Age (day) Value: 7
  misc_feature: MA Experiment 20001248 PARAMETER Experiment Name: At_Far-red-induction_P Parameter: Light Value: Far-red vs. White
  misc_feature: MA Experiment 20001248 PARAMETER Experiment Name: At_Far-red-induction_P Parameter: Organism Value: A. thaliana
  misc_feature: MA Experiment 20001248 PARAMETER Experiment Name: At_Far-red-induction_P Parameter: Plant Line Value: Columbia
  misc_feature: MA Experiment 20001248 PARAMETER Experiment Name: At_Far-red-induction_P Parameter: Timepoint (hr) Value: 4
  misc_feature: MA Experiment 20001248 PARAMETER Experiment Name: At_Far-red-induction_P Parameter: Tissue Value: Whole Plant
  misc_feature: MA Experiment ID: 20001450 Result: Down-regulated in Transcription
  misc_feature: MA Experiment 20001450 PARAMETER Experiment Name: At_Far-red-induction_P Parameter: Age (day) Value: 7
  misc_feature: MA Experiment 20001450 PARAMETER Experiment Name: At_Far-red-induction_P Parameter: Light Value: Far-red vs. White
  misc_feature: MA Experiment 20001450 PARAMETER Experiment Name: At_Far-red-induction_P Parameter: Organism Value: A. thaliana
  misc_feature: MA Experiment 20001450 PARAMETER Experiment Name: At_Far-red-induction_P Parameter: Plant Line Value: Columbia
  misc_feature: MA Experiment 20001450 PARAMETER Experiment Name: At_Far-red-induction_P Parameter: Timepoint (hr) Value: 8
  misc_feature: MA Experiment 20001450 PARAMETER Experiment Name: At_Far-red-induction_P Parameter: Tissue Value: Whole Plant
  misc_feature: MA Experiment ID: 20001560 Result: Up-regulated in Transcription
  misc_feature: MA Experiment 20001560 PARAMETER Experiment Name: At_Drought_Soil_Dry_P Parameter: Age (day) Value: 28
  misc_feature: MA Experiment 20001560 PARAMETER Experiment Name: At_Drought_Soil_Dry_P Parameter: Organism Value: A. thaliana
  misc_feature: MA Experiment 20001560 PARAMETER Experiment Name: At_Drought_Soil_Dry_P Parameter: Plant Line Value: WS
  misc_feature: MA Experiment 20001560 PARAMETER Experiment Name: At_Drought_Soil_Dry_P Parameter: Post Timepoint (hr) Value: None
  misc_feature: MA Experiment 20001560 PARAMETER Experiment Name: At_Drought_Soil_Dry_P Parameter: Post-Treatment Value: None
  misc_feature: MA Experiment 20001560 PARAMETER Experiment Name: At_Drought_Soil_Dry_P Parameter: Timepoint (day) Value: 14
  misc_feature: MA Experiment 20001560 PARAMETER Experiment Name: At_Drought_Soil_Dry_P Parameter: Treatment Value: Drought vs. No Drought
  misc_feature: MA Experiment ID: 20001905 Result: Down-regulated in Transcription
  misc_feature: MA Experiment 20001905 PARAMETER Experiment Name: At_Drought_Reproduction_P Parameter: Age (day) Value: 40
  misc_feature: MA Experiment 20001905 PARAMETER Experiment Name: At_Drought_Reproduction_P Parameter: Organism Value: A. thaliana
  misc_feature: MA Experiment 20001905 PARAMETER Experiment Name: At_Drought_Reproduction_P Parameter: Plant Line Value: WS
  misc_feature: MA Experiment 20001905 PARAMETER Experiment Name: At_Drought_Reproduction_P Parameter: Timepoint (day) Value: 10
  misc_feature: MA Experiment 20001905 PARAMETER Experiment Name: At_Drought_Reproduction_P Parameter: Tissue Value: Rosettes
  misc_feature: MA Experiment 20001905 PARAMETER Experiment Name: At_Drought_Reproduction_P Parameter: Treatment Value: Drought vs. No Drought
  misc_feature: MA Experiment ID: 20001911 Result: Down-regulated in Transcription
  misc_feature: MA Experiment 20001911 PARAMETER Experiment Name: At_Drought_Reproduction_P Parameter: Age (day) Value: 40
  misc_feature: MA Experiment 20001911 PARAMETER Experiment Name: At_Drought_Reproduction_P Parameter: Organism Value: A. thaliana
  misc_feature: MA Experiment 20001911 PARAMETER Experiment Name: At_Drought_Reproduction_P Parameter: Plant Line Value: WS
  misc_feature: MA Experiment 20001911 PARAMETER Experiment Name: At_Drought_Reproduction_P Parameter: Timepoint (day) Value: 10
  misc_feature: MA Experiment 20001911 PARAMETER Experiment Name: At_Drought_Reproduction_P Parameter: Tissue Value: Flowers
  misc_feature: MA Experiment 20001911 PARAMETER Experiment Name: At_Drought_Reproduction_P Parameter: Treatment Value: Drought vs. No Drought
acgattctcccgccaccacaccacagctttttgcttcatctccttcttactctctgtgtctctaactcctcgtgcactcagacatcacagatatggcttgtgttcggtcgattggttctttaacttctgtcaaccattctcaacgaaatgttcctcgctcaggcattgtcttatcttcatgctctgttcttcccatcaaaagctcatctttcactggatcccctgtttctctcccgcgggctcaaccatcatcccgaacagctctaagaccgatgaaacccgtctctatcacgatgatggtaaagccggcgctccaattcatccaagggacggatgagatgacaatccctgatgttaagctgactcgatcaagagacggaagcaacggaatggcactgttctctttcgaccaaccatccgttttcgactcgagcggtgaagtcggagagattacaggattgtacatgattgatgaggaaggtgtgattcagtcgacggatgtgaacgcgagattcgtgaatgggaaaccggaagggattgtggcgaagcacataatgcgatcgccgaaagaatgggacaggttcatgaggtttatggagcgatactcggaccagaatggcttgcagtttgttaagaagcaatgaggttggagagaattttcaatgagcaaaacaaaatgtgtatgttacattaaattttttcactcttttgatttataatcttgtactctcctagttttgatctttacttgagtttcaacttacaatggc

SEQ ID NO: 26298 - protein, 183 aa, Arabidopsis thaliana
  peptide (1)..(183): Ceres Seq. ID no. 12331697
  misc_feature (71)..(183): Pfam Name: Photosystem II reaction centre W protein, PsbW Pfam Description: Photosystem II reaction centre W protein, PsbW
  misc_feature (85)..(182): Homolog of NCBI NO: 19880501 NR Description: saline responsive OSSRII protein [Oryza sativa]
  misc_feature (66)..(182): Homolog of NCBI NO: 34907246 NR Description: photosystem II protein W-like protein
  misc_feature (74)..(183): Homolog of NCBI NO: 23126196 NR Description: hypothetical protein [Nostoc punctiforme]
  misc_feature (74)..(181): Homolog of NCBI NO: 11467376 NR Description: photosystem II protein W [Cyanophora paradoxa]
  misc_feature (74)..(181): Homolog of NCBI NO: 11467617 NR Description: photosystem II protein W [Guillardia theta]
  misc_feature (74)..(181): Homolog of NCBI NO: 11467474 NR Description: photosystem II protein W [Odontella sinensis]
  misc_feature (74)..(181): Homolog of NCBI NO: 11465813 NR Description: photosystem II protein W [Porphyra purpurea]
  misc_feature (74)..(183): Homolog of NCBI NO: 22298036 NR Description: photosystem II reaction center W protein
  misc_feature (1)..(183): Homolog of NCBI NO: 18417239 NR Description: photosystem II protein W - like
  misc_feature (1)..(183): Homolog of NCBI NO: 7488014 NR Description: photosystem II protein W homolog T5F17.110 -
MACVRSIGSLTSVNHSQRNVPRSGIVLSSCSVLPIKSSSFTGSPVSLPRAQPSSRTALRPMKPVSITMMVKPALQFIQGTDEMTIPDVKLTRSRDGSNGMALFSFDQPSVFDSSGEVGEITGLYMIDEEGVIQSTDVNARFVNGKPEGIVAKHIMRSPKEWDRFMRFMERYSDQNGLQFVKKQ

SEQ ID NO: 26299 - protein, 123 aa, Arabidopsis thaliana
  peptide (1)..(123): Ceres Seq. ID no. 12331698
  misc_feature (11)..(123): Pfam Name: Photosystem II reaction centre W protein, PsbW Pfam Description: Photosystem II reaction centre W protein, PsbW
  misc_feature (14)..(123): Homolog of NCBI NO: 23126196 NR Description: hypothetical protein [Nostoc punctiforme]
  misc_feature (14)..(123): Homolog of NCBI NO: 22298036 NR Description: photosystem II reaction center W protein
  misc_feature (14)..(121): Homolog of NCBI NO: 11467376 NR Description: photosystem II protein W [Cyanophora paradoxa]
  misc_feature (14)..(121): Homolog of NCBI NO: 11465813 NR Description: photosystem II protein W [Porphyra purpurea]
  misc_feature (14)..(121): Homolog of NCBI NO: 11467617 NR Description: photosystem II protein W [Guillardia theta]
  misc_feature (14)..(121): Homolog of NCBI NO: 11467474 NR Description: photosystem II protein W [Odontella sinensis]
  misc_feature (25)..(122): Homolog of NCBI NO: 19880501 NR Description: saline responsive OSSRII protein [Oryza sativa]
  misc_feature (6)..(122): Homolog of NCBI NO: 34907246 NR Description: photosystem II protein W-like protein
  misc_feature (1)..(123): Homolog of NCBI NO: 18417239 NR Description: photosystem II protein W - like
  misc_feature (1)..(123): Homolog of NCBI NO: 7488014 NR Description: photosystem II protein W homolog T5F17.110 -
MKPVSITMMVKPALQFIQGTDEMTIPDVKLTRSRDGSNGMALFSFDQPSVFDSSGEVGEITGLYMIDEEGVIQSTDVNARFVNGKPEGIVAKHIMRSPKEWDRFMRFMERYSDQNGLQFVKKQ

SEQ ID NO: 26300 - protein, 116 aa, Arabidopsis thaliana
  peptide (1)..(116): Ceres Seq. ID no. 12331699
  misc_feature (4)..(116): Pfam Name: Photosystem II reaction centre W protein, PsbW Pfam Description: Photosystem II reaction centre W protein, PsbW
  misc_feature (7)..(116): Homolog of NCBI NO: 23126196 NR Description: hypothetical protein [Nostoc punctiforme]
  misc_feature (7)..(116): Homolog of NCBI NO: 22298036 NR Description: photosystem II reaction center W protein
  misc_feature (7)..(114): Homolog of NCBI NO: 11467376 NR Description: photosystem II protein W [Cyanophora paradoxa]
  misc_feature (7)..(114): Homolog of NCBI NO: 11465813 NR Description: photosystem II protein W [Porphyra purpurea]
  misc_feature (7)..(114): Homolog of NCBI NO: 11467617 NR Description: photosystem II protein W [Guillardia theta]
  misc_feature (7)..(114): Homolog of NCBI NO: 11467474 NR Description: photosystem II protein W [Odontella sinensis]
  misc_feature (18)..(115): Homolog of NCBI NO: 19880501 NR Description: saline responsive OSSRII protein [Oryza sativa]
  misc_feature (1)..(115): Homolog of NCBI NO: 34907246 NR Description: photosystem II protein W-like protein
  misc_feature (1)..(116): Homolog of NCBI NO: 18417239 NR Description: photosystem II protein W - like
  misc_feature (1)..(116): Homolog of NCBI NO: 7488014 NR Description: photosystem II protein W homolog T5F17.110 -
MMVKPALQFIQGTDEMTIPDVKLTRSRDGSNGMALFSFDQPSVFDSSGEVGEITGLYMIDEEGVIQSTDVNARFVNGKPEGIVAKHIMRSPKEWDRFMRFMERYSDQNGLQFVKKQ

SEQ ID NO: 26301 - DNA, 1233 bp, Arabidopsis thaliana
  misc_feature (1)..(1233): Ceres Seq. ID no. 13495914
  misc_feature: MA Experiment ID: 20000234 Result: Down-regulated in Transcription
  misc_feature: MA Experiment 20000234 PARAMETER Experiment Name: At_Siliques_P Parameter: Age (day) Value: 21
  misc_feature: MA Experiment 20000234 PARAMETER Experiment Name: At_Siliques_P Parameter: Organism Value: A. thaliana
  misc_feature: MA Experiment 20000234 PARAMETER Experiment Name: At_Siliques_P Parameter: Plant Line Value: WS
  misc_feature: MA Experiment 20000234 PARAMETER Experiment Name: At_Siliques_P Parameter: Tissue Value: Less Than 5mm Siliques vs. Whole Plant
  misc_feature: MA Experiment ID: 20000495 Result: Down-regulated in Transcription
  misc_feature: MA Experiment 20000495 PARAMETER Experiment Name: At_Guard_Cells_P Parameter: Harvest Date Value: 8/2/2002
  misc_feature: MA Experiment 20000495 PARAMETER Experiment Name: At_Guard_Cells_P Parameter: Organism Value: A. thaliana
  misc_feature: MA Experiment 20000495 PARAMETER Experiment Name: At_Guard_Cells_P Parameter: Tissue Value: Guard Cells vs. Leaves
  misc_feature: MA Experiment ID: 20001458 Result: Up-regulated in Transcription
  misc_feature: MA Experiment 20001458 PARAMETER Experiment Name: At_50mM_NH4NO3_L-to-H_P Parameter: Age (day) Value: Undefined
  misc_feature: MA Experiment 20001458 PARAMETER Experiment Name: At_50mM_NH4NO3_L-to-H_P Parameter: Organism Value: Undefined
  misc_feature: MA Experiment 20001458 PARAMETER Experiment Name: At_50mM_NH4NO3_L-to-H_P Parameter: Plant Line Value: Undefined
  misc_feature: MA Experiment 20001458 PARAMETER Experiment Name: At_50mM_NH4NO3_L-to-H_P Parameter: Timepoint (hr) Value: 2
  misc_feature: MA Experiment 20001458 PARAMETER Experiment Name: At_50mM_NH4NO3_L-to-H_P Parameter: Tissue Value: Siliques
  misc_feature: MA Experiment 20001458 PARAMETER Experiment Name: At_50mM_NH4NO3_L-to-H_P Parameter: Treatment Value: 50mM NH4NO3 vs. 100mM Manitol
  misc_feature: MA Experiment ID: 20001757 Result: Up-regulated in Transcription
  misc_feature: MA Experiment 20001757 PARAMETER Experiment Name: At_50mM_NH4NO3_L-to-H_P Parameter: Timepoint (hr) Value: 6
  misc_feature: MA Experiment 20001757 PARAMETER Experiment Name: At_50mM_NH4NO3_L-to-H_P Parameter: Tissue Value: Leaf
  misc_feature: MA Experiment 20001757 PARAMETER Experiment Name: At_50mM_NH4NO3_L-to-H_P Parameter: Treatment Value: 50mM NH4NO3 vs 100mM Mannitol
cacgagattttttattttaatatcacgctcgaatatacaattcggaatgtgcagatgttttttttgaaggcaatttagaaaaatagacaaaaatcgaacaaacatatatagaaatagagatctaaataaaaacatttattttatttcctcttggaaacaaggaaaaaatgaattggggtgggtgacgtggcagtcatacccttgccacacccttcctatacgcatataaacagcagctgcgaggagagagagatttcagagtattttctagggtttcgttttttttaaagatttagagaaaaaagtgagttattaagagattccaatcaaaatgagcggagacaacggcggtggtgagaggcgcaaaggctccgtcaagtggtttgatacccagaagggtttcggcttcatcactcctgacgacggtggcgacgatctcttcgttcaccagtcctccatcagatctgagggtttccgtagcctcgctgccgaagaagccgtagagttcgaggttgagatcgacaacaacaaccgtcccaaggccatcgatgtttctggacccgacggcgctcccgtccaaggaaacagcggtggtggttcatctggcggacgcggcggtttcggtggaggaagaggaggtggacgcggatctggaggtggatacggcggtggcggtggtggatacggaggaagaggaggtggtggtcgaggaggcagcgactgctacaagtgtggtgagcccggtcacatggcgagagactgttctgaaggcggtggaggttacggaggaggcggcggtggctacggaggtggaggcggatacggcggaggaggtggtggttacggaggtggtggccgtggaggtggtggcggcgggggaagctgctacagctgtggcgagtcgggacatttcgccagggattgcaccagcggtggacgttaaaaccaacgccggttacgcggtggagaagagtgagttggttatctcacaagtgatcggttctttctcccgccgccttctatctctctattatccactttttgcttattatgatggatctctatctttgttagttggttttttcttgatggtttcggattaggactcttcttttggttttgctacttatggttggttttatttatggtacttgtgatatgggtgaaatgctctacttgttgctctgtttcaagtgttcataatatgcgaacaaatattctgggttttgtttc

SEQ ID NO: 26302 - protein, 203 aa, Arabidopsis thaliana
  peptide (1)..(203): Ceres Seq. ID no. 13495915
  misc_feature (10)..(77): Pfam Name: 'Cold-shock' DNA-binding domain Pfam Description: 'Cold-shock' DNA-binding domain
  misc_feature (1)..(199): Homolog of NCBI NO: 15233440 NR Description: glycine-rich protein [Arabidopsis thaliana]
  misc_feature (87)..(198): Homolog of NCBI NO: 21322752 NR Description: cold shock protein-1 [Triticum aestivum]
  misc_feature (10)..(202): Homolog of NCBI NO: 7442089 NR Description: glycine-rich protein T13L16.11 - Arabidopsis
  misc_feature (1)..(202): Homolog of NCBI NO: 18398546 NR Description: glycine-rich, zinc-finger DNA-binding protein
  misc_feature (8)..(198): Homolog of NCBI NO: 40363759 NR Description: putative glycine-rich protein [Triticum aestivum]
  misc_feature (8)..(202): Homolog of NCBI NO: 21322752 NR Description: cold shock protein-1 [Triticum aestivum]
  misc_feature (9)..(200): Homolog of NCBI NO: 29467522 NR Description: P0582D05.12 [Oryza sativa (japonica
  misc_feature (8)..(203): Homolog of NCBI NO: 121631 NR Description: Glycine-rich protein 2
  misc_feature (7)..(202): Homolog of NCBI NO: 15226451 NR Description: glycine-rich protein (AtGRP2) [Arabidopsis
  misc_feature (1)..(203): Homolog of NCBI NO: 15234010 NR Description: glycine-rich protein 2 (GRP2) [Arabidopsis
MSGDNGGGERRKGSVKWFDTQKGFGFITPDDGGDDLFVHQSSIRSEGFRSLAAEEAVEFEVEIDNNNRPKAIDVSGPDGAPVQGNSGGGSSGGRGGFGGGRGGGRGSGGGYGGGGGGYGGRGGGGRGGSDCYKCGEPGHMARDCSEGGGGYGGGGGGYGGGGGYGGGGGGYGGGGRGGGGGGGSCYSCGESGHFARDCTSGGR

SEQ ID NO: 26303 - protein, 184 aa, Arabidopsis thaliana
  peptide (1)..(184): Ceres Seq. ID no. 13495916
MFLDPTALPSKETAVVVHLADAAVSVEEEEVDADLEVDTAVAVVDTEEEEVVVEEAATATSVVSPVTWRETVLKAVEVTEEAAVATEVEADTAEEVVVTEVVAVEVVAAGEAATAVASRDISPGIAPAVDVKTNAGYAVEKSELVISQVIGSFSRRLLSLYYPLFAYYDGSLSLLVGFFLMVSD

SEQ ID NO: 26304 - DNA, 2368 bp, Arabidopsis thaliana
  misc_feature (1)..(2368): Ceres Seq. ID no. 14307859
  misc_feature: MA Experiment ID: 20000327 Result: Up-regulated in Transcription
  misc_feature: MA Experiment 20000327 PARAMETER Experiment Name: At_42deg_Heat_Sub_P Parameter: Age (day) Value: 14
  misc_feature: MA Experiment 20000327 PARAMETER Experiment Name: At_42deg_Heat_Sub_P Parameter: Organism Value: A. thaliana
  misc_feature: MA Experiment 20000327 PARAMETER Experiment Name: At_42deg_Heat_Sub_P Parameter: Plant Line Value: WS
  misc_feature: MA Experiment 20000327 PARAMETER Experiment Name: At_42deg_Heat_Sub_P Parameter: Temperature (deg C) Value: 42 vs. 22
  misc_feature: MA Experiment 20000327 PARAMETER Experiment Name: At_42deg_Heat_Sub_P Parameter: Timepoint (hr) Value: 1
  misc_feature: MA Experiment 20000327 PARAMETER Experiment Name: At_42deg_Heat_Sub_P Parameter: Tissue Value: Aerial
  misc_feature: MA Experiment ID: 20000328 Result: Up-regulated in Transcription
  misc_feature: MA Experiment 20000328 PARAMETER Experiment Name: At_42deg_Heat_Sub_P Parameter: Age (day) Value: 14
  misc_feature: MA Experiment 20000328 PARAMETER Experiment Name: At_42deg_Heat_Sub_P Parameter: Organism Value: A. thaliana
  misc_feature: MA Experiment 20000328 PARAMETER Experiment Name: At_42deg_Heat_Sub_P Parameter: Plant Line Value: WS
  misc_feature: MA Experiment 20000328 PARAMETER Experiment Name: At_42deg_Heat_Sub_P Parameter: Temperature (deg C) Value: 42 vs. 22
  misc_feature: MA Experiment 20000328 PARAMETER Experiment Name: At_42deg_Heat_Sub_P Parameter: Timepoint (hr) Value: 6
  misc_feature: MA Experiment 20000328 PARAMETER Experiment Name: At_42deg_Heat_Sub_P Parameter: Tissue Value: Aerial
atcaatacttctctctgctctcaagataattttgttctctcaatttcattcttaaaccctaattcttcgtttttatccgatctacgaaaatggcggacgctgaaacctttgctttccaagctgagatcaaccagttgctctccctcatcatcaataccttttactccaacaaggagatcttcctccgtgaactcatcagtaactcttctgatgctttagacaagattagattcgagtccttgacggacaagagcaagcttgatggtcagcctgagctcttcattcacatcattcccgacaagactaacaacaccttgaccattattgatagtggtatcggcatgaccaaggctgatttggtcaacaacctcggaacaattgcaagatctggtaccaaggaattcatggaagcgttggctgctggagctgatgttagcatgattggtcagtttggtgttggtttctactctgcatacttggttgctgacaaagtggttgttactaccaagcacaatgacgatgagcaatacgtgtgggagtctcaggccggtggatctttcaccgtgaccagagacacctctggggaggctcttggtagaggaacaaagatggtcctttacctcaaggaagaccagttggagtaccttgaggagcgaaggcttaaggatttggtgaagaagcactctgagttcatcagctacccaatctctctctggattgagaagaccattgagaaggagatctctgatgatgaagaggaggaagaaaagaaagatgaggaaggaaaggttgaggaggtcgatgaggagaaagagaaggaggagaagaaaaagaagaagattaaggaggtttctcatgagtgggatttggtgaacaagcagaaaccgatttggatgaggaagccagaggagatcaacaaggaggagtacgctgctttctacaagagtttgagcaatgactgggaagagcatttggctgtgaagcatttctcagttgaaggacagcttgagttcaaagctatcctctttgttcccaagagagctcctttcgatctctttgacactaagaagaagcccaacaacatcaagctctatgtccgtcgtgtcttcatcatggacaactgtgaagacatcattcctgagtaccttgggtttgttaagggtattgttgactctgaagatcttcctctcaacatctcgagagaaacattgcagcagaacaagatcctcaaggtcatccgcaagaaccttgtgaagaagtgccttgagctcttctttgagattgctgagaacaaggaggactacaacaagttttacgaagctttctctaagaacctgaagcttggtatccacgaggactcccaaaacagaaccaagattgctgagttgctccgttaccactcaaccaagagcggtgatgaattgaccagtctcaaggactacgtgacaaggatgaaggaaggtcagaacgatatcttctacatcactggtgagagcaagaaggctgttgagaactctccattccttgagaagctcaagaagaagggtattgaagttctctacatggttgatgcgattgatgagtacgctattggtcagcttaaggaattcgagggaaagaaacttgtttctgcaaccaaggaaggtctgaaactggatgagaccgaagatgaaaagaagaagaaagaagagctcaaggagaagtttgaaggactctgcaaagtgataaaagatgttttgggagacaaggtcgagaaggttattgtttctgaccgtgttgtggactcaccttgctgtcttgtaaccggcgaatatggctggactgcaaacatggagaggatcatgaaagctcaagccttgagagacagcagcatggctggttacatgtcgagcaagaagacaatggagattaacccagagaactccatcatggatgagctgagaaagagagctgacgcagacaagaacgataagtctgtgaaggatcttgtgcttctcctctttgagaccgcccttctcacctctggtttcagccttgacgagccaaacactttcggaagcaggattcacaggatgttgaagcttggactgagtattgatgacgatgatgctgttgaagccgatgctgagatgcctccccttgaagacgatgctgatgcggaaggtagcaagatggaggaagtcgactaatttatcacacaaaagtcgactaaattattagcggttttttaagactctggttttctttttactttttcgttaaaacttctgttattttggtgatcatcttcacgaattttttctatggtttcatttgttgtgaagatatttccctgaactcggttttatgacaaagattctattatgcc

SEQ ID NO: 26305 - protein, 699 aa, Arabidopsis thaliana
  peptide (1)..(699): Ceres Seq. ID no. 14307860
  misc_feature (184)..(699): Pfam Name: Hsp90 protein Pfam Description: Hsp90 protein
  misc_feature (4)..(699): Homolog of NCBI NO: 2239253 NR Description: gp96/GRP94 [Sus scrofa]
  misc_feature (4)..(699): Homolog of NCBI NO: 33304175 NR Description: tumor rejection antigen 1gp96 [synthetic
  misc_feature (4)..(699): Homolog of NCBI NO: 7441885 NR Description: protein kinase ppk98 (EC 2.7.1.-) precursor,
  misc_feature (4)..(699): Homolog of NCBI NO: 4507677 NR Description: tumor rejection antigen (gp96) 1
  misc_feature (4)..(699): Homolog of NCBI NO: 27807263 NR Description: tumor rejection antigen (gp96) 1 [Bos taurus]
  misc_feature (4)..(697): Homolog of NCBI NO: 14714615 NR Description: tumor rejection antigen gp96 [Mus musculus]
  misc_feature (4)..(697): Homolog of NCBI NO: 6755863 NR Description: tumor rejection antigen gp96; tumor rejection
  misc_feature (1)..(699): Homolog of NCBI NO: 12005809 NR Description: 90-kDa heat shock protein HSP83 [Spodoptera
  misc_feature (3)..(280): Homolog of NCBI NO: 29145077 NR Description: Hspca protein [Mus musculus]
  misc_feature (211)..(699): Homolog of NCBI NO: 29145077 NR Description: Hspca protein [Mus musculus]
MADAETFAFQAEINQLLSLIINTFYSNKEIFLRELISNSSDALDKIRFESLTDKSKLDGQPELFIHIIPDKTNNTLTIIDSGIGMTKADLVNNLGTIARSGTKEFMEALAAGADVSMIGQFGVGFYSAYLVADKVVVTTKHNDDEQYVWESQAGGSFTVTRDTSGEALGRGTKMVLYLKEDQLEYLEERRLKDLVKKHSEFISYPISLWIEKTIEKEISDDEEEEEKKDEEGKVEEVDEEKEKEEKKKKKIKEVSHEWDLVNKQKPIWMRKPEEINKEEYAAFYKSLSNDWEEHLAVKHFSVEGQLEFKAILFVPKRAPFDLFDTKKKPNNIKLYVRRVFIMDNCEDIIPEYLGFVKGIVDSEDLPLNISRETLQQNKILKVIRKNLVKKCLELFFEIAENKEDYNKFYEAFSKNLKLGIHEDSQNRTKIAELLRYHSTKSGDELTSLKDYVTRMKEGQNDIFYITGESKKAVENSPFLEKLKKKGIEVLYMVDAIDEYAIGQLKEFEGKKLVSATKEGLKLDETEDEKKKKEELKEKFEGLCKVIKDVLGDKVEKVIVSDRVVDSPCCLVTGEYGWTANMERIMKAQALRDSSMAGYMSSKKTMEINPENSIMDELRKRADADKNDKSVKDLVLLLFETALLTSGFSLDEPNTFGSRIHRMLKLGLSIDDDDAVEADAEMPPLEDDADAEGSKMEEVD

SEQ ID NO: 26306 - protein, 615 aa, Arabidopsis thaliana
  peptide (1)..(615): Ceres Seq. ID no. 14307861
  misc_feature (100)..(615): Pfam Name: Hsp90 protein Pfam Description: Hsp90 protein
  misc_feature (1)..(615): Homolog of NCBI NO: 2239253 NR Description: gp96/GRP94 [Sus scrofa]
  misc_feature (1)..(615): Homolog of NCBI NO: 7441885 NR Description: protein kinase ppk98 (EC 2.7.1.-) precursor,
  misc_feature (1)..(615): Homolog of NCBI NO: 33304175 NR Description: tumor rejection antigen 1gp96 [synthetic
  misc_feature (1)..(615): Homolog of NCBI NO: 4507677 NR Description: tumor rejection antigen (gp96) 1
  misc_feature (1)..(615): Homolog of NCBI NO: 27807263 NR Description: tumor rejection antigen (gp96) 1 [Bos taurus]
  misc_feature (1)..(613): Homolog of NCBI NO: 14714615 NR Description: tumor rejection antigen gp96 [Mus musculus]
  misc_feature (1)..(613): Homolog of NCBI NO: 6755863 NR Description: tumor rejection antigen gp96; tumor rejection
  misc_feature (1)..(615): Homolog of NCBI NO: 12005809 NR Description: 90-kDa heat shock protein HSP83 [Spodoptera
  misc_feature (1)..(196): Homolog of NCBI NO: 29145077 NR Description: Hspca protein [Mus musculus]
  misc_feature (127)..(615): Homolog of NCBI NO: 29145077 NR Description: Hspca protein [Mus musculus]
MTKADLVNNLGTIARSGTKEFMEALAAGADVSMIGQFGVGFYSAYLVADKVVVTTKHNDDEQYVWESQAGGSFTVTRDTSGEALGRGTKMVLYLKEDQLEYLEERRLKDLVKKHSEFISYPISLWIEKTIEKEISDDEEEEEKKDEEGKVEEVDEEKEKEEKKKKKIKEVSHEWDLVNKQKPIWMRKPEEINKEEYAAFYKSLSNDWEEHLAVKHFSVEGQLEFKAILFVPKRAPFDLFDTKKKPNNIKLYVRRVFIMDNCEDIIPEYLGFVKGIVDSEDLPLNISRETLQQNKILKVIRKNLVKKCLELFFEIAENKEDYNKFYEAFSKNLKLGIHEDSQNRTKIAELLRYHSTKSGDELTSLKDYVTRMKEGQNDIFYITGESKKAVENSPFLEKLKKKGIEVLYMVDAIDEYAIGQLKEFEGKKLVSATKEGLKLDETEDEKKKKEELKEKFEGLCKVIKDVLGDKVEKVIVSDRVVDSPCCLVTGEYGWTANMERIMKAQALRDSSMAGYMSSKKTMEINPENSIMDELRKRADADKNDKSVKDLVLLLFETALLTSGFSLDEPNTFGSRIHRMLKLGLSIDDDDAVEADAEMPPLEDDADAEGSKMEEVD

SEQ ID NO: 26307 - protein, 594 aa, Arabidopsis thaliana
  peptide (1)..(594): Ceres Seq. ID no. 14307862
  misc_feature (79)..(594): Pfam Name: Hsp90 protein Pfam Description: Hsp90 protein
  misc_feature (1)..(594): Homolog of NCBI NO: 2239253 NR Description: gp96/GRP94 [Sus scrofa]
  misc_feature (1)..(594): Homolog of NCBI NO: 33304175 NR Description: tumor rejection antigen 1gp96 [synthetic
  misc_feature (1)..(594): Homolog of NCBI NO: 7441885 NR Description: protein kinase ppk98 (EC 2.7.1.-) precursor,
  misc_feature (1)..(594): Homolog of NCBI NO: 4507677 NR Description: tumor rejection antigen (gp96) 1
  misc_feature (1)..(594): Homolog of NCBI NO: 27807263 NR Description: tumor rejection antigen (gp96) 1 [Bos taurus]
  misc_feature (1)..(592): Homolog of NCBI NO: 14714615 NR Description: tumor rejection antigen gp96 [Mus musculus]
  misc_feature (1)..(592): Homolog of NCBI NO: 6755863 NR Description: tumor rejection antigen gp96; tumor rejection
  misc_feature (1)..(594): Homolog of NCBI NO: 12005809 NR Description: 90-kDa heat shock protein HSP83 [Spodoptera
  misc_feature (1)..(175): Homolog of NCBI NO: 29145077 NR Description: Hspca protein [Mus musculus]
  misc_feature (106)..(594): Homolog of NCBI NO: 29145077 NR Description: Hspca protein [Mus musculus]
MEALAAGADVSMIGQFGVGFYSAYLVADKVVVTTKHNDDEQYVWESQAGGSFTVTRDTSGEALGRGTKMVLYLKEDQLEYLEERRLKDLVKKHSEFISYPISLWIEKTIEKEISDDEEEEEKKDEEGKVEEVDEEKEKEEKKKKKIKEVSHEWDLVNKQKPIWMRKPEEINKEEYAAFYKSLSNDWEEHLAVKHFSVEGQLEFKAILFVPKRAPFDLFDTKKKPNNIKLYVRRVFIMDNCEDIIPEYLGFVKGIVDSEDLPLNISRETLQQNKILKVIRKNLVKKCLELFFEIAENKEDYNKFYEAFSKNLKLGIHEDSQNRTKIAELLRYHSTKSGDELTSLKDYVTRMKEGQNDIFYITGESKKAVENSPFLEKLKKKGIEVLYMVDAIDEYAIGQLKEFEGKKLVSATKEGLKLDETEDEKKKKEELKEKFEGLCKVIKDVLGDKVEKVIVSDRVVDSPCCLVTGEYGWTANMERIMKAQALRDSSMAGYMSSKKTMEINPENSIMDELRKRADADKNDKSVKDLVLLLFETALLTSGFSLDEPNTFGSRIHRMLKLGLSIDDDDAVEADAEMPPLEDDADAEGSKMEEVD

SEQ ID NO: 26308 - DNA, 1150 bp, Arabidopsis thaliana
  misc_feature (1)..(1150): Ceres Seq. ID no. 12439637
  misc_feature: MA Experiment ID: 108434 Result: Down-regulated in Transcription
  misc_feature: MA Experiment 108434 PARAMETER Experiment Name: At_Root_Tips_cDNA_P Parameter: Tissue Value: Root Tips
  misc_feature: MA Experiment ID: 20000182 Result: Up-regulated in Transcription
  misc_feature: MA Experiment 20000182 PARAMETER Experiment Name: At_2mM_SA_P Parameter: Age (day) Value: 14
  misc_feature: MA Experiment 20000182 PARAMETER Experiment Name: At_2mM_SA_P Parameter: Organism Value: A. thaliana
  misc_feature: MA Experiment 20000182 PARAMETER Experiment Name: At_2mM_SA_P Parameter: Plant Line Value: WS
  misc_feature: MA Experiment 20000182 PARAMETER Experiment Name: At_2mM_SA_P Parameter: Timepoint (hr) Value: 6
  misc_feature: MA Experiment 20000182 PARAMETER Experiment Name: At_2mM_SA_P Parameter: Tissue Value: Aerial
  misc_feature: MA Experiment 20000182 PARAMETER Experiment Name: At_2mM_SA_P Parameter: Treatment Value: 2mM SA vs. No Treatment
  misc_feature: MA Experiment ID: 20000224 Result: Down-regulated in Transcription
  misc_feature: MA Experiment ID: 20000286 Result: Down-regulated in Transcription
  misc_feature: MA Experiment 20000286 PARAMETER Experiment Name: At_Open_Flower_P Parameter: Age (day) Value: 21
  misc_feature: MA Experiment 20000286 PARAMETER Experiment Name: At_Open_Flower_P Parameter: Plant Line Value: WS
  misc_feature: MA Experiment 20000286 PARAMETER Experiment Name: At_Open_Flower_P Parameter: Tissue Value: Half Open vs. Whole Plant
  misc_feature: MA Experiment ID: 20001905 Result: Up-regulated in Transcription
  misc_feature: MA Experiment 20001905 PARAMETER Experiment Name: At_Drought_Reproduction_P Parameter: Age (day) Value: 40
  misc_feature: MA Experiment 20001905 PARAMETER Experiment Name: At_Drought_Reproduction_P Parameter: Organism Value: A. thaliana
  misc_feature: MA Experiment 20001905 PARAMETER Experiment Name: At_Drought_Reproduction_P Parameter: Plant Line Value: WS
  misc_feature: MA Experiment 20001905 PARAMETER Experiment Name: At_Drought_Reproduction_P Parameter: Timepoint (day) Value: 10
  misc_feature: MA Experiment 20001905 PARAMETER Experiment Name: At_Drought_Reproduction_P Parameter: Tissue Value: Rosettes
  misc_feature: MA Experiment 20001905 PARAMETER Experiment Name: At_Drought_Reproduction_P Parameter: Treatment Value: Drought vs. No Drought
aaaactcaagggtttgatttttcttcttcaactacgttaagatttctcctacacttttctttttcaccgtattctcttttagtcctcgattctctacgcgtttcagcgtcaagtcttctagatctctaaagccttcgtgctcgccaatataaatctctgagatcggtcccgtaaaatcggattcgcgtcgtttttgagtaaaaaaaatggcgcaacaatcgttgatctacagtttcgtcgctcgtggtaccgttatcctcgttgagttcacagatttcaaaggcaatttcacatcaatcgctgctcagtgccttcagaagcttccttcttctaacaacaagtttacctacaactgcgatggtcacacgttcaattacctcgtcgaaaatggattcacctattgtgttgttgcagttgattctgctgggaggcagattcctatggctttcttggaacgagttaaggaggatttcaacaagagatatggtggtggaaaggctgcaactgctcaagcaaacagcttgaataaagaatttgggtcgaaactgaaagagcatatgcagtattgcatggatcatcctgatgagattagcaagcttgctaaggttaaagctcaagtgtctgaagttaaaggtgttatgatggaaaacattgagaaggttcttgaccgtggtgagaagattgagcttttggttgacaaaacagaaaaccttcgctcacaggcgcaagattttagaacacaaggaactcaaatgagaagaaagatgtggtttcagaacatgaagataaagctcattgtccttgcaattatcattgccttgattctcatcatcatcctctcaatttgtgggggattcaactgcggtaaataagtctggaacatttcttcccggcgttatcgactgcgctctgtgcttcccaagatctctgagaatatcttcattcagttcgttgtgctacctttttgttttgtttttgtttttgtgatttctatattctcatactatatgtttcttcttagattgtacttcttgaaatttgttttgtataggctatatatattatacatatatgtatgcatgttcgacaatctgcaatgttgctattgctggtactgacactaattcttgcaaaccaatatttggacgat

SEQ ID NO: 26309 - protein, 221 aa, Arabidopsis thaliana
  peptide (1)..(221): Ceres Seq. ID no. 12439638
  misc_feature (127)..(215): Pfam Name: Synaptobrevin Pfam Description: Synaptobrevin
  misc_feature (1)..(221): Homolog of NCBI NO: 30685571 NR Description: synaptobrevin -related [Arabidopsis thaliana]
  misc_feature (1)..(163): Homolog of NCBI NO: 25408245 NR Description: probable synaptobrevin [imported] - Arabidopsis
  misc_feature (1)..(219): Homolog of NCBI NO: 29150380 NR Description: synaptobrevin-like protein
  misc_feature (1)..(219): Homolog of NCBI NO: 27805765 NR Description: Putative vesicle-associated membrane protein 726
  misc_feature (1)..(219): Homolog of NCBI NO: 15220315 NR Description: synaptobrevin 7B, putative; protein id:
  misc_feature (1)..(219): Homolog of NCBI NO: 27805753 NR Description: Vesicle-associated membrane protein 725
  misc_feature (1)..(219): Homolog of NCBI NO: 30685375 NR Description: synaptobrevin -related [Arabidopsis thaliana]
  misc_feature (1)..(219): Homolog of NCBI NO: 15220943 NR Description: synaptobrevin 7B, putative; protein id:
  misc_feature (1)..(221): Homolog of NCBI NO: 600710 NR Description: formerly called HAT24; synaptobrevin-related
  misc_feature (1)..(221): Homolog of NCBI NO: 15225796 NR Description: putative synaptobrevin
MAQQSLIYSFVARGTVILVEFTDFKGNFTSIAAQCLQKLPSSNNKFTYNCDGHTFNYLVENGFTYCVVAVDSAGRQIPMAFLERVKEDFNKRYGGGKAATAQANSLNKEFGSKLKEHMQYCMDHPDEISKLAKVKAQVSEVKGVMMENIEKVLDRGEKIELLVDKTENLRSQAQDFRTQGTQMRRKMWFQNMKIKLIVLAIIIALILIIILSICGGFNCGK

SEQ ID NO: 26310 - protein, 143 aa, Arabidopsis thaliana
  peptide (1)..(143): Ceres Seq. ID no. 12439639
  misc_feature (49)..(137): Pfam Name: Synaptobrevin Pfam Description: Synaptobrevin
  misc_feature (1)..(143): Homolog of NCBI NO: 15225796 NR Description: putative synaptobrevin
  misc_feature (1)..(141): Homolog of NCBI NO: 15220943 NR Description: synaptobrevin 7B, putative; protein id:
  misc_feature (1)..(143): Homolog of NCBI NO: 600710 NR Description: formerly called HAT24; synaptobrevin-related
  misc_feature (1)..(143): Homolog of NCBI NO: 30685571 NR Description: synaptobrevin -related [Arabidopsis thaliana]
  misc_feature (1)..(85): Homolog of NCBI NO: 25408245 NR Description: probable synaptobrevin [imported] - Arabidopsis
  misc_feature (1)..(141): Homolog of NCBI NO: 29150380 NR Description: synaptobrevin-like protein
  misc_feature (1)..(141): Homolog of NCBI NO: 27805765 NR Description: Putative vesicle-associated membrane protein 726
  misc_feature (1)..(141): Homolog of NCBI NO: 15220315 NR Description: synaptobrevin 7B, putative; protein id:
  misc_feature (1)..(141): Homolog of NCBI NO: 27805753 NR Description: Vesicle-associated membrane protein 725
  misc_feature (1)..(141): Homolog of NCBI NO: 30685375 NR Description: synaptobrevin -related [Arabidopsis thaliana]
MAFLERVKEDFNKRYGGGKAATAQANSLNKEFGSKLKEHMQYCMDHPDEISKLAKVKAQVSEVKGVMMENIEKVLDRGEKIELLVDKTENLRSQAQDFRTQGTQMRRKMWFQNMKIKLIVLAIIIALILIIILSICGGFNCGK

SEQ ID NO: 26311 - DNA, 1219 bp, Arabidopsis thaliana
  misc_feature (1)..(1219): Ceres Seq. ID no. 12422525
  misc_feature: MA Experiment ID: 20000179 Result: Up-regulated in Transcription
  misc_feature: MA Experiment 20000179 PARAMETER Experiment Name: At_Germinating_Seeds_P Parameter: Age (hr) Value: 6 vs. 0
  misc_feature: MA Experiment 20000179 PARAMETER Experiment Name: At_Germinating_Seeds_P Parameter: Tissue Value: Germinating Seeds
  misc_feature: MA Experiment ID: 20000180 Result: Up-regulated in Transcription
  misc_feature: MA Experiment 20000180 PARAMETER Experiment Name: At_Germinating_Seeds_P Parameter: Age (hr) Value: 24 vs. 0
  misc_feature: MA Experiment 20000180 PARAMETER Experiment Name: At_Germinating_Seeds_P Parameter: Tissue Value: Germinating Seeds
  misc_feature: MA Experiment ID: 20000227 Result: Up-regulated in Transcription
  misc_feature: MA Experiment 20000227 PARAMETER Experiment Name: At_Root-Tips-vs-Tops_P Parameter: Tissue Value: Root Tips vs. Root Tops
  misc_feature: MA Experiment ID: 20000794 Result: Down-regulated in Transcription
  misc_feature: MA Experiment 20000794 PARAMETER Experiment Name: At_Petals_P Parameter: Age (day) Value: 23-25 days
  misc_feature: MA Experiment 20000794 PARAMETER Experiment Name: At_Petals_P Parameter: Plant Line Value: WS
  misc_feature: MA Experiment 20000794 PARAMETER Experiment Name: At_Petals_P Parameter: Tissue Value: Petals vs. Whole plant
  misc_feature: MA Experiment ID: 20001558 Result: Down-regulated in Transcription
  misc_feature: MA Experiment 20001558 PARAMETER Experiment Name: At_Drought_Soil_Dry_P Parameter: Age (day) Value: 27
  misc_feature: MA Experiment 20001558 PARAMETER Experiment Name: At_Drought_Soil_Dry_P Parameter: Organism Value: A. thaliana
  misc_feature: MA Experiment 20001558 PARAMETER Experiment Name: At_Drought_Soil_Dry_P Parameter: Plant Line Value: WS
  misc_feature: MA Experiment 20001558 PARAMETER Experiment Name: At_Drought_Soil_Dry_P Parameter: Post Timepoint (hr) Value: 6
  misc_feature: MA Experiment 20001558 PARAMETER Experiment Name: At_Drought_Soil_Dry_P Parameter: Post-Treatment Value: Re-Water vs. No Drought
  misc_feature: MA Experiment 20001558 PARAMETER Experiment Name: At_Drought_Soil_Dry_P Parameter: Timepoint (day) Value: 13
  misc_feature: MA Experiment 20001558 PARAMETER Experiment Name: At_Drought_Soil_Dry_P Parameter: Treatment Value: Drought vs. No Drought
aatctataatcattttgtgactcttggagcactctcttctctttgtctctgtgactcacattcatccaatccaggaggcatgtcgacatctgaggataaaccggaaatcatcagtagagtagttcatcaggagggtgacgtggaaatcgtcgatagaagtcagaaggataaggacgaggaaaaagaagaagggaaaggtggattcctcgataaggtgaaagatttcattcatgacattggtgagaaactcgagggaaccattggctttgggaagccaactgctgatgtctctgcgattcatatccctaagatcaatcttgagagggcagatattgttgtggatgtgcttgtcaagaacccgaatccagttcctatccctctcatcgatgtcaactacctggtcgagagcgatgggaggaaactggtttctggtttgatcccggatgctggaacactcaaggctcatggaggaagaactgtgaagataccattgacgttgatctatgatgacatcaagagcacttacaacgatatcaaccccgggatgatcataccttacagaatcaaggttgatctgattgtggatgtgccagtattgggaagactgacattgccgctggagaaatgtggagagatcccaattccaaagaaacctgatgttgatatcgagaagattaagttccagaagttctctttggaggaaaccgtggcgattctccatgtgaggcttcagaacatgaatgatttcgacttggggctcaatgacttggactgtgaagtttggctgtgtgatgtaagcattgggaaagcagagatcgcggactcgatcaagcttgacaaaaacggaagcggattgattaatgtgccgatgacattccgaccaaaggactttggttctgcgctttgggatatgattcgtggtaaaggaacagggtacacaatcaaaggtaatattgatgttgatacaccatttggagctatgaagcttcctattatcaaggaaggtggagagacccgtctgaagaaggaagatgatgatgacgacgatgagtaataaggaaacaaagtgctgcagagacagaatggtcatagttactaaatctccgatcttgaaatgtctatttaaaattaaaaaaaaaaagaaagacttgttttgtgtgctttttgataactgatggatcagacttttgaatagagccgtctttttattggacttctt

SEQ ID NO: 26312 - protein, 350 aa, Arabidopsis thaliana
  peptide (1)..(350): Ceres Seq. ID no. 12422526
  misc_feature (66)..(221): Pfam Name: Late embryogenesis abundant protein Pfam Description: Late embryogenesis abundant protein
  misc_feature (68)..(220): Homolog of NCBI NO: 7489028 NR Description: late embryogenesis (Lea)-like protein ER5,
  misc_feature (95)..(350): Homolog of NCBI NO: 3264769 NR Description: late embryogenesis-like protein [Prunus armeniaca]
  misc_feature (52)..(350): Homolog of NCBI NO: 34394536 NR Description: late embryogenesis abundant proteins-like
  misc_feature (27)..(350): Homolog of NCBI NO: 21592483 NR Description: similar to late embryogenesis abundant proteins
  misc_feature (27)..(350): Homolog of NCBI NO: 15224810 NR Description: similar to late embryogenesis abundant proteins
IYNHFVTLGALSSLCLCDSHSSNPGGMSTSEDKPEIISRVVHQEGDVEIVDRSQKDKDEEKEEGKGGFLDKVKDFIHDIGEKLEGTIGFGKPTADVSAIHIPKINLERADIVVDVLVKNPNPVPIPLIDVNYLVESDGRKLVSGLIPDAGTLKAHGGRTVKIPLTLIYDDIKSTYNDINPGMIIPYRIKVDLIVDVPVLGRLTLPLEKCGEIPIPKKPDVDIEKIKFQKFSLEETVAILHVRLQNMNDFDLGLNDLDCEVWLCDVSIGKAEIADSIKLDKNGSGLINVPMTFRPKDFGSALWDMIRGKGTGYTIKGNIDVDTPFGAMKLPIIKEGGETRLKKEDDDDDDE

SEQ ID NO: 26313 - protein, 324 aa, Arabidopsis thaliana
  peptide (1)..(324): Ceres Seq. ID no. 12422527
  misc_feature (40)..(195): Pfam Name: Late embryogenesis abundant protein Pfam Description: Late embryogenesis abundant protein
  misc_feature (42)..(194): Homolog of NCBI NO: 7489028 NR Description: late embryogenesis (Lea)-like protein ER5,
  misc_feature (69)..(324): Homolog of NCBI NO: 3264769 NR Description: late embryogenesis-like protein [Prunus armeniaca]
  misc_feature (26)..(324): Homolog of NCBI NO: 34394536 NR Description: late embryogenesis abundant proteins-like
  misc_feature (1)..(324): Homolog of NCBI NO: 21592483 NR Description: similar to late embryogenesis abundant proteins
  misc_feature (1)..(324): Homolog of NCBI NO: 15224810 NR Description: similar to late embryogenesis abundant proteins
MSTSEDKPEIISRVVHQEGDVEIVDRSQKDKDEEKEEGKGGFLDKVKDFIHDIGEKLEGTIGFGKPTADVSAIHIPKINLERADIVVDVLVKNPNPVPIPLIDVNYLVESDGRKLVSGLIPDAGTLKAHGGRTVKIPLTLIYDDIKSTYNDINPGMIIPYRIKVDLIVDVPVLGRLTLPLEKCGEIPIPKKPDVDIEKIKFQKFSLEETVAILHVRLQNMNDFDLGLNDLDCEVWLCDVSIGKAEIADSIKLDKNGSGLINVPMTFRPKDFGSALWDMIRGKGTGYTIKGNIDVDTPFGAMKLPIIKEGGETRLKKEDDDDDDE

SEQ ID NO: 26314 - DNA, 1066 bp, Arabidopsis thaliana
  misc_feature (1)..(1066): Ceres Seq. ID no. 13500015
  misc_feature: MA Experiment ID: 108434 Result: Up-regulated in Transcription
  misc_feature: MA Experiment 108434 PARAMETER Experiment Name: At_Root_Tips_cDNA_P Parameter: Tissue Value: Root Tips
  misc_feature: MA Experiment ID: 108577 Result: Down-regulated in Transcription
  misc_feature: MA Experiment 108577 PARAMETER Experiment Name: At_42deg_Heat_cDNA_P Parameter: Temperature (deg C) Value: 42 vs. 22
  misc_feature: MA Experiment 108577 PARAMETER Experiment Name: At_42deg_Heat_cDNA_P Parameter: Timepoint (hr) Value: 6
  misc_feature: MA Experiment 108577 PARAMETER Experiment Name: At_42deg_Heat_cDNA_P Parameter: Tissue Value: Aerial
  misc_feature: MA Experiment ID: 20000111 Result: Down-regulated in Transcription
  misc_feature: MA Experiment 20000111 PARAMETER Experiment Name: At_42deg_Heat_cDNA_P Parameter: Temperature (deg C) Value: 42 vs. 22
  misc_feature: MA Experiment 20000111 PARAMETER Experiment Name: At_42deg_Heat_cDNA_P Parameter: Timepoint (hr) Value: 6
  misc_feature: MA Experiment 20000111 PARAMETER Experiment Name: At_42deg_Heat_cDNA_P Parameter: Tissue Value: Aerial
  misc_feature: MA Experiment ID: 20000437 Result: Up-regulated in Transcription
  misc_feature: MA Experiment 20000437 PARAMETER Experiment Name: At_Drought_P Parameter: Age (day) Value: 8
  misc_feature: MA Experiment 20000437 PARAMETER Experiment Name: At_Drought_P Parameter: Organism Value: A. thaliana
  misc_feature: MA Experiment 20000437 PARAMETER Experiment Name: At_Drought_P Parameter: Plant Line Value: WS
  misc_feature: MA Experiment 20000437 PARAMETER Experiment Name: At_Drought_P Parameter: Timepoint (hr) Value: 24
  misc_feature: MA Experiment 20000437 PARAMETER Experiment Name: At_Drought_P Parameter: Tissue Value: Whole Plant
  misc_feature: MA Experiment 20000437 PARAMETER Experiment Name: At_Drought_P Parameter: Treatment Value: Drought vs. No Drought
ggtattcattgtcggggagtttctcctctctgcaccagatttcaaatccttgtttacaatctcttctctggctatcttagagggatttttgattgagattttaaaattttctgagttggattagttggttggtaaagagatggatccggatacggtgaagtcgaccctctcgaatctggcattcgggaatgtattggcggcagctgctagagattataaaaaggaagttcttgcaaatgaaaaggcacaaggatcaagacctgtcaacgaggaagttgatcttgacgaattgatggatgatccagagctagaaaagttgcacgcagataggattgcagcactcaggagagaagtggaaaagagagaagcattcaaaagacaaggacatggtgaataccgagaagttagcgaaggcgacttcttgggagaagtcacaaggagtgaaaaagttatatgtcacttctaccacaaggagttctatcgctgcaagataatggacaagcatttgaagacccttgctcctagacatgtggacacaaagttcattaagatggacgctgagaacgctcccttcttcgtcaccaagcttgcaatcaagactttgccgtgtgttatcctttttagcaagggaatcgcgatggataggcttgtcgggtttcaagatctaggtgccaaggacgatttctccacgacgaagctggagaatcttctggtcaagaaaggaatgcttagtgaaaagagaaaagaggaagatgaggaagattacgagtatcaagaaagcatacgtcggtccgttaggtcttcagcgaatgtcgactctgattcagattgatctcgaagcttttctcatagtagacctccgagcctttttgtattttgttttcaccgctgctctgtttgaattgtttggtctatgaatcttatgcttctataagtctttatagtgggaaatttcgttccacaatgtttttgtttatttgaaaactgcaaattatggtgtctaaccatataaacaaaagtcattaggtgaatgacaagatttgaaaagaaatgataagagttgagc

SEQ ID NO: 26315 - protein, 230 aa, Arabidopsis thaliana
  peptide (1)..(230): Ceres Seq. ID no. 13500016
  misc_feature (27)..(230): Homolog of NCBI NO: 21594045 NR Description: putative ATP binding protein [Arabidopsis
  misc_feature (27)..(230): Homolog of NCBI NO: 18404574 NR Description: expressed protein [Arabidopsis thaliana]
  misc_feature (25)..(230): Homolog of NCBI NO: 25282435 NR Description: ES cell-related protein; ATP binding protein
  misc_feature (19)..(230): Homolog of NCBI NO: 28277604 NR Description: Similar to ATP binding protein associated with
  misc_feature (20)..(230): Homolog of NCBI NO: 18104959 NR Description: ATP binding protein associated with cell
  misc_feature (25)..(230): Homolog of NCBI NO: 25286717 NR Description: ATP binding protein associated with cell
  misc_feature (19)..(230): Homolog of NCBI NO: 7485705 NR Description: hypothetical protein F18B3.240 - Arabidopsis
  misc_feature (1)..(230): Homolog of NCBI NO: 30693386 NR Description: expressed protein [Arabidopsis thaliana]
  misc_feature (1)..(230): Homolog of NCBI NO: 10177522 NR Description: contains similarity to ATP binding protein
  misc_feature (1)..(230): Homolog of NCBI NO: 18425069 NR Description: expressed protein [Arabidopsis thaliana]
MDPDTVKSTLSNLAFGNVLAAAARDYKKEVLANEKAQGSRPVNEEVDLDELMDDPELEKLHADRIAALRREVEKREAFKRQGHGEYREVSEGDFLGEVTRSEKVICHFYHKEFYRCKIMDKHLKTLAPRHVDTKFIKMDAENAPFFVTKLAIKTLPCVILFSKGIAMDRLVGFQDLGAKDDFSTTKLENLLVKKGMLSEKRKEEDEEDYEYQESIRRSVRSSANVDSDSD

SEQ ID NO: 26316 - protein, 179 aa, Arabidopsis thaliana
  peptide (1)..(179): Ceres Seq. ID no. 13500017
  misc_feature (1)..(179): Homolog of NCBI NO: 21594045 NR Description: putative ATP binding protein [Arabidopsis
  misc_feature (1)..(179): Homolog of NCBI NO: 18404574 NR Description: expressed protein [Arabidopsis thaliana]
  misc_feature (1)..(179): Homolog of NCBI NO: 25282435 NR Description: ES cell-related protein; ATP binding protein
  misc_feature (1)..(179): Homolog of NCBI NO: 28277604 NR Description: Similar to ATP binding protein associated with
  misc_feature (1)..(179): Homolog of NCBI NO: 18104959 NR Description: ATP binding protein associated with cell
  misc_feature (1)..(179): Homolog of NCBI NO: 25286717 NR Description: ATP binding protein associated with cell
  misc_feature (1)..(179): Homolog of NCBI NO: 7485705 NR Description: hypothetical protein F18B3.240 - Arabidopsis
  misc_feature (1)..(179): Homolog of NCBI NO: 30693386 NR Description: expressed protein [Arabidopsis thaliana]
  misc_feature (1)..(179): Homolog of NCBI NO: 10177522 NR Description: contains similarity to ATP binding protein
  misc_feature (1)..(179): Homolog of NCBI NO: 18425069 NR Description: expressed protein [Arabidopsis thaliana]
MDDPELEKLHADRIAALRREVEKREAFKRQGHGEYREVSEGDFLGEVTRSEKVICHFYHKEFYRCKIMDKHLKTLAPRHVDTKFIKMDAENAPFFVTKLAIKTLPCVILFSKGIAMDRLVGFQDLGAKDDFSTTKLENLLVKKGMLSEKRKEEDEEDYEYQESIRRSVRSSANVDSDSD

SEQ ID NO: 26317 - DNA, 1194 bp, Arabidopsis thaliana
  misc_feature (1)..(1194): Ceres Seq. ID no. 12335479
  misc_feature: MA Experiment ID: 20000111 Result: Down-regulated in Transcription
  misc_feature: MA Experiment 20000111 PARAMETER Experiment Name: At_42deg_Heat_cDNA_P Parameter: Temperature (deg C) Value: 42 vs. 22
  misc_feature: MA Experiment 20000111 PARAMETER Experiment Name: At_42deg_Heat_cDNA_P Parameter: Timepoint (hr) Value: 6
  misc_feature: MA Experiment 20000111 PARAMETER Experiment Name: At_42deg_Heat_cDNA_P Parameter: Tissue Value: Aerial
  misc_feature: MA Experiment ID: 20000173 Result: Down-regulated in Transcription
  misc_feature: MA Experiment 20000173 PARAMETER Experiment Name: At_42deg_Heat_P Parameter: Age (day) Value: 14
  misc_feature: MA Experiment 20000173 PARAMETER Experiment Name: At_42deg_Heat_P Parameter: Organism Value: A. thaliana
  misc_feature: MA Experiment 20000173 PARAMETER Experiment Name: At_42deg_Heat_P Parameter: Plant Line Value: WS
  misc_feature: MA Experiment 20000173 PARAMETER Experiment Name: At_42deg_Heat_P Parameter: Temperature (deg C) Value: 42 vs. 22
  misc_feature: MA Experiment 20000173 PARAMETER Experiment Name: At_42deg_Heat_P Parameter: Timepoint (hr) Value: 6
  misc_feature: MA Experiment 20000173 PARAMETER Experiment Name: At_42deg_Heat_P Parameter: Tissue Value: Aerial
  misc_feature: MA Experiment ID: 20000179 Result: Up-regulated in Transcription
  misc_feature: MA Experiment 20000179 PARAMETER Experiment Name: At_Germinating_Seeds_P Parameter: Age (hr) Value: 6 vs. 0
  misc_feature: MA Experiment 20000179 PARAMETER Experiment Name: At_Germinating_Seeds_P Parameter: Tissue Value: Germinating Seeds
  misc_feature: MA Experiment ID: 20000180 Result: Up-regulated in Transcription
  misc_feature: MA Experiment 20000180 PARAMETER Experiment Name: At_Germinating_Seeds_P Parameter: Age (hr) Value: 24 vs. 0
  misc_feature: MA Experiment 20000180 PARAMETER Experiment Name: At_Germinating_Seeds_P Parameter: Tissue Value: Germinating Seeds
  misc_feature: MA Experiment ID: 20000184 Result: Down-regulated in Transcription
  misc_feature: MA Experiment 20000184 PARAMETER Experiment Name: At_Shoots__P Parameter: Age (day) Value: 7
  misc_feature: MA Experiment 20000184 PARAMETER Experiment Name: At_Shoots__P Parameter: Tissue Value: Shoots vs. Whole Plant
  misc_feature: MA Experiment ID: 20001905 Result: Up-regulated in Transcription
  misc_feature: MA Experiment 20001905 PARAMETER Experiment Name: At_Drought_Reproduction_P Parameter: Age (day) Value: 40
  misc_feature: MA Experiment 20001905 PARAMETER Experiment Name: At_Drought_Reproduction_P Parameter: Organism Value: A. thaliana
  misc_feature: MA Experiment 20001905 PARAMETER Experiment Name: At_Drought_Reproduction_P Parameter: Plant Line Value: WS
  misc_feature: MA Experiment 20001905 PARAMETER Experiment Name: At_Drought_Reproduction_P Parameter: Timepoint (day) Value: 10
  misc_feature: MA Experiment 20001905 PARAMETER Experiment Name: At_Drought_Reproduction_P Parameter: Tissue Value: Rosettes
  misc_feature: MA Experiment 20001905 PARAMETER Experiment Name: At_Drought_Reproduction_P Parameter: Treatment Value: Drought vs. No Drought
atccaaagaattaaaaaccataataaaaaaaaaaaagataaaaagacgaattccagaaaaaaaaagacgcaaaatcgtcgtcgtcgtcttcgtctttgcatttcgtcggaatcttttgattcttgaatcggaatatctctgtttttgttttatccggactcaagatcaattcggattcttggaatttatttgattttttgttgttgttgttgaaaaagtggattctttggtttcgatttgtaataatcttcgtagaaaaaatggattctgattcttggagtgatcgtctcgcatcggcttcaagaagatatcagctcgatttcttgtctcgatctgacaatttcttggggtttgaggagatagaaggagaagatgacttcagggaggagtatgcttgcccgttctgttcagactattttgatatcgtctctctatgctgtcacattgatgaagatcatcctatggatgcaaaaaatggggtatgtcccgtttgtgcggtgaaagtgagctctgatatgattgctcatataaccctacaacatgcaaatatgttcaaggtgacgcggaaaaggaaatcaagaagaggcggggctcaatccatgctatcgatcttgaagagagagtttcctgatggaaattttcagagcctatttgaaggaacatcacgtgctgtatcctcttcttctgccagtatagctgctgatcctttactgtcttcattcatttcaccaatggctgatgactttttcatttctgagtcaagtctatgtgcagacacaagttctgccaagaaaacattgaatcagagtttgcctgaaaggaatgttgagaagcagtctctttcagcagaggatcacagagaaaagttgaaacagagcgagttcgttcaagggatattgagctctatgattcttgaagacggcttataaaggagaaacatattccggtaacttgtctacggttagatgattcagcgattggaaaatgtaacggctttgttgtgttaaacgcaacaattgatttgggaaagggtttgggaataagcagaataatgtaaaagagagacatgataatgagtattatttttaacttatgaactacatatttgctttaatgaacactcgaattgtctgtacaccgtaggtcttacaaaaaaaacccaaaaaaaaggtatgtatttgatcatatatttgc

SEQ ID NO: 26318 - protein, 222 aa, Arabidopsis thaliana
  peptide (1)..(222): Ceres Seq. ID no. 12335480
  misc_feature (26)..(217): Pfam Name: Drought induced 19 protein (Di19) Pfam Description: Drought induced 19 protein (Di19)
  misc_feature (1)..(220): Homolog of NCBI NO: 13937216 NR Description: AT5g49230/K21P3_11 [Arabidopsis thaliana]
  misc_feature (14)..(220): Homolog of NCBI NO: 1076316 NR Description: drought-induced protein Di19 - Arabidopsis
  misc_feature (14)..(220): Homolog of NCBI NO: 15028023 NR Description: unknown protein [Arabidopsis thaliana]
  misc_feature (11)..(220): Homolog of NCBI NO: 18377875 NR Description: AT3g06760/F3E22_10 [Arabidopsis thaliana]
  misc_feature (1)..(220): Homolog of NCBI NO: 25992529 NR Description: fiber protein Fb2 [Gossypium barbadense]
  misc_feature (1)..(86): Homolog of NCBI NO: 15230036 NR Description: unknown protein; protein id: At3g05700.1
  misc_feature (129)..(222): Homolog of NCBI NO: 15230036 NR Description: unknown protein; protein id: At3g05700.1
  misc_feature (1)..(222): Homolog of NCBI NO: 28393233 NR Description: unknown protein [Arabidopsis thaliana]
  misc_feature (26)..(222): Homolog of NCBI NO: 7485240 NR Description: hypothetical protein A_IG002P16.10 - Arabidopsis
  misc_feature (1)..(222): Homolog of NCBI NO: 15240426 NR Description: drought-induced protein - like; protein id:
MDSDSWSDRLASASRRYQLDFLSRSDNFLGFEEIEGEDDFREEYACPFCSDYFDIVSLCCHIDEDHPMDAKNGVCPVCAVKVSSDMIAHITLQHANMFKVTRKRKSRRGGAQSMLSILKREFPDGNFQSLFEGTSRAVSSSSASIAADPLLSSFISPMADDFFISESSLCADTSSAKKTLNQSLPERNVEKQSLSAEDHREKLKQSEFVQGILSSMILEDGL

SEQ ID NO: 26319 - protein, 155 aa, Arabidopsis thaliana
  peptide (1)..(155): Ceres Seq. ID no. 12335481
  misc_feature (1)..(150): Pfam Name: Drought induced 19 protein (Di19) Pfam Description: Drought induced 19 protein (Di19)
  misc_feature (1)..(153): Homolog of NCBI NO: 13937216 NR Description: AT5g49230/K21P3_11 [Arabidopsis thaliana]
  misc_feature (1)..(153): Homolog of NCBI NO: 1076316 NR Description: drought-induced protein Di19 - Arabidopsis
  misc_feature (1)..(153): Homolog of NCBI NO: 15028023 NR Description: unknown protein [Arabidopsis thaliana]
  misc_feature (1)..(153): Homolog of NCBI NO: 18377875 NR Description: AT3g06760/F3E22_10 [Arabidopsis thaliana]
  misc_feature (1)..(153): Homolog of NCBI NO: 25992529 NR Description: fiber protein Fb2 [Gossypium barbadense]
  misc_feature (1)..(19): Homolog of NCBI NO: 15230036 NR Description: unknown protein; protein id: At3g05700.1
  misc_feature (62)..(155): Homolog of NCBI NO: 15230036 NR Description: unknown protein; protein id: At3g05700.1
  misc_feature (1)..(155): Homolog of NCBI NO: 28393233 NR Description: unknown protein [Arabidopsis thaliana]
  misc_feature (1)..(155): Homolog of NCBI NO: 7485240 NR Description: hypothetical protein A_IG002P16.10 - Arabidopsis
  misc_feature (1)..(155): Homolog of NCBI NO: 15240426 NR Description: drought-induced protein - like; protein id:
MDAKNGVCPVCAVKVSSDMIAHITLQHANMFKVTRKRKSRRGGAQSMLSILKREFPDGNFQSLFEGTSRAVSSSSASIAADPLLSSFISPMADDFFISESSLCADTSSAKKTLNQSLPERNVEKQSLSAEDHREKLKQSEFVQGILSSMILEDGL

SEQ ID NO: 26320 - protein, 137 aa, Arabidopsis thaliana
  peptide (1)..(137): Ceres Seq. ID no. 12335482
  misc_feature (1)..(132): Pfam Name: Drought induced 19 protein (Di19) Pfam Description: Drought induced 19 protein (Di19)
  misc_feature (1)..(135): Homolog of NCBI NO: 15239827 NR Description: drought-induced protein Di19-like protein
  misc_feature (1)..(135): Homolog of NCBI NO: 13937216 NR Description: AT5g49230/K21P3_11 [Arabidopsis thaliana]
  misc_feature (1)..(135): Homolog of NCBI NO: 1076316 NR Description: drought-induced protein Di19 - Arabidopsis
  misc_feature (1)..(135): Homolog of NCBI NO: 15028023 NR Description: unknown protein [Arabidopsis thaliana]
  misc_feature (1)..(135): Homolog of NCBI NO: 18377875 NR Description: AT3g06760/F3E22_10 [Arabidopsis thaliana]
  misc_feature (1)..(135): Homolog of NCBI NO: 25992529 NR Description: fiber protein Fb2 [Gossypium barbadense]
  misc_feature (44)..(137): Homolog of NCBI NO: 15230036 NR Description: unknown protein; protein id: At3g05700.1
  misc_feature (1)..(137): Homolog of NCBI NO: 28393233 NR Description: unknown protein [Arabidopsis thaliana]
  misc_feature (1)..(137): Homolog of NCBI NO: 7485240 NR Description: hypothetical protein A_IG002P16.10 - Arabidopsis
  misc_feature (1)..(137): Homolog of NCBI NO: 15240426 NR Description: drought-induced protein - like; protein id:
MIAHITLQHANMFKVTRKRKSRRGGAQSMLSILKREFPDGNFQSLFEGTSRAVSSSSASIAADPLLSSFISPMADDFFISESSLCADTSSAKKTLNQSLPERNVEKQSLSAEDHREKLKQSEFVQGILSSMILEDGL

SEQ ID NO: 26321 - DNA, 1001 bp, Arabidopsis thaliana
  misc_feature (1)..(1001): Ceres Seq. ID no. 13489962
  misc_feature: MA Experiment ID: 108461 Result: Up-regulated in Transcription
  misc_feature: MA Experiment 108461 PARAMETER Experiment Name: At_Germinating_Seeds_cDNA_P Parameter: Age (day) Value: 1 vs. 0
  misc_feature: MA Experiment 108461 PARAMETER Experiment Name: At_Germinating_Seeds_cDNA_P Parameter: Tissue Value: Germinating Seeds
  misc_feature: MA Experiment ID: 108462 Result: Up-regulated in Transcription
  misc_feature: MA Experiment 108462 PARAMETER Experiment Name: At_Germinating_Seeds_cDNA_P Parameter: Age (day) Value: 2 vs. 0
  misc_feature: MA Experiment 108462 PARAMETER Experiment Name: At_Germinating_Seeds_cDNA_P Parameter: Tissue Value: Germinating Seeds
  misc_feature: MA Experiment ID: 108463 Result: Up-regulated in Transcription
  misc_feature: MA Experiment 108463 PARAMETER Experiment Name: At_Germinating_Seeds_cDNA_P Parameter: Age (day) Value: 3 vs. 0
  misc_feature: MA Experiment 108463 PARAMETER Experiment Name: At_Germinating_Seeds_cDNA_P Parameter: Tissue Value: Germinating Seeds
  misc_feature: MA Experiment ID: 108595 Result: Up-regulated in Transcription
  misc_feature: MA Experiment 108595 PARAMETER Experiment Name: At_Ler-pi_Ovule_cDNA_P Parameter: Plant Line Value: null
  misc_feature: MA Experiment ID: 20000180 Result: Up-regulated in Transcription
  misc_feature: MA Experiment 20000180 PARAMETER Experiment Name: At_Germinating_Seeds_P Parameter: Age (hr) Value: 24 vs. 0
  misc_feature: MA Experiment 20000180 PARAMETER Experiment Name: At_Germinating_Seeds_P Parameter: Tissue Value: Germinating Seeds
  misc_feature: MA Experiment ID: 20000495 Result: Down-regulated in Transcription
  misc_feature: MA Experiment 20000495 PARAMETER Experiment Name: At_Guard_Cells_P Parameter: Harvest Date Value: 8/2/2002
  misc_feature: MA Experiment 20000495 PARAMETER Experiment Name: At_Guard_Cells_P Parameter: Organism Value: A. thaliana
  misc_feature: MA Experiment 20000495 PARAMETER Experiment Name: At_Guard_Cells_P Parameter: Tissue Value: Guard Cells vs. Leaves
  misc_feature: MA Experiment ID: 20000573 Result: Down-regulated in Transcription
  misc_feature: MA Experiment 20000573 PARAMETER Experiment Name: At_100uM_ABA_Mutants__P Parameter: Organism Value: A. thaliana
  misc_feature: MA Experiment 20000573 PARAMETER Experiment Name: At_100uM_ABA_Mutants__P Parameter: Plant Line Value: CS22 vs. Ler wt
  misc_feature: MA Experiment 20000573 PARAMETER Experiment Name: At_100uM_ABA_Mutants__P Parameter: Timepoint (hr) Value: N/A
  misc_feature: MA Experiment 20000573 PARAMETER Experiment Name: At_100uM_ABA_Mutants__P Parameter: Tissue Value: Whole Plant
  misc_feature: MA Experiment 20000573 PARAMETER Experiment Name: At_100uM_ABA_Mutants__P Parameter: Treatment Value: None
  misc_feature: MA Experiment ID: 20001248 Result: Down-regulated in Transcription
  misc_feature: MA Experiment 20001248 PARAMETER Experiment Name: At_Far-red-induction_P Parameter: Age (day) Value: 7
  misc_feature: MA Experiment 20001248 PARAMETER Experiment Name: At_Far-red-induction_P Parameter: Light Value: Far-red vs. White
  misc_feature: MA Experiment 20001248 PARAMETER Experiment Name: At_Far-red-induction_P Parameter: Organism Value: A. thaliana
  misc_feature: MA Experiment 20001248 PARAMETER Experiment Name: At_Far-red-induction_P Parameter: Plant Line Value: Columbia
  misc_feature: MA Experiment 20001248 PARAMETER Experiment Name: At_Far-red-induction_P Parameter: Timepoint (hr) Value: 4
  misc_feature: MA Experiment 20001248 PARAMETER Experiment Name: At_Far-red-induction_P Parameter: Tissue Value: Whole Plant
  misc_feature: MA Experiment ID: 20001905 Result: Up-regulated in Transcription
  misc_feature: MA Experiment 20001905 PARAMETER Experiment Name: At_Drought_Reproduction_P Parameter: Age (day) Value: 40
  misc_feature: MA Experiment 20001905 PARAMETER Experiment Name: At_Drought_Reproduction_P Parameter: Organism Value: A. thaliana
  misc_feature: MA Experiment 20001905 PARAMETER Experiment Name: At_Drought_Reproduction_P Parameter: Plant Line Value: WS
  misc_feature: MA Experiment 20001905 PARAMETER Experiment Name: At_Drought_Reproduction_P Parameter: Timepoint (day) Value: 10
  misc_feature: MA Experiment 20001905 PARAMETER Experiment Name: At_Drought_Reproduction_P Parameter: Tissue Value: Rosettes
  misc_feature: MA Experiment 20001905 PARAMETER Experiment Name: At_Drought_Reproduction_P Parameter: Treatment Value: Drought vs. No Drought
aaggaagagaagagtgtccatatcatagattaaaaatcattcgttaatcaaaccacaaaatctaacttccacacacaaaacacacatacacaagaaaataaaaataaaaatggaattagttgaagagaccattccaaaagaagggaaaaagatgggagaaagaattgtggtcgacaaagcttatctttaccaagaagacaaaccactcaccgtctgcaagacttctctcttctacaccggcgatggcttcgccgcctatgactgccgtggtgatatcatcttcagggttgattcttatggacctgacacaagagataacgatgagattgtcctcatggacgcgaccgggaagtgtctccttaccgttaaacgaaagagaccaactctacaccaaagatgggaaggttttctcggcgagagatcggaaggtcagaaaccgatattcagcgtccgtagatcgtcgataatcggacggtgtacgatggaagtagaagtttacgacggaacaggagaagagtacattatcgatggagacttctcgcaacgaagctgtctcatatacgacacgaagaaatgtactgtggctgagatcaaacgcaaagtagacgcgtcaacgaacgtgatgcttggtcgagatgtgttcactctagagattaaaccgggttttgatggcgctttcgcgatgggtttggtcgttgtgcttgaccagatcaacggtgatgatccagttgagattggtgatgaacaggtacacccttttgtagaggattagtgtcggtctctctctcacctctctcagcggtcttcacgttaacatatcgaatctaatctttagtttttcaatctttggatttggaccatatgggattatggagatctgtttgtatcattctgtgttaagtcatttaagttgctacgttacataatatttatagactatagtctgtctcgggaaattcgttgactatacgtttgatgttacaaaattatttgtgcgttcc

SEQ ID NO: 26322 - protein, 220 aa, Arabidopsis thaliana
  peptide (1)..(220): Ceres Seq. ID no. 13489963
  misc_feature (18)..(197): Pfam Name: Protein of unknown function (DUF567) Pfam Description: Protein of unknown function (DUF567)
  misc_feature (109)..(201): Homolog of NCBI NO: 27542767 NR Description: hypothetical protein-like protein [Sorghum
  misc_feature (33)..(201): Homolog of NCBI NO: 15224921 NR Description: expressed protein [Arabidopsis thaliana]
  misc_feature (33)..(201): Homolog of NCBI NO: 27542765 NR Description: hypothetical protein-like protein [Sorghum
  misc_feature (28)..(203): Homolog of NCBI NO: 34909256 NR Description: B1148D12.16 [Oryza sativa (japonica
  misc_feature (33)..(201): Homolog of NCBI NO: 27542769 NR Description: hypothetical protein-like protein [Sorghum
  misc_feature (139)..(205): Homolog of NCBI NO: 34909922 NR Description: P0665A11.21 [Oryza sativa (japonica
  misc_feature (20)..(121): Homolog of NCBI NO: 34909922 NR Description: P0665A11.21 [Oryza sativa (japonica
  misc_feature (19)..(220): Homolog of NCBI NO: 15220064 NR Description: expressed protein [Arabidopsis thaliana]
  misc_feature (15)..(220): Homolog of NCBI NO: 21554362 NR Description: unknown [Arabidopsis thaliana]
  misc_feature (1)..(220): Homolog of NCBI NO: 18400907 NR Description: expressed protein [Arabidopsis thaliana]
MELVEETIPKEGKKMGERIVVDKAYLYQEDKPLTVCKTSLFYTGDGFAAYDCRGDIIFRVDSYGPDTRDNDEIVLMDATGKCLLTVKRKRPTLHQRWEGFLGERSEGQKPIFSVRRSSIIGRCTMEVEVYDGTGEEYIIDGDFSQRSCLIYDTKKCTVAEIKRKVDASTNVMLGRDVFTLEIKPGFDGAFAMGLVVVLDQINGDDPVEIGDEQVHPFVED

SEQ ID NO: 26323 - protein, 206 aa, Arabidopsis thaliana
  peptide (1)..(206): Ceres Seq. ID no. 13489964
  misc_feature (4)..(183): Pfam Name: Protein of unknown function (DUF567) Pfam Description: Protein of unknown function (DUF567)
  misc_feature (125)..(191): Homolog of NCBI NO: 34909922 NR Description: P0665A11.21 [Oryza sativa (japonica
  misc_feature (6)..(107): Homolog of NCBI NO: 34909922 NR Description: P0665A11.21 [Oryza sativa (japonica
  misc_feature (5)..(206): Homolog of NCBI NO: 15220064 NR Description: expressed protein [Arabidopsis thaliana]
  misc_feature (19)..(187): Homolog of NCBI NO: 27542769 NR Description: hypothetical protein-like protein [Sorghum
  misc_feature (19)..(187): Homolog of NCBI NO: 15224921 NR Description: expressed protein [Arabidopsis thaliana]
  misc_feature (19)..(187): Homolog of NCBI NO: 27542765 NR Description: hypothetical protein-like protein [Sorghum
  misc_feature (95)..(187): Homolog of NCBI NO: 27542767 NR Description: hypothetical protein-like protein [Sorghum
  misc_feature (14)..(189): Homolog of NCBI NO: 34909256 NR Description: B1148D12.16 [Oryza sativa (japonica
  misc_feature (1)..(206): Homolog of NCBI NO: 21554362 NR Description: unknown [Arabidopsis thaliana]
  misc_feature (1)..(206): Homolog of NCBI NO: 18400907 NR Description: expressed protein [Arabidopsis thaliana]
MGERIVVDKAYLYQEDKPLTVCKTSLFYTGDGFAAYDCRGDIIFRVDSYGPDTRDNDEIVLMDATGKCLLTVKRKRPTLHQRWEGFLGERSEGQKPIFSVRRSSIIGRCTMEVEVYDGTGEEYIIDGDFSQRSCLIYDTKKCTVAEIKRKVDASTNVMLGRDVFTLEIKPGFDGAFAMGLVVVLDQINGDDPVEIGDEQVHPFVED

SEQ ID NO: 26324 - protein, 145 aa, Arabidopsis thaliana
  peptide (1)..(145): Ceres Seq. ID no. 13489965
  misc_feature (1)..(122): Pfam Name: Protein of unknown function (DUF567) Pfam Description: Protein of unknown function (DUF567)
  misc_feature (34)..(126): Homolog of NCBI NO: 27542767 NR Description: hypothetical protein-like protein [Sorghum
  misc_feature (1)..(126): Homolog of NCBI NO: 15224921 NR Description: expressed protein [Arabidopsis thaliana]
  misc_feature (1)..(126): Homolog of NCBI NO: 27542765 NR Description: hypothetical protein-like protein [Sorghum
  misc_feature (1)..(128): Homolog of NCBI NO: 34909256 NR Description: B1148D12.16 [Oryza sativa (japonica
  misc_feature (1)..(126): Homolog of NCBI NO: 27542769 NR Description: hypothetical protein-like protein [Sorghum
  misc_feature (64)..(130): Homolog of NCBI NO: 34909922 NR Description: P0665A11.21 [Oryza sativa (japonica
  misc_feature (1)..(46): Homolog of NCBI NO: 34909922 NR Description: P0665A11.21 [Oryza sativa (japonica
  misc_feature (1)..(145): Homolog of NCBI NO: 15220064 NR Description: expressed protein [Arabidopsis thaliana]
  misc_feature (1)..(145): Homolog of NCBI NO: 21554362 NR Description: unknown [Arabidopsis thaliana]
  misc_feature (1)..(145): Homolog of NCBI NO: 18400907 NR Description: expressed protein [Arabidopsis thaliana]
MDATGKCLLTVKRKRPTLHQRWEGFLGERSEGQKPIFSVRRSSIIGRCTMEVEVYDGTGEEYIIDGDFSQRSCLIYDTKKCTVAEIKRKVDASTNVMLGRDVFTLEIKPGFDGAFAMGLVVVLDQINGDDPVEIGDEQVHPFVED

SEQ ID NO: 26325 - DNA, 1267 bp, Arabidopsis thaliana
  misc_feature (1)..(1267): Ceres Seq. ID no. 12488498
  misc_feature: MA Experiment ID: 20000179 Result: Up-regulated in Transcription
  misc_feature: MA Experiment 20000179 PARAMETER Experiment Name: At_Germinating_Seeds_P Parameter: Age (hr) Value: 6 vs. 0
  misc_feature: MA Experiment 20000179 PARAMETER Experiment Name: At_Germinating_Seeds_P Parameter: Tissue Value: Germinating Seeds
  misc_feature: MA Experiment ID: 20000180 Result: Up-regulated in Transcription
  misc_feature: MA Experiment 20000180 PARAMETER Experiment Name: At_Germinating_Seeds_P Parameter: Age (hr) Value: 24 vs. 0
  misc_feature: MA Experiment 20000180 PARAMETER Experiment Name: At_Germinating_Seeds_P Parameter: Tissue Value: Germinating Seeds
  misc_feature: MA Experiment ID: 20000185 Result: Down-regulated in Transcription
  misc_feature: MA Experiment 20000185 PARAMETER Experiment Name: At_Roots__P Parameter: Age (day) Value: 7 vs. 21
  misc_feature: MA Experiment 20000185 PARAMETER Experiment Name: At_Roots__P Parameter: Organism Value: A. thaliana
  misc_feature: MA Experiment 20000185 PARAMETER Experiment Name: At_Roots__P Parameter: Tissue Value: Roots vs. Whole Plant
  misc_feature: MA Experiment ID: 20000227 Result: Down-regulated in Transcription
  misc_feature: MA Experiment 20000227 PARAMETER Experiment Name: At_Root-Tips-vs-Tops_P Parameter: Tissue Value: Root Tips vs. Root Tops
  misc_feature: MA Experiment ID: 20000264 Result: Down-regulated in Transcription
  misc_feature: MA Experiment 20000264 PARAMETER Experiment Name: At_Open_Flower_P Parameter: Age (day) Value: 21
  misc_feature: MA Experiment 20000264 PARAMETER Experiment Name: At_Open_Flower_P Parameter: Plant Line Value: WS
  misc_feature: MA Experiment 20000264 PARAMETER Experiment Name: At_Open_Flower_P Parameter: Tissue Value: Open Flower vs. Whole Plant
  misc_feature: MA Experiment ID: 20000269 Result: Down-regulated in Transcription
  misc_feature: MA Experiment 20000269 PARAMETER Experiment Name: At_1mM_KNO3_L-vs-H_Roots_P Parameter: Age (day) Value: 7,10,12
  misc_feature: MA Experiment 20000269 PARAMETER Experiment Name: At_1mM_KNO3_L-vs-H_Roots_P Parameter: Organism Value: A. thaliana
  misc_feature: MA Experiment 20000269 PARAMETER Experiment Name: At_1mM_KNO3_L-vs-H_Roots_P Parameter: Plant Line Value: WS
  misc_feature: MA Experiment 20000269 PARAMETER Experiment Name: At_1mM_KNO3_L-vs-H_Roots_P Parameter: Timepoint (day) Value: 7,10,12
  misc_feature: MA Experiment 20000269 PARAMETER Experiment Name: At_1mM_KNO3_L-vs-H_Roots_P Parameter: Tissue Value: Roots
  misc_feature: MA Experiment 20000269 PARAMETER Experiment Name: At_1mM_KNO3_L-vs-H_Roots_P Parameter: Treatment Value: 1mM KNO3 vs. 50mM KNO3
  misc_feature: MA Experiment ID: 20000286 Result: Down-regulated in Transcription
  misc_feature: MA Experiment 20000286 PARAMETER Experiment Name: At_Open_Flower_P Parameter: Age (day) Value: 21
  misc_feature: MA Experiment 20000286 PARAMETER Experiment Name: At_Open_Flower_P Parameter: Plant Line Value: WS
  misc_feature: MA Experiment 20000286 PARAMETER Experiment Name: At_Open_Flower_P Parameter: Tissue Value: Half Open vs. Whole Plant
  misc_feature: MA Experiment ID: 20000439 Result: Down-regulated in Transcription
  misc_feature: MA Experiment 20000439 PARAMETER Experiment Name: At_Roots__P Parameter: Age (day) Value: 14 vs. 21
  misc_feature: MA Experiment 20000439 PARAMETER Experiment Name: At_Roots__P Parameter: Organism Value: A. thaliana
  misc_feature: MA Experiment 20000439 PARAMETER Experiment Name: At_Roots__P Parameter: Tissue Value: Roots vs. Whole Plant
  misc_feature: MA Experiment ID: 20000441 Result: Up-regulated in Transcription
  misc_feature: MA Experiment 20000441 PARAMETER Experiment Name: At_1uM_BR-BRZ__P Parameter: Tissue Value: Shoot Apices
  misc_feature: MA Experiment 20000441 PARAMETER Experiment Name: At_1uM_BR-BRZ__P Parameter: Treatment Value: 1uM BR vs. No Treatment
  misc_feature: MA Experiment ID: 20000578 Result: Down-regulated in Transcription
  misc_feature: MA Experiment 20000578 PARAMETER Experiment Name: At_CS3726__P Parameter: Organism Value: A. thaliana
  misc_feature: MA Experiment 20000578 PARAMETER Experiment Name: At_CS3726__P Parameter: Plant Line Value: CS3726
  misc_feature: MA Experiment 20000578 PARAMETER Experiment Name: At_CS3726__P Parameter: Tissue Value: Whole Plant
  misc_feature: MA Experiment ID: 20000794 Result: Down-regulated in Transcription
  misc_feature: MA Experiment 20000794 PARAMETER Experiment Name: At_Petals_P Parameter: Age (day) Value: 23-25 days
  misc_feature: MA Experiment 20000794 PARAMETER Experiment Name: At_Petals_P Parameter: Plant Line Value: WS
  misc_feature: MA Experiment 20000794 PARAMETER Experiment Name: At_Petals_P Parameter: Tissue Value: Petals vs. Whole plant
  misc_feature: MA Experiment ID: 20001557 Result: Down-regulated in Transcription
  misc_feature: MA Experiment 20001557 PARAMETER Experiment Name: At_Drought_Soil_Dry_P Parameter: Age (day) Value: 27
  misc_feature: MA Experiment 20001557 PARAMETER Experiment Name: At_Drought_Soil_Dry_P Parameter: Organism Value: A. thaliana
  misc_feature: MA Experiment 20001557 PARAMETER Experiment Name: At_Drought_Soil_Dry_P Parameter: Plant Line Value: WS
  misc_feature: MA Experiment 20001557 PARAMETER Experiment Name: At_Drought_Soil_Dry_P Parameter: Post Timepoint (hr) Value: 3
  misc_feature: MA Experiment 20001557 PARAMETER Experiment Name: At_Drought_Soil_Dry_P Parameter: Post-Treatment Value: Re-Water vs. No Drought
  misc_feature: MA Experiment 20001557 PARAMETER Experiment Name: At_Drought_Soil_Dry_P Parameter: Timepoint (day) Value: 13
  misc_feature: MA Experiment 20001557 PARAMETER Experiment Name: At_Drought_Soil_Dry_P Parameter: Treatment Value: Drought vs. No Drought
  misc_feature: MA Experiment ID: 20001906 Result: Down-regulated in Transcription
  misc_feature: MA Experiment 20001906 PARAMETER Experiment Name: At_Drought_Reproduction_P Parameter: Age (day) Value: 35
  misc_feature: MA Experiment 20001906 PARAMETER Experiment Name: At_Drought_Reproduction_P Parameter: Organism Value: A. thaliana
  misc_feature: MA Experiment 20001906 PARAMETER Experiment Name: At_Drought_Reproduction_P Parameter: Plant Line Value: WS
  misc_feature: MA Experiment 20001906 PARAMETER Experiment Name: At_Drought_Reproduction_P Parameter: Timepoint (day) Value: 5
  misc_feature: MA Experiment 20001906 PARAMETER Experiment Name: At_Drought_Reproduction_P Parameter: Tissue Value: Siliques
  misc_feature: MA Experiment 20001906 PARAMETER Experiment Name: At_Drought_Reproduction_P Parameter: Treatment Value: Drought vs. No Drought
aaccgataagcctgtatctccgctcaaaccaatctcatccgtcaaatcaaccacgtcatctaatccaacggtagatactcagccatcaaaccacagccacaaaaactcgtttcaagaaacgaataaacttacaaaatcccctccaagtcttatttcttcacaaccatctctgaactcatctttcaatctctcttgattccaatccattcttcttcaagtgccgggttctcgggtcggatcttctaagtctagctagggataatggctactgtcactactcatgcctcggcctcgattttccgaccttgtacttcaaagccaagattcctcaccggttcttccggtaggttgaaccgcgacttgtcgtttacatcgatcggttcatcggccaaaacgtcgtcgttcaaggttgaagctaagaaaggagaatggttgcccggtttggcatcgcctgattatctcaccggcagtcttgccggtgacaatgggtttgacccgttgggtctagcagaggatccagagaacttgaaatggttcgtccaggcagagctggtcaacggacgatgggctatgctcggtgtcgctgggatgcttttgccggaagttttcaccaagatcggaatcataaatgttcctgagtggtacgatgctgggaaagagcagtattttgcatcgtcgtcgacattgttcgtgatcgagttcatattgtttcattacgttgagatcagacggtggcaagacatcaagaacccaggaagtgtgaaccaagaccctatctttaagcaatacagcttacctaagggtgaagttggttaccctggtggaatctttaacccgcttaactttgctcctacgcaagaggccaaggagaaagagctagcaaacgggaggttggcgatgttggcattcttagggtttgtggttcaacacaatgtgactggaaaaggaccatttgagaatctgttgcagcacttgtctgacccatggcacaacactattgtccaaaccttcaactaaagagtgaagacagacttatgatctcatacctatctatcttccatcactttcatgtctgtctgtgagtgtgtttcatcttagagttcttggtttttgagcttgaattattgttgaaccgttgtagctccatgaacaaatttggaatcttcaatgtacagaggaactaagttaatcaacattgttgtactctttaatatctattattcatgtggcaacagttatatataagcacaccataacttagattcac

SEQ ID NO: 26326 - protein, 251 aa, Arabidopsis thaliana
  peptide (1)..(251): Ceres Seq. ID no. 12488499
  misc_feature (62)..(224): Pfam Name: Chlorophyll A-B binding protein Pfam Description: Chlorophyll A-B binding protein
  misc_feature (62)..(224): Pfam Name: Chlorophyll A-B binding protein Pfam Description: Chlorophyll A-B binding protein
  misc_feature (62)..(224): Pfam Name: Chlorophyll A-B binding protein Pfam Description: Chlorophyll A-B binding protein
  misc_feature (18)..(251): Homolog of NCBI NO: 9624495 NR Description: chlorophyll a/b-binding protein precursor
  misc_feature (53)..(249): Homolog of NCBI NO: 1076630 NR Description: light-harvesting chlorophyll a - common tobacco
  misc_feature (1)..(249): Homolog of NCBI NO: 20218813 NR Description: putative chlorophyll a/b-binding protein type 4
  misc_feature (8)..(249): Homolog of NCBI NO: 322393 NR Description: chlorophyll a/b-binding protein type 4,
  misc_feature (1)..(249): Homolog of NCBI NO: 322392 NR Description: chlorophyll a/b-binding protein type 4,
  misc_feature (18)..(251): Homolog of NCBI NO: 9624495 NR Description: chlorophyll a/b-binding protein precursor
  misc_feature (1)..(249): Homolog of NCBI NO: 20218813 NR Description: putative chlorophyll a/b-binding protein type 4
  misc_feature (1)..(249): Homolog of NCBI NO: 322392 NR Description: chlorophyll a/b-binding protein type 4,
  misc_feature (8)..(249): Homolog of NCBI NO: 322393 NR Description: chlorophyll a/b-binding protein type 4,
  misc_feature (1)..(249): Homolog of NCBI NO: 20218813 NR Description: putative chlorophyll a/b-binding protein type 4
  misc_feature (53)..(249): Homolog of NCBI NO: 1076630 NR Description: light-harvesting chlorophyll a - common tobacco
  misc_feature (18)..(251): Homolog of NCBI NO: 9624495 NR Description: chlorophyll a/b-binding protein precursor
  misc_feature (1)..(251): Homolog of NCBI NO: 30692874 NR Description: light-harvesting chlorophyll a/b binding protein
  misc_feature (1)..(251): Homolog of NCBI NO: 100196 NR Description: chlorophyll a/b-binding protein (cab-11) - tomato
  misc_feature (1)..(249): Homolog of NCBI NO: 11277626 NR Description: chlorophyll a/b-binding protein [imported] -
  misc_feature (1)..(251): Homolog of NCBI NO: 100197 NR Description: chlorophyll a/b-binding protein (cab-12) - tomato
  misc_feature (1)..(250): Homolog of NCBI NO: 13385204 NR Description: cDNA sequence BC002118; hypothetical protein,
  misc_feature (1)..(251): Homolog of NCBI NO: 30692874 NR Description: light-harvesting chlorophyll a/b binding protein
  misc_feature (1)..(251): Homolog of NCBI NO: 100196 NR Description: chlorophyll a/b-binding protein (cab-11) - tomato
  misc_feature (1)..(249): Homolog of NCBI NO: 11277626 NR Description: chlorophyll a/b-binding protein [imported] -
  misc_feature (1)..(251): Homolog of NCBI NO: 100197 NR Description: chlorophyll a/b-binding protein (cab-12) - tomato
  misc_feature (1)..(250): Homolog of NCBI NO: 13385204 NR Description: cDNA sequence BC002118; hypothetical protein,
  misc_feature (1)..(249): Homolog of NCBI NO: 322392 NR Description: chlorophyll a/b-binding protein type 4,
  misc_feature (8)..(249): Homolog of NCBI NO: 322393 NR Description: chlorophyll a/b-binding protein type 4,
  misc_feature (53)..(249): Homolog of NCBI NO: 1076630 NR Description: light-harvesting chlorophyll a - common tobacco
  misc_feature (1)..(250): Homolog of NCBI NO: 13385204 NR Description: cDNA sequence BC002118; hypothetical protein,
  misc_feature (1)..(251): Homolog of NCBI NO: 100197 NR Description: chlorophyll a/b-binding protein (cab-12) - tomato
  misc_feature (1)..(249): Homolog of NCBI NO: 11277626 NR Description: chlorophyll a/b-binding protein [imported] -
  misc_feature (1)..(251): Homolog of NCBI NO: 100196 NR Description: chlorophyll a/b-binding protein (cab-11) - tomato
  misc_feature (1)..(251): Homolog of NCBI NO: 30692874 NR Description: light-harvesting chlorophyll a/b binding protein
MATVTTHASASIFRPCTSKPRFLTGSSGRLNRDLSFTSIGSSAKTSSFKVEAKKGEWLPGLASPDYLTGSLAGDNGFDPLGLAEDPENLKWFVQAELVNGRWAMLGVAGMLLPEVFTKIGIINVPEWYDAGKEQYFASSSTLFVIEFILFHYVEIRRWQDIKNPGSVNQDPIFKQYSLPKGEVGYPGGIFNPLNFAPTQEAKEKELANGRLAMLAFLGFVVQHNVTGKGPFENLLQHLSDPWHNTIVQTFN

SEQ ID NO: 26327 - protein, 148 aa, Arabidopsis thaliana
  peptide (1)..(148): Ceres Seq. ID no. 12488500
  misc_feature (1)..(121): Pfam Name: Chlorophyll A-B binding protein Pfam Description: Chlorophyll A-B binding protein
  misc_feature (1)..(121): Pfam Name: Chlorophyll A-B binding protein Pfam Description: Chlorophyll A-B binding protein
  misc_feature (1)..(121): Pfam Name: Chlorophyll A-B binding protein Pfam Description: Chlorophyll A-B binding protein
  misc_feature (1)..(148): Homolog of NCBI NO: 9624495 NR Description: chlorophyll a/b-binding protein precursor
  misc_feature (1)..(146): Homolog of NCBI NO: 1076630 NR Description: light-harvesting chlorophyll a - common tobacco
  misc_feature (1)..(146): Homolog of NCBI NO: 20218813 NR Description: putative chlorophyll a/b-binding protein type 4
  misc_feature (1)..(146): Homolog of NCBI NO: 322393 NR Description: chlorophyll a/b-binding protein type 4,
  misc_feature (1)..(146): Homolog of NCBI NO: 322392 NR Description: chlorophyll a/b-binding protein type 4,
  misc_feature (1)..(148): Homolog of NCBI NO: 9624495 NR Description: chlorophyll a/b-binding protein precursor
  misc_feature (1)..(146): Homolog of NCBI NO: 20218813 NR Description: putative chlorophyll a/b-binding protein type 4
  misc_feature (1)..(146): Homolog of NCBI NO: 322392 NR Description: chlorophyll a/b-binding protein type 4,
  misc_feature (1)..(146): Homolog of NCBI NO: 322393 NR Description: chlorophyll a/b-binding protein type 4,
  misc_feature (1)..(146): Homolog of NCBI NO: 20218813 NR Description: putative chlorophyll a/b-binding protein type 4
  misc_feature (1)..(146): Homolog of NCBI NO: 1076630 NR Description: light-harvesting chlorophyll a - common tobacco
  misc_feature (1)..(148): Homolog of NCBI NO: 9624495 NR Description: chlorophyll a/b-binding protein precursor
  misc_feature (1)..(148): Homolog of NCBI NO: 30692874 NR Description: light-harvesting chlorophyll a/b binding protein
  misc_feature (1)..(148): Homolog of NCBI NO: 100196 NR Description: chlorophyll a/b-binding protein (cab-11) - tomato
  misc_feature (1)..(146): Homolog of NCBI NO: 11277626 NR Description: chlorophyll a/b-binding protein [imported] -
  misc_feature (1)..(148): Homolog of NCBI NO: 100197 NR Description: chlorophyll a/b-binding protein (cab-12) - tomato
  misc_feature (1)..(147): Homolog of NCBI NO: 13385204 NR Description: cDNA sequence BC002118; hypothetical protein,
  misc_feature (1)..(148): Homolog of NCBI NO: 30692874 NR Description: light-harvesting chlorophyll a/b binding protein
  misc_feature (1)..(148): Homolog of NCBI NO: 100196 NR Description: chlorophyll a/b-binding protein (cab-11) - tomato
  misc_feature (1)..(146): Homolog of NCBI NO: 11277626 NR Description: chlorophyll a/b-binding protein [imported] -
  misc_feature (1)..(148): Homolog of NCBI NO: 100197 NR Description: chlorophyll a/b-binding protein (cab-12) - tomato
  misc_feature (1)..(147): Homolog of NCBI NO: 13385204 NR Description: cDNA sequence BC002118; hypothetical protein,
  misc_feature (1)..(146): Homolog of NCBI NO: 322392 NR Description: chlorophyll a/b-binding protein type 4,
  misc_feature (1)..(146): Homolog of NCBI NO: 322393 NR Description: chlorophyll a/b-binding protein type 4,
  misc_feature (1)..(146): Homolog of NCBI NO: 1076630 NR Description: light-harvesting chlorophyll a - common tobacco
  misc_feature (1)..(147): Homolog of NCBI NO: 13385204 NR Description: cDNA sequence BC002118; hypothetical protein,
  misc_feature (1)..(148): Homolog of NCBI NO: 100197 NR Description: chlorophyll a/b-binding protein (cab-12) - tomato
  misc_feature (1)..(146): Homolog of NCBI NO: 11277626 NR Description: chlorophyll a/b-binding protein [imported] -
  misc_feature (1)..(148): Homolog of NCBI NO: 100196 NR Description: chlorophyll a/b-binding protein (cab-11) - tomato
  misc_feature (1)..(148): Homolog of NCBI NO: 30692874 NR Description: light-harvesting chlorophyll a/b binding protein
MLGVAGMLLPEVFTKIGIINVPEWYDAGKEQYFASSSTLFVIEFILFHYVEIRRWQDIKNPGSVNQDPIFKQYSLPKGEVGYPGGIFNPLNFAPTQEAKEKELANGRLAMLAFLGFVVQHNVTGKGPFENLLQHLSDPWHNTIVQTFN

SEQ ID NO: 26328 - protein, 142 aa, Arabidopsis thaliana
  peptide (1)..(142): Ceres Seq. ID no. 12488501
  misc_feature (1)..(115): Pfam Name: Chlorophyll A-B binding protein Pfam Description: Chlorophyll A-B binding protein
  misc_feature (1)..(115): Pfam Name: Chlorophyll A-B binding protein Pfam Description: Chlorophyll A-B binding protein
  misc_feature (1)..(115): Pfam Name: Chlorophyll A-B binding protein Pfam Description: Chlorophyll A-B binding protein
  misc_feature (1)..(142): Homolog of NCBI NO: 9624495 NR Description: chlorophyll a/b-binding protein precursor
  misc_feature (1)..(140): Homolog of NCBI NO: 1076630 NR Description: light-harvesting chlorophyll a - common tobacco
  misc_feature (1)..(140): Homolog of NCBI NO: 20218813 NR Description: putative chlorophyll a/b-binding protein type 4
  misc_feature (1)..(140): Homolog of NCBI NO: 322393 NR Description: chlorophyll a/b-binding protein type 4,
  misc_feature (1)..(140): Homolog of NCBI NO: 322392 NR Description: chlorophyll a/b-binding protein type 4,
  misc_feature (1)..(142): Homolog of NCBI NO: 9624495 NR Description: chlorophyll a/b-binding protein precursor
  misc_feature (1)..(140): Homolog of NCBI NO: 20218813 NR Description: putative chlorophyll a/b-binding protein type 4
  misc_feature (1)..(140): Homolog of NCBI NO: 322392 NR Description: chlorophyll a/b-binding protein type 4,
  misc_feature (1)..(140): Homolog of NCBI NO: 322393 NR Description: chlorophyll a/b-binding protein type 4,
  misc_feature (1)..(140): Homolog of NCBI NO: 20218813 NR Description: putative chlorophyll a/b-binding protein type 4
  misc_feature (1)..(140): Homolog of NCBI NO: 1076630 NR Description: light-harvesting chlorophyll a - common tobacco
  misc_feature (1)..(142): Homolog of NCBI NO: 9624495 NR Description: chlorophyll a/b-binding protein precursor
  misc_feature (1)..(142): Homolog of NCBI NO: 30692874 NR Description: light-harvesting chlorophyll a/b binding protein
  misc_feature (1)..(142): Homolog of NCBI NO: 100196 NR Description: chlorophyll a/b-binding protein (cab-11) - tomato
  misc_feature (1)..(140): Homolog of NCBI NO: 11277626 NR Description: chlorophyll a/b-binding protein [imported] -
  misc_feature (1)..(142): Homolog of NCBI NO: 100197 NR Description: chlorophyll a/b-binding protein (cab-12) - tomato
  misc_feature (1)..(141): Homolog of NCBI NO: 13385204 NR Description: cDNA sequence BC002118; hypothetical protein,
  misc_feature (1)..(142): Homolog of NCBI NO: 30692874 NR Description: light-harvesting chlorophyll a/b binding protein
  misc_feature (1)..(142): Homolog of NCBI NO: 100196 NR Description: chlorophyll a/b-binding protein (cab-11) - tomato
  misc_feature (1)..(140): Homolog of NCBI NO: 11277626 NR Description: chlorophyll a/b-binding protein [imported] -
  misc_feature (1)..(142): Homolog of NCBI NO: 100197 NR Description: chlorophyll a/b-binding protein (cab-12) - tomato
  misc_feature (1)..(141): Homolog of NCBI NO: 13385204 NR Description: cDNA sequence BC002118; hypothetical protein,
  misc_feature (1)..(140): Homolog of NCBI NO: 322392 NR Description: chlorophyll a/b-binding protein type 4,
  misc_feature (1)..(140): Homolog of NCBI NO: 322393 NR Description: chlorophyll a/b-binding protein type 4,
  misc_feature (1)..(140): Homolog of NCBI NO: 1076630 NR Description: light-harvesting chlorophyll a - common tobacco
  misc_feature (1)..(141): Homolog of NCBI NO: 13385204 NR Description: cDNA sequence BC002118; hypothetical protein,
  misc_feature (1)..(142): Homolog of NCBI NO: 100197 NR Description: chlorophyll a/b-binding protein (cab-12) - tomato
  misc_feature (1)..(140): Homolog of NCBI NO: 11277626 NR Description: chlorophyll a/b-binding protein [imported] -
  misc_feature (1)..(142): Homolog of NCBI NO: 100196 NR Description: chlorophyll a/b-binding protein (cab-11) - tomato
  misc_feature (1)..(142): Homolog of NCBI NO: 30692874 NR Description: light-harvesting chlorophyll a/b binding protein
MLLPEVFTKIGIINVPEWYDAGKEQYFASSSTLFVIEFILFHYVEIRRWQDIKNPGSVNQDPIFKQYSLPKGEVGYPGGIFNPLNFAPTQEAKEKELANGRLAMLAFLGFVVQHNVTGKGPFENLLQHLSDPWHNTIVQTFN

SEQ ID NO: 26329 - DNA, 1139 bp, Arabidopsis thaliana
  misc_feature (1)..(1139): Ceres Seq. ID no. 12333768
  misc_feature: MA Experiment ID: 108461 Result: Up-regulated in Transcription
  misc_feature: MA Experiment 108461 PARAMETER Experiment Name: At_Germinating_Seeds_cDNA_P Parameter: Age (day) Value: 1 vs. 0
  misc_feature: MA Experiment 108461 PARAMETER Experiment Name: At_Germinating_Seeds_cDNA_P Parameter: Tissue Value: Germinating Seeds
  misc_feature: MA Experiment ID: 108462 Result: Up-regulated in Transcription
  misc_feature: MA Experiment 108462 PARAMETER Experiment Name: At_Germinating_Seeds_cDNA_P Parameter: Age (day) Value: 2 vs. 0
  misc_feature: MA Experiment 108462 PARAMETER Experiment Name: At_Germinating_Seeds_cDNA_P Parameter: Tissue Value: Germinating Seeds
  misc_feature: MA Experiment ID: 108464 Result: Up-regulated in Transcription
  misc_feature: MA Experiment 108464 PARAMETER Experiment Name: At_Germinating_Seeds_cDNA_P Parameter: Age (day) Value: 4 vs. 0
  misc_feature: MA Experiment 108464 PARAMETER Experiment Name: At_Germinating_Seeds_cDNA_P Parameter: Tissue Value: Germinating Seeds
  misc_feature: MA Experiment ID: 108501 Result: Up-regulated in Transcription
  misc_feature: MA Experiment 108501 PARAMETER Experiment Name: At_ap2_floral_buds_cDNA_P Parameter: Plant Line Value: ap2 (Ler.)
  misc_feature: MA Experiment 108501 PARAMETER Experiment Name: At_ap2_floral_buds_cDNA_P Parameter: Tissue Value: Closed Flower
  misc_feature: MA Experiment ID: 108569 Result: Up-regulated in Transcription
  misc_feature: MA Experiment 108569 PARAMETER Experiment Name: At_0.001%_MeJA__cDNA_P Parameter: Timepoint (hr) Value: 6
  misc_feature: MA Experiment 108569 PARAMETER Experiment Name: At_0.001%_MeJA__cDNA_P Parameter: Tissue Value: Aerial
  misc_feature: MA Experiment 108569 PARAMETER Experiment Name: At_0.001%_MeJA__cDNA_P Parameter: Treatment Value: 0.001% MeJA vs. No Treatment
  misc_feature: MA Experiment ID: 108576 Result: Up-regulated in Transcription
  misc_feature: MA Experiment 108576 PARAMETER Experiment Name: At_42deg_Heat_cDNA_P Parameter: Temperature (deg C) Value: 42 vs. 22
  misc_feature: MA Experiment 108576 PARAMETER Experiment Name: At_42deg_Heat_cDNA_P Parameter: Timepoint (hr) Value: 1
  misc_feature: MA Experiment 108576 PARAMETER Experiment Name: At_42deg_Heat_cDNA_P Parameter: Tissue Value: Aerial
  misc_feature: MA Experiment ID: 20000030 Result: Down-regulated in Transcription
  misc_feature: MA Experiment 20000030 PARAMETER Experiment Name: At_CS6630_Roots_cDNA_P Parameter: Plant Line Value: CS6630 vs. WS
  misc_feature: MA Experiment 20000030 PARAMETER Experiment Name: At_CS6630_Roots_cDNA_P Parameter: Tissue Value: Roots
  misc_feature: MA Experiment ID: 20000090 Result: Down-regulated in Transcription
  misc_feature: MA Experiment ID: 20000117 Result: Down-regulated in Transcription
  misc_feature: MA Experiment 20000117 PARAMETER Experiment Name: At_100uM_ABA_Mutants_cDNA_P Parameter: Plant Line Value: Columbia
  misc_feature: MA Experiment 20000117 PARAMETER Experiment Name: At_100uM_ABA_Mutants_cDNA_P Parameter: Timepoint (hr) Value: 6
  misc_feature: MA Experiment 20000117 PARAMETER Experiment Name: At_100uM_ABA_Mutants_cDNA_P Parameter: Tissue Value: Aerial
  misc_feature: MA Experiment 20000117 PARAMETER Experiment Name: At_100uM_ABA_Mutants_cDNA_P Parameter: Treatment Value: 100uM ABA vs. No Treatment
  misc_feature: MA Experiment ID: 20000144 Result: Up-regulated in Transcription
  misc_feature: MA Experiment 20000144 PARAMETER Experiment Name: At_42deg_Heat_cDNA_P Parameter: Temperature (deg C) Value: 42 vs. 22
  misc_feature: MA Experiment 20000144 PARAMETER Experiment Name: At_42deg_Heat_cDNA_P Parameter: Timepoint (hr) Value: 1
  misc_feature: MA Experiment 20000144 PARAMETER Experiment Name: At_42deg_Heat_cDNA_P Parameter: Tissue Value: Aerial
actttttatggataatagatctagtagtcttcgtttactaattctctctcacaaatccaaacaaaaaggaactgtgtacttaaatcctgtaatgacaatttcatacatactaaacaagaactattaaatactaggataatacatacttgaagaaataacaactcttcatgtagtcgtgtctttttacaatttaaaatttgaaaaataaaagttacatttacctttacaacgtcggtcgttttccacacaatagattacccacttctactcgatagttttctctataatatagagacaaaagaagagagcatttaaattctaaagaacaaaaaaggaaaaacagagcagccatgagagcttctgtttattcattgatcctactcttcttctcgtgtttactacatctatcaaagtctcaaccgttcctcggagtaaactacggcctaaccgccgacaatcttccacctccgtcagcgagtgcaaagctccttcaatccacaactttccaaaaagtccgtctttacggatccgacccggctgtaatcaaggccctagcaaacacggggatcgagatcgtcatcggggcgtctaacggcgatgtacccggtctagcatcggacccgagtttcgcccgaagctgggtcgaaaccaacgtggtaccttattatccagcgagcaagattgttctcattgccgtgggaaatgagatcacatcatacggcgacaatagtctcatgtcgcagcttttgccggcgatgaaaaatgtccaaggtgcccttgaggctgtgtcacttggtggcggaaaaatcaaagtctcgacagtacacataatgtcggttctagccgggtcagaccctccttcggccgcggtatttaaaccggagcatgctgatatattgaagggattgctagagtttaatagtgaaaccgggtcgccattcgcggttaacccgtacccgttttttgcttaccaagatgaccggagacccgaaacgttggcttattgcttgtttcaggccaatcctggccgtgtcgaccccaacagcaacctcaagtatatgaacatgttcgatgctcaggttgatgcggtgtattcagctttgaactcgatggggttcaaggacgtagagataatggtc

SEQ ID NO: 26330 - protein, 263 aa, Arabidopsis thaliana
  peptide (1)..(263): Ceres Seq. ID no. 12333769
  misc_feature (26)..(262): Pfam Name: Glycosyl hydrolases family 17 Pfam Description: Glycosyl hydrolases family 17
  misc_feature (7)..(262): Homolog of NCBI NO: 25316443 NR Description: CDS protein F9L11.6 [imported] - Arabidopsis
  misc_feature (1)..(262): Homolog of NCBI NO: 34908492 NR Description: putative beta-1,3-glucanase
  misc_feature (6)..(262): Homolog of NCBI NO: 34902328 NR Description: Putative glycosyl hydrolase
  misc_feature (15)..(262): Homolog of NCBI NO: 31126737 NR Description: putative beta 1,3-glucanase
  misc_feature (1)..(262): Homolog of NCBI NO: 14279169 NR Description: beta-1,3-glucanase-like protein [Olea europaea]
  misc_feature (9)..(262): Homolog of NCBI NO: 15226720 NR Description: glycosyl hydrolase family 17; protein id:
  misc_feature (22)..(262): Homolog of NCBI NO: 7447982 NR Description: hypothetical protein T4L20.60 - Arabidopsis
  misc_feature (1)..(262): Homolog of NCBI NO: 30690053 NR Description: glycosyl hydrolase family 17 [Arabidopsis
  misc_feature (1)..(262): Homolog of NCBI NO: 22327528 NR Description: glycosyl hydrolase family 17
  misc_feature (1)..(262): Homolog of NCBI NO: 10177275 NR Description: beta-1,3-glucanase-like protein [Arabidopsis
MRASVYSLILLFFSCLLHLSKSQPFLGVNYGLTADNLPPPSASAKLLQSTTFQKVRLYGSDPAVIKALANTGIEIVIGASNGDVPGLASDPSFARSWVETNVVPYYPASKIVLIAVGNEITSYGDNSLMSQLLPAMKNVQGALEAVSLGGGKIKVSTVHIMSVLAGSDPPSAAVFKPEHADILKGLLEFNSETGSPFAVNPYPFFAYQDDRRPETLAYCLFQANPGRVDPNSNLKYMNMFDAQVDAVYSALNSMGFKDVEIMV

SEQ ID NO: 26331 - protein, 135 aa, Arabidopsis thaliana
  peptide (1)..(135): Ceres Seq. ID no. 12333770
  misc_feature (1)..(134): Pfam Name: Glycosyl hydrolases family 17 Pfam Description: Glycosyl hydrolases family 17
  misc_feature (1)..(134): Homolog of NCBI NO: 25316443 NR Description: CDS protein F9L11.6 [imported] - Arabidopsis
  misc_feature (1)..(134): Homolog of NCBI NO: 34908492 NR Description: putative beta-1,3-glucanase
  misc_feature (1)..(134): Homolog of NCBI NO: 34902328 NR Description: Putative glycosyl hydrolase
  misc_feature (1)..(134): Homolog of NCBI NO: 31126737 NR Description: putative beta 1,3-glucanase
  misc_feature (1)..(134): Homolog of NCBI NO: 14279169 NR Description: beta-1,3-glucanase-like protein [Olea europaea]
  misc_feature (1)..(134): Homolog of NCBI NO: 15226720 NR Description: glycosyl hydrolase family 17; protein id:
  misc_feature (1)..(134): Homolog of NCBI NO: 7447982 NR Description: hypothetical protein T4L20.60 - Arabidopsis
  misc_feature (1)..(134): Homolog of NCBI NO: 30690053 NR Description: glycosyl hydrolase family 17 [Arabidopsis
  misc_feature (1)..(134): Homolog of NCBI NO: 22327528 NR Description: glycosyl hydrolase family 17
  misc_feature (1)..(134): Homolog of NCBI NO: 10177275 NR Description: beta-1,3-glucanase-like protein [Arabidopsis
MSQLLPAMKNVQGALEAVSLGGGKIKVSTVHIMSVLAGSDPPSAAVFKPEHADILKGLLEFNSETGSPFAVNPYPFFAYQDDRRPETLAYCLFQANPGRVDPNSNLKYMNMFDAQVDAVYSALNSMGFKDVEIMV

SEQ ID NO: 26332 - DNA, 2118 bp, Arabidopsis thaliana
  misc_feature (1)..(2118): Ceres Seq. ID no. 12329069
  misc_feature: MA Experiment ID: 20000264 Result: Down-regulated in Transcription
  misc_feature: MA Experiment 20000264 PARAMETER Experiment Name: At_Open_Flower_P Parameter: Age (day) Value: 21
  misc_feature: MA Experiment 20000264 PARAMETER Experiment Name: At_Open_Flower_P Parameter: Plant Line Value: WS
  misc_feature: MA Experiment 20000264 PARAMETER Experiment Name: At_Open_Flower_P Parameter: Tissue Value: Open Flower vs. Whole Plant
  misc_feature: MA Experiment ID: 20000265 Result: Down-regulated in Transcription
  misc_feature: MA Experiment 20000265 PARAMETER Experiment Name: At_Open_Flower_P Parameter: Age (day) Value: 21
  misc_feature: MA Experiment 20000265 PARAMETER Experiment Name: At_Open_Flower_P Parameter: Plant Line Value: WS
  misc_feature: MA Experiment 20000265 PARAMETER Experiment Name: At_Open_Flower_P Parameter: Tissue Value: Closed Flower vs. Whole Plant
aaaaaccaaatccgccataactctctctctctctcccacttcccacagagagacacattcatgccagcaatgccaggtctcgtctcagtcaaaactccttccgatacaccgccgctacgtgtagccgtaccagacacgcaacctctctcaaacccgccgcgaactccgatgaagaaaaccccttcctctacaccatctcgatccaaaccatcaccaaatagatccaccggcaaaaaagattccccaaccgtatcctcctccaccgcagccgtaatcgacgtcgacgatccatctctagataatccagatctcggtcctttccttctaaaattagctcgtgacgctattgcttctggtgaaggtcctaacaaagcattagattacgcgatccgagcaactaagtcctttgagagatgttgcgccgccgttgctccgcctattcccggtggtagcgatggtggacctgttcttgatctcgctatgagccttcatgttctcgctgctatttactgtagtctcggccgatttgatgaagctgtaccacctcttgaacgagctattcaagtccctgatccgactcgtggccctgaccactctctcgctgcgttttctggtcatatgcaacttggtgatacgttgtctatgcttggtcagattgatagatctattgcttgttatgaagaaggtcttaagatccagatccagactttgggtgatactgatccacgagttggtgaaacttgcaggtacttagcagaagcatatgttcaagcaatgcagttcaataaagcggaagagttatgcaagaagactctagagattcaccgagcgcatagtgaacctgcttcactggaggaagcagctgataggagattgatggcaattatctgcgaggctaaaggagattatgaaaacgctcttgagcatcttgttcttgctagtatggctatgattgcgagtggacaagaatctgaggttgcatcgattgatgttagtattgggaatatttacatgtcgctgtgccggtttgatgaagctgtgttttcatatcagaaggctcttactgtgtttaaggcttctaaaggagagactcatccgacggttgcgtcagtgtttgttagattggctgagctttaccatagaacagggaaacttcgtgagtctaagtcttactgtgagaatgcgttgaggatatacaataagccggtgcctgggacaactgtggaggagattgctggtggattaactgagatttctgctatttatgagtctgtagatgaacctgaggaagcattgaagctacttcagaagtctatgaaattgcttgaggataagccaggacagcagagcgccattgcagggttagaggcacggatgggagttatgtattacacagtggggaggtacgaggacgcaagaaacgcgtttgagagcgctgtgacaaagctacgggcagcaggtgagaaatctgccttcttcggtgttgtattaaaccagatgggactagcctgcgttcagcttttcaagattgatgaagcgggtgagctgtttgaagaagcaagaggtattcttgaacaagaacgtggaccgtgcgatcaggacactctcggtgtttatagcaatctagctgctacctatgacgctatgggaaggatagaggatgcgattgagatattagagcaggttctgaagctgagagaggaaaagctcgggactgcgaatccggattttgaagacgagaagaaacgtttggccgagcttttgaaggaagctgggcggtcgcggaactacaaagccaagtcgctccagaatctgattgatccaaatgcaagacctccgaagaaagagtcttctgctaagaaatggcccagcctcggtttcaagttctgaggaaaaaattatcatataaaataaatcatccacatatatattcaatattttattttattgttattgttatattttttatctgatctattttctgtatcataatctgaggttgatgaattaatttcatgtatagtgtttttatttgagtttggtgaaatactgccaagatggtgagctgtttgtttgagtttgaaatttctttaattcaatcacttttttcttcttctg

SEQ ID NO: 26333 - protein, 629 aa, Arabidopsis thaliana
  peptide (1)..(629): Ceres Seq. ID no. 12329070
  misc_feature (245)..(278): Pfam Name: TPR Domain Pfam Description: TPR Domain
  misc_feature (151)..(614): Homolog of NCBI NO: 27261475 NR Description: Hypothetical protein [Oryza sativa (japonica
  misc_feature (98)..(612): Homolog of NCBI NO: 30684882 NR Description: tetratricopeptide repeat (TPR)-containing protein
  misc_feature (98)..(612): Homolog of NCBI NO: 25408142 NR Description: probable kinesin light chain [imported] -
  misc_feature (95)..(607): Homolog of NCBI NO: 26450936 NR Description: unknown protein [Arabidopsis thaliana]
  misc_feature (95)..(607): Homolog of NCBI NO: 15223528 NR Description: hypothetical protein; protein id: At1g27500.1
  misc_feature (95)..(607): Homolog of NCBI NO: 9802538 NR Description: F17L21.29 [Arabidopsis thaliana]
  misc_feature (53)..(609): Homolog of NCBI NO: 33589662 NR Description: At3g27960 [Arabidopsis thaliana]
  misc_feature (53)..(609): Homolog of NCBI NO: 15232873 NR Description: hypothetical protein; protein id: At3g27960.1
  misc_feature (72)..(609): Homolog of NCBI NO: 20152971 NR Description: similar to A. thaliana protein BAB01483 similar
  misc_feature (95)..(609): Homolog of NCBI NO: 19387245 NR Description: putative kinesin light chain gene
KNQIRHNSLSLSHFPQRDTFMPAMPGLVSVKTPSDTPPLRVAVPDTQPLSNPPRTPMKKTPSSTPSRSKPSPNRSTGKKDSPTVSSSTAAVIDVDDPSLDNPDLGPFLLKLARDAIASGEGPNKALDYAIRATKSFERCCAAVAPPIPGGSDGGPVLDLAMSLHVLAAIYCSLGRFDEAVPPLERAIQVPDPTRGPDHSLAAFSGHMQLGDTLSMLGQIDRSIACYEEGLKIQIQTLGDTDPRVGETCRYLAEAYVQAMQFNKAEELCKKTLEIHRAHSEPASLEEAADRRLMAIICEAKGDYENALEHLVLASMAMIASGQESEVASIDVSIGNIYMSLCRFDEAVFSYQKALTVFKASKGETHPTVASVFVRLAELYHRTGKLRESKSYCENALRIYNKPVPGTTVEEIAGGLTEISAIYESVDEPEEALKLLQKSMKLLEDKPGQQSAIAGLEARMGVMYYTVGRYEDARNAFESAVTKLRAAGEKSAFFGVVLNQMGLACVQLFKIDEAGELFEEARGILEQERGPCDQDTLGVYSNLAATYDAMGRIEDAIEILEQVLKLREEKLGTANPDFEDEKKRLAELLKEAGRSRNYKAKSLQNLIDPNARPPKKESSAKKWPSLGFKF

SEQ ID NO: 26334 - protein, 609 aa, Arabidopsis thaliana
  peptide (1)..(609): Ceres Seq. ID no. 12329071
  misc_feature (225)..(258): Pfam Name: TPR Domain Pfam Description: TPR Domain
  misc_feature (131)..(594): Homolog of NCBI NO: 27261475 NR Description: Hypothetical protein [Oryza sativa (japonica
  misc_feature (78)..(592): Homolog of NCBI NO: 30684882 NR Description: tetratricopeptide repeat (TPR)-containing protein
  misc_feature (78)..(592): Homolog of NCBI NO: 25408142 NR Description: probable kinesin light chain [imported] -
  misc_feature (75)..(587): Homolog of NCBI NO: 26450936 NR Description: unknown protein [Arabidopsis thaliana]
  misc_feature (75)..(587): Homolog of NCBI NO: 15223528 NR Description: hypothetical protein; protein id: At1g27500.1
  misc_feature (75)..(587): Homolog of NCBI NO: 9802538 NR Description: F17L21.29 [Arabidopsis thaliana]
  misc_feature (33)..(589): Homolog of NCBI NO: 33589662 NR Description: At3g27960 [Arabidopsis thaliana]
  misc_feature (33)..(589): Homolog of NCBI NO: 15232873 NR Description: hypothetical protein; protein id: At3g27960.1
  misc_feature (52)..(589): Homolog of NCBI NO: 20152971 NR Description: similar to A. thaliana protein BAB01483 similar
  misc_feature (75)..(589): Homolog of NCBI NO: 19387245 NR Description: putative kinesin light chain gene
MPAMPGLVSVKTPSDTPPLRVAVPDTQPLSNPPRTPMKKTPSSTPSRSKPSPNRSTGKKDSPTVSSSTAAVIDVDDPSLDNPDLGPFLLKLARDAIASGEGPNKALDYAIRATKSFERCCAAVAPPIPGGSDGGPVLDLAMSLHVLAAIYCSLGRFDEAVPPLERAIQVPDPTRGPDHSLAAFSGHMQLGDTLSMLGQIDRSIACYEEGLKIQIQTLGDTDPRVGETCRYLAEAYVQAMQFNKAEELCKKTLEIHRAHSEPASLEEAADRRLMAIICEAKGDYENALEHLVLASMAMIASGQESEVASIDVSIGNIYMSLCRFDEAVFSYQKALTVFKASKGETHPTVASVFVRLAELYHRTGKLRESKSYCENALRIYNKPVPGTTVEEIAGGLTEISAIYESVDEPEEALKLLQKSMKLLEDKPGQQSAIAGLEARMGVMYYTVGRYEDARNAFESAVTKLRAAGEKSAFFGVVLNQMGLACVQLFKIDEAGELFEEARGILEQERGPCDQDTLGVYSNLAATYDAMGRIEDAIEILEQVLKLREEKLGTANPDFEDEKKRLAELLKEAGRSRNYKAKSLQNLIDPNARPPKKESSAKKWPSLGFKF

SEQ ID NO: 26335 - protein, 606 aa, Arabidopsis thaliana
  peptide (1)..(606): Ceres Seq. ID no. 12329072
  misc_feature (222)..(255): Pfam Name: TPR Domain Pfam Description: TPR Domain
  misc_feature (128)..(591): Homolog of NCBI NO: 27261475 NR Description: Hypothetical protein [Oryza sativa (japonica
  misc_feature (75)..(589): Homolog of NCBI NO: 30684882 NR Description: tetratricopeptide repeat (TPR)-containing protein
  misc_feature (75)..(589): Homolog of NCBI NO: 25408142 NR Description: probable kinesin light chain [imported] -
  misc_feature (72)..(584): Homolog of NCBI NO: 26450936 NR Description: unknown protein [Arabidopsis thaliana]
  misc_feature (72)..(584): Homolog of NCBI NO: 15223528 NR Description: hypothetical protein; protein id: At1g27500.1
  misc_feature (72)..(584): Homolog of NCBI NO: 9802538 NR Description: F17L21.29 [Arabidopsis thaliana]
  misc_feature (30)..(586): Homolog of NCBI NO: 33589662 NR Description: At3g27960 [Arabidopsis thaliana]
  misc_feature (30)..(586): Homolog of NCBI NO: 15232873 NR Description: hypothetical protein; protein id: At3g27960.1
  misc_feature (49)..(586): Homolog of NCBI NO: 20152971 NR Description: similar to A. thaliana protein BAB01483 similar
  misc_feature (72)..(586): Homolog of NCBI NO: 19387245 NR Description: putative kinesin light chain gene
MPGLVSVKTPSDTPPLRVAVPDTQPLSNPPRTPMKKTPSSTPSRSKPSPNRSTGKKDSPTVSSSTAAVIDVDDPSLDNPDLGPFLLKLARDAIASGEGPNKALDYAIRATKSFERCCAAVAPPIPGGSDGGPVLDLAMSLHVLAAIYCSLGRFDEAVPPLERAIQVPDPTRGPDHSLAAFSGHMQLGDTLSMLGQIDRSIACYEEGLKIQIQTLGDTDPRVGETCRYLAEAYVQAMQFNKAEELCKKTLEIHRAHSEPASLEEAADRRLMAIICEAKGDYENALEHLVLASMAMIASGQESEVASIDVSIGNIYMSLCRFDEAVFSYQKALTVFKASKGETHPTVASVFVRLAELYHRTGKLRESKSYCENALRIYNKPVPGTTVEEIAGGLTEISAIYESVDEPEEALKLLQKSMKLLEDKPGQQSAIAGLEARMGVMYYTVGRYEDARNAFESAVTKLRAAGEKSAFFGVVLNQMGLACVQLFKIDEAGELFEEARGILEQERGPCDQDTLGVYSNLAATYDAMGRIEDAIEILEQVLKLREEKLGTANPDFEDEKKRLAELLKEAGRSRNYKAKSLQNLIDPNARPPKKESSAKKWPSLGFKF

SEQ ID NO: 26336 - DNA, 1324 bp, Arabidopsis thaliana
  misc_feature (1)..(1324): Ceres Seq. ID no. 12334062
  misc_feature: MA Experiment ID: 108434 Result: Down-regulated in Transcription
  misc_feature: MA Experiment 108434 PARAMETER Experiment Name: At_Root_Tips_cDNA_P Parameter: Tissue Value: Root Tips
  misc_feature: MA Experiment ID: 108464 Result: Up-regulated in Transcription
  misc_feature: MA Experiment 108464 PARAMETER Experiment Name: At_Germinating_Seeds_cDNA_P Parameter: Age (day) Value: 4 vs. 0
  misc_feature: MA Experiment 108464 PARAMETER Experiment Name: At_Germinating_Seeds_cDNA_P Parameter: Tissue Value: Germinating Seeds
  misc_feature: MA Experiment ID: 108488 Result: Down-regulated in Transcription
  misc_feature: MA Experiment ID: 20000185 Result: Up-regulated in Transcription
  misc_feature: MA Experiment 20000185 PARAMETER Experiment Name: At_Roots__P Parameter: Age (day) Value: 7 vs. 21
  misc_feature: MA Experiment 20000185 PARAMETER Experiment Name: At_Roots__P Parameter: Organism Value: A. thaliana
  misc_feature: MA Experiment 20000185 PARAMETER Experiment Name: At_Roots__P Parameter: Tissue Value: Roots vs. Whole Plant
  misc_feature: MA Experiment ID: 20000227 Result: Down-regulated in Transcription
  misc_feature: MA Experiment 20000227 PARAMETER Experiment Name: At_Root-Tips-vs-Tops_P Parameter: Tissue Value: Root Tips vs. Root Tops
  misc_feature: MA Experiment ID: 20000234 Result: Down-regulated in Transcription
  misc_feature: MA Experiment 20000234 PARAMETER Experiment Name: At_Siliques_P Parameter: Age (day) Value: 21
  misc_feature: MA Experiment 20000234 PARAMETER Experiment Name: At_Siliques_P Parameter: Organism Value: A. thaliana
  misc_feature: MA Experiment 20000234 PARAMETER Experiment Name: At_Siliques_P Parameter: Plant Line Value: WS
  misc_feature: MA Experiment 20000234 PARAMETER Experiment Name: At_Siliques_P Parameter: Tissue Value: Less Than 5mm Siliques vs. Whole Plant
  misc_feature: MA Experiment ID: 20000235 Result: Down-regulated in Transcription
  misc_feature: MA Experiment 20000235 PARAMETER Experiment Name: At_Siliques_P Parameter: Age (day) Value: 21
  misc_feature: MA Experiment 20000235 PARAMETER Experiment Name: At_Siliques_P Parameter: Organism Value: A. thaliana
  misc_feature: MA Experiment 20000235 PARAMETER Experiment Name: At_Siliques_P Parameter: Plant Line Value: WS
  misc_feature: MA Experiment 20000235 PARAMETER Experiment Name: At_Siliques_P Parameter: Tissue Value: 5-10mm Siliques vs. Whole Plant
  misc_feature: MA Experiment ID: 20000264 Result: Up-regulated in Transcription
  misc_feature: MA Experiment 20000264 PARAMETER Experiment Name: At_Open_Flower_P Parameter: Age (day) Value: 21
  misc_feature: MA Experiment 20000264 PARAMETER Experiment Name: At_Open_Flower_P Parameter: Plant Line Value: WS
  misc_feature: MA Experiment 20000264 PARAMETER Experiment Name: At_Open_Flower_P Parameter: Tissue Value: Open Flower vs. Whole Plant
  misc_feature: MA Experiment ID: 20000286 Result: Up-regulated in Transcription
  misc_feature: MA Experiment 20000286 PARAMETER Experiment Name: At_Open_Flower_P Parameter: Age (day) Value: 21
  misc_feature: MA Experiment 20000286 PARAMETER Experiment Name: At_Open_Flower_P Parameter: Plant Line Value: WS
  misc_feature: MA Experiment 20000286 PARAMETER Experiment Name: At_Open_Flower_P Parameter: Tissue Value: Half Open vs. Whole Plant
  misc_feature: MA Experiment ID: 20000437 Result: Up-regulated in Transcription
  misc_feature: MA Experiment 20000437 PARAMETER Experiment Name: At_Drought_P Parameter: Age (day) Value: 8
  misc_feature: MA Experiment 20000437 PARAMETER Experiment Name: At_Drought_P Parameter: Organism Value: A. thaliana
  misc_feature: MA Experiment 20000437 PARAMETER Experiment Name: At_Drought_P Parameter: Plant Line Value: WS
  misc_feature: MA Experiment 20000437 PARAMETER Experiment Name: At_Drought_P Parameter: Timepoint (hr) Value: 24
  misc_feature: MA Experiment 20000437 PARAMETER Experiment Name: At_Drought_P Parameter: Tissue Value: Whole Plant
  misc_feature: MA Experiment 20000437 PARAMETER Experiment Name: At_Drought_P Parameter: Treatment Value: Drought vs. No Drought
  misc_feature: MA Experiment ID: 20000439 Result: Up-regulated in Transcription
  misc_feature: MA Experiment 20000439 PARAMETER Experiment Name: At_Roots__P Parameter: Age (day) Value: 14 vs. 21
  misc_feature: MA Experiment 20000439 PARAMETER Experiment Name: At_Roots__P Parameter: Organism Value: A. thaliana
  misc_feature: MA Experiment 20000439 PARAMETER Experiment Name: At_Roots__P Parameter: Tissue Value: Roots vs. Whole Plant
  misc_feature: MA Experiment ID: 20000794 Result: Up-regulated in Transcription
  misc_feature: MA Experiment 20000794 PARAMETER Experiment Name: At_Petals_P Parameter: Age (day) Value: 23-25 days
  misc_feature: MA Experiment 20000794 PARAMETER Experiment Name: At_Petals_P Parameter: Plant Line Value: WS
  misc_feature: MA Experiment 20000794 PARAMETER Experiment Name: At_Petals_P Parameter: Tissue Value: Petals vs. Whole plant
  misc_feature: MA Experiment ID: 20001757 Result: Down-regulated in Transcription
  misc_feature: MA Experiment 20001757 PARAMETER Experiment Name: At_50mM_NH4NO3_L-to-H_P Parameter: Timepoint (hr) Value: 6
  misc_feature: MA Experiment 20001757 PARAMETER Experiment Name: At_50mM_NH4NO3_L-to-H_P Parameter: Tissue Value: Leaf
  misc_feature: MA Experiment 20001757 PARAMETER Experiment Name: At_50mM_NH4NO3_L-to-H_P Parameter: Treatment Value: 50mM NH4NO3 vs 100mM Mannitol
  misc_feature: MA Experiment ID: 20001906 Result: Up-regulated in Transcription
  misc_feature: MA Experiment 20001906 PARAMETER Experiment Name: At_Drought_Reproduction_P Parameter: Age (day) Value: 35
  misc_feature: MA Experiment 20001906 PARAMETER Experiment Name: At_Drought_Reproduction_P Parameter: Organism Value: A. thaliana
  misc_feature: MA Experiment 20001906 PARAMETER Experiment Name: At_Drought_Reproduction_P Parameter: Plant Line Value: WS
  misc_feature: MA Experiment 20001906 PARAMETER Experiment Name: At_Drought_Reproduction_P Parameter: Timepoint (day) Value: 5
  misc_feature: MA Experiment 20001906 PARAMETER Experiment Name: At_Drought_Reproduction_P Parameter: Tissue Value: Siliques
  misc_feature: MA Experiment 20001906 PARAMETER Experiment Name: At_Drought_Reproduction_P Parameter: Treatment Value: Drought vs. No Drought
acaagctagctgatatgtcgggacggctgcaattccttttttattagtggagaaaaaaacaaaaaaaatacccgaaagagaaaaaaaagatagagatggagaatcacacgaccatgaaagtttcatctcttaattgtatcgatctagccaacgacgatcttaatcattctgttgtttccctcaaacaggcatgtttggattgtggatttttctatgtgatcaatcatgggataagcgaagagttcatggacgatgttttcgagcagagcaagaagctttttgctcttcctttagaagaaaagatgaaagtgttgagaaacgaaaagcatcgaggctatacacctgttcttgatgaacttttagatcccaagaatcaaatcaatggggatcacaaagagggttattacattggaattgaagttcctaaagatgatcctcattgggataagccattctatggtcctaacccttggcctgatgctgatgttttacctggttggcgagaaacaatggagaaatatcatcaagaagcatagagggtttctatggctattgcaagacttttggcgttagcacttgacttggatgtgggatactttgataggacggagatgcttggaaaacctattgcaactatgcgactgttgcggtatcaagggatttctgatccttcgaaaggaatatatgcatgtggagcacattctgacttcggaatgatgactctgttagccactgatggtgtaatgggactccagatatgcaaagataagaacgcgatgccgcagaagtgggaatatgtaccgccgattaaaggagcatttatagtgaatcttggcgatatgctggaacgttggagcaatggcttttttaaatccacgttgcatcgggttcttggaaacggtcaggaacgatattctattccattctttgtggaaccaaatcatgactgtctcgtggagtgtctcccaacctgcaagtcggaaagcgagcttcctaaatatccaccgatcaaatgttcgacatacctcacccagcgttacgaggaaacacatgcgaatttaagcatctaccaccaacaaacatgaatgctctttgtgagatcgacactaggagggagtctacaaaagtaaattttatgtaagttcgttgttagctcaaagcaaagtaaaagatattgtaagaatgtaaggtaagtgaagtttacggccacaccctcccttacttattgggagggatacacatacttatgtcttgtttcaatctatgtatctgtacgaattgacagtctctttaacgtttagaatctacacgggctagacttgtt

SEQ ID NO: 26337 - protein, 179 aa, Arabidopsis thaliana
  peptide (1)..(179): Ceres Seq. ID no. 12334063
  misc_feature (27)..(131): Pfam Name: 2OG-Fe(II) oxygenase superfamily Pfam Description: 2OG-Fe(II) oxygenase superfamily
  misc_feature (1)..(168): Homolog of NCBI NO: 22989061 NR Description: hypothetical protein [Burkholderia fungorum]
  misc_feature (1)..(178): Homolog of NCBI NO: 40742276 NR Description: hypothetical protein AN9175.2 [Aspergillus
  misc_feature (1)..(169): Homolog of NCBI NO: 37536198 NR Description: putative gibberellin oxidase
  misc_feature (1)..(169): Homolog of NCBI NO: 27311283 NR Description: putative gibberellin 20-oxidase
  misc_feature (1)..(173): Homolog of NCBI NO: 18414746 NR Description: gibberellin oxidase-like protein; protein id:
  misc_feature (1)..(170): Homolog of NCBI NO: 7594580 NR Description: hypothetical protein [Arabidopsis thaliana]
  misc_feature (1)..(175): Homolog of NCBI NO: 34906368 NR Description: unnamed protein product [Oryza sativa (japonica
  misc_feature (1)..(177): Homolog of NCBI NO: 15231441 NR Description: putative protein; protein id: At3g46480.1
  misc_feature (1)..(151): Homolog of NCBI NO: 15231442 NR Description: putative protein; protein id: At3g46490.1
  misc_feature (1)..(179): Homolog of NCBI NO: 15219523 NR Description: hyoscyamine 6-dioxygenase hydroxylase, putative
MAIARLLALALDLDVGYFDRTEMLGKPIATMRLLRYQGISDPSKGIYACGAHSDFGMMTLLATDGVMGLQICKDKNAMPQKWEYVPPIKGAFIVNLGDMLERWSNGFFKSTLHRVLGNGQERYSIPFFVEPNHDCLVECLPTCKSESELPKYPPIKCSTYLTQRYEETHANLSIYHQQT

SEQ ID NO: 26338 - protein, 157 aa, Arabidopsis thaliana
  peptide (1)..(157): Ceres Seq. ID no. 12334064
  misc_feature (5)..(109): Pfam Name: 2OG-Fe(II) oxygenase superfamily Pfam Description: 2OG-Fe(II) oxygenase superfamily
  misc_feature (1)..(146): Homolog of NCBI NO: 22989061 NR Description: hypothetical protein [Burkholderia fungorum]
  misc_feature (1)..(156): Homolog of NCBI NO: 40742276 NR Description: hypothetical protein AN9175.2 [Aspergillus
  misc_feature (1)..(147): Homolog of NCBI NO: 37536198 NR Description: putative gibberellin oxidase
  misc_feature (1)..(147): Homolog of NCBI NO: 27311283 NR Description: putative gibberellin 20-oxidase
  misc_feature (1)..(151): Homolog of NCBI NO: 18414746 NR Description: gibberellin oxidase-like protein; protein id:
  misc_feature (1)..(148): Homolog of NCBI NO: 7594580 NR Description: hypothetical protein [Arabidopsis thaliana]
  misc_feature (1)..(153): Homolog of NCBI NO: 34906368 NR Description: unnamed protein product [Oryza sativa (japonica
  misc_feature (1)..(155): Homolog of NCBI NO: 15231441 NR Description: putative protein; protein id: At3g46480.1
  misc_feature (1)..(129): Homolog of NCBI NO: 15231442 NR Description: putative protein; protein id: At3g46490.1
  misc_feature (1)..(157): Homolog of NCBI NO: 15219523 NR Description: hyoscyamine 6-dioxygenase hydroxylase, putative
MLGKPIATMRLLRYQGISDPSKGIYACGAHSDFGMMTLLATDGVMGLQICKDKNAMPQKWEYVPPIKGAFIVNLGDMLERWSNGFFKSTLHRVLGNGQERYSIPFFVEPNHDCLVECLPTCKSESELPKYPPIKCSTYLTQRYEETHANLSIYHQQT

SEQ ID NO: 26339 - protein, 149 aa, Arabidopsis thaliana
  peptide (1)..(149): Ceres Seq. ID no. 12334065
  misc_feature (1)..(101): Pfam Name: 2OG-Fe(II) oxygenase superfamily Pfam Description: 2OG-Fe(II) oxygenase superfamily
  misc_feature (1)..(138): Homolog of NCBI NO: 22989061 NR Description: hypothetical protein [Burkholderia fungorum]
  misc_feature (1)..(148): Homolog of NCBI NO: 40742276 NR Description: hypothetical protein AN9175.2 [Aspergillus
  misc_feature (1)..(139): Homolog of NCBI NO: 37536198 NR Description: putative gibberellin oxidase
  misc_feature (1)..(139): Homolog of NCBI NO: 27311283 NR Description: putative gibberellin 20-oxidase
  misc_feature (1)..(143): Homolog of NCBI NO: 18414746 NR Description: gibberellin oxidase-like protein; protein id:
  misc_feature (1)..(140): Homolog of NCBI NO: 7594580 NR Description: hypothetical protein [Arabidopsis thaliana]
  misc_feature (1)..(145): Homolog of NCBI NO: 34906368 NR Description: unnamed protein product [Oryza sativa (japonica
  misc_feature (1)..(147): Homolog of NCBI NO: 15231441 NR Description: putative protein; protein id: At3g46480.1
  misc_feature (1)..(121): Homolog of NCBI NO: 15231442 NR Description: putative protein; protein id: At3g46490.1
  misc_feature (1)..(149): Homolog of NCBI NO: 15219523 NR Description: hyoscyamine 6-dioxygenase hydroxylase, putative
MRLLRYQGISDPSKGIYACGAHSDFGMMTLLATDGVMGLQICKDKNAMPQKWEYVPPIKGAFIVNLGDMLERWSNGFFKSTLHRVLGNGQERYSIPFFVEPNHDCLVECLPTCKSESELPKYPPIKCSTYLTQRYEETHANLSIYHQQT

SEQ ID NO: 26340 - DNA, 1336 bp, Arabidopsis thaliana
  misc_feature (1)..(1336): Ceres Seq. ID no. 12327627
  misc_feature: MA Experiment ID: 108464 Result: Down-regulated in Transcription
  misc_feature: MA Experiment 108464 PARAMETER Experiment Name: At_Germinating_Seeds_cDNA_P Parameter: Age (day) Value: 4 vs. 0
  misc_feature: MA Experiment 108464 PARAMETER Experiment Name: At_Germinating_Seeds_cDNA_P Parameter: Tissue Value: Germinating Seeds
  misc_feature: MA Experiment ID: 108573 Result: Down-regulated in Transcription
  misc_feature: MA Experiment 108573 PARAMETER Experiment Name: At_Drought_cDNA_P Parameter: Timepoint (hr) Value: 6
  misc_feature: MA Experiment 108573 PARAMETER Experiment Name: At_Drought_cDNA_P Parameter: Tissue Value: Aerial
  misc_feature: MA Experiment 108573 PARAMETER Experiment Name: At_Drought_cDNA_P Parameter: Treatment Value: Drought vs. No Drought
  misc_feature: MA Experiment ID: 108585 Result: Down-regulated in Transcription
  misc_feature: MA Experiment 108585 PARAMETER Experiment Name: At_5mM_NaNP_cDNA_P Parameter: Timepoint (hr) Value: 6
  misc_feature: MA Experiment 108585 PARAMETER Experiment Name: At_5mM_NaNP_cDNA_P Parameter: Tissue Value: Aerial
  misc_feature: MA Experiment 108585 PARAMETER Experiment Name: At_5mM_NaNP_cDNA_P Parameter: Treatment Value: null
  misc_feature: MA Experiment ID: 108595 Result: Down-regulated in Transcription
  misc_feature: MA Experiment 108595 PARAMETER Experiment Name: At_Ler-pi_Ovule_cDNA_P Parameter: Plant Line Value: null
  misc_feature: MA Experiment ID: 20000180 Result: Up-regulated in Transcription
  misc_feature: MA Experiment 20000180 PARAMETER Experiment Name: At_Germinating_Seeds_P Parameter: Age (hr) Value: 24 vs. 0
  misc_feature: MA Experiment 20000180 PARAMETER Experiment Name: At_Germinating_Seeds_P Parameter: Tissue Value: Germinating Seeds
  misc_feature: MA Experiment ID: 20000437 Result: Down-regulated in Transcription
  misc_feature: MA Experiment 20000437 PARAMETER Experiment Name: At_Drought_P Parameter: Age (day) Value: 8
  misc_feature: MA Experiment 20000437 PARAMETER Experiment Name: At_Drought_P Parameter: Organism Value: A. thaliana
  misc_feature: MA Experiment 20000437 PARAMETER Experiment Name: At_Drought_P Parameter: Plant Line Value: WS
  misc_feature: MA Experiment 20000437 PARAMETER Experiment Name: At_Drought_P Parameter: Timepoint (hr) Value: 24
  misc_feature: MA Experiment 20000437 PARAMETER Experiment Name: At_Drought_P Parameter: Tissue Value: Whole Plant
  misc_feature: MA Experiment 20000437 PARAMETER Experiment Name: At_Drought_P Parameter: Treatment Value: Drought vs. No Drought
  misc_feature: MA Experiment ID: 20001557 Result: Up-regulated in Transcription
  misc_feature: MA Experiment 20001557 PARAMETER Experiment Name: At_Drought_Soil_Dry_P Parameter: Age (day) Value: 27
  misc_feature: MA Experiment 20001557 PARAMETER Experiment Name: At_Drought_Soil_Dry_P Parameter: Organism Value: A. thaliana
  misc_feature: MA Experiment 20001557 PARAMETER Experiment Name: At_Drought_Soil_Dry_P Parameter: Plant Line Value: WS
  misc_feature: MA Experiment 20001557 PARAMETER Experiment Name: At_Drought_Soil_Dry_P Parameter: Post Timepoint (hr) Value: 3
  misc_feature: MA Experiment 20001557 PARAMETER Experiment Name: At_Drought_Soil_Dry_P Parameter: Post-Treatment Value: Re-Water vs. No Drought
  misc_feature: MA Experiment 20001557 PARAMETER Experiment Name: At_Drought_Soil_Dry_P Parameter: Timepoint (day) Value: 13
  misc_feature: MA Experiment 20001557 PARAMETER Experiment Name: At_Drought_Soil_Dry_P Parameter: Treatment Value: Drought vs. No Drought
  misc_feature: MA Experiment ID: 20001558 Result: Up-regulated in Transcription
  misc_feature: MA Experiment 20001558 PARAMETER Experiment Name: At_Drought_Soil_Dry_P Parameter: Age (day) Value: 27
  misc_feature: MA Experiment 20001558 PARAMETER Experiment Name: At_Drought_Soil_Dry_P Parameter: Organism Value: A. thaliana
  misc_feature: MA Experiment 20001558 PARAMETER Experiment Name: At_Drought_Soil_Dry_P Parameter: Plant Line Value: WS
  misc_feature: MA Experiment 20001558 PARAMETER Experiment Name: At_Drought_Soil_Dry_P Parameter: Post Timepoint (hr) Value: 6
  misc_feature: MA Experiment 20001558 PARAMETER Experiment Name: At_Drought_Soil_Dry_P Parameter: Post-Treatment Value: Re-Water vs. No Drought
  misc_feature: MA Experiment 20001558 PARAMETER Experiment Name: At_Drought_Soil_Dry_P Parameter: Timepoint (day) Value: 13
  misc_feature: MA Experiment 20001558 PARAMETER Experiment Name: At_Drought_Soil_Dry_P Parameter: Treatment Value: Drought vs. No Drought
aaaaacagcaaacagttttgatgataaaagccatggctctatcttctgccggcgtcgtctctcatcttcatcctccgtcgttttcttcgtcgtcaggtttatccgtcaacagagttctgtttcggaatcggaacgctagtccttgtggtctatctcttccaattctcaatccgtctcggtctgtacttgtttttgctcgtggcaagaatcgaaaaggattcgtgtcttcgtcttcttcgtctccgaagaaaaacaaaaagaaaagtttcgatggagctgataatggaggaggtgaggaggaggaggatccatttgaggcattgtttaatcttttagaagaagatttgaagaatgataactcggatgatgaggagataagtgaggaagagttagaggcattagccgatgagttagctcgagcattgggtgttggtgacgatgttgatgacatcgacttgtctggttcagtcactggtgatgttgatgttgataatgatgatgatgataatgaagatgaagatgatgatgacagcgaagaagatgaaagaccgactaagctgaagaattggcagcttaaaagattggcatatgcattgaaagctgggcgccgtaaaactagtattaaaaatctggcagctgaagtttgtcttgacagggcttatgttcttgaattgcttcgtgacccgcctccaaagctgctaatgctaagtgctacattaccagatgaaaaaccaccagtagcagcacctgagaactcctcacctgatccaagtcctgtggaatcatcatcagctgaagatgttgtggtcgaacctaaggaaaaagtaaaagatgaagcagtccatgtgatgcaacagagatggtctgctcagaaaagagtgaagaaagctcacattgaaacgctagagaaagtttacagaagatcaaaacgacccactaatgctgtggttagcagcattgttcaagtgaccaatcttccaaggaagcgagttttgaagtggtttgaagataaaagagcagaagacggagttccagataagcgagctccatatcaagctccggtttgatctaatattaacgttgagatgggcaatgattttgtatacttgattctcagaaactcatcaacattgtcgtcaaggacaatttgttttggtgatacgaggagtctttatattagtagattctgtccgaatccaatggtgtggctggatatgttagagtactactgtacttaagaaattttaggatatcttgtattcagtttttagttatttccttgctgagattgtgtcttgtagaaaaccgtttcaactttgtttggtttatggcggct

SEQ ID NO: 26341 - protein, 354 aa, Arabidopsis thaliana
  peptide (1)..(354): Ceres Seq. ID no. 12327628
  misc_feature (111)..(185): Pfam Name: Nucleoplasmin Pfam Description: Nucleoplasmin
  misc_feature (79)..(204): Homolog of NCBI NO: 34534595 NR Description: unnamed protein product [Homo sapiens]
  misc_feature (71)..(193): Homolog of NCBI NO: 22024126 NR Description: CG8545-PA [Drosophila melanogaster]
  misc_feature (61)..(181): Homolog of NCBI NO: 18397066 NR Description: expressed protein
  misc_feature (95)..(351): Homolog of NCBI NO: 29367497 NR Description: unknown [Oryza sativa (japonica cultivar-group)]
  misc_feature (11)..(354): Homolog of NCBI NO: 8953389 NR Description: putative protein [Arabidopsis thaliana]
  misc_feature (7)..(354): Homolog of NCBI NO: 30683552 NR Description: expressed protein [Arabidopsis thaliana]
KQQTVLMIKAMALSSAGVVSHLHPPSFSSSSGLSVNRVLFRNRNASPCGLSLPILNPSRSVLVFARGKNRKGFVSSSSSSPKKNKKKSFDGADNGGGEEEEDPFEALFNLLEEDLKNDNSDDEEISEEELEALADELARALGVGDDVDDIDLSGSVTGDVDVDNDDDDNEDEDDDDSEEDERPTKLKNWQLKRLAYALKAGRRKTSIKNLAAEVCLDRAYVLELLRDPPPKLLMLSATLPDEKPPVAAPENSSPDPSPVESSSAEDVVVEPKEKVKDEAVHVMQQRWSAQKRVKKAHIETLEKVYRRSKRPTNAVVSSIVQVTNLPRKRVLKWFEDKRAEDGVPDKRAPYQAPV

SEQ ID NO: 26342 - protein, 348 aa, Arabidopsis thaliana
  peptide (1)..(348): Ceres Seq. ID no. 12327629
  misc_feature (105)..(179): Pfam Name: Nucleoplasmin Pfam Description: Nucleoplasmin
  misc_feature (73)..(198): Homolog of NCBI NO: 34534595 NR Description: unnamed protein product [Homo sapiens]
  misc_feature (65)..(187): Homolog of NCBI NO: 22024126 NR Description: CG8545-PA [Drosophila melanogaster]
  misc_feature (55)..(175): Homolog of NCBI NO: 18397066 NR Description: expressed protein
  misc_feature (89)..(345): Homolog of NCBI NO: 29367497 NR Description: unknown [Oryza sativa (japonica cultivar-group)]
  misc_feature (5)..(348): Homolog of NCBI NO: 8953389 NR Description: putative protein [Arabidopsis thaliana]
  misc_feature (1)..(348): Homolog of NCBI NO: 30683552 NR Description: expressed protein [Arabidopsis thaliana]
MIKAMALSSAGVVSHLHPPSFSSSSGLSVNRVLFRNRNASPCGLSLPILNPSRSVLVFARGKNRKGFVSSSSSSPKKNKKKSFDGADNGGGEEEEDPFEALFNLLEEDLKNDNSDDEEISEEELEALADELARALGVGDDVDDIDLSGSVTGDVDVDNDDDDNEDEDDDDSEEDERPTKLKNWQLKRLAYALKAGRRKTSIKNLAAEVCLDRAYVLELLRDPPPKLLMLSATLPDEKPPVAAPENSSPDPSPVESSSAEDVVVEPKEKVKDEAVHVMQQRWSAQKRVKKAHIETLEKVYRRSKRPTNAVVSSIVQVTNLPRKRVLKWFEDKRAEDGVPDKRAPYQAPV

SEQ ID NO: 26343 - protein, 344 aa, Arabidopsis thaliana
  peptide (1)..(344): Ceres Seq. ID no. 12327630
  misc_feature (101)..(175): Pfam Name: Nucleoplasmin Pfam Description: Nucleoplasmin
  misc_feature (69)..(194): Homolog of NCBI NO: 34534595 NR Description: unnamed protein product [Homo sapiens]
  misc_feature (61)..(183): Homolog of NCBI NO: 22024126 NR Description: CG8545-PA [Drosophila melanogaster]
  misc_feature (51)..(171): Homolog of NCBI NO: 18397066 NR Description: expressed protein
  misc_feature (85)..(341): Homolog of NCBI NO: 29367497 NR Description: unknown [Oryza sativa (japonica cultivar-group)]
  misc_feature (1)..(344): Homolog of NCBI NO: 8953389 NR Description: putative protein [Arabidopsis thaliana]
  misc_feature (1)..(344): Homolog of NCBI NO: 30683552 NR Description: expressed protein [Arabidopsis thaliana]
MALSSAGVVSHLHPPSFSSSSGLSVNRVLFRNRNASPCGLSLPILNPSRSVLVFARGKNRKGFVSSSSSSPKKNKKKSFDGADNGGGEEEEDPFEALFNLLEEDLKNDNSDDEEISEEELEALADELARALGVGDDVDDIDLSGSVTGDVDVDNDDDDNEDEDDDDSEEDERPTKLKNWQLKRLAYALKAGRRKTSIKNLAAEVCLDRAYVLELLRDPPPKLLMLSATLPDEKPPVAAPENSSPDPSPVESSSAEDVVVEPKEKVKDEAVHVMQQRWSAQKRVKKAHIETLEKVYRRSKRPTNAVVSSIVQVTNLPRKRVLKWFEDKRAEDGVPDKRAPYQAPV

SEQ ID NO: 26344 - DNA, 1620 bp, Arabidopsis thaliana
  misc_feature (1)..(1620): Ceres Seq. ID no. 12325289
  misc_feature: MA Experiment ID: 20000234 Result: Down-regulated in Transcription
  misc_feature: MA Experiment 20000234 PARAMETER Experiment Name: At_Siliques_P Parameter: Age (day) Value: 21
  misc_feature: MA Experiment 20000234 PARAMETER Experiment Name: At_Siliques_P Parameter: Organism Value: A. thaliana
  misc_feature: MA Experiment 20000234 PARAMETER Experiment Name: At_Siliques_P Parameter: Plant Line Value: WS
  misc_feature: MA Experiment 20000234 PARAMETER Experiment Name: At_Siliques_P Parameter: Tissue Value: Less Than 5mm Siliques vs. Whole Plant
  misc_feature: MA Experiment ID: 20000235 Result: Down-regulated in Transcription
  misc_feature: MA Experiment 20000235 PARAMETER Experiment Name: At_Siliques_P Parameter: Age (day) Value: 21
  misc_feature: MA Experiment 20000235 PARAMETER Experiment Name: At_Siliques_P Parameter: Organism Value: A. thaliana
  misc_feature: MA Experiment 20000235 PARAMETER Experiment Name: At_Siliques_P Parameter: Plant Line Value: WS
  misc_feature: MA Experiment 20000235 PARAMETER Experiment Name: At_Siliques_P Parameter: Tissue Value: 5-10mm Siliques vs. Whole Plant
  misc_feature: MA Experiment ID: 20000574 Result: Down-regulated in Transcription
  misc_feature: MA Experiment 20000574 PARAMETER Experiment Name: At_100uM_ABA_Mutants__P Parameter: Organism Value: A. thaliana
  misc_feature: MA Experiment 20000574 PARAMETER Experiment Name: At_100uM_ABA_Mutants__P Parameter: Plant Line Value: CS23 vs. Ler wt
  misc_feature: MA Experiment 20000574 PARAMETER Experiment Name: At_100uM_ABA_Mutants__P Parameter: Timepoint (hr) Value: N/A
  misc_feature: MA Experiment 20000574 PARAMETER Experiment Name: At_100uM_ABA_Mutants__P Parameter: Tissue Value: Whole Plant
  misc_feature: MA Experiment 20000574 PARAMETER Experiment Name: At_100uM_ABA_Mutants__P Parameter: Treatment Value: None
  misc_feature: MA Experiment ID: 20001247 Result: Up-regulated in Transcription
  misc_feature: MA Experiment 20001247 PARAMETER Experiment Name: At_Far-red-induction_P Parameter: Age (day) Value: 7
  misc_feature: MA Experiment 20001247 PARAMETER Experiment Name: At_Far-red-induction_P Parameter: Light Value: Far-red vs. White
  misc_feature: MA Experiment 20001247 PARAMETER Experiment Name: At_Far-red-induction_P Parameter: Organism Value: A. thaliana
  misc_feature: MA Experiment 20001247 PARAMETER Experiment Name: At_Far-red-induction_P Parameter: Plant Line Value: Columbia
  misc_feature: MA Experiment 20001247 PARAMETER Experiment Name: At_Far-red-induction_P Parameter: Timepoint (hr) Value: 1
  misc_feature: MA Experiment 20001247 PARAMETER Experiment Name: At_Far-red-induction_P Parameter: Tissue Value: Whole Plant
  misc_feature: MA Experiment ID: 20001450 Result: Up-regulated in Transcription
  misc_feature: MA Experiment 20001450 PARAMETER Experiment Name: At_Far-red-induction_P Parameter: Age (day) Value: 7
  misc_feature: MA Experiment 20001450 PARAMETER Experiment Name: At_Far-red-induction_P Parameter: Light Value: Far-red vs. White
  misc_feature: MA Experiment 20001450 PARAMETER Experiment Name: At_Far-red-induction_P Parameter: Organism Value: A. thaliana
  misc_feature: MA Experiment 20001450 PARAMETER Experiment Name: At_Far-red-induction_P Parameter: Plant Line Value: Columbia
  misc_feature: MA Experiment 20001450 PARAMETER Experiment Name: At_Far-red-induction_P Parameter: Timepoint (hr) Value: 8
  misc_feature: MA Experiment 20001450 PARAMETER Experiment Name: At_Far-red-induction_P Parameter: Tissue Value: Whole Plant
  misc_feature: MA Experiment ID: 20001560 Result: Down-regulated in Transcription
  misc_feature: MA Experiment 20001560 PARAMETER Experiment Name: At_Drought_Soil_Dry_P Parameter: Age (day) Value: 28
  misc_feature: MA Experiment 20001560 PARAMETER Experiment Name: At_Drought_Soil_Dry_P Parameter: Organism Value: A. thaliana
  misc_feature: MA Experiment 20001560 PARAMETER Experiment Name: At_Drought_Soil_Dry_P Parameter: Plant Line Value: WS
  misc_feature: MA Experiment 20001560 PARAMETER Experiment Name: At_Drought_Soil_Dry_P Parameter: Post Timepoint (hr) Value: None
  misc_feature: MA Experiment 20001560 PARAMETER Experiment Name: At_Drought_Soil_Dry_P Parameter: Post-Treatment Value: None
  misc_feature: MA Experiment 20001560 PARAMETER Experiment Name: At_Drought_Soil_Dry_P Parameter: Timepoint (day) Value: 14
  misc_feature: MA Experiment 20001560 PARAMETER Experiment Name: At_Drought_Soil_Dry_P Parameter: Treatment Value: Drought vs. No Drought
aattcatgttattatggtcaacaacagaatctgaatcccatttccccattttcggatcacaataactaacaaaccctagatttctatctatagtccttcgatctgtttctgtgtctccttaaagctgtgatttttgcaattggggtttgtgagattcgatcaattaattgtgtttgttgaatggaccttcttcgattgagagaaaagggtatatttttatctcagagaagaaggaaatggctgatttttatggcgatctctggagtttctggctatggagcttacaaggtttatcatttgccatctgttgccagaaaaaggaagcgtctttttaagcttttcggagccattgtctctgtagctgaattgatctctgattcagctgagaccttaagtatggtatcacgagacgtgaagggttttctcaattcagattcagatgaaatccctaacagcttgaagcagatcgcgaagatcacaacttcgaatgagtttacggattcgctttctagggtttctcaggctgtgactattggtgcctttcgtgggtacaaatccgaatcgtctattggtgattcaggaattgagaaatcatcagactcgagtgttgttgatagagtgattgataaggttttctcagaggctggaactggttttgtttcagttgttgttggtagctttgctaagaatcttgttcttggattttactctggtaaggtagagagtggtgtgaaatgtgagggttctgattcttctgagacacctagatgggtgactttgcttggtgatgacaagtgtagagagcttttagctgattgtattgagagattcaccagcactgcaattggtgtgtatcttgacaagacgatggatatcaatacttatgatcaaatctttgaaggcttgacgaatccgaaacatcaggacagtgtcaaggacgttcttgtttcggtttgtaacggtgctctcgagactattgttaggacatctcacgatgtgtttacatcatcaaggtctaagaatgcgatagaagagatcgaagatgatgatttcaagagtaatggttccgcgagaagcaagatggtttcggaatcaggagatggggtcaagagtaatgggtggactgaggctatcgcaactacattggcagttccgagcaatcggaggtttatgtttgatgtaacaggaagagtaacactagaaacgacgagatcaatcatcgcatttataatggtgaagacatttcaagggttcagaaaaagtattaatgtggttcatgaagaggttacagatagaggacgccaagcagttgaatatgttggagccaaatcttctgttataatcactgtgtgccttgcgttgtacttgcacatcataagcggctgtgttcggaattctcccataggcgtaagccagcatttttagttcttcagatgaagagcagatcatcgatttggttggatataggataatatttgttaggtacacaagatttatcagctcgttgtttatagttggagctgagaatattgtaaagattgtgtgcgtgtattagcacaacttgattcttattgatggatcatggatcatatatatatacatattgaaaaggttcttggc

SEQ ID NO: 26345 - protein, 414 aa, Arabidopsis thaliana
  peptide (1)..(414): Ceres Seq. ID no. 12325290
  misc_feature (11)..(281): Homolog of NCBI NO: 40539064 NR Description: expressed protein [Oryza sativa (japonica
  misc_feature (57)..(412): Homolog of NCBI NO: 22093613 NR Description: hypothetical protein~similar to Arabidopsis
  misc_feature (289)..(407): Homolog of NCBI NO: 14475940 NR Description: unknown protein [Arabidopsis thaliana]
  misc_feature (1)..(299): Homolog of NCBI NO: 14475940 NR Description: unknown protein [Arabidopsis thaliana]
  misc_feature (289)..(414): Homolog of NCBI NO: 18406365 NR Description: expressed protein
  misc_feature (1)..(299): Homolog of NCBI NO: 18406365 NR Description: expressed protein
  misc_feature (289)..(414): Homolog of NCBI NO: 21553547 NR Description: unknown [Arabidopsis thaliana]
  misc_feature (1)..(299): Homolog of NCBI NO: 21553547 NR Description: unknown [Arabidopsis thaliana]
  misc_feature (1)..(414): Homolog of NCBI NO: 18391117 NR Description: expressed protein
  misc_feature (1)..(414): Homolog of NCBI NO: 21554418 NR Description: unknown [Arabidopsis thaliana]
  misc_feature (11)..(281): Homolog of NCBI NO: 40539064 NR Description: expressed protein [Oryza sativa (japonica
  misc_feature (57)..(412): Homolog of NCBI NO: 22093613 NR Description: hypothetical protein~similar to Arabidopsis
  misc_feature (289)..(407): Homolog of NCBI NO: 14475940 NR Description: unknown protein [Arabidopsis thaliana]
  misc_feature (1)..(299): Homolog of NCBI NO: 14475940 NR Description: unknown protein [Arabidopsis thaliana]
  misc_feature (289)..(414): Homolog of NCBI NO: 18406365 NR Description: expressed protein
  misc_feature (1)..(299): Homolog of NCBI NO: 18406365 NR Description: expressed protein
  misc_feature (289)..(414): Homolog of NCBI NO: 21553547 NR Description: unknown [Arabidopsis thaliana]
  misc_feature (1)..(299): Homolog of NCBI NO: 21553547 NR Description: unknown [Arabidopsis thaliana]
  misc_feature (1)..(414): Homolog of NCBI NO: 18391117 NR Description: expressed protein
  misc_feature (1)..(414): Homolog of NCBI NO: 21554418 NR Description: unknown [Arabidopsis thaliana]
MDLLRLREKGIFLSQRRRKWLIFMAISGVSGYGAYKVYHLPSVARKRKRLFKLFGAIVSVAELISDSAETLSMVSRDVKGFLNSDSDEIPNSLKQIAKITTSNEFTDSLSRVSQAVTIGAFRGYKSESSIGDSGIEKSSDSSVVDRVIDKVFSEAGTGFVSVVVGSFAKNLVLGFYSGKVESGVKCEGSDSSETPRWVTLLGDDKCRELLADCIERFTSTAIGVYLDKTMDINTYDQIFEGLTNPKHQDSVKDVLVSVCNGALETIVRTSHDVFTSSRSKNAIEEIEDDDFKSNGSARSKMVSESGDGVKSNGWTEAIATTLAVPSNRRFMFDVTGRVTLETTRSIIAFIMVKTFQGFRKSINVVHEEVTDRGRQAVEYVGAKSSVIITVCLALYLHIISGCVRNSPIGVSQHF

SEQ ID NO: 26346 - protein, 391 aa, Arabidopsis thaliana
  peptide (1)..(391): Ceres Seq. ID no. 12325291
  misc_feature (1)..(258): Homolog of NCBI NO: 40539064 NR Description: expressed protein [Oryza sativa (japonica
  misc_feature (34)..(389): Homolog of NCBI NO: 22093613 NR Description: hypothetical protein~similar to Arabidopsis
  misc_feature (266)..(384): Homolog of NCBI NO: 14475940 NR Description: unknown protein [Arabidopsis thaliana]
  misc_feature (1)..(276): Homolog of NCBI NO: 14475940 NR Description: unknown protein [Arabidopsis thaliana]
  misc_feature (266)..(391): Homolog of NCBI NO: 18406365 NR Description: expressed protein
  misc_feature (1)..(276): Homolog of NCBI NO: 18406365 NR Description: expressed protein
  misc_feature (266)..(391): Homolog of NCBI NO: 21553547 NR Description: unknown [Arabidopsis thaliana]
  misc_feature (1)..(276): Homolog of NCBI NO: 21553547 NR Description: unknown [Arabidopsis thaliana]
  misc_feature (1)..(391): Homolog of NCBI NO: 18391117 NR Description: expressed protein
  misc_feature (1)..(391): Homolog of NCBI NO: 21554418 NR Description: unknown [Arabidopsis thaliana]
  misc_feature (1)..(258): Homolog of NCBI NO: 40539064 NR Description: expressed protein [Oryza sativa (japonica
  misc_feature (34)..(389): Homolog of NCBI NO: 22093613 NR Description: hypothetical protein~similar to Arabidopsis
  misc_feature (266)..(384): Homolog of NCBI NO: 14475940 NR Description: unknown protein [Arabidopsis thaliana]
  misc_feature (1)..(276): Homolog of NCBI NO: 14475940 NR Description: unknown protein [Arabidopsis thaliana]
  misc_feature (266)..(391): Homolog of NCBI NO: 18406365 NR Description: expressed protein
  misc_feature (1)..(276): Homolog of NCBI NO: 18406365 NR Description: expressed protein
  misc_feature (266)..(391): Homolog of NCBI NO: 21553547 NR Description: unknown [Arabidopsis thaliana]
  misc_feature (1)..(276): Homolog of NCBI NO: 21553547 NR Description: unknown [Arabidopsis thaliana]
  misc_feature (1)..(391): Homolog of NCBI NO: 18391117 NR Description: expressed protein
  misc_feature (1)..(391): Homolog of NCBI NO: 21554418 NR Description: unknown [Arabidopsis thaliana]
MAISGVSGYGAYKVYHLPSVARKRKRLFKLFGAIVSVAELISDSAETLSMVSRDVKGFLNSDSDEIPNSLKQIAKITTSNEFTDSLSRVSQAVTIGAFRGYKSESSIGDSGIEKSSDSSVVDRVIDKVFSEAGTGFVSVVVGSFAKNLVLGFYSGKVESGVKCEGSDSSETPRWVTLLGDDKCRELLADCIERFTSTAIGVYLDKTMDINTYDQIFEGLTNPKHQDSVKDVLVSVCNGALETIVRTSHDVFTSSRSKNAIEEIEDDDFKSNGSARSKMVSESGDGVKSNGWTEAIATTLAVPSNRRFMFDVTGRVTLETTRSIIAFIMVKTFQGFRKSINVVHEEVTDRGRQAVEYVGAKSSVIITVCLALYLHIISGCVRNSPIGVSQHF

SEQ ID NO: 26347 - protein, 342 aa, Arabidopsis thaliana
  peptide (1)..(342): Ceres Seq. ID no. 12325292
  misc_feature (1)..(209): Homolog of NCBI NO: 40539064 NR Description: expressed protein [Oryza sativa (japonica
  misc_feature (1)..(340): Homolog of NCBI NO: 22093613 NR Description: hypothetical protein~similar to Arabidopsis
  misc_feature (217)..(335): Homolog of NCBI NO: 14475940 NR Description: unknown protein [Arabidopsis thaliana]
  misc_feature (1)..(227): Homolog of NCBI NO: 14475940 NR Description: unknown protein [Arabidopsis thaliana]
  misc_feature (217)..(342): Homolog of NCBI NO: 18406365 NR Description: expressed protein
  misc_feature (1)..(227): Homolog of NCBI NO: 18406365 NR Description: expressed protein
  misc_feature (217)..(342): Homolog of NCBI NO: 21553547 NR Description: unknown [Arabidopsis thaliana]
  misc_feature (1)..(227): Homolog of NCBI NO: 21553547 NR Description: unknown [Arabidopsis thaliana]
  misc_feature (1)..(342): Homolog of NCBI NO: 18391117 NR Description: expressed protein
  misc_feature (1)..(342): Homolog of NCBI NO: 21554418 NR Description: unknown [Arabidopsis thaliana]
  misc_feature (1)..(209): Homolog of NCBI NO: 40539064 NR Description: expressed protein [Oryza sativa (japonica
  misc_feature (1)..(340): Homolog of NCBI NO: 22093613 NR Description: hypothetical protein~similar to Arabidopsis
  misc_feature (217)..(335): Homolog of NCBI NO: 14475940 NR Description: unknown protein [Arabidopsis thaliana]
  misc_feature (1)..(227): Homolog of NCBI NO: 14475940 NR Description: unknown protein [Arabidopsis thaliana]
  misc_feature (217)..(342): Homolog of NCBI NO: 18406365 NR Description: expressed protein
  misc_feature (1)..(227): Homolog of NCBI NO: 18406365 NR Description: expressed protein
  misc_feature (217)..(342): Homolog of NCBI NO: 21553547 NR Description: unknown [Arabidopsis thaliana]
  misc_feature (1)..(227): Homolog of NCBI NO: 21553547 NR Description: unknown [Arabidopsis thaliana]
  misc_feature (1)..(342): Homolog of NCBI NO: 18391117 NR Description: expressed protein
  misc_feature (1)..(342): Homolog of NCBI NO: 21554418 NR Description: unknown [Arabidopsis thaliana]
MVSRDVKGFLNSDSDEIPNSLKQIAKITTSNEFTDSLSRVSQAVTIGAFRGYKSESSIGDSGIEKSSDSSVVDRVIDKVFSEAGTGFVSVVVGSFAKNLVLGFYSGKVESGVKCEGSDSSETPRWVTLLGDDKCRELLADCIERFTSTAIGVYLDKTMDINTYDQIFEGLTNPKHQDSVKDVLVSVCNGALETIVRTSHDVFTSSRSKNAIEEIEDDDFKSNGSARSKMVSESGDGVKSNGWTEAIATTLAVPSNRRFMFDVTGRVTLETTRSIIAFIMVKTFQGFRKSINVVHEEVTDRGRQAVEYVGAKSSVIITVCLALYLHIISGCVRNSPIGVSQHF

SEQ ID NO: 26348 - DNA, 640 bp, Arabidopsis thaliana
  misc_feature (1)..(640): Ceres Seq. ID no. 12394923
  misc_feature: MA Experiment ID: 108434 Result: Up-regulated in Transcription
  misc_feature: MA Experiment 108434 PARAMETER Experiment Name: At_Root_Tips_cDNA_P Parameter: Tissue Value: Root Tips
  misc_feature: MA Experiment ID: 108462 Result: Down-regulated in Transcription
  misc_feature: MA Experiment 108462 PARAMETER Experiment Name: At_Germinating_Seeds_cDNA_P Parameter: Age (day) Value: 2 vs. 0
  misc_feature: MA Experiment 108462 PARAMETER Experiment Name: At_Germinating_Seeds_cDNA_P Parameter: Tissue Value: Germinating Seeds
  misc_feature: MA Experiment ID: 108463 Result: Down-regulated in Transcription
  misc_feature: MA Experiment 108463 PARAMETER Experiment Name: At_Germinating_Seeds_cDNA_P Parameter: Age (day) Value: 3 vs. 0
  misc_feature: MA Experiment 108463 PARAMETER Experiment Name: At_Germinating_Seeds_cDNA_P Parameter: Tissue Value: Germinating Seeds
  misc_feature: MA Experiment ID: 108464 Result: Down-regulated in Transcription
  misc_feature: MA Experiment 108464 PARAMETER Experiment Name: At_Germinating_Seeds_cDNA_P Parameter: Age (day) Value: 4 vs. 0
  misc_feature: MA Experiment 108464 PARAMETER Experiment Name: At_Germinating_Seeds_cDNA_P Parameter: Tissue Value: Germinating Seeds
  misc_feature: MA Experiment ID: 108572 Result: Down-regulated in Transcription
  misc_feature: MA Experiment 108572 PARAMETER Experiment Name: At_Drought_cDNA_P Parameter: Timepoint (hr) Value: 1
  misc_feature: MA Experiment 108572 PARAMETER Experiment Name: At_Drought_cDNA_P Parameter: Tissue Value: Aerial
  misc_feature: MA Experiment 108572 PARAMETER Experiment Name: At_Drought_cDNA_P Parameter: Treatment Value: Drought vs. No Drought
  misc_feature: MA Experiment ID: 108573 Result: Down-regulated in Transcription
  misc_feature: MA Experiment 108573 PARAMETER Experiment Name: At_Drought_cDNA_P Parameter: Timepoint (hr) Value: 6
  misc_feature: MA Experiment 108573 PARAMETER Experiment Name: At_Drought_cDNA_P Parameter: Tissue Value: Aerial
  misc_feature: MA Experiment 108573 PARAMETER Experiment Name: At_Drought_cDNA_P Parameter: Treatment Value: Drought vs. No Drought
  misc_feature: MA Experiment ID: 108576 Result: Down-regulated in Transcription
  misc_feature: MA Experiment 108576 PARAMETER Experiment Name: At_42deg_Heat_cDNA_P Parameter: Temperature (deg C) Value: 42 vs. 22
  misc_feature: MA Experiment 108576 PARAMETER Experiment Name: At_42deg_Heat_cDNA_P Parameter: Timepoint (hr) Value: 1
  misc_feature: MA Experiment 108576 PARAMETER Experiment Name: At_42deg_Heat_cDNA_P Parameter: Tissue Value: Aerial
  misc_feature: MA Experiment ID: 20000112 Result: Down-regulated in Transcription
  misc_feature: MA Experiment 20000112 PARAMETER Experiment Name: At_42deg_Heat_cDNA_P Parameter: Temperature (deg C) Value: 42 vs. 22
  misc_feature: MA Experiment 20000112 PARAMETER Experiment Name: At_42deg_Heat_cDNA_P Parameter: Timepoint (hr) Value: 2
  misc_feature: MA Experiment 20000112 PARAMETER Experiment Name: At_42deg_Heat_cDNA_P Parameter: Tissue Value: Aerial
  misc_feature: MA Experiment ID: 20000327 Result: Down-regulated in Transcription
  misc_feature: MA Experiment 20000327 PARAMETER Experiment Name: At_42deg_Heat_Sub_P Parameter: Age (day) Value: 14
  misc_feature: MA Experiment 20000327 PARAMETER Experiment Name: At_42deg_Heat_Sub_P Parameter: Organism Value: A. thaliana
  misc_feature: MA Experiment 20000327 PARAMETER Experiment Name: At_42deg_Heat_Sub_P Parameter: Plant Line Value: WS
  misc_feature: MA Experiment 20000327 PARAMETER Experiment Name: At_42deg_Heat_Sub_P Parameter: Temperature (deg C) Value: 42 vs. 22
  misc_feature: MA Experiment 20000327 PARAMETER Experiment Name: At_42deg_Heat_Sub_P Parameter: Timepoint (hr) Value: 1
  misc_feature: MA Experiment 20000327 PARAMETER Experiment Name: At_42deg_Heat_Sub_P Parameter: Tissue Value: Aerial
  misc_feature: MA Experiment ID: 20000328 Result: Down-regulated in Transcription
  misc_feature: MA Experiment 20000328 PARAMETER Experiment Name: At_42deg_Heat_Sub_P Parameter: Age (day) Value: 14
  misc_feature: MA Experiment 20000328 PARAMETER Experiment Name: At_42deg_Heat_Sub_P Parameter: Organism Value: A. thaliana
  misc_feature: MA Experiment 20000328 PARAMETER Experiment Name: At_42deg_Heat_Sub_P Parameter: Plant Line Value: WS
  misc_feature: MA Experiment 20000328 PARAMETER Experiment Name: At_42deg_Heat_Sub_P Parameter: Temperature (deg C) Value: 42 vs. 22
  misc_feature: MA Experiment 20000328 PARAMETER Experiment Name: At_42deg_Heat_Sub_P Parameter: Timepoint (hr) Value: 6
  misc_feature: MA Experiment 20000328 PARAMETER Experiment Name: At_42deg_Heat_Sub_P Parameter: Tissue Value: Aerial
  misc_feature: MA Experiment ID: 20000352 Result: Down-regulated in Transcription
  misc_feature: MA Experiment 20000352 PARAMETER Experiment Name: At_Drought_Sub_P Parameter: Age (day) Value: 7
  misc_feature: MA Experiment 20000352 PARAMETER Experiment Name: At_Drought_Sub_P Parameter: Organism Value: A. thaliana
  misc_feature: MA Experiment 20000352 PARAMETER Experiment Name: At_Drought_Sub_P Parameter: Plant Line Value: WS
  misc_feature: MA Experiment 20000352 PARAMETER Experiment Name: At_Drought_Sub_P Parameter: Timepoint (hr) Value: 6
  misc_feature: MA Experiment 20000352 PARAMETER Experiment Name: At_Drought_Sub_P Parameter: Tissue Value: Whole Plant
  misc_feature: MA Experiment 20000352 PARAMETER Experiment Name: At_Drought_Sub_P Parameter: Treatment Value: Drought vs. No Drought
  misc_feature: MA Experiment ID: 20000355 Result: Up-regulated in Transcription
  misc_feature: MA Experiment 20000355 PARAMETER Experiment Name: At_Siliques_Sub_P Parameter: Age (day) Value: 21
  misc_feature: MA Experiment 20000355 PARAMETER Experiment Name: At_Siliques_Sub_P Parameter: Organism Value: A. thaliana
  misc_feature: MA Experiment 20000355 PARAMETER Experiment Name: At_Siliques_Sub_P Parameter: Plant Line Value: WS
  misc_feature: MA Experiment 20000355 PARAMETER Experiment Name: At_Siliques_Sub_P Parameter: Tissue Value: Less Than 5mm Siliques vs. Whole Plant
  misc_feature: Phenotype: ROSETTE LEAVES Other
  misc_feature: Phenotype: WHOLE PLANT Size-Small
  misc_feature: Phenotype: ROSETTE LEAVES Other
  misc_feature: Phenotype: WHOLE PLANT Size-Small
  misc_feature: Phenotype: INFLORESCENCE Height-Short
  misc_feature: Phenotype: FERTILITY Fertility-Reduced
  misc_feature: Phenotype: ROSETTE LEAVES Other
  misc_feature: Phenotype: WHOLE PLANT Color-Dark Green
  misc_feature: Phenotype: WHOLE PLANT Size-Small
cagcaaaaaaaaaccctaaatttcttcacaaattcagcggcgatgaagttcaatccgcgtgtgagctcttctcgccggaagaacaggaaggctcacttcacagctccttcaagcgtgaggcgcgttctcatgagctcgccgttatccaaggatctccgtaacaaacacaacgtcagatccatgccgattcgtaaagacgacgaagtgcaagttgttcgtgggacgttcaagggaagagaagggaaggtgatgcaggtgtatcgccgcaagtgggtgattcacatcgagagaatcacaagggagaaagtcaacggatccacggtcaacgtcggagtcaatgcttcgaatgtgatgatcactaagctccgtctcgataaggataggaagtcgcttttggagcgtaaggctaatggacgcgccgccgccgataaggagaagggaaccaagttttcagccgaagatgtcatggagaacgtagattgatcttaacgtatggttttttcttcttcttttctagttttctattttgatttcattgatgatgatatgattcagaattcgaagttgaattttgtggttttcttatcaatgtacctcatttatgcttatatttctagctattgaaattggattgagattt

SEQ ID NO: 26349 - protein, 160 aa, Arabidopsis thaliana
  peptide (1)..(160): Ceres Seq. ID no. 12394924
  misc_feature (63)..(96): Pfam Name: KOW motif Pfam Description: KOW motif
  misc_feature (15)..(155): Homolog of NCBI NO: 27729769 NR Description: similar to ribosomal protein L26 - mouse [Rattus
  misc_feature (15)..(155): Homolog of NCBI NO: 132827 NR Description: 60S RIBOSOMAL PROTEIN L26
  misc_feature (15)..(157): Homolog of NCBI NO: 22758898 NR Description: ribosomal protein L26 [Argopecten irradians]
  misc_feature (15)..(155): Homolog of NCBI NO: 4506621 NR Description: ribosomal protein L26; 60S ribosomal protein L26
  misc_feature (15)..(159): Homolog of NCBI NO: 7705813 NR Description: ribosomal protein L26-like 1
  misc_feature (15)..(133): Homolog of NCBI NO: 3747050 NR Description: ribosomal protein L26 [Zea mays]
  misc_feature (15)..(155): Homolog of NCBI NO: 34895672 NR Description: putative ribosomal protein L26
  misc_feature (15)..(159): Homolog of NCBI NO: 3914740 NR Description: 60S ribosomal protein L26
  misc_feature (15)..(160): Homolog of NCBI NO: 15229631 NR Description: 60S RIBOSOMAL PROTEIN - like
  misc_feature (15)..(160): Homolog of NCBI NO: 15240766 NR Description: 60S ribosomal protein L26
QQKKTLNFFTNSAAMKFNPRVSSSRRKNRKAHFTAPSSVRRVLMSSPLSKDLRNKHNVRSMPIRKDDEVQVVRGTFKGREGKVMQVYRRKWVIHIERITREKVNGSTVNVGVNASNVMITKLRLDKDRKSLLERKANGRAAADKEKGTKFSAEDVMENVD

SEQ ID NO: 26350 - protein, 146 aa, Arabidopsis thaliana
  peptide (1)..(146): Ceres Seq. ID no. 12394925
  misc_feature (49)..(82): Pfam Name: KOW motif Pfam Description: KOW motif
  misc_feature (1)..(141): Homolog of NCBI NO: 27729769 NR Description: similar to ribosomal protein L26 - mouse [Rattus
  misc_feature (1)..(141): Homolog of NCBI NO: 132827 NR Description: 60S RIBOSOMAL PROTEIN L26
  misc_feature (1)..(143): Homolog of NCBI NO: 22758898 NR Description: ribosomal protein L26 [Argopecten irradians]
  misc_feature (1)..(141): Homolog of NCBI NO: 4506621 NR Description: ribosomal protein L26; 60S ribosomal protein L26
  misc_feature (1)..(145): Homolog of NCBI NO: 7705813 NR Description: ribosomal protein L26-like 1
  misc_feature (1)..(119): Homolog of NCBI NO: 3747050 NR Description: ribosomal protein L26 [Zea mays]
  misc_feature (1)..(141): Homolog of NCBI NO: 34895672 NR Description: putative ribosomal protein L26
  misc_feature (1)..(145): Homolog of NCBI NO: 3914740 NR Description: 60S ribosomal protein L26
  misc_feature (1)..(146): Homolog of NCBI NO: 15229631 NR Description: 60S RIBOSOMAL PROTEIN - like
  misc_feature (1)..(146): Homolog of NCBI NO: 15240766 NR Description: 60S ribosomal protein L26
MKFNPRVSSSRRKNRKAHFTAPSSVRRVLMSSPLSKDLRNKHNVRSMPIRKDDEVQVVRGTFKGREGKVMQVYRRKWVIHIERITREKVNGSTVNVGVNASNVMITKLRLDKDRKSLLERKANGRAAADKEKGTKFSAEDVMENVD

SEQ ID NO: 26351 - protein, 117 aa, Arabidopsis thaliana
  peptide (1)..(117): Ceres Seq. ID no. 12394926
  misc_feature (20)..(53): Pfam Name: KOW motif Pfam Description: KOW motif
  misc_feature (1)..(112): Homolog of NCBI NO: 27729769 NR Description: similar to ribosomal protein L26 - mouse [Rattus
  misc_feature (1)..(112): Homolog of NCBI NO: 132827 NR Description: 60S RIBOSOMAL PROTEIN L26
  misc_feature (1)..(114): Homolog of NCBI NO: 22758898 NR Description: ribosomal protein L26 [Argopecten irradians]
  misc_feature (1)..(112): Homolog of NCBI NO: 4506621 NR Description: ribosomal protein L26; 60S ribosomal protein L26
  misc_feature (1)..(116): Homolog of NCBI NO: 7705813 NR Description: ribosomal protein L26-like 1
  misc_feature (1)..(90): Homolog of NCBI NO: 3747050 NR Description: ribosomal protein L26 [Zea mays]
  misc_feature (1)..(112): Homolog of NCBI NO: 34895672 NR Description: putative ribosomal protein L26
  misc_feature (1)..(116): Homolog of NCBI NO: 3914740 NR Description: 60S ribosomal protein L26
  misc_feature (1)..(117): Homolog of NCBI NO: 15229631 NR Description: 60S RIBOSOMAL PROTEIN - like
  misc_feature (1)..(117): Homolog of NCBI NO: 15240766 NR Description: 60S ribosomal protein L26
MSSPLSKDLRNKHNVRSMPIRKDDEVQVVRGTFKGREGKVMQVYRRKWVIHIERITREKVNGSTVNVGVNASNVMITKLRLDKDRKSLLERKANGRAAADKEKGTKFSAEDVMENVD

SEQ ID NO: 26352 - DNA, 1323 bp, Arabidopsis thaliana
  misc_feature (1)..(1323): Ceres Seq. ID no. 12714731
  misc_feature: MA Experiment ID: 108462 Result: Down-regulated in Transcription
  misc_feature: MA Experiment 108462 PARAMETER Experiment Name: At_Germinating_Seeds_cDNA_P Parameter: Age (day) Value: 2 vs. 0
  misc_feature: MA Experiment 108462 PARAMETER Experiment Name: At_Germinating_Seeds_cDNA_P Parameter: Tissue Value: Germinating Seeds
  misc_feature: MA Experiment ID: 108463 Result: Down-regulated in Transcription
  misc_feature: MA Experiment 108463 PARAMETER Experiment Name: At_Germinating_Seeds_cDNA_P Parameter: Age (day) Value: 3 vs. 0
  misc_feature: MA Experiment 108463 PARAMETER Experiment Name: At_Germinating_Seeds_cDNA_P Parameter: Tissue Value: Germinating Seeds
  misc_feature: MA Experiment ID: 108464 Result: Down-regulated in Transcription
  misc_feature: MA Experiment 108464 PARAMETER Experiment Name: At_Germinating_Seeds_cDNA_P Parameter: Age (day) Value: 4 vs. 0
  misc_feature: MA Experiment 108464 PARAMETER Experiment Name: At_Germinating_Seeds_cDNA_P Parameter: Tissue Value: Germinating Seeds
  misc_feature: MA Experiment ID: 108473 Result: Down-regulated in Transcription
  misc_feature: MA Experiment 108473 PARAMETER Experiment Name: At_Drought_Flowers_cDNA_P Parameter: Timepoint (hr) Value: 7 d
  misc_feature: MA Experiment 108473 PARAMETER Experiment Name: At_Drought_Flowers_cDNA_P Parameter: Tissue Value: Flower
  misc_feature: MA Experiment 108473 PARAMETER Experiment Name: At_Drought_Flowers_cDNA_P Parameter: Treatment Value: Drought vs. No Drought
  misc_feature: MA Experiment ID: 108605 Result: Up-regulated in Transcription
  misc_feature: MA Experiment 108605 PARAMETER Experiment Name: At_100uM_ABA_cDNA_P Parameter: Timepoint (hr) Value: 6
  misc_feature: MA Experiment 108605 PARAMETER Experiment Name: At_100uM_ABA_cDNA_P Parameter: Tissue Value: Aerial
  misc_feature: MA Experiment 108605 PARAMETER Experiment Name: At_100uM_ABA_cDNA_P Parameter: Treatment Value: 100uM ABA vs. No Treatment
  misc_feature: MA Experiment ID: 108668 Result: Down-regulated in Transcription
  misc_feature: MA Experiment 108668 PARAMETER Experiment Name: At_2mM_SA_cDNA_P Parameter: Plant Line Value: WS
  misc_feature: MA Experiment 108668 PARAMETER Experiment Name: At_2mM_SA_cDNA_P Parameter: Timepoint (hr) Value: 6
  misc_feature: MA Experiment 108668 PARAMETER Experiment Name: At_2mM_SA_cDNA_P Parameter: Treatment Value: 2mM SA vs. No Treatment
  misc_feature: MA Experiment ID: 20000069 Result: Down-regulated in Transcription
  misc_feature: MA Experiment 20000069 PARAMETER Experiment Name: At_100uM_ABA_Mutants_cDNA_P Parameter: Plant Line Value: CS23
  misc_feature: MA Experiment 20000069 PARAMETER Experiment Name: At_100uM_ABA_Mutants_cDNA_P Parameter: Timepoint (hr) Value: 6
  misc_feature: MA Experiment 20000069 PARAMETER Experiment Name: At_100uM_ABA_Mutants_cDNA_P Parameter: Tissue Value: Aerial
  misc_feature: MA Experiment 20000069 PARAMETER Experiment Name: At_100uM_ABA_Mutants_cDNA_P Parameter: Treatment Value: 100uM ABA vs. No Treatment
  misc_feature: MA Experiment ID: 20000072 Result: Down-regulated in Transcription
  misc_feature: MA Experiment 20000072 PARAMETER Experiment Name: At_100uM_ABA_Mutants_cDNA_P Parameter: Plant Line Value: CS8105
  misc_feature: MA Experiment 20000072 PARAMETER Experiment Name: At_100uM_ABA_Mutants_cDNA_P Parameter: Timepoint (hr) Value: 6
  misc_feature: MA Experiment 20000072 PARAMETER Experiment Name: At_100uM_ABA_Mutants_cDNA_P Parameter: Tissue Value: Aerial
  misc_feature: MA Experiment 20000072 PARAMETER Experiment Name: At_100uM_ABA_Mutants_cDNA_P Parameter: Treatment Value: 100uM ABA vs. No Treatment
  misc_feature: MA Experiment ID: 20000087 Result: Down-regulated in Transcription
  misc_feature: MA Experiment 20000087 PARAMETER Experiment Name: At_100uM_ABA_Mutants_cDNA_P Parameter: Plant Line Value: WS
  misc_feature: MA Experiment 20000087 PARAMETER Experiment Name: At_100uM_ABA_Mutants_cDNA_P Parameter: Timepoint (hr) Value: 6
  misc_feature: MA Experiment 20000087 PARAMETER Experiment Name: At_100uM_ABA_Mutants_cDNA_P Parameter: Tissue Value: Aerial
  misc_feature: MA Experiment 20000087 PARAMETER Experiment Name: At_100uM_ABA_Mutants_cDNA_P Parameter: Treatment Value: 100uM ABA vs. No Treatment
  misc_feature: MA Experiment ID: 20000089 Result: Down-regulated in Transcription
  misc_feature: MA Experiment ID: 20000090 Result: Down-regulated in Transcription
  misc_feature: MA Experiment ID: 20000179 Result: Up-regulated in Transcription
  misc_feature: MA Experiment 20000179 PARAMETER Experiment Name: At_Germinating_Seeds_P Parameter: Age (hr) Value: 6 vs. 0
  misc_feature: MA Experiment 20000179 PARAMETER Experiment Name: At_Germinating_Seeds_P Parameter: Tissue Value: Germinating Seeds
  misc_feature: MA Experiment ID: 20000182 Result: Down-regulated in Transcription
  misc_feature: MA Experiment 20000182 PARAMETER Experiment Name: At_2mM_SA_P Parameter: Age (day) Value: 14
  misc_feature: MA Experiment 20000182 PARAMETER Experiment Name: At_2mM_SA_P Parameter: Organism Value: A. thaliana
  misc_feature: MA Experiment 20000182 PARAMETER Experiment Name: At_2mM_SA_P Parameter: Plant Line Value: WS
  misc_feature: MA Experiment 20000182 PARAMETER Experiment Name: At_2mM_SA_P Parameter: Timepoint (hr) Value: 6
  misc_feature: MA Experiment 20000182 PARAMETER Experiment Name: At_2mM_SA_P Parameter: Tissue Value: Aerial
  misc_feature: MA Experiment 20000182 PARAMETER Experiment Name: At_2mM_SA_P Parameter: Treatment Value: 2mM SA vs. No Treatment
  misc_feature: MA Experiment ID: 20000224 Result: Up-regulated in Transcription
  misc_feature: MA Experiment ID: 20000234 Result: Up-regulated in Transcription
  misc_feature: MA Experiment 20000234 PARAMETER Experiment Name: At_Siliques_P Parameter: Age (day) Value: 21
  misc_feature: MA Experiment 20000234 PARAMETER Experiment Name: At_Siliques_P Parameter: Organism Value: A. thaliana
  misc_feature: MA Experiment 20000234 PARAMETER Experiment Name: At_Siliques_P Parameter: Plant Line Value: WS
  misc_feature: MA Experiment 20000234 PARAMETER Experiment Name: At_Siliques_P Parameter: Tissue Value: Less Than 5mm Siliques vs. Whole Plant
  misc_feature: MA Experiment ID: 20000235 Result: Up-regulated in Transcription
  misc_feature: MA Experiment 20000235 PARAMETER Experiment Name: At_Siliques_P Parameter: Age (day) Value: 21
  misc_feature: MA Experiment 20000235 PARAMETER Experiment Name: At_Siliques_P Parameter: Organism Value: A. thaliana
  misc_feature: MA Experiment 20000235 PARAMETER Experiment Name: At_Siliques_P Parameter: Plant Line Value: WS
  misc_feature: MA Experiment 20000235 PARAMETER Experiment Name: At_Siliques_P Parameter: Tissue Value: 5-10mm Siliques vs. Whole Plant
  misc_feature: MA Experiment ID: 20000437 Result: Down-regulated in Transcription
  misc_feature: MA Experiment 20000437 PARAMETER Experiment Name: At_Drought_P Parameter: Age (day) Value: 8
  misc_feature: MA Experiment 20000437 PARAMETER Experiment Name: At_Drought_P Parameter: Organism Value: A. thaliana
  misc_feature: MA Experiment 20000437 PARAMETER Experiment Name: At_Drought_P Parameter: Plant Line Value: WS
  misc_feature: MA Experiment 20000437 PARAMETER Experiment Name: At_Drought_P Parameter: Timepoint (hr) Value: 24
  misc_feature: MA Experiment 20000437 PARAMETER Experiment Name: At_Drought_P Parameter: Tissue Value: Whole Plant
  misc_feature: MA Experiment 20000437 PARAMETER Experiment Name: At_Drought_P Parameter: Treatment Value: Drought vs. No Drought
  misc_feature: MA Experiment ID: 20000573 Result: Down-regulated in Transcription
  misc_feature: MA Experiment 20000573 PARAMETER Experiment Name: At_100uM_ABA_Mutants__P Parameter: Organism Value: A. thaliana
  misc_feature: MA Experiment 20000573 PARAMETER Experiment Name: At_100uM_ABA_Mutants__P Parameter: Plant Line Value: CS22 vs. Ler wt
  misc_feature: MA Experiment 20000573 PARAMETER Experiment Name: At_100uM_ABA_Mutants__P Parameter: Timepoint (hr) Value: N/A
  misc_feature: MA Experiment 20000573 PARAMETER Experiment Name: At_100uM_ABA_Mutants__P Parameter: Tissue Value: Whole Plant
  misc_feature: MA Experiment 20000573 PARAMETER Experiment Name: At_100uM_ABA_Mutants__P Parameter: Treatment Value: None
  misc_feature: MA Experiment ID: 20000574 Result: Down-regulated in Transcription
  misc_feature: MA Experiment 20000574 PARAMETER Experiment Name: At_100uM_ABA_Mutants__P Parameter: Organism Value: A. thaliana
  misc_feature: MA Experiment 20000574 PARAMETER Experiment Name: At_100uM_ABA_Mutants__P Parameter: Plant Line Value: CS23 vs. Ler wt
  misc_feature: MA Experiment 20000574 PARAMETER Experiment Name: At_100uM_ABA_Mutants__P Parameter: Timepoint (hr) Value: N/A
  misc_feature: MA Experiment 20000574 PARAMETER Experiment Name: At_100uM_ABA_Mutants__P Parameter: Tissue Value: Whole Plant
  misc_feature: MA Experiment 20000574 PARAMETER Experiment Name: At_100uM_ABA_Mutants__P Parameter: Treatment Value: None
  misc_feature: MA Experiment ID: 20001248 Result: Down-regulated in Transcription
  misc_feature: MA Experiment 20001248 PARAMETER Experiment Name: At_Far-red-induction_P Parameter: Age (day) Value: 7
  misc_feature: MA Experiment 20001248 PARAMETER Experiment Name: At_Far-red-induction_P Parameter: Light Value: Far-red vs. White
  misc_feature: MA Experiment 20001248 PARAMETER Experiment Name: At_Far-red-induction_P Parameter: Organism Value: A. thaliana
  misc_feature: MA Experiment 20001248 PARAMETER Experiment Name: At_Far-red-induction_P Parameter: Plant Line Value: Columbia
  misc_feature: MA Experiment 20001248 PARAMETER Experiment Name: At_Far-red-induction_P Parameter: Timepoint (hr) Value: 4
  misc_feature: MA Experiment 20001248 PARAMETER Experiment Name: At_Far-red-induction_P Parameter: Tissue Value: Whole Plant
  misc_feature: MA Experiment ID: 20001450 Result: Down-regulated in Transcription
  misc_feature: MA Experiment 20001450 PARAMETER Experiment Name: At_Far-red-induction_P Parameter: Age (day) Value: 7
  misc_feature: MA Experiment 20001450 PARAMETER Experiment Name: At_Far-red-induction_P Parameter: Light Value: Far-red vs. White
  misc_feature: MA Experiment 20001450 PARAMETER Experiment Name: At_Far-red-induction_P Parameter: Organism Value: A. thaliana
  misc_feature: MA Experiment 20001450 PARAMETER Experiment Name: At_Far-red-induction_P Parameter: Plant Line Value: Columbia
  misc_feature: MA Experiment 20001450 PARAMETER Experiment Name: At_Far-red-induction_P Parameter: Timepoint (hr) Value: 8
  misc_feature: MA Experiment 20001450 PARAMETER Experiment Name: At_Far-red-induction_P Parameter: Tissue Value: Whole Plant
  misc_feature: MA Experiment ID: 20001451 Result: Down-regulated in Transcription
  misc_feature: MA Experiment 20001451 PARAMETER Experiment Name: At_Far-red-induction_P Parameter: Age (day) Value: 7
  misc_feature: MA Experiment 20001451 PARAMETER Experiment Name: At_Far-red-induction_P Parameter: Light Value: Far-red vs. White
  misc_feature: MA Experiment 20001451 PARAMETER Experiment Name: At_Far-red-induction_P Parameter: Organism Value: A. thaliana
  misc_feature: MA Experiment 20001451 PARAMETER Experiment Name: At_Far-red-induction_P Parameter: Plant Line Value: Columbia
  misc_feature: MA Experiment 20001451 PARAMETER Experiment Name: At_Far-red-induction_P Parameter: Timepoint (hr) Value: 24
  misc_feature: MA Experiment 20001451 PARAMETER Experiment Name: At_Far-red-induction_P Parameter: Tissue Value: Whole Plant
  misc_feature: MA Experiment ID: 20001558 Result: Up-regulated in Transcription
  misc_feature: MA Experiment 20001558 PARAMETER Experiment Name: At_Drought_Soil_Dry_P Parameter: Age (day) Value: 27
  misc_feature: MA Experiment 20001558 PARAMETER Experiment Name: At_Drought_Soil_Dry_P Parameter: Organism Value: A. thaliana
  misc_feature: MA Experiment 20001558 PARAMETER Experiment Name: At_Drought_Soil_Dry_P Parameter: Plant Line Value: WS
  misc_feature: MA Experiment 20001558 PARAMETER Experiment Name: At_Drought_Soil_Dry_P Parameter: Post Timepoint (hr) Value: 6
  misc_feature: MA Experiment 20001558 PARAMETER Experiment Name: At_Drought_Soil_Dry_P Parameter: Post-Treatment Value: Re-Water vs. No Drought
  misc_feature: MA Experiment 20001558 PARAMETER Experiment Name: At_Drought_Soil_Dry_P Parameter: Timepoint (day) Value: 13
  misc_feature: MA Experiment 20001558 PARAMETER Experiment Name: At_Drought_Soil_Dry_P Parameter: Treatment Value: Drought vs. No Drought
  misc_feature: MA Experiment ID: 20001911 Result: Down-regulated in Transcription
  misc_feature: MA Experiment 20001911 PARAMETER Experiment Name: At_Drought_Reproduction_P Parameter: Age (day) Value: 40
  misc_feature: MA Experiment 20001911 PARAMETER Experiment Name: At_Drought_Reproduction_P Parameter: Organism Value: A. thaliana
  misc_feature: MA Experiment 20001911 PARAMETER Experiment Name: At_Drought_Reproduction_P Parameter: Plant Line Value: WS
  misc_feature: MA Experiment 20001911 PARAMETER Experiment Name: At_Drought_Reproduction_P Parameter: Timepoint (day) Value: 10
  misc_feature: MA Experiment 20001911 PARAMETER Experiment Name: At_Drought_Reproduction_P Parameter: Tissue Value: Flowers
  misc_feature: MA Experiment 20001911 PARAMETER Experiment Name: At_Drought_Reproduction_P Parameter: Treatment Value: Drought vs. No Drought
atcttaaatgcttgctccaattgttcttcccaattaatcgtgaggttcttgttttgcagaagcaaaaaattgaaaaaacttgtgtaaaaagcatgcagcgaaacagagttcttgcgttcttgttgctagcagctcagctcttggtgaagatacctgaaacgtgtgcaaaatttcccgcacttatcgtatttggtgactcaactgttgattcaggcaacaacaaccagatttctactgttctgaagagcaatttccagccatatggccgggattactttgacggcaaagcgactgggagattttcaaatggccggattgcaccagacttcatttctgaaggtttgggactcaagaacgcagtccctgcctacctagatccagcatacaacattgcagactttgccactggtgtctgtttcgcttcagctggaaccggcttagacaatgcaacctctgccgtgttatctgtaatgccgctatggaaggaagtggaatactacaaagaataccaaaccaggctaagaagctacttgggtgaagagaaagctaatgagattattagtgaatcactttacctgattagtatcggaaccaacgatttcctggagaattactatcttcttccccgcaagttacggaagtactcagtgaacgagtaccaatatttcctgataggaatagcagcagatttcgtgacagatatatacagactcggagctcggaagatgtctttgtcgggactctctccttttggatgcttacccctggaaagaacaactcagctcttttatggaagcaaatgtattgaagaatacaacattgtggctagagatttcaacatcaagatggaagagaaagtcttccagttgaacagagatctgaacggaatccagctggtgttttcaaatccatatgaccttgtttcagaaatcatataccatcctgaagcattcggtttcgaaaacgtaagaagtgcgtgttgcggaacgggatactatgagatgagctacttgtgtgataaaatgaacccattcacatgttcggatgcaagcaaatatgtattttgggactcatttcacccaacagagaagacaaacgccatcgtagcaaatcatgttctgaaatacgacttatctcggtttcagtgataaaataagaaattgctacaccacaagcactatagttattagttaacctactaaattctttcctccacaacatatatatttttttctgtgagtttcttgtctagatatcactcaaatcaagcttccaaaatgttgtacaagaaccattcttcttactctatgttcgtgtgactac

SEQ ID NO: 26353 - protein, 381 aa, Arabidopsis thaliana
  peptide (1)..(381): Ceres Seq. ID no. 12714732
  misc_feature (60)..(372): Pfam Name: GDSL-like Lipase/Acylhydrolase Pfam Description: GDSL-like Lipase/Acylhydrolase
  misc_feature (280)..(379): Homolog of NCBI NO: 15229719 NR Description: putative protein; protein id: At3g43570.1
  misc_feature (55)..(266): Homolog of NCBI NO: 15229719 NR Description: putative protein; protein id: At3g43570.1
  misc_feature (58)..(373): Homolog of NCBI NO: 9758010 NR Description: proline-rich protein APG-like [Arabidopsis
  misc_feature (36)..(379): Homolog of NCBI NO: 15217977 NR Description: proline-rich protein, putative; protein id:
  misc_feature (58)..(379): Homolog of NCBI NO: 18406327 NR Description: proline-rich protein, putative; protein id:
  misc_feature (81)..(375): Homolog of NCBI NO: 15224201 NR Description: putative APG isolog protein; protein id:
  misc_feature (56)..(380): Homolog of NCBI NO: 15228157 NR Description: putative GDSL-motif lipase/hydrolase
  misc_feature (56)..(380): Homolog of NCBI NO: 21593518 NR Description: putative GDSL-motif lipase/hydrolase [Arabidopsis
  misc_feature (31)..(381): Homolog of NCBI NO: 7485330 NR Description: hypothetical protein F10M23.130 - Arabidopsis
  misc_feature (31)..(381): Homolog of NCBI NO: 18416824 NR Description: putative APG protein
LKCLLQLFFPINREVLVLQKQKIEKTCVKSMQRNRVLAFLLLAAQLLVKIPETCAKFPALIVFGDSTVDSGNNNQISTVLKSNFQPYGRDYFDGKATGRFSNGRIAPDFISEGLGLKNAVPAYLDPAYNIADFATGVCFASAGTGLDNATSAVLSVMPLWKEVEYYKEYQTRLRSYLGEEKANEIISESLYLISIGTNDFLENYYLLPRKLRKYSVNEYQYFLIGIAADFVTDIYRLGARKMSLSGLSPFGCLPLERTTQLFYGSKCIEEYNIVARDFNIKMEEKVFQLNRDLNGIQLVFSNPYDLVSEIIYHPEAFGFENVRSACCGTGYYEMSYLCDKMNPFTCSDASKYVFWDSFHPTEKTNAIVANHVLKYDLSRFQ

SEQ ID NO: 26354 - protein, 351 aa, Arabidopsis thaliana
  peptide (1)..(351): Ceres Seq. ID no. 12714733
  misc_feature (30)..(342): Pfam Name: GDSL-like Lipase/Acylhydrolase Pfam Description: GDSL-like Lipase/Acylhydrolase
  misc_feature (250)..(349): Homolog of NCBI NO: 15229719 NR Description: putative protein; protein id: At3g43570.1
  misc_feature (25)..(236): Homolog of NCBI NO: 15229719 NR Description: putative protein; protein id: At3g43570.1
  misc_feature (28)..(343): Homolog of NCBI NO: 9758010 NR Description: proline-rich protein APG-like [Arabidopsis
  misc_feature (6)..(349): Homolog of NCBI NO: 15217977 NR Description: proline-rich protein, putative; protein id:
  misc_feature (28)..(349): Homolog of NCBI NO: 18406327 NR Description: proline-rich protein, putative; protein id:
  misc_feature (51)..(345): Homolog of NCBI NO: 15224201 NR Description: putative APG isolog protein; protein id:
  misc_feature (26)..(350): Homolog of NCBI NO: 15228157 NR Description: putative GDSL-motif lipase/hydrolase
  misc_feature (26)..(350): Homolog of NCBI NO: 21593518 NR Description: putative GDSL-motif lipase/hydrolase [Arabidopsis
  misc_feature (1)..(351): Homolog of NCBI NO: 7485330 NR Description: hypothetical protein F10M23.130 - Arabidopsis
  misc_feature (1)..(351): Homolog of NCBI NO: 18416824 NR Description: putative APG protein
MQRNRVLAFLLLAAQLLVKIPETCAKFPALIVFGDSTVDSGNNNQISTVLKSNFQPYGRDYFDGKATGRFSNGRIAPDFISEGLGLKNAVPAYLDPAYNIADFATGVCFASAGTGLDNATSAVLSVMPLWKEVEYYKEYQTRLRSYLGEEKANEIISESLYLISIGTNDFLENYYLLPRKLRKYSVNEYQYFLIGIAADFVTDIYRLGARKMSLSGLSPFGCLPLERTTQLFYGSKCIEEYNIVARDFNIKMEEKVFQLNRDLNGIQLVFSNPYDLVSEIIYHPEAFGFENVRSACCGTGYYEMSYLCDKMNPFTCSDASKYVFWDSFHPTEKTNAIVANHVLKYDLSRFQ

SEQ ID NO: 26355 - protein, 225 aa, Arabidopsis thaliana
  peptide (1)..(225): Ceres Seq. ID no. 12714734
  misc_feature (1)..(216): Pfam Name: GDSL-like Lipase/Acylhydrolase Pfam Description: GDSL-like Lipase/Acylhydrolase
  misc_feature (124)..(223): Homolog of NCBI NO: 15229719 NR Description: putative protein; protein id: At3g43570.1
  misc_feature (1)..(110): Homolog of NCBI NO: 15229719 NR Description: putative protein; protein id: At3g43570.1
  misc_feature (1)..(217): Homolog of NCBI NO: 9758010 NR Description: proline-rich protein APG-like [Arabidopsis
  misc_feature (1)..(223): Homolog of NCBI NO: 15217977 NR Description: proline-rich protein, putative; protein id:
  misc_feature (1)..(223): Homolog of NCBI NO: 18406327 NR Description: proline-rich protein, putative; protein id:
  misc_feature (1)..(219): Homolog of NCBI NO: 15224201 NR Description: putative APG isolog protein; protein id:
  misc_feature (1)..(224): Homolog of NCBI NO: 15228157 NR Description: putative GDSL-motif lipase/hydrolase
  misc_feature (1)..(224): Homolog of NCBI NO: 21593518 NR Description: putative GDSL-motif lipase/hydrolase [Arabidopsis
  misc_feature (1)..(225): Homolog of NCBI NO: 7485330 NR Description: hypothetical protein F10M23.130 - Arabidopsis
  misc_feature (1)..(225): Homolog of NCBI NO: 18416824 NR Description: putative APG protein
MPLWKEVEYYKEYQTRLRSYLGEEKANEIISESLYLISIGTNDFLENYYLLPRKLRKYSVNEYQYFLIGIAADFVTDIYRLGARKMSLSGLSPFGCLPLERTTQLFYGSKCIEEYNIVARDFNIKMEEKVFQLNRDLNGIQLVFSNPYDLVSEIIYHPEAFGFENVRSACCGTGYYEMSYLCDKMNPFTCSDASKYVFWDSFHPTEKTNAIVANHVLKYDLSRFQ

SEQ ID NO: 26356 - DNA, 1329 bp, Arabidopsis thaliana
  misc_feature (1)..(1329): Ceres Seq. ID no. 12395764
  misc_feature: MA Experiment ID: 108594 Result: Up-regulated in Transcription
  misc_feature: MA Experiment 108594 PARAMETER Experiment Name: At_Ler-rhl_Root_cDNA_P Parameter: Plant Line Value: null
  misc_feature: MA Experiment ID: 108595 Result: Down-regulated in Transcription
  misc_feature: MA Experiment 108595 PARAMETER Experiment Name: At_Ler-pi_Ovule_cDNA_P Parameter: Plant Line Value: null
  misc_feature: MA Experiment ID: 20000185 Result: Up-regulated in Transcription
  misc_feature: MA Experiment 20000185 PARAMETER Experiment Name: At_Roots__P Parameter: Age (day) Value: 7 vs. 21
  misc_feature: MA Experiment 20000185 PARAMETER Experiment Name: At_Roots__P Parameter: Organism Value: A. thaliana
  misc_feature: MA Experiment 20000185 PARAMETER Experiment Name: At_Roots__P Parameter: Tissue Value: Roots vs. Whole Plant
  misc_feature: MA Experiment ID: 20000439 Result: Up-regulated in Transcription
  misc_feature: MA Experiment 20000439 PARAMETER Experiment Name: At_Roots__P Parameter: Age (day) Value: 14 vs. 21
  misc_feature: MA Experiment 20000439 PARAMETER Experiment Name: At_Roots__P Parameter: Organism Value: A. thaliana
  misc_feature: MA Experiment 20000439 PARAMETER Experiment Name: At_Roots__P Parameter: Tissue Value: Roots vs. Whole Plant
  misc_feature: MA Experiment ID: 20000794 Result: Up-regulated in Transcription
  misc_feature: MA Experiment 20000794 PARAMETER Experiment Name: At_Petals_P Parameter: Age (day) Value: 23-25 days
  misc_feature: MA Experiment 20000794 PARAMETER Experiment Name: At_Petals_P Parameter: Plant Line Value: WS
  misc_feature: MA Experiment 20000794 PARAMETER Experiment Name: At_Petals_P Parameter: Tissue Value: Petals vs. Whole plant
  misc_feature: MA Experiment ID: 20001905 Result: Up-regulated in Transcription
  misc_feature: MA Experiment 20001905 PARAMETER Experiment Name: At_Drought_Reproduction_P Parameter: Age (day) Value: 40
  misc_feature: MA Experiment 20001905 PARAMETER Experiment Name: At_Drought_Reproduction_P Parameter: Organism Value: A. thaliana
  misc_feature: MA Experiment 20001905 PARAMETER Experiment Name: At_Drought_Reproduction_P Parameter: Plant Line Value: WS
  misc_feature: MA Experiment 20001905 PARAMETER Experiment Name: At_Drought_Reproduction_P Parameter: Timepoint (day) Value: 10
  misc_feature: MA Experiment 20001905 PARAMETER Experiment Name: At_Drought_Reproduction_P Parameter: Tissue Value: Rosettes
  misc_feature: MA Experiment 20001905 PARAMETER Experiment Name: At_Drought_Reproduction_P Parameter: Treatment Value: Drought vs. No Drought
aaaggattccgaaaaaaagcttagacctttttgatctgatacgtatctataaatctggaaaggagctgagagtttcaaggggttttaatttcgctgagaaaacgtttaattatctttgtcgagatggattgtggtatggagaattgtaatggtgggatctcaaacggtgacgttttgggtaagcatgagaagctcattatcgatacagacccaggaattgatgatagcatggcgatattgatggcgtttcaaacaccggagctggagatattaggattaactactgtgtttggtaatgtttctacacaagatgctactcgcaacgctttactcttgtgtgagattgctggcttccctgatgttcccgttgcagaaggaagttccgaacctttaaagggtggaattccgcgtgttgctgattttgtgcatggtaaaaacggactaggagatgtctctcttcctcctccgagtagaaagaaatctgagaaaagtgcagctgagtttctagatgagaaggtcgaagaatatccgggtgaagtcaccattctcgccctcggacctctaaccaacctggcattagccatcaaacgcgatagttcatttgcgagcaaggtgaagaaaattgttattcttggtggagctttcttttctttgggaaatgtcaatcctgcagctgaggctaatatatatggtgacccggaagcagctgatgttgttttcacatctggagcggatatcactgttgtcggtataaacatcacaacccaacttaaactatcagatgatgacctcttggagcttggtaactgcaaggggaaacactctaaattgataagcgatatgtgcaaattttatagagattggcacgtcaaatctgatggtgtttacggagtgtacctccatgacccagtcagctttgtggctgtagtacggcctgatttattcacatataagaaaggcgttgttcgggtggagactcaagggatatgtgttggccacacgctcatggatcaaggcctcaagagatggaacggaagcaatccgtgggtgggatattcaccgatatcagttgcttggacggttgacgtagaaggagttttggaatatgtcaaagcaaagctgatgaagccataaaagatgagtttcagagcacgttagagtgtgaatattcatttaaaatggcatcatcacattcatctcttctggttctaaccggaatcttatattcatctctgtatttgatctgtataaatgctatattcgattaaaagaaaagactaatgaatgaaaactatcttcgttttctcttatcgatctttgtttctttcc

SEQ ID NO: 26357 - protein, 336 aa, Arabidopsis thaliana
  peptide (1)..(336): Ceres Seq. ID no. 12395765
  misc_feature (21)..(333): Pfam Name: Inosine-uridine preferring nucleoside hydrolase Pfam Description: Inosine-uridine preferring nucleoside hydrolase
  misc_feature (23)..(326): Homolog of NCBI NO: 22984963 NR Description: hypothetical protein [Burkholderia fungorum]
  misc_feature (19)..(335): Homolog of NCBI NO: 17935486 NR Description: inosine-uridine preferring nucleoside hydrolase
  misc_feature (19)..(335): Homolog of NCBI NO: 15888904 NR Description: AGR_C_2923p [Agrobacterium tumefaciens]
  misc_feature (221)..(335): Homolog of NCBI NO: 25321071 NR Description: hypothetical protein [imported] - Arabidopsis
  misc_feature (18)..(225): Homolog of NCBI NO: 25321071 NR Description: hypothetical protein [imported] - Arabidopsis
  misc_feature (18)..(335): Homolog of NCBI NO: 18390550 NR Description: expressed protein
  misc_feature (22)..(333): Homolog of NCBI NO: 30089728 NR Description: putative inosine-uridine preferring nucleoside
  misc_feature (231)..(302): Homolog of NCBI NO: 25321061 NR Description: hypothetical protein At2g36310 [imported] -
  misc_feature (36)..(256): Homolog of NCBI NO: 25321061 NR Description: hypothetical protein At2g36310 [imported] -
  misc_feature (1)..(336): Homolog of NCBI NO: 18404099 NR Description: expressed protein
MDCGMENCNGGISNGDVLGKHEKLIIDTDPGIDDSMAILMAFQTPELEILGLTTVFGNVSTQDATRNALLLCEIAGFPDVPVAEGSSEPLKGGIPRVADFVHGKNGLGDVSLPPPSRKKSEKSAAEFLDEKVEEYPGEVTILALGPLTNLALAIKRDSSFASKVKKIVILGGAFFSLGNVNPAAEANIYGDPEAADVVFTSGADITVVGINITTQLKLSDDDLLELGNCKGKHSKLISDMCKFYRDWHVKSDGVYGVYLHDPVSFVAVVRPDLFTYKKGVVRVETQGICVGHTLMDQGLKRWNGSNPWVGYSPISVAWTVDVEGVLEYVKAKLMKP

SEQ ID NO: 26358 - protein, 332 aa, Arabidopsis thaliana
  peptide (1)..(332): Ceres Seq. ID no. 12395766
  misc_feature (17)..(329): Pfam Name: Inosine-uridine preferring nucleoside hydrolase Pfam Description: Inosine-uridine preferring nucleoside hydrolase
  misc_feature (19)..(322): Homolog of NCBI NO: 22984963 NR Description: hypothetical protein [Burkholderia fungorum]
  misc_feature (15)..(331): Homolog of NCBI NO: 17935486 NR Description: inosine-uridine preferring nucleoside hydrolase
  misc_feature (15)..(331): Homolog of NCBI NO: 15888904 NR Description: AGR_C_2923p [Agrobacterium tumefaciens]
  misc_feature (217)..(331): Homolog of NCBI NO: 25321071 NR Description: hypothetical protein [imported] - Arabidopsis
  misc_feature (14)..(221): Homolog of NCBI NO: 25321071 NR Description: hypothetical protein [imported] - Arabidopsis
  misc_feature (14)..(331): Homolog of NCBI NO: 18390550 NR Description: expressed protein
  misc_feature (18)..(329): Homolog of NCBI NO: 30089728 NR Description: putative inosine-uridine preferring nucleoside
  misc_feature (227)..(298): Homolog of NCBI NO: 25321061 NR Description: hypothetical protein At2g36310 [imported] -
  misc_feature (32)..(252): Homolog of NCBI NO: 25321061 NR Description: hypothetical protein At2g36310 [imported] -
  misc_feature (1)..(332): Homolog of NCBI NO: 18404099 NR Description: expressed protein
MENCNGGISNGDVLGKHEKLIIDTDPGIDDSMAILMAFQTPELEILGLTTVFGNVSTQDATRNALLLCEIAGFPDVPVAEGSSEPLKGGIPRVADFVHGKNGLGDVSLPPPSRKKSEKSAAEFLDEKVEEYPGEVTILALGPLTNLALAIKRDSSFASKVKKIVILGGAFFSLGNVNPAAEANIYGDPEAADVVFTSGADITVVGINITTQLKLSDDDLLELGNCKGKHSKLISDMCKFYRDWHVKSDGVYGVYLHDPVSFVAVVRPDLFTYKKGVVRVETQGICVGHTLMDQGLKRWNGSNPWVGYSPISVAWTVDVEGVLEYVKAKLMKP

SEQ ID NO: 26359 - protein, 301 aa, Arabidopsis thaliana
  peptide (1)..(301): Ceres Seq. ID no. 12395767
  misc_feature (1)..(298): Pfam Name: Inosine-uridine preferring nucleoside hydrolase Pfam Description: Inosine-uridine preferring nucleoside hydrolase
  misc_feature (1)..(291): Homolog of NCBI NO: 22984963 NR Description: hypothetical protein [Burkholderia fungorum]
  misc_feature (1)..(300): Homolog of NCBI NO: 17935486 NR Description: inosine-uridine preferring nucleoside hydrolase
  misc_feature (1)..(300): Homolog of NCBI NO: 15888904 NR Description: AGR_C_2923p [Agrobacterium tumefaciens]
  misc_feature (186)..(300): Homolog of NCBI NO: 25321071 NR Description: hypothetical protein [imported] - Arabidopsis
  misc_feature (1)..(190): Homolog of NCBI NO: 25321071 NR Description: hypothetical protein [imported] - Arabidopsis
  misc_feature (1)..(300): Homolog of NCBI NO: 18390550 NR Description: expressed protein
  misc_feature (1)..(298): Homolog of NCBI NO: 30089728 NR Description: putative inosine-uridine preferring nucleoside
  misc_feature (196)..(267): Homolog of NCBI NO: 25321061 NR Description: hypothetical protein At2g36310 [imported] -
  misc_feature (1)..(221): Homolog of NCBI NO: 25321061 NR Description: hypothetical protein At2g36310 [imported] -
  misc_feature (1)..(301): Homolog of NCBI NO: 18404099 NR Description: expressed protein
MAILMAFQTPELEILGLTTVFGNVSTQDATRNALLLCEIAGFPDVPVAEGSSEPLKGGIPRVADFVHGKNGLGDVSLPPPSRKKSEKSAAEFLDEKVEEYPGEVTILALGPLTNLALAIKRDSSFASKVKKIVILGGAFFSLGNVNPAAEANIYGDPEAADVVFTSGADITVVGINITTQLKLSDDDLLELGNCKGKHSKLISDMCKFYRDWHVKSDGVYGVYLHDPVSFVAVVRPDLFTYKKGVVRVETQGICVGHTLMDQGLKRWNGSNPWVGYSPISVAWTVDVEGVLEYVKAKLMKP

SEQ ID NO: 26360 - DNA, 1178 bp, Arabidopsis thaliana
  misc_feature (1)..(1178): Ceres Seq. ID no. 12333778
  misc_feature: MA Experiment ID: 108462 Result: Up-regulated in Transcription
  misc_feature: MA Experiment 108462 PARAMETER Experiment Name: At_Germinating_Seeds_cDNA_P Parameter: Age (day) Value: 2 vs. 0
  misc_feature: MA Experiment 108462 PARAMETER Experiment Name: At_Germinating_Seeds_cDNA_P Parameter: Tissue Value: Germinating Seeds
  misc_feature: MA Experiment ID: 108595 Result: Down-regulated in Transcription
  misc_feature: MA Experiment 108595 PARAMETER Experiment Name: At_Ler-pi_Ovule_cDNA_P Parameter: Plant Line Value: null
  misc_feature: MA Experiment ID: 20000307 Result: Up-regulated in Transcription
  misc_feature: MA Experiment 20000307 PARAMETER Experiment Name: At_Germinating_Seeds_Sub_P Parameter: Age (hr) Value: 24 vs. 0
  misc_feature: MA Experiment 20000307 PARAMETER Experiment Name: At_Germinating_Seeds_Sub_P Parameter: Organism Value: A. thaliana
  misc_feature: MA Experiment 20000307 PARAMETER Experiment Name: At_Germinating_Seeds_Sub_P Parameter: Plant Line Value: WS
  misc_feature: MA Experiment 20000307 PARAMETER Experiment Name: At_Germinating_Seeds_Sub_P Parameter: Tissue Value: Germinating Seeds
  misc_feature: MA Experiment ID: 20000314 Result: Up-regulated in Transcription
  misc_feature: MA Experiment 20000314 PARAMETER Experiment Name: At_14day_Shoots-Roots_Sub_P Parameter: Age (day) Value: 14
  misc_feature: MA Experiment 20000314 PARAMETER Experiment Name: At_14day_Shoots-Roots_Sub_P Parameter: Organism Value: A. thaliana
  misc_feature: MA Experiment 20000314 PARAMETER Experiment Name: At_14day_Shoots-Roots_Sub_P Parameter: Plant Line Value: WS
  misc_feature: MA Experiment 20000314 PARAMETER Experiment Name: At_14day_Shoots-Roots_Sub_P Parameter: Tissue Value: Roots vs. Whole Plant
  misc_feature: MA Experiment ID: 20000315 Result: Up-regulated in Transcription
  misc_feature: MA Experiment 20000315 PARAMETER Experiment Name: At_14day_Shoots-Roots_Sub_P Parameter: Age (day) Value: 14
  misc_feature: MA Experiment 20000315 PARAMETER Experiment Name: At_14day_Shoots-Roots_Sub_P Parameter: Organism Value: A. thaliana
  misc_feature: MA Experiment 20000315 PARAMETER Experiment Name: At_14day_Shoots-Roots_Sub_P Parameter: Plant Line Value: WS
  misc_feature: MA Experiment 20000315 PARAMETER Experiment Name: At_14day_Shoots-Roots_Sub_P Parameter: Tissue Value: Shoots vs. Whole Plant
attaaacgcaacaaatcaaaagtaataatccaaattatatatacatatatgcaccatttggttaaaaactaagaagaaaccaaaatgagaagttttactaatttaaatccttgctacgttctcttaccgttcttccttgtcctagccacgaatgcaacacatacaaacaatttcctcccaaggccacggactgggtattacggtagtgcatgctggaatgtagaatcgatagttcggtccgtggttgagtctaactatcttgctaatccagccaatgctccaggcattttgcgtatgcactttcacgattgtttcgttcaaggctgtgacgcctccgttctcctagccggacctaactctgagcgaacggcgattccaaatctatcgttgagagggtttaatgtcattgaagaagctaagactcagcttgagatcgcttgtcctcgaacagtctcttgtgctgatatcctcgcactcgctgcacgtgacttcgtccatttggccggtggaccatggtggccagttccattggggagactcgatggccgaatttctctagcctcgaatgtcattttgccgggacctaccgactccgttgccgtgcagaagctgaggtttgccgaaaaaaatcttaatacccaagatctcgttgtccttgctgctggacatacgataggaacggccggatgtattgtgtttagggacagattcttcaactacgacaacacaggaagtccggacccaaccatcgccccgagttttgtccctctgatccaagctcaatgccctctgaatggtgaccccgcgactcgtgtagtgctggacacgggaagtggtgaccaatttgatacgtcgtaccttaacaacttgaagaacggtcgaggtctcctcgagtctgatcaggtcctatggactaatctcgagacccgacccatcgtggaaaggcttctaggactacggtttccgtttcttattttcggactggagttcgcgaggtccatgaccaagatgagtcaaatcgagatcaagacgggtttggatggggagattcgtagggtttgttctgcggttaactaattaatataagattaattaaccattacaatatgatataaagtaatgaataaaaatggagattatatagactctccagcttttaataataaaccagctagttt

SEQ ID NO: 26361 - protein, 330 aa, Arabidopsis thaliana
  peptide (1)..(330): Ceres Seq. ID no. 12333779
  misc_feature (50)..(291): Pfam Name: Peroxidase Pfam Description: Peroxidase
  misc_feature (35)..(330): Homolog of NCBI NO: 19698452 NR Description: bacterial-induced gaiacol peroxidase [Gossypium
  misc_feature (35)..(330): Homolog of NCBI NO: 129808 NR Description: Cationic peroxidase 2 precursor (PNPC2)
  misc_feature (3)..(330): Homolog of NCBI NO: 17066703 NR Description: peroxidase [Capsicum annuum]
  misc_feature (8)..(330): Homolog of NCBI NO: 18558997 NR Description: bacterial-induced peroxidase [Gossypium hirsutum]
  misc_feature (6)..(330): Homolog of NCBI NO: 7433065 NR Description: peroxidase (EC 1.11.1.7) precursor,
  misc_feature (14)..(330): Homolog of NCBI NO: 5381255 NR Description: peroxidase [Nicotiana tabacum]
  misc_feature (35)..(330): Homolog of NCBI NO: 15237615 NR Description: peroxidase, putative
  misc_feature (35)..(330): Homolog of NCBI NO: 21592403 NR Description: peroxidase [Arabidopsis thaliana]
  misc_feature (8)..(330): Homolog of NCBI NO: 15237613 NR Description: peroxidase, putative
  misc_feature (1)..(330): Homolog of NCBI NO: 15237614 NR Description: peroxidase, putative
MRSFTNLNPCYVLLPFFLVLATNATHTNNFLPRPRTGYYGSACWNVESIVRSVVESNYLANPANAPGILRMHFHDCFVQGCDASVLLAGPNSERTAIPNLSLRGFNVIEEAKTQLEIACPRTVSCADILALAARDFVHLAGGPWWPVPLGRLDGRISLASNVILPGPTDSVAVQKLRFAEKNLNTQDLVVLAAGHTIGTAGCIVFRDRFFNYDNTGSPDPTIAPSFVPLIQAQCPLNGDPATRVVLDTGSGDQFDTSYLNNLKNGRGLLESDQVLWTNLETRPIVERLLGLRFPFLIFGLEFARSMTKMSQIEIKTGLDGEIRRVCSAVN

SEQ ID NO: 26362 - protein, 260 aa, Arabidopsis thaliana
  peptide (1)..(260): Ceres Seq. ID no. 12333780
  misc_feature (1)..(221): Pfam Name: Peroxidase Pfam Description: Peroxidase
  misc_feature (1)..(260): Homolog of NCBI NO: 19698452 NR Description: bacterial-induced gaiacol peroxidase [Gossypium
  misc_feature (1)..(260): Homolog of NCBI NO: 129808 NR Description: Cationic peroxidase 2 precursor (PNPC2)
  misc_feature (1)..(260): Homolog of NCBI NO: 17066703 NR Description: peroxidase [Capsicum annuum]
  misc_feature (1)..(260): Homolog of NCBI NO: 18558997 NR Description: bacterial-induced peroxidase [Gossypium hirsutum]
  misc_feature (1)..(260): Homolog of NCBI NO: 7433065 NR Description: peroxidase (EC 1.11.1.7) precursor,
  misc_feature (1)..(260): Homolog of NCBI NO: 5381255 NR Description: peroxidase [Nicotiana tabacum]
  misc_feature (1)..(260): Homolog of NCBI NO: 15237615 NR Description: peroxidase, putative
  misc_feature (1)..(260): Homolog of NCBI NO: 21592403 NR Description: peroxidase [Arabidopsis thaliana]
  misc_feature (1)..(260): Homolog of NCBI NO: 15237613 NR Description: peroxidase, putative
  misc_feature (1)..(260): Homolog of NCBI NO: 15237614 NR Description: peroxidase, putative
MHFHDCFVQGCDASVLLAGPNSERTAIPNLSLRGFNVIEEAKTQLEIACPRTVSCADILALAARDFVHLAGGPWWPVPLGRLDGRISLASNVILPGPTDSVAVQKLRFAEKNLNTQDLVVLAAGHTIGTAGCIVFRDRFFNYDNTGSPDPTIAPSFVPLIQAQCPLNGDPATRVVLDTGSGDQFDTSYLNNLKNGRGLLESDQVLWTNLETRPIVERLLGLRFPFLIFGLEFARSMTKMSQIEIKTGLDGEIRRVCSAVN

SEQ ID NO: 26363 - DNA, 1332 bp, Arabidopsis thaliana
  misc_feature (1)..(1332): Ceres Seq. ID no. 13493921
  misc_feature: MA Experiment ID: 108462 Result: Up-regulated in Transcription
  misc_feature: MA Experiment 108462 PARAMETER Experiment Name: At_Germinating_Seeds_cDNA_P Parameter: Age (day) Value: 2 vs. 0
  misc_feature: MA Experiment 108462 PARAMETER Experiment Name: At_Germinating_Seeds_cDNA_P Parameter: Tissue Value: Germinating Seeds
  misc_feature: MA Experiment ID: 108463 Result: Up-regulated in Transcription
  misc_feature: MA Experiment 108463 PARAMETER Experiment Name: At_Germinating_Seeds_cDNA_P Parameter: Age (day) Value: 3 vs. 0
  misc_feature: MA Experiment 108463 PARAMETER Experiment Name: At_Germinating_Seeds_cDNA_P Parameter: Tissue Value: Germinating Seeds
  misc_feature: MA Experiment ID: 108464 Result: Up-regulated in Transcription
  misc_feature: MA Experiment 108464 PARAMETER Experiment Name: At_Germinating_Seeds_cDNA_P Parameter: Age (day) Value: 4 vs. 0
  misc_feature: MA Experiment 108464 PARAMETER Experiment Name: At_Germinating_Seeds_cDNA_P Parameter: Tissue Value: Germinating Seeds
  misc_feature: MA Experiment ID: 108579 Result: Up-regulated in Transcription
  misc_feature: MA Experiment 108579 PARAMETER Experiment Name: At_4deg_Cold_cDNA_P Parameter: Temperature (deg C) Value: 4 vs. 22
  misc_feature: MA Experiment 108579 PARAMETER Experiment Name: At_4deg_Cold_cDNA_P Parameter: Timepoint (hr) Value: 6
  misc_feature: MA Experiment 108579 PARAMETER Experiment Name: At_4deg_Cold_cDNA_P Parameter: Tissue Value: Aerial
  misc_feature: MA Experiment ID: 20000180 Result: Up-regulated in Transcription
  misc_feature: MA Experiment 20000180 PARAMETER Experiment Name: At_Germinating_Seeds_P Parameter: Age (hr) Value: 24 vs. 0
  misc_feature: MA Experiment 20000180 PARAMETER Experiment Name: At_Germinating_Seeds_P Parameter: Tissue Value: Germinating Seeds
  misc_feature: MA Experiment ID: 20000495 Result: Down-regulated in Transcription
  misc_feature: MA Experiment 20000495 PARAMETER Experiment Name: At_Guard_Cells_P Parameter: Harvest Date Value: 8/2/2002
  misc_feature: MA Experiment 20000495 PARAMETER Experiment Name: At_Guard_Cells_P Parameter: Organism Value: A. thaliana
  misc_feature: MA Experiment 20000495 PARAMETER Experiment Name: At_Guard_Cells_P Parameter: Tissue Value: Guard Cells vs. Leaves
  misc_feature: MA Experiment ID: 20000573 Result: Down-regulated in Transcription
  misc_feature: MA Experiment 20000573 PARAMETER Experiment Name: At_100uM_ABA_Mutants__P Parameter: Organism Value: A. thaliana
  misc_feature: MA Experiment 20000573 PARAMETER Experiment Name: At_100uM_ABA_Mutants__P Parameter: Plant Line Value: CS22 vs. Ler wt
  misc_feature: MA Experiment 20000573 PARAMETER Experiment Name: At_100uM_ABA_Mutants__P Parameter: Timepoint (hr) Value: N/A
  misc_feature: MA Experiment 20000573 PARAMETER Experiment Name: At_100uM_ABA_Mutants__P Parameter: Tissue Value: Whole Plant
  misc_feature: MA Experiment 20000573 PARAMETER Experiment Name: At_100uM_ABA_Mutants__P Parameter: Treatment Value: None
  misc_feature: MA Experiment ID: 20000794 Result: Up-regulated in Transcription
  misc_feature: MA Experiment 20000794 PARAMETER Experiment Name: At_Petals_P Parameter: Age (day) Value: 23-25 days
  misc_feature: MA Experiment 20000794 PARAMETER Experiment Name: At_Petals_P Parameter: Plant Line Value: WS
  misc_feature: MA Experiment 20000794 PARAMETER Experiment Name: At_Petals_P Parameter: Tissue Value: Petals vs. Whole plant
  misc_feature: MA Experiment ID: 20001248 Result: Down-regulated in Transcription
  misc_feature: MA Experiment 20001248 PARAMETER Experiment Name: At_Far-red-induction_P Parameter: Age (day) Value: 7
  misc_feature: MA Experiment 20001248 PARAMETER Experiment Name: At_Far-red-induction_P Parameter: Light Value: Far-red vs. White
  misc_feature: MA Experiment 20001248 PARAMETER Experiment Name: At_Far-red-induction_P Parameter: Organism Value: A. thaliana
  misc_feature: MA Experiment 20001248 PARAMETER Experiment Name: At_Far-red-induction_P Parameter: Plant Line Value: Columbia
  misc_feature: MA Experiment 20001248 PARAMETER Experiment Name: At_Far-red-induction_P Parameter: Timepoint (hr) Value: 4
  misc_feature: MA Experiment 20001248 PARAMETER Experiment Name: At_Far-red-induction_P Parameter: Tissue Value: Whole Plant
  misc_feature: MA Experiment ID: 20001450 Result: Down-regulated in Transcription
  misc_feature: MA Experiment 20001450 PARAMETER Experiment Name: At_Far-red-induction_P Parameter: Age (day) Value: 7
  misc_feature: MA Experiment 20001450 PARAMETER Experiment Name: At_Far-red-induction_P Parameter: Light Value: Far-red vs. White
  misc_feature: MA Experiment 20001450 PARAMETER Experiment Name: At_Far-red-induction_P Parameter: Organism Value: A. thaliana
  misc_feature: MA Experiment 20001450 PARAMETER Experiment Name: At_Far-red-induction_P Parameter: Plant Line Value: Columbia
  misc_feature: MA Experiment 20001450 PARAMETER Experiment Name: At_Far-red-induction_P Parameter: Timepoint (hr) Value: 8
  misc_feature: MA Experiment 20001450 PARAMETER Experiment Name: At_Far-red-induction_P Parameter: Tissue Value: Whole Plant
  misc_feature: MA Experiment ID: 20001451 Result: Down-regulated in Transcription
  misc_feature: MA Experiment 20001451 PARAMETER Experiment Name: At_Far-red-induction_P Parameter: Age (day) Value: 7
  misc_feature: MA Experiment 20001451 PARAMETER Experiment Name: At_Far-red-induction_P Parameter: Light Value: Far-red vs. White
  misc_feature: MA Experiment 20001451 PARAMETER Experiment Name: At_Far-red-induction_P Parameter: Organism Value: A. thaliana
  misc_feature: MA Experiment 20001451 PARAMETER Experiment Name: At_Far-red-induction_P Parameter: Plant Line Value: Columbia
  misc_feature: MA Experiment 20001451 PARAMETER Experiment Name: At_Far-red-induction_P Parameter: Timepoint (hr) Value: 24
  misc_feature: MA Experiment 20001451 PARAMETER Experiment Name: At_Far-red-induction_P Parameter: Tissue Value: Whole Plant
tggaagatcatcacaagcaaagaaaatggagagcgattcagagatggttccgtttcctcaactaccgatgccaatagaaaacaactacagagcttgcacaattccttacagatttccttctgatgatcccaagaaagccactccaaatgaaatctcgtggatcaacgtcttcgccaattccattccttctttcaagaaacgtgcagagagcgatatcactgttccagatgctcctgctagagctgaaaaatttgcagaaagatatgctgggattcttgaagacttgaagaaagatccagagagtcatggcggaccaccagatggcattcttctatgccgacttcgtgagcaagtactcagagagttaggatttagggacatattcaagaaagttaaggatgaggagaatgcaaaggctatatcactatttcctcaagttgtcagtctgagtgatgctattgaagatgacggaaaacggttagagaatttggtgagagggatatttgctggaaacatctttgatcttggttctgcacagcttgctgaagttttctcaagggatggtatgtctttcttggctagctgtcaaaacttggttccacgaccatgggtcattgatgacttggaaaacttccaagccaaatggatcaataagtcttggaagaaggcagtgatttttgttgataattctggtgcagacataattttgggtattttgccgtttgcaagagagttgctccgtcgaggagctcaggtggtgctggctgctaatgagctgccatctatcaatgacataacatgtaccgagcttacagaaatcttgtcacagttgaaggatgaaaatggccaattgctaggtgttgatacttcgaagcttctgattgcaaattcggggaatgacttaccagttatcgatctctcaagagtatcacaggagcttgcttacctttcatctgatgccgacttagtcatcgtagaaggcatgggtcgtggaattgagacaaacctttatgctcagttcaagtgtgattctctcaagattggaatggtgaagcatcttgaagtagcagagtttctcggaggacggctctatgactgtgtcttcaaattcaatgaagttcagagctaattagtatttcagtactctccagtctcacttctctcttactgtcatttttaattcaaaacatagggtacaaaaagtaatatttttccatcttgatatggtaaatcaatttgaaacaaaaatatttattcgtttgtgatggactgatggataaaatggaaaccataactaaaccaactatatacactctaataaagggacttgtt

SEQ ID NO: 26364 - protein, 375 aa, Arabidopsis thaliana
  peptide (1)..(375): Ceres Seq. ID no. 13493922
  misc_feature (55)..(370): Pfam Name: Protein of unknown function DUF89 Pfam Description: Protein of unknown function DUF89
  misc_feature (15)..(179): Homolog of NCBI NO: 7486028 NR Description: hypothetical protein F23E12.80 - Arabidopsis
  misc_feature (172)..(231): Homolog of NCBI NO: 15227811 NR Description: expressed protein [Arabidopsis thaliana]
  misc_feature (271)..(375): Homolog of NCBI NO: 15227811 NR Description: expressed protein [Arabidopsis thaliana]
  misc_feature (15)..(181): Homolog of NCBI NO: 15227811 NR Description: expressed protein [Arabidopsis thaliana]
  misc_feature (251)..(375): Homolog of NCBI NO: 25370535 NR Description: hypothetical protein At2g17340 [imported] -
  misc_feature (9)..(175): Homolog of NCBI NO: 25370535 NR Description: hypothetical protein At2g17340 [imported] -
  misc_feature (9)..(374): Homolog of NCBI NO: 18418688 NR Description: expressed protein [Arabidopsis thaliana]
  misc_feature (9)..(374): Homolog of NCBI NO: 21554145 NR Description: unknown [Arabidopsis thaliana]
  misc_feature (9)..(375): Homolog of NCBI NO: 21554574 NR Description: unknown [Arabidopsis thaliana]
  misc_feature (9)..(375): Homolog of NCBI NO: 18398388 NR Description: expressed protein [Arabidopsis thaliana]
GRSSQAKKMESDSEMVPFPQLPMPIENNYRACTIPYRFPSDDPKKATPNEISWINVFANSIPSFKKRAESDITVPDAPARAEKFAERYAGILEDLKKDPESHGGPPDGILLCRLREQVLRELGFRDIFKKVKDEENAKAISLFPQVVSLSDAIEDDGKRLENLVRGIFAGNIFDLGSAQLAEVFSRDGMSFLASCQNLVPRPWVIDDLENFQAKWINKSWKKAVIFVDNSGADIILGILPFARELLRRGAQVVLAANELPSINDITCTELTEILSQLKDENGQLLGVDTSKLLIANSGNDLPVIDLSRVSQELAYLSSDADLVIVEGMGRGIETNLYAQFKCDSLKIGMVKHLEVAEFLGGRLYDCVFKFNEVQS

SEQ ID NO: 26365 - protein, 367 aa, Arabidopsis thaliana
  peptide (1)..(367): Ceres Seq. ID no. 13493923
  misc_feature (47)..(362): Pfam Name: Protein of unknown function DUF89 Pfam Description: Protein of unknown function DUF89
  misc_feature (7)..(171): Homolog of NCBI NO: 7486028 NR Description: hypothetical protein F23E12.80 - Arabidopsis
  misc_feature (164)..(223): Homolog of NCBI NO: 15227811 NR Description: expressed protein [Arabidopsis thaliana]
  misc_feature (263)..(367): Homolog of NCBI NO: 15227811 NR Description: expressed protein [Arabidopsis thaliana]
  misc_feature (7)..(173): Homolog of NCBI NO: 15227811 NR Description: expressed protein [Arabidopsis thaliana]
  misc_feature (243)..(367): Homolog of NCBI NO: 25370535 NR Description: hypothetical protein At2g17340 [imported] -
  misc_feature (1)..(167): Homolog of NCBI NO: 25370535 NR Description: hypothetical protein At2g17340 [imported] -
  misc_feature (1)..(366): Homolog of NCBI NO: 18418688 NR Description: expressed protein [Arabidopsis thaliana]
  misc_feature (1)..(366): Homolog of NCBI NO: 21554145 NR Description: unknown [Arabidopsis thaliana]
  misc_feature (1)..(367): Homolog of NCBI NO: 21554574 NR Description: unknown [Arabidopsis thaliana]
  misc_feature (1)..(367): Homolog of NCBI NO: 18398388 NR Description: expressed protein [Arabidopsis thaliana]
MESDSEMVPFPQLPMPIENNYRACTIPYRFPSDDPKKATPNEISWINVFANSIPSFKKRAESDITVPDAPARAEKFAERYAGILEDLKKDPESHGGPPDGILLCRLREQVLRELGFRDIFKKVKDEENAKAISLFPQVVSLSDAIEDDGKRLENLVRGIFAGNIFDLGSAQLAEVFSRDGMSFLASCQNLVPRPWVIDDLENFQAKWINKSWKKAVIFVDNSGADIILGILPFARELLRRGAQVVLAANELPSINDITCTELTEILSQLKDENGQLLGVDTSKLLIANSGNDLPVIDLSRVSQELAYLSSDADLVIVEGMGRGIETNLYAQFKCDSLKIGMVKHLEVAEFLGGRLYDCVFKFNEVQS

SEQ ID NO: 26366 - protein, 361 aa, Arabidopsis thaliana
  peptide (1)..(361): Ceres Seq. ID no. 13493924
  misc_feature (41)..(356): Pfam Name: Protein of unknown function DUF89 Pfam Description: Protein of unknown function DUF89
  misc_feature (1)..(165): Homolog of NCBI NO: 7486028 NR Description: hypothetical protein F23E12.80 - Arabidopsis
  misc_feature (158)..(217): Homolog of NCBI NO: 15227811 NR Description: expressed protein [Arabidopsis thaliana]
  misc_feature (257)..(361): Homolog of NCBI NO: 15227811 NR Description: expressed protein [Arabidopsis thaliana]
  misc_feature (1)..(167): Homolog of NCBI NO: 15227811 NR Description: expressed protein [Arabidopsis thaliana]
  misc_feature (237)..(361): Homolog of NCBI NO: 25370535 NR Description: hypothetical protein At2g17340 [imported] -
  misc_feature (1)..(161): Homolog of NCBI NO: 25370535 NR Description: hypothetical protein At2g17340 [imported] -
  misc_feature (1)..(360): Homolog of NCBI NO: 18418688 NR Description: expressed protein [Arabidopsis thaliana]
  misc_feature (1)..(360): Homolog of NCBI NO: 21554145 NR Description: unknown [Arabidopsis thaliana]
  misc_feature (1)..(361): Homolog of NCBI NO: 21554574 NR Description: unknown [Arabidopsis thaliana]
  misc_feature (1)..(361): Homolog of NCBI NO: 18398388 NR Description: expressed protein [Arabidopsis thaliana]
MVPFPQLPMPIENNYRACTIPYRFPSDDPKKATPNEISWINVFANSIPSFKKRAESDITVPDAPARAEKFAERYAGILEDLKKDPESHGGPPDGILLCRLREQVLRELGFRDIFKKVKDEENAKAISLFPQVVSLSDAIEDDGKRLENLVRGIFAGNIFDLGSAQLAEVFSRDGMSFLASCQNLVPRPWVIDDLENFQAKWINKSWKKAVIFVDNSGADIILGILPFARELLRRGAQVVLAANELPSINDITCTELTEILSQLKDENGQLLGVDTSKLLIANSGNDLPVIDLSRVSQELAYLSSDADLVIVEGMGRGIETNLYAQFKCDSLKIGMVKHLEVAEFLGGRLYDCVFKFNEVQS

SEQ ID NO: 26367 - DNA, 1150 bp, Arabidopsis thaliana
  misc_feature (1)..(1150): Ceres Seq. ID no. 12327126
  misc_feature: MA Experiment ID: 108434 Result: Down-regulated in Transcription
  misc_feature: MA Experiment 108434 PARAMETER Experiment Name: At_Root_Tips_cDNA_P Parameter: Tissue Value: Root Tips
  misc_feature: MA Experiment ID: 108435 Result: Up-regulated in Transcription
  misc_feature: MA Experiment 108435 PARAMETER Experiment Name: At_stm_Mutants_cDNA_P Parameter: Plant Line Value: wt Landsburg vs stm
  misc_feature: MA Experiment 108435 PARAMETER Experiment Name: At_stm_Mutants_cDNA_P Parameter: Tissue Value: Shoot Apical Meristem Region
  misc_feature: MA Experiment ID: 108461 Result: Up-regulated in Transcription
  misc_feature: MA Experiment 108461 PARAMETER Experiment Name: At_Germinating_Seeds_cDNA_P Parameter: Age (day) Value: 1 vs. 0
  misc_feature: MA Experiment 108461 PARAMETER Experiment Name: At_Germinating_Seeds_cDNA_P Parameter: Tissue Value: Germinating Seeds
  misc_feature: MA Experiment ID: 108462 Result: Up-regulated in Transcription
  misc_feature: MA Experiment 108462 PARAMETER Experiment Name: At_Germinating_Seeds_cDNA_P Parameter: Age (day) Value: 2 vs. 0
  misc_feature: MA Experiment 108462 PARAMETER Experiment Name: At_Germinating_Seeds_cDNA_P Parameter: Tissue Value: Germinating Seeds
  misc_feature: MA Experiment ID: 108463 Result: Up-regulated in Transcription
  misc_feature: MA Experiment 108463 PARAMETER Experiment Name: At_Germinating_Seeds_cDNA_P Parameter: Age (day) Value: 3 vs. 0
  misc_feature: MA Experiment 108463 PARAMETER Experiment Name: At_Germinating_Seeds_cDNA_P Parameter: Tissue Value: Germinating Seeds
  misc_feature: MA Experiment ID: 108469 Result: Up-regulated in Transcription
  misc_feature: MA Experiment ID: 108501 Result: Down-regulated in Transcription
  misc_feature: MA Experiment 108501 PARAMETER Experiment Name: At_ap2_floral_buds_cDNA_P Parameter: Plant Line Value: ap2 (Ler.)
  misc_feature: MA Experiment 108501 PARAMETER Experiment Name: At_ap2_floral_buds_cDNA_P Parameter: Tissue Value: Closed Flower
  misc_feature: MA Experiment ID: 108573 Result: Up-regulated in Transcription
  misc_feature: MA Experiment 108573 PARAMETER Experiment Name: At_Drought_cDNA_P Parameter: Timepoint (hr) Value: 6
  misc_feature: MA Experiment 108573 PARAMETER Experiment Name: At_Drought_cDNA_P Parameter: Tissue Value: Aerial
  misc_feature: MA Experiment 108573 PARAMETER Experiment Name: At_Drought_cDNA_P Parameter: Treatment Value: Drought vs. No Drought
  misc_feature: MA Experiment ID: 108579 Result: Down-regulated in Transcription
  misc_feature: MA Experiment 108579 PARAMETER Experiment Name: At_4deg_Cold_cDNA_P Parameter: Temperature (deg C) Value: 4 vs. 22
  misc_feature: MA Experiment 108579 PARAMETER Experiment Name: At_4deg_Cold_cDNA_P Parameter: Timepoint (hr) Value: 6
  misc_feature: MA Experiment 108579 PARAMETER Experiment Name: At_4deg_Cold_cDNA_P Parameter: Tissue Value: Aerial
  misc_feature: MA Experiment ID: 108605 Result: Up-regulated in Transcription
  misc_feature: MA Experiment 108605 PARAMETER Experiment Name: At_100uM_ABA_cDNA_P Parameter: Timepoint (hr) Value: 6
  misc_feature: MA Experiment 108605 PARAMETER Experiment Name: At_100uM_ABA_cDNA_P Parameter: Tissue Value: Aerial
  misc_feature: MA Experiment 108605 PARAMETER Experiment Name: At_100uM_ABA_cDNA_P Parameter: Treatment Value: 100uM ABA vs. No Treatment
  misc_feature: MA Experiment ID: 108667 Result: Up-regulated in Transcription
  misc_feature: MA Experiment 108667 PARAMETER Experiment Name: At_2mM_SA_cDNA_P Parameter: Plant Line Value: WS
  misc_feature: MA Experiment 108667 PARAMETER Experiment Name: At_2mM_SA_cDNA_P Parameter: Timepoint (hr) Value: 1
  misc_feature: MA Experiment 108667 PARAMETER Experiment Name: At_2mM_SA_cDNA_P Parameter: Treatment Value: 2mM SA vs. No Treatment
  misc_feature: MA Experiment ID: 108668 Result: Up-regulated in Transcription
  misc_feature: MA Experiment 108668 PARAMETER Experiment Name: At_2mM_SA_cDNA_P Parameter: Plant Line Value: WS
  misc_feature: MA Experiment 108668 PARAMETER Experiment Name: At_2mM_SA_cDNA_P Parameter: Timepoint (hr) Value: 6
  misc_feature: MA Experiment 108668 PARAMETER Experiment Name: At_2mM_SA_cDNA_P Parameter: Treatment Value: 2mM SA vs. No Treatment
  misc_feature: MA Experiment ID: 20000182 Result: Up-regulated in Transcription
  misc_feature: MA Experiment 20000182 PARAMETER Experiment Name: At_2mM_SA_P Parameter: Age (day) Value: 14
  misc_feature: MA Experiment 20000182 PARAMETER Experiment Name: At_2mM_SA_P Parameter: Organism Value: A. thaliana
  misc_feature: MA Experiment 20000182 PARAMETER Experiment Name: At_2mM_SA_P Parameter: Plant Line Value: WS
  misc_feature: MA Experiment 20000182 PARAMETER Experiment Name: At_2mM_SA_P Parameter: Timepoint (hr) Value: 6
  misc_feature: MA Experiment 20000182 PARAMETER Experiment Name: At_2mM_SA_P Parameter: Tissue Value: Aerial
  misc_feature: MA Experiment 20000182 PARAMETER Experiment Name: At_2mM_SA_P Parameter: Treatment Value: 2mM SA vs. No Treatment
  misc_feature: MA Experiment ID: 20000184 Result: Down-regulated in Transcription
  misc_feature: MA Experiment 20000184 PARAMETER Experiment Name: At_Shoots__P Parameter: Age (day) Value: 7
  misc_feature: MA Experiment 20000184 PARAMETER Experiment Name: At_Shoots__P Parameter: Tissue Value: Shoots vs. Whole Plant
  misc_feature: MA Experiment ID: 20000224 Result: Up-regulated in Transcription
  misc_feature: MA Experiment ID: 20000227 Result: Down-regulated in Transcription
  misc_feature: MA Experiment 20000227 PARAMETER Experiment Name: At_Root-Tips-vs-Tops_P Parameter: Tissue Value: Root Tips vs. Root Tops
  misc_feature: MA Experiment ID: 20000234 Result: Down-regulated in Transcription
  misc_feature: MA Experiment 20000234 PARAMETER Experiment Name: At_Siliques_P Parameter: Age (day) Value: 21
  misc_feature: MA Experiment 20000234 PARAMETER Experiment Name: At_Siliques_P Parameter: Organism Value: A. thaliana
  misc_feature: MA Experiment 20000234 PARAMETER Experiment Name: At_Siliques_P Parameter: Plant Line Value: WS
  misc_feature: MA Experiment 20000234 PARAMETER Experiment Name: At_Siliques_P Parameter: Tissue Value: Less Than 5mm Siliques vs. Whole Plant
  misc_feature: MA Experiment ID: 20000235 Result: Down-regulated in Transcription
  misc_feature: MA Experiment 20000235 PARAMETER Experiment Name: At_Siliques_P Parameter: Age (day) Value: 21
  misc_feature: MA Experiment 20000235 PARAMETER Experiment Name: At_Siliques_P Parameter: Organism Value: A. thaliana
  misc_feature: MA Experiment 20000235 PARAMETER Experiment Name: At_Siliques_P Parameter: Plant Line Value: WS
  misc_feature: MA Experiment 20000235 PARAMETER Experiment Name: At_Siliques_P Parameter: Tissue Value: 5-10mm Siliques vs. Whole Plant
  misc_feature: MA Experiment ID: 20000264 Result: Down-regulated in Transcription
  misc_feature: MA Experiment 20000264 PARAMETER Experiment Name: At_Open_Flower_P Parameter: Age (day) Value: 21
  misc_feature: MA Experiment 20000264 PARAMETER Experiment Name: At_Open_Flower_P Parameter: Plant Line Value: WS
  misc_feature: MA Experiment 20000264 PARAMETER Experiment Name: At_Open_Flower_P Parameter: Tissue Value: Open Flower vs. Whole Plant
  misc_feature: MA Experiment ID: 20000265 Result: Down-regulated in Transcription
  misc_feature: MA Experiment 20000265 PARAMETER Experiment Name: At_Open_Flower_P Parameter: Age (day) Value: 21
  misc_feature: MA Experiment 20000265 PARAMETER Experiment Name: At_Open_Flower_P Parameter: Plant Line Value: WS
  misc_feature: MA Experiment 20000265 PARAMETER Experiment Name: At_Open_Flower_P Parameter: Tissue Value: Closed Flower vs. Whole Plant
  misc_feature: MA Experiment ID: 20000286 Result: Down-regulated in Transcription
  misc_feature: MA Experiment 20000286 PARAMETER Experiment Name: At_Open_Flower_P Parameter: Age (day) Value: 21
  misc_feature: MA Experiment 20000286 PARAMETER Experiment Name: At_Open_Flower_P Parameter: Plant Line Value: WS
  misc_feature: MA Experiment 20000286 PARAMETER Experiment Name: At_Open_Flower_P Parameter: Tissue Value: Half Open vs. Whole Plant
  misc_feature: MA Experiment ID: 20000437 Result: Down-regulated in Transcription
  misc_feature: MA Experiment 20000437 PARAMETER Experiment Name: At_Drought_P Parameter: Age (day) Value: 8
  misc_feature: MA Experiment 20000437 PARAMETER Experiment Name: At_Drought_P Parameter: Organism Value: A. thaliana
  misc_feature: MA Experiment 20000437 PARAMETER Experiment Name: At_Drought_P Parameter: Plant Line Value: WS
  misc_feature: MA Experiment 20000437 PARAMETER Experiment Name: At_Drought_P Parameter: Timepoint (hr) Value: 24
  misc_feature: MA Experiment 20000437 PARAMETER Experiment Name: At_Drought_P Parameter: Tissue Value: Whole Plant
  misc_feature: MA Experiment 20000437 PARAMETER Experiment Name: At_Drought_P Parameter: Treatment Value: Drought vs. No Drought
  misc_feature: MA Experiment ID: 20000438 Result: Down-regulated in Transcription
  misc_feature: MA Experiment 20000438 PARAMETER Experiment Name: At_Shoots__P Parameter: Age (day) Value: 14
  misc_feature: MA Experiment 20000438 PARAMETER Experiment Name: At_Shoots__P Parameter: Tissue Value: Shoots vs. Whole Plant
  misc_feature: MA Experiment ID: 20000573 Result: Up-regulated in Transcription
  misc_feature: MA Experiment 20000573 PARAMETER Experiment Name: At_100uM_ABA_Mutants__P Parameter: Organism Value: A. thaliana
  misc_feature: MA Experiment 20000573 PARAMETER Experiment Name: At_100uM_ABA_Mutants__P Parameter: Plant Line Value: CS22 vs. Ler wt
  misc_feature: MA Experiment 20000573 PARAMETER Experiment Name: At_100uM_ABA_Mutants__P Parameter: Timepoint (hr) Value: N/A
  misc_feature: MA Experiment 20000573 PARAMETER Experiment Name: At_100uM_ABA_Mutants__P Parameter: Tissue Value: Whole Plant
  misc_feature: MA Experiment 20000573 PARAMETER Experiment Name: At_100uM_ABA_Mutants__P Parameter: Treatment Value: None
  misc_feature: MA Experiment ID: 20000574 Result: Up-regulated in Transcription
  misc_feature: MA Experiment 20000574 PARAMETER Experiment Name: At_100uM_ABA_Mutants__P Parameter: Organism Value: A. thaliana
  misc_feature: MA Experiment 20000574 PARAMETER Experiment Name: At_100uM_ABA_Mutants__P Parameter: Plant Line Value: CS23 vs. Ler wt
  misc_feature: MA Experiment 20000574 PARAMETER Experiment Name: At_100uM_ABA_Mutants__P Parameter: Timepoint (hr) Value: N/A
  misc_feature: MA Experiment 20000574 PARAMETER Experiment Name: At_100uM_ABA_Mutants__P Parameter: Tissue Value: Whole Plant
  misc_feature: MA Experiment 20000574 PARAMETER Experiment Name: At_100uM_ABA_Mutants__P Parameter: Treatment Value: None
  misc_feature: MA Experiment ID: 20000794 Result: Down-regulated in Transcription
  misc_feature: MA Experiment 20000794 PARAMETER Experiment Name: At_Petals_P Parameter: Age (day) Value: 23-25 days
  misc_feature: MA Experiment 20000794 PARAMETER Experiment Name: At_Petals_P Parameter: Plant Line Value: WS
  misc_feature: MA Experiment 20000794 PARAMETER Experiment Name: At_Petals_P Parameter: Tissue Value: Petals vs. Whole plant
  misc_feature: MA Experiment ID: 20001555 Result: Down-regulated in Transcription
  misc_feature: MA Experiment 20001555 PARAMETER Experiment Name: At_Drought_Soil_Dry_P Parameter: Age (day) Value: 24
  misc_feature: MA Experiment 20001555 PARAMETER Experiment Name: At_Drought_Soil_Dry_P Parameter: Organism Value: A. thaliana
  misc_feature: MA Experiment 20001555 PARAMETER Experiment Name: At_Drought_Soil_Dry_P Parameter: Plant Line Value: WS
  misc_feature: MA Experiment 20001555 PARAMETER Experiment Name: At_Drought_Soil_Dry_P Parameter: Post Timepoint (hr) Value: None
  misc_feature: MA Experiment 20001555 PARAMETER Experiment Name: At_Drought_Soil_Dry_P Parameter: Post-Treatment Value: None
  misc_feature: MA Experiment 20001555 PARAMETER Experiment Name: At_Drought_Soil_Dry_P Parameter: Timepoint (day) Value: 10
  misc_feature: MA Experiment 20001555 PARAMETER Experiment Name: At_Drought_Soil_Dry_P Parameter: Treatment Value: Drought vs. No Drought
  misc_feature: MA Experiment ID: 20001556 Result: Down-regulated in Transcription
  misc_feature: MA Experiment 20001556 PARAMETER Experiment Name: At_Drought_Soil_Dry_P Parameter: Age (day) Value: 26
  misc_feature: MA Experiment 20001556 PARAMETER Experiment Name: At_Drought_Soil_Dry_P Parameter: Organism Value: A. thaliana
  misc_feature: MA Experiment 20001556 PARAMETER Experiment Name: At_Drought_Soil_Dry_P Parameter: Plant Line Value: WS
  misc_feature: MA Experiment 20001556 PARAMETER Experiment Name: At_Drought_Soil_Dry_P Parameter: Post Timepoint (hr) Value: None
  misc_feature: MA Experiment 20001556 PARAMETER Experiment Name: At_Drought_Soil_Dry_P Parameter: Post-Treatment Value: None
  misc_feature: MA Experiment 20001556 PARAMETER Experiment Name: At_Drought_Soil_Dry_P Parameter: Timepoint (day) Value: 12
  misc_feature: MA Experiment 20001556 PARAMETER Experiment Name: At_Drought_Soil_Dry_P Parameter: Treatment Value: Drought vs. No Drought
atatacacatatagagagattgagtgaaaatattttttttaaaatggttgtggtgaacaaaacgaatctcttattgcttcttctctctctatgtctcaccctcgacctctcctccgcacaactccgccgtaacttctacgccggaagttgtcctaacgtcgaacaaatcgttagaaacgccgtacagaaaaaagtccaacaaactttcaccaccattcccgccactctacgcctctatttccatgattgtttcgtcaatgggtgtgatgcatcagtgatgatagcgtcaacaaataataataaggcggagaaggatcatgaggaaaatttatcgttggccggagatggattcgacaccgtcattaaaactaaagaagctctcgatgccgtcccaaattgtcgtaacaaagtttcatgcgctgatattctcacgatggccactcgtgacgtcgttaatcttgcgggtggaccacaatacgacgtggaattgggaaggctagatggactatcatcaacagcggctagcgtcggagggaagttgccgcatccgaccgacgatgtcaataaactcacttcactcttcgccaaaaacggccttagccttaacgacatgatcgctctctccggggcacacacattaggattcgcgcattgcacaaaagtgttcaatcggatatacactttcaacaagacaactaaagtggatcccacggttaacaaagattacgtgacagagctaaaagcgtcgtgtcctcgaaacatagatccaagagtggctattaacatggacccaacaacaccaagacaattcgacaacgtttactacaaaaacttgcaacaagggaaaggattgttcacgtcggatcaagtcttattcacggatcgtcggtcaaagccaaccgttgacttatgggctaataatggacagttgtttaatcaagcttttattaactcgatgatcaagcttggtcgtgttggtgttaaaactggtagtaatggtaatatccgtcgtgattgtggagcttttaattgatttaaatatatctgttttagattttgtttattgtatttgggtataggatgggtcatgggtctcataaagctggttaagctaaattgaaaattgtaataaatctctgtcttgggtttc

SEQ ID NO: 26368 - protein, 343 aa, Arabidopsis thaliana
  peptide (1)..(343): Ceres Seq. ID no. 12327127
  misc_feature (57)..(307): Pfam Name: Peroxidase Pfam Description: Peroxidase
  misc_feature (26)..(339): Homolog of NCBI NO: 4138647 NR Description: peroxidase [Trifolium repens]
  misc_feature (24)..(343): Homolog of NCBI NO: 14485511 NR Description: putative peroxidase [Solanum tuberosum]
  misc_feature (24)..(343): Homolog of NCBI NO: 28629828 NR Description: peroxidase 1 [Artemisia annua]
  misc_feature (24)..(343): Homolog of NCBI NO: 15229646 NR Description: peroxidase, putative; protein id: At3g49960.1
  misc_feature (23)..(343): Homolog of NCBI NO: 15240737 NR Description: peroxidase, putative; protein id: At5g67400.1
  misc_feature (15)..(343): Homolog of NCBI NO: 17979440 NR Description: putative peroxidase [Arabidopsis thaliana]
  misc_feature (15)..(343): Homolog of NCBI NO: 15235600 NR Description: peroxidase, putative
  misc_feature (32)..(343): Homolog of NCBI NO: 1546708 NR Description: peroxidase ATP9a [Arabidopsis thaliana]
  misc_feature (15)..(343): Homolog of NCBI NO: 15235597 NR Description: peroxidase, putative
  misc_feature (15)..(343): Homolog of NCBI NO: 21554605 NR Description: peroxidase, prxr2 [Arabidopsis thaliana]
YTHIERLSENIFFKMVVVNKTNLLLLLLSLCLTLDLSSAQLRRNFYAGSCPNVEQIVRNAVQKKVQQTFTTIPATLRLYFHDCFVNGCDASVMIASTNNNKAEKDHEENLSLAGDGFDTVIKTKEALDAVPNCRNKVSCADILTMATRDVVNLAGGPQYDVELGRLDGLSSTAASVGGKLPHPTDDVNKLTSLFAKNGLSLNDMIALSGAHTLGFAHCTKVFNRIYTFNKTTKVDPTVNKDYVTELKASCPRNIDPRVAINMDPTTPRQFDNVYYKNLQQGKGLFTSDQVLFTDRRSKPTVDLWANNGQLFNQAFINSMIKLGRVGVKTGSNGNIRRDCGAFN

SEQ ID NO: 26369 - protein, 329 aa, Arabidopsis thaliana
  peptide (1)..(329): Ceres Seq. ID no. 12327128
  misc_feature (43)..(293): Pfam Name: Peroxidase Pfam Description: Peroxidase
  misc_feature (9)..(329): Homolog of NCBI NO: 15240737 NR Description: peroxidase, putative; protein id: At5g67400.1
  misc_feature (1)..(329): Homolog of NCBI NO: 17979440 NR Description: putative peroxidase [Arabidopsis thaliana]
  misc_feature (1)..(329): Homolog of NCBI NO: 15235600 NR Description: peroxidase, putative
  misc_feature (12)..(325): Homolog of NCBI NO: 4138647 NR Description: peroxidase [Trifolium repens]
  misc_feature (10)..(329): Homolog of NCBI NO: 28629828 NR Description: peroxidase 1 [Artemisia annua]
  misc_feature (10)..(329): Homolog of NCBI NO: 15229646 NR Description: peroxidase, putative; protein id: At3g49960.1
  misc_feature (10)..(329): Homolog of NCBI NO: 14485511 NR Description: putative peroxidase [Solanum tuberosum]
  misc_feature (18)..(329): Homolog of NCBI NO: 1546708 NR Description: peroxidase ATP9a [Arabidopsis thaliana]
  misc_feature (1)..(329): Homolog of NCBI NO: 15235597 NR Description: peroxidase, putative
  misc_feature (1)..(329): Homolog of NCBI NO: 21554605 NR Description: peroxidase, prxr2 [Arabidopsis thaliana]
MVVVNKTNLLLLLLSLCLTLDLSSAQLRRNFYAGSCPNVEQIVRNAVQKKVQQTFTTIPATLRLYFHDCFVNGCDASVMIASTNNNKAEKDHEENLSLAGDGFDTVIKTKEALDAVPNCRNKVSCADILTMATRDVVNLAGGPQYDVELGRLDGLSSTAASVGGKLPHPTDDVNKLTSLFAKNGLSLNDMIALSGAHTLGFAHCTKVFNRIYTFNKTTKVDPTVNKDYVTELKASCPRNIDPRVAINMDPTTPRQFDNVYYKNLQQGKGLFTSDQVLFTDRRSKPTVDLWANNGQLFNQAFINSMIKLGRVGVKTGSNGNIRRDCGAFN

SEQ ID NO: 26370 - protein, 251 aa, Arabidopsis thaliana
  peptide (1)..(251): Ceres Seq. ID no. 12327129
  misc_feature (1)..(215): Pfam Name: Peroxidase Pfam Description: Peroxidase
  misc_feature (1)..(247): Homolog of NCBI NO: 4138647 NR Description: peroxidase [Trifolium repens]
  misc_feature (1)..(251): Homolog of NCBI NO: 14485511 NR Description: putative peroxidase [Solanum tuberosum]
  misc_feature (1)..(251): Homolog of NCBI NO: 28629828 NR Description: peroxidase 1 [Artemisia annua]
  misc_feature (1)..(251): Homolog of NCBI NO: 15229646 NR Description: peroxidase, putative; protein id: At3g49960.1
  misc_feature (1)..(251): Homolog of NCBI NO: 15240737 NR Description: peroxidase, putative; protein id: At5g67400.1
  misc_feature (1)..(251): Homolog of NCBI NO: 17979440 NR Description: putative peroxidase [Arabidopsis thaliana]
  misc_feature (1)..(251): Homolog of NCBI NO: 15235600 NR Description: peroxidase, putative
  misc_feature (1)..(251): Homolog of NCBI NO: 1546708 NR Description: peroxidase ATP9a [Arabidopsis thaliana]
  misc_feature (1)..(251): Homolog of NCBI NO: 15235597 NR Description: peroxidase, putative
  misc_feature (1)..(251): Homolog of NCBI NO: 21554605 NR Description: peroxidase, prxr2 [Arabidopsis thaliana]
MIASTNNNKAEKDHEENLSLAGDGFDTVIKTKEALDAVPNCRNKVSCADILTMATRDVVNLAGGPQYDVELGRLDGLSSTAASVGGKLPHPTDDVNKLTSLFAKNGLSLNDMIALSGAHTLGFAHCTKVFNRIYTFNKTTKVDPTVNKDYVTELKASCPRNIDPRVAINMDPTTPRQFDNVYYKNLQQGKGLFTSDQVLFTDRRSKPTVDLWANNGQLFNQAFINSMIKLGRVGVKTGSNGNIRRDCGAFN

SEQ ID NO: 26371 - DNA, 1344 bp, Arabidopsis thaliana
  misc_feature (1)..(1344): Ceres Seq. ID no. 12388499
  misc_feature: MA Experiment ID: 108462 Result: Up-regulated in Transcription
  misc_feature: MA Experiment 108462 PARAMETER Experiment Name: At_Germinating_Seeds_cDNA_P Parameter: Age (day) Value: 2 vs. 0
  misc_feature: MA Experiment 108462 PARAMETER Experiment Name: At_Germinating_Seeds_cDNA_P Parameter: Tissue Value: Germinating Seeds
  misc_feature: MA Experiment ID: 108463 Result: Up-regulated in Transcription
  misc_feature: MA Experiment 108463 PARAMETER Experiment Name: At_Germinating_Seeds_cDNA_P Parameter: Age (day) Value: 3 vs. 0
  misc_feature: MA Experiment 108463 PARAMETER Experiment Name: At_Germinating_Seeds_cDNA_P Parameter: Tissue Value: Germinating Seeds
  misc_feature: MA Experiment ID: 20000070 Result: Down-regulated in Transcription
  misc_feature: MA Experiment 20000070 PARAMETER Experiment Name: At_100uM_ABA_Mutants_cDNA_P Parameter: Plant Line Value: CS24
  misc_feature: MA Experiment 20000070 PARAMETER Experiment Name: At_100uM_ABA_Mutants_cDNA_P Parameter: Timepoint (hr) Value: 6
  misc_feature: MA Experiment 20000070 PARAMETER Experiment Name: At_100uM_ABA_Mutants_cDNA_P Parameter: Tissue Value: Aerial
  misc_feature: MA Experiment 20000070 PARAMETER Experiment Name: At_100uM_ABA_Mutants_cDNA_P Parameter: Treatment Value: 100uM ABA vs. No Treatment
  misc_feature: MA Experiment ID: 20000071 Result: Down-regulated in Transcription
  misc_feature: MA Experiment 20000071 PARAMETER Experiment Name: At_100uM_ABA_Mutants_cDNA_P Parameter: Plant Line Value: CS8104
  misc_feature: MA Experiment 20000071 PARAMETER Experiment Name: At_100uM_ABA_Mutants_cDNA_P Parameter: Timepoint (hr) Value: 6
  misc_feature: MA Experiment 20000071 PARAMETER Experiment Name: At_100uM_ABA_Mutants_cDNA_P Parameter: Tissue Value: Aerial
  misc_feature: MA Experiment 20000071 PARAMETER Experiment Name: At_100uM_ABA_Mutants_cDNA_P Parameter: Treatment Value: 100uM ABA vs. No Treatment
  misc_feature: MA Experiment ID: 20000072 Result: Down-regulated in Transcription
  misc_feature: MA Experiment 20000072 PARAMETER Experiment Name: At_100uM_ABA_Mutants_cDNA_P Parameter: Plant Line Value: CS8105
  misc_feature: MA Experiment 20000072 PARAMETER Experiment Name: At_100uM_ABA_Mutants_cDNA_P Parameter: Timepoint (hr) Value: 6
  misc_feature: MA Experiment 20000072 PARAMETER Experiment Name: At_100uM_ABA_Mutants_cDNA_P Parameter: Tissue Value: Aerial
  misc_feature: MA Experiment 20000072 PARAMETER Experiment Name: At_100uM_ABA_Mutants_cDNA_P Parameter: Treatment Value: 100uM ABA vs. No Treatment
  misc_feature: MA Experiment ID: 20000086 Result: Down-regulated in Transcription
  misc_feature: MA Experiment 20000086 PARAMETER Experiment Name: At_100uM_ABA_Mutants_cDNA_P Parameter: Plant Line Value: CS22
  misc_feature: MA Experiment 20000086 PARAMETER Experiment Name: At_100uM_ABA_Mutants_cDNA_P Parameter: Timepoint (hr) Value: 6
  misc_feature: MA Experiment 20000086 PARAMETER Experiment Name: At_100uM_ABA_Mutants_cDNA_P Parameter: Tissue Value: Aerial
  misc_feature: MA Experiment 20000086 PARAMETER Experiment Name: At_100uM_ABA_Mutants_cDNA_P Parameter: Treatment Value: 100uM ABA vs. No Treatment
  misc_feature: MA Experiment ID: 20000087 Result: Down-regulated in Transcription
  misc_feature: MA Experiment 20000087 PARAMETER Experiment Name: At_100uM_ABA_Mutants_cDNA_P Parameter: Plant Line Value: WS
  misc_feature: MA Experiment 20000087 PARAMETER Experiment Name: At_100uM_ABA_Mutants_cDNA_P Parameter: Timepoint (hr) Value: 6
  misc_feature: MA Experiment 20000087 PARAMETER Experiment Name: At_100uM_ABA_Mutants_cDNA_P Parameter: Tissue Value: Aerial
  misc_feature: MA Experiment 20000087 PARAMETER Experiment Name: At_100uM_ABA_Mutants_cDNA_P Parameter: Treatment Value: 100uM ABA vs. No Treatment
  misc_feature: MA Experiment ID: 20000090 Result: Down-regulated in Transcription
  misc_feature: MA Experiment ID: 20000182 Result: Down-regulated in Transcription
  misc_feature: MA Experiment 20000182 PARAMETER Experiment Name: At_2mM_SA_P Parameter: Age (day) Value: 14
  misc_feature: MA Experiment 20000182 PARAMETER Experiment Name: At_2mM_SA_P Parameter: Organism Value: A. thaliana
  misc_feature: MA Experiment 20000182 PARAMETER Experiment Name: At_2mM_SA_P Parameter: Plant Line Value: WS
  misc_feature: MA Experiment 20000182 PARAMETER Experiment Name: At_2mM_SA_P Parameter: Timepoint (hr) Value: 6
  misc_feature: MA Experiment 20000182 PARAMETER Experiment Name: At_2mM_SA_P Parameter: Tissue Value: Aerial
  misc_feature: MA Experiment 20000182 PARAMETER Experiment Name: At_2mM_SA_P Parameter: Treatment Value: 2mM SA vs. No Treatment
  misc_feature: MA Experiment ID: 20001557 Result: Up-regulated in Transcription
  misc_feature: MA Experiment 20001557 PARAMETER Experiment Name: At_Drought_Soil_Dry_P Parameter: Age (day) Value: 27
  misc_feature: MA Experiment 20001557 PARAMETER Experiment Name: At_Drought_Soil_Dry_P Parameter: Organism Value: A. thaliana
  misc_feature: MA Experiment 20001557 PARAMETER Experiment Name: At_Drought_Soil_Dry_P Parameter: Plant Line Value: WS
  misc_feature: MA Experiment 20001557 PARAMETER Experiment Name: At_Drought_Soil_Dry_P Parameter: Post Timepoint (hr) Value: 3
  misc_feature: MA Experiment 20001557 PARAMETER Experiment Name: At_Drought_Soil_Dry_P Parameter: Post-Treatment Value: Re-Water vs. No Drought
  misc_feature: MA Experiment 20001557 PARAMETER Experiment Name: At_Drought_Soil_Dry_P Parameter: Timepoint (day) Value: 13
  misc_feature: MA Experiment 20001557 PARAMETER Experiment Name: At_Drought_Soil_Dry_P Parameter: Treatment Value: Drought vs. No Drought
attagccccttctttcagataccagctcccacaccatcaaacttactacatctgagttattatgttgaaacaagagagtaacgacataggtagtggagagaacaacagggcacgaccctgtgacacatgccggtcaaacgcctgcaccgtgtattgccatgcagattctgcctacttgtgcatgagctgtgatgctcaagttcactctgccaatcgcgttgcttcccgccataaacgtgtccgggtctgcgagtcatgtgagcgtgctccggctgcttttttgtgtgaggcagatgatgcctctctatgcacagcctgtgattcagaggttcattctgcaaacccacttgctagacgccatcagcgagttccaattctaccaatttctggaaactctttcagctccatgaccactactcaccaccaaagcgagaaaacaatgaccgatccagagaagagactggtggtggatcaagaggaaggtgaagaaggtgataaggatgccaaggaggttgcttcgtggctgttccctaattcagacaaaaataacaataaccaaaacaatgggttattgtttagtgatgagtatctaaaccttgtggattacaactcgagtatggactacaaattcacaggtgaatacagtcaacaccaacaaaactgcagcgtaccacagacgagctacgggggagatagagttgttccgcttaaacttgaagaatcaaggggccaccagtgccataaccaacagaattttcagttcaatatcaaatatggctcctcagggactcactacaacgacaatggttccattaaccataacgcatacatttcatccatggaaactggtgttgtgccggagtcaacagcatgtgtcacaacagcttcacacccaagaacgcccaaagggacagtagagcaacaacctgaccctgcaagccagatgataacagtaacacaactcagtccaatggacagagaagccagggtcctgagatacagagagaagaggaagacaaggaaatttgagaagacaataaggtatgcttcgaggaaggcatatgcagagataagaccgcgggtcaatggccggttcgcaaagagagaaatcgaagccgaggagcaagggttcaacacgatgctaatgtacaacacaggatatgggattgttccttcattctgatactcctgtggcaaaaagaaaaactagattgcaagctgtaaattacttttagtttgagattatgttaggtttggtgaaattcttagcttcaagaagtattactactgttgtgcaaatgggtttgtagttttggctaattaaaactatagtattcttctttc

SEQ ID NO: 26372 - protein, 373 aa, Arabidopsis thaliana
  peptide (1)..(373): Ceres Seq. ID no. 12388500
  misc_feature (15)..(62): Pfam Name: B-box zinc finger Pfam Description: B-box zinc finger
  misc_feature (13)..(332): Homolog of NCBI NO: 22854908 NR Description: COL1 protein [Brassica nigra]
  misc_feature (13)..(332): Homolog of NCBI NO: 22854906 NR Description: COL1 protein [Brassica nigra]
  misc_feature (1)..(131): Homolog of NCBI NO: 15232898 NR Description: Zinc finger protein CONSTANS-LIKE 2 (COL2)
  misc_feature (139)..(373): Homolog of NCBI NO: 15232898 NR Description: Zinc finger protein CONSTANS-LIKE 2 (COL2)
  misc_feature (13)..(373): Homolog of NCBI NO: 15242403 NR Description: Zinc finger protein CONSTANS-LIKE 1 (COL1)
  misc_feature (1)..(373): Homolog of NCBI NO: 2895186 NR Description: CONSTANS homolog [Brassica napus]
  misc_feature (1)..(373): Homolog of NCBI NO: 7488449 NR Description: CONSTANS homolog 9 - rape
  misc_feature (1)..(373): Homolog of NCBI NO: 11037308 NR Description: constans-like protein [Brassica nigra]
  misc_feature (1)..(373): Homolog of NCBI NO: 7488448 NR Description: CONSTANS homolog 1 - rape
  misc_feature (1)..(373): Homolog of NCBI NO: 15242402 NR Description: Zinc finger protein CONSTANS
MLKQESNDIGSGENNRARPCDTCRSNACTVYCHADSAYLCMSCDAQVHSANRVASRHKRVRVCESCERAPAAFLCEADDASLCTACDSEVHSANPLARRHQRVPILPISGNSFSSMTTTHHQSEKTMTDPEKRLVVDQEEGEEGDKDAKEVASWLFPNSDKNNNNQNNGLLFSDEYLNLVDYNSSMDYKFTGEYSQHQQNCSVPQTSYGGDRVVPLKLEESRGHQCHNQQNFQFNIKYGSSGTHYNDNGSINHNAYISSMETGVVPESTACVTTASHPRTPKGTVEQQPDPASQMITVTQLSPMDREARVLRYREKRKTRKFEKTIRYASRKAYAEIRPRVNGRFAKREIEAEEQGFNTMLMYNTGYGIVPSF

SEQ ID NO: 26373 - protein, 333 aa, Arabidopsis thaliana
  peptide (1)..(333): Ceres Seq. ID no. 12388501
  misc_feature (271)..(310): Pfam Name: CCT motif Pfam Description: CCT motif
  misc_feature (1)..(292): Homolog of NCBI NO: 22854910 NR Description: COL1 protein [Brassica nigra]
  misc_feature (1)..(292): Homolog of NCBI NO: 22854906 NR Description: COL1 protein [Brassica nigra]
  misc_feature (1)..(91): Homolog of NCBI NO: 15232898 NR Description: Zinc finger protein CONSTANS-LIKE 2 (COL2)
  misc_feature (99)..(333): Homolog of NCBI NO: 15232898 NR Description: Zinc finger protein CONSTANS-LIKE 2 (COL2)
  misc_feature (1)..(333): Homolog of NCBI NO: 15242403 NR Description: Zinc finger protein CONSTANS-LIKE 1 (COL1)
  misc_feature (1)..(333): Homolog of NCBI NO: 2895186 NR Description: CONSTANS homolog [Brassica napus]
  misc_feature (1)..(333): Homolog of NCBI NO: 7488449 NR Description: CONSTANS homolog 9 - rape
  misc_feature (1)..(333): Homolog of NCBI NO: 11037308 NR Description: constans-like protein [Brassica nigra]
  misc_feature (1)..(333): Homolog of NCBI NO: 7488448 NR Description: CONSTANS homolog 1 - rape
  misc_feature (1)..(333): Homolog of NCBI NO: 15242402 NR Description: Zinc finger protein CONSTANS
MSCDAQVHSANRVASRHKRVRVCESCERAPAAFLCEADDASLCTACDSEVHSANPLARRHQRVPILPISGNSFSSMTTTHHQSEKTMTDPEKRLVVDQEEGEEGDKDAKEVASWLFPNSDKNNNNQNNGLLFSDEYLNLVDYNSSMDYKFTGEYSQHQQNCSVPQTSYGGDRVVPLKLEESRGHQCHNQQNFQFNIKYGSSGTHYNDNGSINHNAYISSMETGVVPESTACVTTASHPRTPKGTVEQQPDPASQMITVTQLSPMDREARVLRYREKRKTRKFEKTIRYASRKAYAEIRPRVNGRFAKREIEAEEQGFNTMLMYNTGYGIVPSF

SEQ ID NO: 26374 - protein, 258 aa, Arabidopsis thaliana
  peptide (1)..(258): Ceres Seq. ID no. 12388502
  misc_feature (196)..(235): Pfam Name: CCT motif Pfam Description: CCT motif
  misc_feature (1)..(217): Homolog of NCBI NO: 22854910 NR Description: COL1 protein [Brassica nigra]
  misc_feature (1)..(217): Homolog of NCBI NO: 22854906 NR Description: COL1 protein [Brassica nigra]
  misc_feature (1)..(16): Homolog of NCBI NO: 15232898 NR Description: Zinc finger protein CONSTANS-LIKE 2 (COL2)
  misc_feature (24)..(258): Homolog of NCBI NO: 15232898 NR Description: Zinc finger protein CONSTANS-LIKE 2 (COL2)
  misc_feature (1)..(258): Homolog of NCBI NO: 15242403 NR Description: Zinc finger protein CONSTANS-LIKE 1 (COL1)
  misc_feature (1)..(258): Homolog of NCBI NO: 2895186 NR Description: CONSTANS homolog [Brassica napus]
  misc_feature (1)..(258): Homolog of NCBI NO: 7488449 NR Description: CONSTANS homolog 9 - rape
  misc_feature (1)..(258): Homolog of NCBI NO: 11037308 NR Description: constans-like protein [Brassica nigra]
  misc_feature (1)..(258): Homolog of NCBI NO: 7488448 NR Description: CONSTANS homolog 1 - rape
  misc_feature (1)..(258): Homolog of NCBI NO: 15242402 NR Description: Zinc finger protein CONSTANS
MTTTHHQSEKTMTDPEKRLVVDQEEGEEGDKDAKEVASWLFPNSDKNNNNQNNGLLFSDEYLNLVDYNSSMDYKFTGEYSQHQQNCSVPQTSYGGDRVVPLKLEESRGHQCHNQQNFQFNIKYGSSGTHYNDNGSINHNAYISSMETGVVPESTACVTTASHPRTPKGTVEQQPDPASQMITVTQLSPMDREARVLRYREKRKTRKFEKTIRYASRKAYAEIRPRVNGRFAKREIEAEEQGFNTMLMYNTGYGIVPSF

SEQ ID NO: 26375 - DNA, 1199 bp, Arabidopsis thaliana
  misc_feature (1)..(1199): Ceres Seq. ID no. 12395627
  misc_feature: MA Experiment ID: 20001807 Result: Up-regulated in Transcription
  misc_feature: MA Experiment 20001807 PARAMETER Experiment Name: At_50mM_NH4NO3_L-to-H_Sub_P Parameter: Timepoint (hr) Value: 6
  misc_feature: MA Experiment 20001807 PARAMETER Experiment Name: At_50mM_NH4NO3_L-to-H_Sub_P Parameter: Tissue Value: Leaf
  misc_feature: MA Experiment 20001807 PARAMETER Experiment Name: At_50mM_NH4NO3_L-to-H_Sub_P Parameter: Treatment Value: 50mM NH4NO3 vs 100mM Mannitol
acgtcaaactctctctatacacagagttaaattgagtttgtgtctcgtaacttatcctgtgagcgaaaatggtgaaagcaactaaggcagagaagaagatcgcctacgataccaagctatgtcagcttatcgatgagtacacccagatcttggtcgttgcggccgataacgtcggatcaactcagcttcagaacatcagaaagggtcttcttggagactccgtcgtgcttatggggaagaacactatgatgaagcgttccgttaggattcactctgagaacaccggaaacactgcaatcctgaatctgcttcctctccttcagggaaacgttggtttgatctttaccaaaggtgacctcaaggaagtgagcgaggaggttgctaagtacaaggtcggtgcccctgctcgtgtgggtttggtggctccaattgatgtggttgtccaacctggcaacactggtctcgacccatcccaaacatctttcttccaggtgcttaacatcccaaccaagattaacaagggtaccgtcgaaatcatcaccccagttgagcttatcaagcaaggtgacaaggtcgggtcttctgaggctgcgcttctagccaagcttggcatcaggccgttctcatatggtcttgttgtccagtctgtctatgacaatggctcagtcttcagcccagaggttcttgatcttactgaagaccaacttgtggagaagtttgcttctggtatctccatggtcacttccttggctcttgctgtgtcgtaccctacccttgctgctgcaccgcatatgttcatcaatgcgtacaagaatgccttggctattgctgttgccactgagtacaccttccctcaagcagagaaggtcaaggaatacttgaaggatccaagcaagtttgctgttgcttcagtagctgcggtgtctgctgatgcaggtggtggtgccccagctgctgctaaggtagaggagaaggaagagtccgacgaagaagactatggaggtgatttcggtttgttcgatgaagagtagattttgtcggttaagatcttacctttttgtcgtggattataagtgttgctttgtttttagtatgttggacctcaattttcttggttttagccaatccagttttatgttactactgtcttttattttttggaaagatttcgttttcttatggttgctttaatatttttc

SEQ ID NO: 26376 - protein, 320 aa, Arabidopsis thaliana
  peptide (1)..(320): Ceres Seq. ID no. 12395628
  misc_feature (5)..(109): Pfam Name: Ribosomal protein L10 Pfam Description: Ribosomal protein L10
  misc_feature (2)..(315): Homolog of NCBI NO: 15225613 NR Description: 60S acidic ribosomal protein P0; protein id:
  misc_feature (5)..(318): Homolog of NCBI NO: 6984134 NR Description: 60S acidic ribosomal protein PO [Euphorbia esula]
  misc_feature (1)..(320): Homolog of NCBI NO: 21593316 NR Description: 60S acidic ribosomal protein P0-C [Arabidopsis
  misc_feature (1)..(320): Homolog of NCBI NO: 15229706 NR Description: 60S acidic ribosomal protein, putative
  misc_feature (1)..(320): Homolog of NCBI NO: 15232603 NR Description: putative 60S acidic ribosomal protein P0
  misc_feature (1)..(320): Homolog of NCBI NO: 21554645 NR Description: putative 60S acidic ribosomal protein P0
MVKATKAEKKIAYDTKLCQLIDEYTQILVVAADNVGSTQLQNIRKGLLGDSVVLMGKNTMMKRSVRIHSENTGNTAILNLLPLLQGNVGLIFTKGDLKEVSEEVAKYKVGAPARVGLVAPIDVVVQPGNTGLDPSQTSFFQVLNIPTKINKGTVEIITPVELIKQGDKVGSSEAALLAKLGIRPFSYGLVVQSVYDNGSVFSPEVLDLTEDQLVEKFASGISMVTSLALAVSYPTLAAAPHMFINAYKNALAIAVATEYTFPQAEKVKEYLKDPSKFAVASVAAVSADAGGGAPAAAKVEEKEESDEEDYGGDFGLFDEE

SEQ ID NO: 26377 - protein, 266 aa, Arabidopsis thaliana
  peptide (1)..(266): Ceres Seq. ID no. 12395629
  misc_feature (1)..(55): Pfam Name: Ribosomal protein L10 Pfam Description: Ribosomal protein L10
  misc_feature (1)..(261): Homolog of NCBI NO: 15225613 NR Description: 60S acidic ribosomal protein P0; protein id:
  misc_feature (1)..(264): Homolog of NCBI NO: 6984134 NR Description: 60S acidic ribosomal protein PO [Euphorbia esula]
  misc_feature (1)..(266): Homolog of NCBI NO: 21593316 NR Description: 60S acidic ribosomal protein P0-C [Arabidopsis
  misc_feature (1)..(266): Homolog of NCBI NO: 15229706 NR Description: 60S acidic ribosomal protein, putative
  misc_feature (1)..(266): Homolog of NCBI NO: 15232603 NR Description: putative 60S acidic ribosomal protein P0
  misc_feature (1)..(266): Homolog of NCBI NO: 21554645 NR Description: putative 60S acidic ribosomal protein P0
MGKNTMMKRSVRIHSENTGNTAILNLLPLLQGNVGLIFTKGDLKEVSEEVAKYKVGAPARVGLVAPIDVVVQPGNTGLDPSQTSFFQVLNIPTKINKGTVEIITPVELIKQGDKVGSSEAALLAKLGIRPFSYGLVVQSVYDNGSVFSPEVLDLTEDQLVEKFASGISMVTSLALAVSYPTLAAAPHMFINAYKNALAIAVATEYTFPQAEKVKEYLKDPSKFAVASVAAVSADAGGGAPAAAKVEEKEESDEEDYGGDFGLFDEE

SEQ ID NO: 26378 - protein, 261 aa, Arabidopsis thaliana
  peptide (1)..(261): Ceres Seq. ID no. 12395630
  misc_feature (176)..(258): Pfam Name: 60s Acidic ribosomal protein Pfam Description: 60s Acidic ribosomal protein
  misc_feature (1)..(256): Homolog of NCBI NO: 15225613 NR Description: 60S acidic ribosomal protein P0; protein id:
  misc_feature (1)..(259): Homolog of NCBI NO: 6984134 NR Description: 60S acidic ribosomal protein PO [Euphorbia esula]
  misc_feature (1)..(261): Homolog of NCBI NO: 21593316 NR Description: 60S acidic ribosomal protein P0-C [Arabidopsis
  misc_feature (1)..(261): Homolog of NCBI NO: 15229706 NR Description: 60S acidic ribosomal protein, putative
  misc_feature (1)..(261): Homolog of NCBI NO: 15232603 NR Description: putative 60S acidic ribosomal protein P0
  misc_feature (1)..(261): Homolog of NCBI NO: 21554645 NR Description: putative 60S acidic ribosomal protein P0
MMKRSVRIHSENTGNTAILNLLPLLQGNVGLIFTKGDLKEVSEEVAKYKVGAPARVGLVAPIDVVVQPGNTGLDPSQTSFFQVLNIPTKINKGTVEIITPVELIKQGDKVGSSEAALLAKLGIRPFSYGLVVQSVYDNGSVFSPEVLDLTEDQLVEKFASGISMVTSLALAVSYPTLAAAPHMFINAYKNALAIAVATEYTFPQAEKVKEYLKDPSKFAVASVAAVSADAGGGAPAAAKVEEKEESDEEDYGGDFGLFDEE

SEQ ID NO: 26379 - DNA, 1429 bp, Arabidopsis thaliana
  misc_feature (1)..(1429): Ceres Seq. ID no. 13491286
  misc_feature: MA Experiment ID: 108594 Result: Down-regulated in Transcription
  misc_feature: MA Experiment 108594 PARAMETER Experiment Name: At_Ler-rhl_Root_cDNA_P Parameter: Plant Line Value: null
  misc_feature: MA Experiment ID: 108595 Result: Down-regulated in Transcription
  misc_feature: MA Experiment 108595 PARAMETER Experiment Name: At_Ler-pi_Ovule_cDNA_P Parameter: Plant Line Value: null
  misc_feature: MA Experiment ID: 20000180 Result: Up-regulated in Transcription
  misc_feature: MA Experiment 20000180 PARAMETER Experiment Name: At_Germinating_Seeds_P Parameter: Age (hr) Value: 24 vs. 0
  misc_feature: MA Experiment 20000180 PARAMETER Experiment Name: At_Germinating_Seeds_P Parameter: Tissue Value: Germinating Seeds
  misc_feature: MA Experiment ID: 20000185 Result: Down-regulated in Transcription
  misc_feature: MA Experiment 20000185 PARAMETER Experiment Name: At_Roots__P Parameter: Age (day) Value: 7 vs. 21
  misc_feature: MA Experiment 20000185 PARAMETER Experiment Name: At_Roots__P Parameter: Organism Value: A. thaliana
  misc_feature: MA Experiment 20000185 PARAMETER Experiment Name: At_Roots__P Parameter: Tissue Value: Roots vs. Whole Plant
  misc_feature: MA Experiment ID: 20000439 Result: Down-regulated in Transcription
  misc_feature: MA Experiment 20000439 PARAMETER Experiment Name: At_Roots__P Parameter: Age (day) Value: 14 vs. 21
  misc_feature: MA Experiment 20000439 PARAMETER Experiment Name: At_Roots__P Parameter: Organism Value: A. thaliana
  misc_feature: MA Experiment 20000439 PARAMETER Experiment Name: At_Roots__P Parameter: Tissue Value: Roots vs. Whole Plant
  misc_feature: MA Experiment ID: 20000794 Result: Down-regulated in Transcription
  misc_feature: MA Experiment 20000794 PARAMETER Experiment Name: At_Petals_P Parameter: Age (day) Value: 23-25 days
  misc_feature: MA Experiment 20000794 PARAMETER Experiment Name: At_Petals_P Parameter: Plant Line Value: WS
  misc_feature: MA Experiment 20000794 PARAMETER Experiment Name: At_Petals_P Parameter: Tissue Value: Petals vs. Whole plant
  misc_feature: MA Experiment ID: 20001248 Result: Down-regulated in Transcription
  misc_feature: MA Experiment 20001248 PARAMETER Experiment Name: At_Far-red-induction_P Parameter: Age (day) Value: 7
  misc_feature: MA Experiment 20001248 PARAMETER Experiment Name: At_Far-red-induction_P Parameter: Light Value: Far-red vs. White
  misc_feature: MA Experiment 20001248 PARAMETER Experiment Name: At_Far-red-induction_P Parameter: Organism Value: A. thaliana
  misc_feature: MA Experiment 20001248 PARAMETER Experiment Name: At_Far-red-induction_P Parameter: Plant Line Value: Columbia
  misc_feature: MA Experiment 20001248 PARAMETER Experiment Name: At_Far-red-induction_P Parameter: Timepoint (hr) Value: 4
  misc_feature: MA Experiment 20001248 PARAMETER Experiment Name: At_Far-red-induction_P Parameter: Tissue Value: Whole Plant
  misc_feature: MA Experiment ID: 20001450 Result: Down-regulated in Transcription
  misc_feature: MA Experiment 20001450 PARAMETER Experiment Name: At_Far-red-induction_P Parameter: Age (day) Value: 7
  misc_feature: MA Experiment 20001450 PARAMETER Experiment Name: At_Far-red-induction_P Parameter: Light Value: Far-red vs. White
  misc_feature: MA Experiment 20001450 PARAMETER Experiment Name: At_Far-red-induction_P Parameter: Organism Value: A. thaliana
  misc_feature: MA Experiment 20001450 PARAMETER Experiment Name: At_Far-red-induction_P Parameter: Plant Line Value: Columbia
  misc_feature: MA Experiment 20001450 PARAMETER Experiment Name: At_Far-red-induction_P Parameter: Timepoint (hr) Value: 8
  misc_feature: MA Experiment 20001450 PARAMETER Experiment Name: At_Far-red-induction_P Parameter: Tissue Value: Whole Plant
  misc_feature: MA Experiment ID: 20001451 Result: Down-regulated in Transcription
  misc_feature: MA Experiment 20001451 PARAMETER Experiment Name: At_Far-red-induction_P Parameter: Age (day) Value: 7
  misc_feature: MA Experiment 20001451 PARAMETER Experiment Name: At_Far-red-induction_P Parameter: Light Value: Far-red vs. White
  misc_feature: MA Experiment 20001451 PARAMETER Experiment Name: At_Far-red-induction_P Parameter: Organism Value: A. thaliana
  misc_feature: MA Experiment 20001451 PARAMETER Experiment Name: At_Far-red-induction_P Parameter: Plant Line Value: Columbia
  misc_feature: MA Experiment 20001451 PARAMETER Experiment Name: At_Far-red-induction_P Parameter: Timepoint (hr) Value: 24
  misc_feature: MA Experiment 20001451 PARAMETER Experiment Name: At_Far-red-induction_P Parameter: Tissue Value: Whole Plant
  misc_feature: MA Experiment ID: 20001557 Result: Down-regulated in Transcription
  misc_feature: MA Experiment 20001557 PARAMETER Experiment Name: At_Drought_Soil_Dry_P Parameter: Age (day) Value: 27
  misc_feature: MA Experiment 20001557 PARAMETER Experiment Name: At_Drought_Soil_Dry_P Parameter: Organism Value: A. thaliana
  misc_feature: MA Experiment 20001557 PARAMETER Experiment Name: At_Drought_Soil_Dry_P Parameter: Plant Line Value: WS
  misc_feature: MA Experiment 20001557 PARAMETER Experiment Name: At_Drought_Soil_Dry_P Parameter: Post Timepoint (hr) Value: 3
  misc_feature: MA Experiment 20001557 PARAMETER Experiment Name: At_Drought_Soil_Dry_P Parameter: Post-Treatment Value: Re-Water vs. No Drought
  misc_feature: MA Experiment 20001557 PARAMETER Experiment Name: At_Drought_Soil_Dry_P Parameter: Timepoint (day) Value: 13
  misc_feature: MA Experiment 20001557 PARAMETER Experiment Name: At_Drought_Soil_Dry_P Parameter: Treatment Value: Drought vs. No Drought
  misc_feature: MA Experiment ID: 20001904 Result: Down-regulated in Transcription
  misc_feature: MA Experiment 20001904 PARAMETER Experiment Name: At_Drought_Reproduction_P Parameter: Age (day) Value: 37
  misc_feature: MA Experiment 20001904 PARAMETER Experiment Name: At_Drought_Reproduction_P Parameter: Organism Value: A. thaliana
  misc_feature: MA Experiment 20001904 PARAMETER Experiment Name: At_Drought_Reproduction_P Parameter: Plant Line Value: WS
  misc_feature: MA Experiment 20001904 PARAMETER Experiment Name: At_Drought_Reproduction_P Parameter: Timepoint (day) Value: 7
  misc_feature: MA Experiment 20001904 PARAMETER Experiment Name: At_Drought_Reproduction_P Parameter: Tissue Value: Rosettes
  misc_feature: MA Experiment 20001904 PARAMETER Experiment Name: At_Drought_Reproduction_P Parameter: Treatment Value: Drought vs. No Drought
  misc_feature: MA Experiment ID: 20001905 Result: Down-regulated in Transcription
  misc_feature: MA Experiment 20001905 PARAMETER Experiment Name: At_Drought_Reproduction_P Parameter: Age (day) Value: 40
  misc_feature: MA Experiment 20001905 PARAMETER Experiment Name: At_Drought_Reproduction_P Parameter: Organism Value: A. thaliana
  misc_feature: MA Experiment 20001905 PARAMETER Experiment Name: At_Drought_Reproduction_P Parameter: Plant Line Value: WS
  misc_feature: MA Experiment 20001905 PARAMETER Experiment Name: At_Drought_Reproduction_P Parameter: Timepoint (day) Value: 10
  misc_feature: MA Experiment 20001905 PARAMETER Experiment Name: At_Drought_Reproduction_P Parameter: Tissue Value: Rosettes
  misc_feature: MA Experiment 20001905 PARAMETER Experiment Name: At_Drought_Reproduction_P Parameter: Treatment Value: Drought vs. No Drought
  misc_feature: MA Experiment ID: 20001906 Result: Down-regulated in Transcription
  misc_feature: MA Experiment 20001906 PARAMETER Experiment Name: At_Drought_Reproduction_P Parameter: Age (day) Value: 35
  misc_feature: MA Experiment 20001906 PARAMETER Experiment Name: At_Drought_Reproduction_P Parameter: Organism Value: A. thaliana
  misc_feature: MA Experiment 20001906 PARAMETER Experiment Name: At_Drought_Reproduction_P Parameter: Plant Line Value: WS
  misc_feature: MA Experiment 20001906 PARAMETER Experiment Name: At_Drought_Reproduction_P Parameter: Timepoint (day) Value: 5
  misc_feature: MA Experiment 20001906 PARAMETER Experiment Name: At_Drought_Reproduction_P Parameter: Tissue Value: Siliques
  misc_feature: MA Experiment 20001906 PARAMETER Experiment Name: At_Drought_Reproduction_P Parameter: Treatment Value: Drought vs. No Drought
  misc_feature: MA Experiment ID: 20001908 Result: Down-regulated in Transcription
  misc_feature: MA Experiment 20001908 PARAMETER Experiment Name: At_Drought_Reproduction_P Parameter: Age (day) Value: 40
  misc_feature: MA Experiment 20001908 PARAMETER Experiment Name: At_Drought_Reproduction_P Parameter: Organism Value: A. thaliana
  misc_feature: MA Experiment 20001908 PARAMETER Experiment Name: At_Drought_Reproduction_P Parameter: Plant Line Value: WS
  misc_feature: MA Experiment 20001908 PARAMETER Experiment Name: At_Drought_Reproduction_P Parameter: Timepoint (day) Value: 10
  misc_feature: MA Experiment 20001908 PARAMETER Experiment Name: At_Drought_Reproduction_P Parameter: Tissue Value: Siliques
  misc_feature: MA Experiment 20001908 PARAMETER Experiment Name: At_Drought_Reproduction_P Parameter: Treatment Value: Drought vs. No Drought
  misc_feature: MA Experiment ID: 20001911 Result: Down-regulated in Transcription
  misc_feature: MA Experiment 20001911 PARAMETER Experiment Name: At_Drought_Reproduction_P Parameter: Age (day) Value: 40
  misc_feature: MA Experiment 20001911 PARAMETER Experiment Name: At_Drought_Reproduction_P Parameter: Organism Value: A. thaliana
  misc_feature: MA Experiment 20001911 PARAMETER Experiment Name: At_Drought_Reproduction_P Parameter: Plant Line Value: WS
  misc_feature: MA Experiment 20001911 PARAMETER Experiment Name: At_Drought_Reproduction_P Parameter: Timepoint (day) Value: 10
  misc_feature: MA Experiment 20001911 PARAMETER Experiment Name: At_Drought_Reproduction_P Parameter: Tissue Value: Flowers
  misc_feature: MA Experiment 20001911 PARAMETER Experiment Name: At_Drought_Reproduction_P Parameter: Treatment Value: Drought vs. No Drought
ctttaaaaaaaaaaaataccaaaagaagcggaaacagagaaaaagagagaaaaatgctgagtagatcagttgcttctgctgttacaccggtctcatcttcttctctcttaccaaactcaaagcctatcttctgtctgaaaaccctctccggttatcgttcttcttctttctgtggcggctgtattcgtaaaatcaaccataagcctcttcgaatgacgagttccaatattacaccaagagctatggccacacaacagcttgagaacgctgatcagctcattgattctgtcgaaacttttatcttcgattgtgatggtgtgatttggaagggagataaattgatagagggagttcctgaaactcttgatatgcttcgtgccaagggaaagagattggtttttgtgacaaacaactcaacaaaatctaggaaacagtatggaaaaaagttcgagactcttggcctgaatgttaacgaggaggagatatttgcttcatcttttgctgctgctgcatacttgcagtctattaatttcccaaaagataagaaggtctatgtgattggtgaggaaggtatcttgaaagagctagagcttgctggttttcaataccttggaggtccggatgatggtaaaagacagattgaattgaagccaggttttctaatggagcatgatcatgatgttggagctgttgtggttggatttgatcgctatttcaactactacaaaattcagtatggaacactctgtatccgtgaaaacccggggtgtcttttcatcgctacaaaccgagatgctgtcactcaccttactgatgctcaagaatgggcaggtggtggctctatggttggtgctcttgttggatccactcaacgtgagcctcttgttgttggaaaaccctcaacttttatgatggactatttagcagacaaatttggaatccaaaagtcacagatatgcatggttggtgatagattggacactgacattttattcgggcagaatggcggttgtaagactctactcgtcctctcgggtgttacttcaatctctatgttggaaagccctgagaacaagatacaaccagatttctacaccagcaagatctccgattttctgtctccgaaagccgcaactgtataatctagtaagccccgcgtcaatcactctgtagaactcagggtactgaatctatttatgggtatacaactacagtctattcatttttctttgtgactatgtgtataataataagaactttcttgcttgtttttggcaagcttattttatttgcagtgcctttgtgtgcatagcaaattagggagccaatgtgtttttttttaggaagagtttacagaattgaaccaagctctaatctgtaagggtttctctcttcattgcctttaaattatttgtttgtggtcatgtat

SEQ ID NO: 26380 - protein, 379 aa, Arabidopsis thaliana
  peptide (1)..(379): Ceres Seq. ID no. 13491287
  misc_feature (96)..(345): Pfam Name: haloacid dehalogenase-like hydrolase Pfam Description: haloacid dehalogenase-like hydrolase
  misc_feature (96)..(345): Pfam Name: haloacid dehalogenase-like hydrolase Pfam Description: haloacid dehalogenase-like hydrolase
  misc_feature (81)..(372): Homolog of NCBI NO: 15238800 NR Description: phosphoglycolate phosphatase, putative
  misc_feature (81)..(372): Homolog of NCBI NO: 10177912 NR Description: 4-nitrophenylphosphatase-like protein
  misc_feature (81)..(372): Homolog of NCBI NO: 21593203 NR Description: 4-nitrophenylphosphatase-like protein
  misc_feature (67)..(375): Homolog of NCBI NO: 15982558 NR Description: phosphoglycolate phosphatase precursor
  misc_feature (80)..(379): Homolog of NCBI NO: 38345235 NR Description: OSJNBa0084K20.14 [Oryza sativa (japonica
  misc_feature (81)..(372): Homolog of NCBI NO: 15238800 NR Description: phosphoglycolate phosphatase, putative
  misc_feature (81)..(372): Homolog of NCBI NO: 21593203 NR Description: 4-nitrophenylphosphatase-like protein
  misc_feature (80)..(379): Homolog of NCBI NO: 38345235 NR Description: OSJNBa0084K20.14 [Oryza sativa (japonica
  misc_feature (18)..(349): Homolog of NCBI NO: 8953699 NR Description: 4-nitrophenylphosphatase-like [Arabidopsis
  misc_feature (18)..(379): Homolog of NCBI NO: 15239406 NR Description: phosphoglycolate phosphatase, putative
  misc_feature (71)..(379): Homolog of NCBI NO: 26450878 NR Description: putative p-nitrophenylphosphatase [Arabidopsis
  misc_feature (202)..(379): Homolog of NCBI NO: 8885622 NR Description: N-glyceraldehyde-2-phosphotransferase-like
  misc_feature (71)..(206): Homolog of NCBI NO: 8885622 NR Description: N-glyceraldehyde-2-phosphotransferase-like
  misc_feature (67)..(375): Homolog of NCBI NO: 15982558 NR Description: phosphoglycolate phosphatase precursor
  misc_feature (81)..(372): Homolog of NCBI NO: 10177912 NR Description: 4-nitrophenylphosphatase-like protein
  misc_feature (71)..(206): Homolog of NCBI NO: 8885622 NR Description: N-glyceraldehyde-2-phosphotransferase-like
  misc_feature (202)..(379): Homolog of NCBI NO: 8885622 NR Description: N-glyceraldehyde-2-phosphotransferase-like
  misc_feature (71)..(379): Homolog of NCBI NO: 26450878 NR Description: putative p-nitrophenylphosphatase [Arabidopsis
  misc_feature (18)..(379): Homolog of NCBI NO: 15239406 NR Description: phosphoglycolate phosphatase, putative
  misc_feature (18)..(349): Homolog of NCBI NO: 8953699 NR Description: 4-nitrophenylphosphatase-like [Arabidopsis
LKKKNTKRSGNREKERKMLSRSVASAVTPVSSSSLLPNSKPIFCLKTLSGYRSSSFCGGCIRKINHKPLRMTSSNITPRAMATQQLENADQLIDSVETFIFDCDGVIWKGDKLIEGVPETLDMLRAKGKRLVFVTNNSTKSRKQYGKKFETLGLNVNEEEIFASSFAAAAYLQSINFPKDKKVYVIGEEGILKELELAGFQYLGGPDDGKRQIELKPGFLMEHDHDVGAVVVGFDRYFNYYKIQYGTLCIRENPGCLFIATNRDAVTHLTDAQEWAGGGSMVGALVGSTQREPLVVGKPSTFMMDYLADKFGIQKSQICMVGDRLDTDILFGQNGGCKTLLVLSGVTSISMLESPENKIQPDFYTSKISDFLSPKAATV

SEQ ID NO: 26381 - protein, 362 aa, Arabidopsis thaliana
  peptide (1)..(362): Ceres Seq. ID no. 13491288
  misc_feature (79)..(328): Pfam Name: haloacid dehalogenase-like hydrolase Pfam Description: haloacid dehalogenase-like hydrolase
  misc_feature (79)..(328): Pfam Name: haloacid dehalogenase-like hydrolase Pfam Description: haloacid dehalogenase-like hydrolase
  misc_feature (64)..(355): Homolog of NCBI NO: 15238800 NR Description: phosphoglycolate phosphatase, putative
  misc_feature (64)..(355): Homolog of NCBI NO: 10177912 NR Description: 4-nitrophenylphosphatase-like protein
  misc_feature (64)..(355): Homolog of NCBI NO: 21593203 NR Description: 4-nitrophenylphosphatase-like protein
  misc_feature (50)..(358): Homolog of NCBI NO: 15982558 NR Description: phosphoglycolate phosphatase precursor
  misc_feature (63)..(362): Homolog of NCBI NO: 38345235 NR Description: OSJNBa0084K20.14 [Oryza sativa (japonica
  misc_feature (64)..(355): Homolog of NCBI NO: 15238800 NR Description: phosphoglycolate phosphatase, putative
  misc_feature (64)..(355): Homolog of NCBI NO: 21593203 NR Description: 4-nitrophenylphosphatase-like protein
  misc_feature (63)..(362): Homolog of NCBI NO: 38345235 NR Description: OSJNBa0084K20.14 [Oryza sativa (japonica
  misc_feature (1)..(332): Homolog of NCBI NO: 8953699 NR Description: 4-nitrophenylphosphatase-like [Arabidopsis
  misc_feature (1)..(362): Homolog of NCBI NO: 15239406 NR Description: phosphoglycolate phosphatase, putative
  misc_feature (54)..(362): Homolog of NCBI NO: 26450878 NR Description: putative p-nitrophenylphosphatase [Arabidopsis
  misc_feature (185)..(362): Homolog of NCBI NO: 8885622 NR Description: N-glyceraldehyde-2-phosphotransferase-like
  misc_feature (54)..(189): Homolog of NCBI NO: 8885622 NR Description: N-glyceraldehyde-2-phosphotransferase-like
  misc_feature (50)..(358): Homolog of NCBI NO: 15982558 NR Description: phosphoglycolate phosphatase precursor
  misc_feature (64)..(355): Homolog of NCBI NO: 10177912 NR Description: 4-nitrophenylphosphatase-like protein
  misc_feature (54)..(189): Homolog of NCBI NO: 8885622 NR Description: N-glyceraldehyde-2-phosphotransferase-like
  misc_feature (185)..(362): Homolog of NCBI NO: 8885622 NR Description: N-glyceraldehyde-2-phosphotransferase-like
  misc_feature (54)..(362): Homolog of NCBI NO: 26450878 NR Description: putative p-nitrophenylphosphatase [Arabidopsis
  misc_feature (1)..(362): Homolog of NCBI NO: 15239406 NR Description: phosphoglycolate phosphatase, putative
  misc_feature (1)..(332): Homolog of NCBI NO: 8953699 NR Description: 4-nitrophenylphosphatase-like [Arabidopsis
MLSRSVASAVTPVSSSSLLPNSKPIFCLKTLSGYRSSSFCGGCIRKINHKPLRMTSSNITPRAMATQQLENADQLIDSVETFIFDCDGVIWKGDKLIEGVPETLDMLRAKGKRLVFVTNNSTKSRKQYGKKFETLGLNVNEEEIFASSFAAAAYLQSINFPKDKKVYVIGEEGILKELELAGFQYLGGPDDGKRQIELKPGFLMEHDHDVGAVVVGFDRYFNYYKIQYGTLCIRENPGCLFIATNRDAVTHLTDAQEWAGGGSMVGALVGSTQREPLVVGKPSTFMMDYLADKFGIQKSQICMVGDRLDTDILFGQNGGCKTLLVLSGVTSISMLESPENKIQPDFYTSKISDFLSPKAATV

SEQ ID NO: 26382 - protein, 309 aa, Arabidopsis thaliana
  peptide (1)..(309): Ceres Seq. ID no. 13491289
  misc_feature (26)..(275): Pfam Name: haloacid dehalogenase-like hydrolase Pfam Description: haloacid dehalogenase-like hydrolase
  misc_feature (26)..(275): Pfam Name: haloacid dehalogenase-like hydrolase Pfam Description: haloacid dehalogenase-like hydrolase
  misc_feature (11)..(302): Homolog of NCBI NO: 15238800 NR Description: phosphoglycolate phosphatase, putative
  misc_feature (11)..(302): Homolog of NCBI NO: 10177912 NR Description: 4-nitrophenylphosphatase-like protein
  misc_feature (11)..(302): Homolog of NCBI NO: 21593203 NR Description: 4-nitrophenylphosphatase-like protein
  misc_feature (1)..(305): Homolog of NCBI NO: 15982558 NR Description: phosphoglycolate phosphatase precursor
  misc_feature (10)..(309): Homolog of NCBI NO: 38345235 NR Description: OSJNBa0084K20.14 [Oryza sativa (japonica
  misc_feature (1)..(309): Homolog of NCBI NO: 15239406 NR Description: phosphoglycolate phosphatase, putative
  misc_feature (1)..(309): Homolog of NCBI NO: 26450878 NR Description: putative p-nitrophenylphosphatase [Arabidopsis
  misc_feature (1)..(136): Homolog of NCBI NO: 8885622 NR Description: N-glyceraldehyde-2-phosphotransferase-like
  misc_feature (10)..(309): Homolog of NCBI NO: 38345235 NR Description: OSJNBa0084K20.14 [Oryza sativa (japonica
  misc_feature (1)..(305): Homolog of NCBI NO: 15982558 NR Description: phosphoglycolate phosphatase precursor
  misc_feature (11)..(302): Homolog of NCBI NO: 21593203 NR Description: 4-nitrophenylphosphatase-like protein
  misc_feature (11)..(302): Homolog of NCBI NO: 10177912 NR Description: 4-nitrophenylphosphatase-like protein
  misc_feature (11)..(302): Homolog of NCBI NO: 15238800 NR Description: phosphoglycolate phosphatase, putative
  misc_feature (132)..(309): Homolog of NCBI NO: 8885622 NR Description: N-glyceraldehyde-2-phosphotransferase-like
  misc_feature (1)..(279): Homolog of NCBI NO: 8953699 NR Description: 4-nitrophenylphosphatase-like [Arabidopsis
  misc_feature (1)..(136): Homolog of NCBI NO: 8885622 NR Description: N-glyceraldehyde-2-phosphotransferase-like
  misc_feature (132)..(309): Homolog of NCBI NO: 8885622 NR Description: N-glyceraldehyde-2-phosphotransferase-like
  misc_feature (1)..(309): Homolog of NCBI NO: 26450878 NR Description: putative p-nitrophenylphosphatase [Arabidopsis
  misc_feature (1)..(309): Homolog of NCBI NO: 15239406 NR Description: phosphoglycolate phosphatase, putative
  misc_feature (1)..(279): Homolog of NCBI NO: 8953699 NR Description: 4-nitrophenylphosphatase-like [Arabidopsis
MTSSNITPRAMATQQLENADQLIDSVETFIFDCDGVIWKGDKLIEGVPETLDMLRAKGKRLVFVTNNSTKSRKQYGKKFETLGLNVNEEEIFASSFAAAAYLQSINFPKDKKVYVIGEEGILKELELAGFQYLGGPDDGKRQIELKPGFLMEHDHDVGAVVVGFDRYFNYYKIQYGTLCIRENPGCLFIATNRDAVTHLTDAQEWAGGGSMVGALVGSTQREPLVVGKPSTFMMDYLADKFGIQKSQICMVGDRLDTDILFGQNGGCKTLLVLSGVTSISMLESPENKIQPDFYTSKISDFLSPKAATV

SEQ ID NO: 26383 - DNA, 958 bp, Arabidopsis thaliana
  misc_feature (1)..(958): Ceres Seq. ID no. 13496786
  misc_feature: MA Experiment ID: 108435 Result: Down-regulated in Transcription
  misc_feature: MA Experiment 108435 PARAMETER Experiment Name: At_stm_Mutants_cDNA_P Parameter: Plant Line Value: wt Landsburg vs stm
  misc_feature: MA Experiment 108435 PARAMETER Experiment Name: At_stm_Mutants_cDNA_P Parameter: Tissue Value: Shoot Apical Meristem Region
  misc_feature: MA Experiment ID: 108461 Result: Up-regulated in Transcription
  misc_feature: MA Experiment 108461 PARAMETER Experiment Name: At_Germinating_Seeds_cDNA_P Parameter: Age (day) Value: 1 vs. 0
  misc_feature: MA Experiment 108461 PARAMETER Experiment Name: At_Germinating_Seeds_cDNA_P Parameter: Tissue Value: Germinating Seeds
  misc_feature: MA Experiment ID: 108462 Result: Up-regulated in Transcription
  misc_feature: MA Experiment 108462 PARAMETER Experiment Name: At_Germinating_Seeds_cDNA_P Parameter: Age (day) Value: 2 vs. 0
  misc_feature: MA Experiment 108462 PARAMETER Experiment Name: At_Germinating_Seeds_cDNA_P Parameter: Tissue Value: Germinating Seeds
  misc_feature: MA Experiment ID: 108463 Result: Up-regulated in Transcription
  misc_feature: MA Experiment 108463 PARAMETER Experiment Name: At_Germinating_Seeds_cDNA_P Parameter: Age (day) Value: 3 vs. 0
  misc_feature: MA Experiment 108463 PARAMETER Experiment Name: At_Germinating_Seeds_cDNA_P Parameter: Tissue Value: Germinating Seeds
  misc_feature: MA Experiment ID: 108576 Result: Down-regulated in Transcription
  misc_feature: MA Experiment 108576 PARAMETER Experiment Name: At_42deg_Heat_cDNA_P Parameter: Temperature (deg C) Value: 42 vs. 22
  misc_feature: MA Experiment 108576 PARAMETER Experiment Name: At_42deg_Heat_cDNA_P Parameter: Timepoint (hr) Value: 1
  misc_feature: MA Experiment 108576 PARAMETER Experiment Name: At_42deg_Heat_cDNA_P Parameter: Tissue Value: Aerial
  misc_feature: MA Experiment ID: 108577 Result: Down-regulated in Transcription
  misc_feature: MA Experiment 108577 PARAMETER Experiment Name: At_42deg_Heat_cDNA_P Parameter: Temperature (deg C) Value: 42 vs. 22
  misc_feature: MA Experiment 108577 PARAMETER Experiment Name: At_42deg_Heat_cDNA_P Parameter: Timepoint (hr) Value: 6
  misc_feature: MA Experiment 108577 PARAMETER Experiment Name: At_42deg_Heat_cDNA_P Parameter: Tissue Value: Aerial
  misc_feature: MA Experiment ID: 108595 Result: Down-regulated in Transcription
  misc_feature: MA Experiment 108595 PARAMETER Experiment Name: At_Ler-pi_Ovule_cDNA_P Parameter: Plant Line Value: null
  misc_feature: MA Experiment ID: 20000111 Result: Down-regulated in Transcription
  misc_feature: MA Experiment 20000111 PARAMETER Experiment Name: At_42deg_Heat_cDNA_P Parameter: Temperature (deg C) Value: 42 vs. 22
  misc_feature: MA Experiment 20000111 PARAMETER Experiment Name: At_42deg_Heat_cDNA_P Parameter: Timepoint (hr) Value: 6
  misc_feature: MA Experiment 20000111 PARAMETER Experiment Name: At_42deg_Heat_cDNA_P Parameter: Tissue Value: Aerial
  misc_feature: MA Experiment ID: 20000180 Result: Up-regulated in Transcription
  misc_feature: MA Experiment 20000180 PARAMETER Experiment Name: At_Germinating_Seeds_P Parameter: Age (hr) Value: 24 vs. 0
  misc_feature: MA Experiment 20000180 PARAMETER Experiment Name: At_Germinating_Seeds_P Parameter: Tissue Value: Germinating Seeds
  misc_feature: MA Experiment ID: 20000185 Result: Down-regulated in Transcription
  misc_feature: MA Experiment 20000185 PARAMETER Experiment Name: At_Roots__P Parameter: Age (day) Value: 7 vs. 21
  misc_feature: MA Experiment 20000185 PARAMETER Experiment Name: At_Roots__P Parameter: Organism Value: A. thaliana
  misc_feature: MA Experiment 20000185 PARAMETER Experiment Name: At_Roots__P Parameter: Tissue Value: Roots vs. Whole Plant
  misc_feature: MA Experiment ID: 20000438 Result: Up-regulated in Transcription
  misc_feature: MA Experiment 20000438 PARAMETER Experiment Name: At_Shoots__P Parameter: Age (day) Value: 14
  misc_feature: MA Experiment 20000438 PARAMETER Experiment Name: At_Shoots__P Parameter: Tissue Value: Shoots vs. Whole Plant
  misc_feature: MA Experiment ID: 20000439 Result: Down-regulated in Transcription
  misc_feature: MA Experiment 20000439 PARAMETER Experiment Name: At_Roots__P Parameter: Age (day) Value: 14 vs. 21
  misc_feature: MA Experiment 20000439 PARAMETER Experiment Name: At_Roots__P Parameter: Organism Value: A. thaliana
  misc_feature: MA Experiment 20000439 PARAMETER Experiment Name: At_Roots__P Parameter: Tissue Value: Roots vs. Whole Plant
  misc_feature: MA Experiment ID: 20001248 Result: Down-regulated in Transcription
  misc_feature: MA Experiment 20001248 PARAMETER Experiment Name: At_Far-red-induction_P Parameter: Age (day) Value: 7
  misc_feature: MA Experiment 20001248 PARAMETER Experiment Name: At_Far-red-induction_P Parameter: Light Value: Far-red vs. White
  misc_feature: MA Experiment 20001248 PARAMETER Experiment Name: At_Far-red-induction_P Parameter: Organism Value: A. thaliana
  misc_feature: MA Experiment 20001248 PARAMETER Experiment Name: At_Far-red-induction_P Parameter: Plant Line Value: Columbia
  misc_feature: MA Experiment 20001248 PARAMETER Experiment Name: At_Far-red-induction_P Parameter: Timepoint (hr) Value: 4
  misc_feature: MA Experiment 20001248 PARAMETER Experiment Name: At_Far-red-induction_P Parameter: Tissue Value: Whole Plant
  misc_feature: MA Experiment ID: 20001905 Result: Down-regulated in Transcription
  misc_feature: MA Experiment 20001905 PARAMETER Experiment Name: At_Drought_Reproduction_P Parameter: Age (day) Value: 40
  misc_feature: MA Experiment 20001905 PARAMETER Experiment Name: At_Drought_Reproduction_P Parameter: Organism Value: A. thaliana
  misc_feature: MA Experiment 20001905 PARAMETER Experiment Name: At_Drought_Reproduction_P Parameter: Plant Line Value: WS
  misc_feature: MA Experiment 20001905 PARAMETER Experiment Name: At_Drought_Reproduction_P Parameter: Timepoint (day) Value: 10
  misc_feature: MA Experiment 20001905 PARAMETER Experiment Name: At_Drought_Reproduction_P Parameter: Tissue Value: Rosettes
  misc_feature: MA Experiment 20001905 PARAMETER Experiment Name: At_Drought_Reproduction_P Parameter: Treatment Value: Drought vs. No Drought
taggggttctgtggttcataatcagaaatggctaagacaggggaaagcttgagagacaaacctagatggagtcttgtaggcatgaccgctcttgtcaccggtggctcaaaaggcatcggagaagctgtggttgaggaactagctacgttaggggcaagaatccacacatgtgccagagacgaaactcagcttcaagaaagcttacgtaagtggcaagcaaaagggtttcaggttaccacttctgtctgcgacgtttcttctcgtgataaacgagagaagctcatggaaaccgtttccactatcttcgaaggaaaactcaacatacttgtcaacaatgtgggaacgtgtatagtcaaaccgaccttacaacatacagccgaagatttctcatttacaatggcaacgaatctcgagtcagcttttcatctctcgcagctcgcgcatcctttgttgaaagcttctggttcagggagcatcgtgctcatctcctccgtatctggagttgtacatgtcaatggtgcatccatatatggagtatctaaaggagctatgaatcagctaggaagaaacttagcgtgcgagtgggcaagtgacaacataaggactaactctgtgtgtccatggttcatagaaactcctttagttaccgaaagtcttagtaatgaggagtttagaaaagaagtggagagtagaccaccaatgggacgtgttggagaagtaaatgaagtatcatcgcttgtggcatttctttgtcttcctgcagcttcttatattacaggtcaaaccatttgtgttgatggaggtttcactgttaatggtttctctttcaagcctctgccttaagacgtcgattgttttcattttacgttatttttttaacatttacaatttgtttagatatgtaaacataaacacaattacacaaacaaacaaaaaaaattggcgtttggaatgtaag

SEQ ID NO: 26384 - protein, 271 aa, Arabidopsis thaliana
  peptide (1)..(271): Ceres Seq. ID no. 13496787
  misc_feature (10)..(269): Homolog of NCBI NO: 15222400 NR Description: short-chain dehydrogenase/reductase family
  misc_feature (1)..(101): Homolog of NCBI NO: 6457349 NR Description: short chain alcohol dehydrogenase [Arabidopsis
  misc_feature (105)..(271): Homolog of NCBI NO: 6457349 NR Description: short chain alcohol dehydrogenase [Arabidopsis
  misc_feature (10)..(269): Homolog of NCBI NO: 15227069 NR Description: short-chain dehydrogenase/reductase family
  misc_feature (1)..(266): Homolog of NCBI NO: 25283134 NR Description: probable tropinone reductase [imported] -
  misc_feature (1)..(270): Homolog of NCBI NO: 15227043 NR Description: short-chain dehydrogenase/reductase family
  misc_feature (1)..(271): Homolog of NCBI NO: 15227075 NR Description: short-chain dehydrogenase/reductase family
  misc_feature (1)..(269): Homolog of NCBI NO: 15227040 NR Description: short-chain dehydrogenase/reductase family
  misc_feature (1)..(271): Homolog of NCBI NO: 21554716 NR Description: putative tropinone reductase [Arabidopsis
  misc_feature (1)..(271): Homolog of NCBI NO: 15227076 NR Description: short-chain dehydrogenase/reductase family
MAKTGESLRDKPRWSLVGMTALVTGGSKGIGEAVVEELATLGARIHTCARDETQLQESLRKWQAKGFQVTTSVCDVSSRDKREKLMETVSTIFEGKLNILVNNVGTCIVKPTLQHTAEDFSFTMATNLESAFHLSQLAHPLLKASGSGSIVLISSVSGVVHVNGASIYGVSKGAMNQLGRNLACEWASDNIRTNSVCPWFIETPLVTESLSNEEFRKEVESRPPMGRVGEVNEVSSLVAFLCLPAASYITGQTICVDGGFTVNGFSFKPLP

SEQ ID NO: 26385 - protein, 253 aa, Arabidopsis thaliana
  peptide (1)..(253): Ceres Seq. ID no. 13496788
  misc_feature (1)..(251): Homolog of NCBI NO: 15222400 NR Description: short-chain dehydrogenase/reductase family
  misc_feature (1)..(83): Homolog of NCBI NO: 6457349 NR Description: short chain alcohol dehydrogenase [Arabidopsis
  misc_feature (87)..(253): Homolog of NCBI NO: 6457349 NR Description: short chain alcohol dehydrogenase [Arabidopsis
  misc_feature (1)..(251): Homolog of NCBI NO: 15227069 NR Description: short-chain dehydrogenase/reductase family
  misc_feature (1)..(248): Homolog of NCBI NO: 25283134 NR Description: probable tropinone reductase [imported] -
  misc_feature (1)..(252): Homolog of NCBI NO: 15227043 NR Description: short-chain dehydrogenase/reductase family
  misc_feature (1)..(253): Homolog of NCBI NO: 15227075 NR Description: short-chain dehydrogenase/reductase family
  misc_feature (1)..(251): Homolog of NCBI NO: 15227040 NR Description: short-chain dehydrogenase/reductase family
  misc_feature (1)..(253): Homolog of NCBI NO: 21554716 NR Description: putative tropinone reductase [Arabidopsis
  misc_feature (1)..(253): Homolog of NCBI NO: 15227076 NR Description: short-chain dehydrogenase/reductase family
MTALVTGGSKGIGEAVVEELATLGARIHTCARDETQLQESLRKWQAKGFQVTTSVCDVSSRDKREKLMETVSTIFEGKLNILVNNVGTCIVKPTLQHTAEDFSFTMATNLESAFHLSQLAHPLLKASGSGSIVLISSVSGVVHVNGASIYGVSKGAMNQLGRNLACEWASDNIRTNSVCPWFIETPLVTESLSNEEFRKEVESRPPMGRVGEVNEVSSLVAFLCLPAASYITGQTICVDGGFTVNGFSFKPLP

SEQ ID NO: 26386 - protein, 186 aa, Arabidopsis thaliana
  peptide (1)..(186): Ceres Seq. ID no. 13496789
  misc_feature (1)..(184): Homolog of NCBI NO: 15222400 NR Description: short-chain dehydrogenase/reductase family
  misc_feature (1)..(16): Homolog of NCBI NO: 6457349 NR Description: short chain alcohol dehydrogenase [Arabidopsis
  misc_feature (20)..(186): Homolog of NCBI NO: 6457349 NR Description: short chain alcohol dehydrogenase [Arabidopsis
  misc_feature (1)..(184): Homolog of NCBI NO: 15227069 NR Description: short-chain dehydrogenase/reductase family
  misc_feature (1)..(181): Homolog of NCBI NO: 25283134 NR Description: probable tropinone reductase [imported] -
  misc_feature (1)..(185): Homolog of NCBI NO: 15227043 NR Description: short-chain dehydrogenase/reductase family
  misc_feature (1)..(186): Homolog of NCBI NO: 15227075 NR Description: short-chain dehydrogenase/reductase family
  misc_feature (1)..(184): Homolog of NCBI NO: 15227040 NR Description: short-chain dehydrogenase/reductase family
  misc_feature (1)..(186): Homolog of NCBI NO: 21554716 NR Description: putative tropinone reductase [Arabidopsis
  misc_feature (1)..(186): Homolog of NCBI NO: 15227076 NR Description: short-chain dehydrogenase/reductase family
METVSTIFEGKLNILVNNVGTCIVKPTLQHTAEDFSFTMATNLESAFHLSQLAHPLLKASGSGSIVLISSVSGVVHVNGASIYGVSKGAMNQLGRNLACEWASDNIRTNSVCPWFIETPLVTESLSNEEFRKEVESRPPMGRVGEVNEVSSLVAFLCLPAASYITGQTICVDGGFTVNGFSFKPLP

SEQ ID NO: 26387 - DNA, 1568 bp, Arabidopsis thaliana
  misc_feature (1)..(1568): Ceres Seq. ID no. 12394697
  misc_feature: MA Experiment ID: 108433 Result: Down-regulated in Transcription
  misc_feature: MA Experiment 108433 PARAMETER Experiment Name: At_rhl_Mutant2_cDNA_P Parameter: Age (day) Value: 7
  misc_feature: MA Experiment 108433 PARAMETER Experiment Name: At_rhl_Mutant2_cDNA_P Parameter: Organism Value: A. thaliana
  misc_feature: MA Experiment 108433 PARAMETER Experiment Name: At_rhl_Mutant2_cDNA_P Parameter: Plant Line Value: rhl Mutant vs. wt landsburg
  misc_feature: MA Experiment 108433 PARAMETER Experiment Name: At_rhl_Mutant2_cDNA_P Parameter: Tissue Value: Roots
  misc_feature: MA Experiment ID: 108434 Result: Up-regulated in Transcription
  misc_feature: MA Experiment 108434 PARAMETER Experiment Name: At_Root_Tips_cDNA_P Parameter: Tissue Value: Root Tips
  misc_feature: MA Experiment ID: 108462 Result: Down-regulated in Transcription
  misc_feature: MA Experiment 108462 PARAMETER Experiment Name: At_Germinating_Seeds_cDNA_P Parameter: Age (day) Value: 2 vs. 0
  misc_feature: MA Experiment 108462 PARAMETER Experiment Name: At_Germinating_Seeds_cDNA_P Parameter: Tissue Value: Germinating Seeds
  misc_feature: MA Experiment ID: 108463 Result: Down-regulated in Transcription
  misc_feature: MA Experiment 108463 PARAMETER Experiment Name: At_Germinating_Seeds_cDNA_P Parameter: Age (day) Value: 3 vs. 0
  misc_feature: MA Experiment 108463 PARAMETER Experiment Name: At_Germinating_Seeds_cDNA_P Parameter: Tissue Value: Germinating Seeds
  misc_feature: MA Experiment ID: 108464 Result: Down-regulated in Transcription
  misc_feature: MA Experiment 108464 PARAMETER Experiment Name: At_Germinating_Seeds_cDNA_P Parameter: Age (day) Value: 4 vs. 0
  misc_feature: MA Experiment 108464 PARAMETER Experiment Name: At_Germinating_Seeds_cDNA_P Parameter: Tissue Value: Germinating Seeds
  misc_feature: MA Experiment ID: 20001558 Result: Up-regulated in Transcription
  misc_feature: MA Experiment 20001558 PARAMETER Experiment Name: At_Drought_Soil_Dry_P Parameter: Age (day) Value: 27
  misc_feature: MA Experiment 20001558 PARAMETER Experiment Name: At_Drought_Soil_Dry_P Parameter: Organism Value: A. thaliana
  misc_feature: MA Experiment 20001558 PARAMETER Experiment Name: At_Drought_Soil_Dry_P Parameter: Plant Line Value: WS
  misc_feature: MA Experiment 20001558 PARAMETER Experiment Name: At_Drought_Soil_Dry_P Parameter: Post Timepoint (hr) Value: 6
  misc_feature: MA Experiment 20001558 PARAMETER Experiment Name: At_Drought_Soil_Dry_P Parameter: Post-Treatment Value: Re-Water vs. No Drought
  misc_feature: MA Experiment 20001558 PARAMETER Experiment Name: At_Drought_Soil_Dry_P Parameter: Timepoint (day) Value: 13
  misc_feature: MA Experiment 20001558 PARAMETER Experiment Name: At_Drought_Soil_Dry_P Parameter: Treatment Value: Drought vs. No Drought
gtctctgctggtcggctgctgaaacaagttgtaattgtggtgcatttgttcttcagcgcagccgagaagattcgaaaccggagctaagctatgacgacgattgttcccacctccgaagaaaatccctttctcgctgttgtccgattcacttcccagctcgcctgggccgatgctggtcccgaggcagcagagccagaaattaccaggctctgtagggaggctgaggagtcaatggtagcagagaagtggcttgaattgtcttcgttaatggtcacttcagctgaattggtatcttctaagatatctgagaaagatcttgagtgtacctacaccatcatttgcagcattgtcaagaatgcgaaaagccctgagcaagtccttgaaatggtgaaagctatagcttccaaggttgctcaacaacccagtgacaaagcttcacttcgtttgaagatcctcttcaatctctataacctggttgaccacccgtatgctcgatttcaagtatacatgaaagctcttacactagctgttgatgggaaggttactgagtacatagtttcttcttttaagaagatcgataactttctgaaagagtggaatattgacattaaagatcagagggaactctttcttgccattgctaatgtgctgaaagaaaacaaaagcttggtgaatgaatcccttaagttcttgacgaagtacctagcaactttctccaatgaggatgctcaggtcctggatgaagccaaggaggaggctgtgcgtgcagttatcgaatttgtcaaagcttccagtattttccagtgtgatttattggacttgccagccgtagcacaattggaaaaggatgctaaatatgcacctgtttaccaacttctgaagatttttcttactcagaggttaaatgcctacacggaattccaaaatgcaaattcgggatttctgcaaagctatggactttccaatgaagattgtgttacgaagatgaggttgttgtcactagtggatttggcctcagatgaatctggcaaaataccttacacctcgattaaagacactcttcaggtaaatgaacaggatgtcgagttatggatcgtgaaggcaataactgcaaaactgattgagtgtaagatggatcagatgaaccaagttttaattgtcagccgctcttccgaacgtgaatttgggacaaagcaatggcaatctctccgaacaaagcttgcgacttggaaggacaacatttcaagtatcataactaccatcgaatcgaataaggtaacggaggaaggttctcaggcatcatcatcatctgctgcagctattcaaggcttgagtgttcgttgaaaaagctatcaagaaaaaccgtttcatccccagagaagctcaattctataacgaatcttttgtcttccttaaagctttttctctgtgtatttggctgcagggtttttttgatctttgaatcttttttttgtccctgaaacatatgcggagacttttcctatacattattttttgctagtaatgtttcttaacttgatgctacacactatttcaaaagtttatac

SEQ ID NO: 26388 - protein, 417 aa, Arabidopsis thaliana
  peptide (1)..(417): Ceres Seq. ID no. 12394698
  misc_feature (257)..(359): Pfam Name: PCI domain Pfam Description: PCI domain
  misc_feature (44)..(393): Homolog of NCBI NO: 27735458 NR Description: Similar to dendritic cell protein [Xenopus laevis]
  misc_feature (1)..(122): Homolog of NCBI NO: 32489165 NR Description: OSJNBa0094O15.2 [Oryza sativa (japonica
  misc_feature (122)..(417): Homolog of NCBI NO: 32489165 NR Description: OSJNBa0094O15.2 [Oryza sativa (japonica
  misc_feature (357)..(417): Homolog of NCBI NO: 15242346 NR Description: putative protein
  misc_feature (1)..(361): Homolog of NCBI NO: 15242346 NR Description: putative protein
  misc_feature (1)..(417): Homolog of NCBI NO: 30685439 NR Description: expressed protein [Arabidopsis thaliana]
  misc_feature (1)..(357): Homolog of NCBI NO: 30678503 NR Description: expressed protein [Arabidopsis thaliana]
  misc_feature (384)..(417): Homolog of NCBI NO: 6041797 NR Description: unknown protein [Arabidopsis thaliana]
  misc_feature (1)..(352): Homolog of NCBI NO: 6041797 NR Description: unknown protein [Arabidopsis thaliana]
  misc_feature (1)..(417): Homolog of NCBI NO: 22330807 NR Description: unknown protein
MTTIVPTSEENPFLAVVRFTSQLAWADAGPEAAEPEITRLCREAEESMVAEKWLELSSLMVTSAELVSSKISEKDLECTYTIICSIVKNAKSPEQVLEMVKAIASKVAQQPSDKASLRLKILFNLYNLVDHPYARFQVYMKALTLAVDGKVTEYIVSSFKKIDNFLKEWNIDIKDQRELFLAIANVLKENKSLVNESLKFLTKYLATFSNEDAQVLDEAKEEAVRAVIEFVKASSIFQCDLLDLPAVAQLEKDAKYAPVYQLLKIFLTQRLNAYTEFQNANSGFLQSYGLSNEDCVTKMRLLSLVDLASDESGKIPYTSIKDTLQVNEQDVELWIVKAITAKLIECKMDQMNQVLIVSRSSEREFGTKQWQSLRTKLATWKDNISSIITTIESNKVTEEGSQASSSSAAAIQGLSVR

SEQ ID NO: 26389 - protein, 370 aa, Arabidopsis thaliana
  peptide (1)..(370): Ceres Seq. ID no. 12394699
  misc_feature (210)..(312): Pfam Name: PCI domain Pfam Description: PCI domain
  misc_feature (1)..(346): Homolog of NCBI NO: 27735458 NR Description: Similar to dendritic cell protein [Xenopus laevis]
  misc_feature (1)..(75): Homolog of NCBI NO: 32489165 NR Description: OSJNBa0094O15.2 [Oryza sativa (japonica
  misc_feature (75)..(370): Homolog of NCBI NO: 32489165 NR Description: OSJNBa0094O15.2 [Oryza sativa (japonica
  misc_feature (310)..(370): Homolog of NCBI NO: 15242346 NR Description: putative protein
  misc_feature (1)..(314): Homolog of NCBI NO: 15242346 NR Description: putative protein
  misc_feature (1)..(370): Homolog of NCBI NO: 30685439 NR Description: expressed protein [Arabidopsis thaliana]
  misc_feature (1)..(310): Homolog of NCBI NO: 30678503 NR Description: expressed protein [Arabidopsis thaliana]
  misc_feature (337)..(370): Homolog of NCBI NO: 6041797 NR Description: unknown protein [Arabidopsis thaliana]
  misc_feature (1)..(305): Homolog of NCBI NO: 6041797 NR Description: unknown protein [Arabidopsis thaliana]
  misc_feature (1)..(370): Homolog of NCBI NO: 22330807 NR Description: unknown protein
MVAEKWLELSSLMVTSAELVSSKISEKDLECTYTIICSIVKNAKSPEQVLEMVKAIASKVAQQPSDKASLRLKILFNLYNLVDHPYARFQVYMKALTLAVDGKVTEYIVSSFKKIDNFLKEWNIDIKDQRELFLAIANVLKENKSLVNESLKFLTKYLATFSNEDAQVLDEAKEEAVRAVIEFVKASSIFQCDLLDLPAVAQLEKDAKYAPVYQLLKIFLTQRLNAYTEFQNANSGFLQSYGLSNEDCVTKMRLLSLVDLASDESGKIPYTSIKDTLQVNEQDVELWIVKAITAKLIECKMDQMNQVLIVSRSSEREFGTKQWQSLRTKLATWKDNISSIITTIESNKVTEEGSQASSSSAAAIQGLSVR

SEQ ID NO: 26390 - protein, 358 aa, Arabidopsis thaliana
  peptide (1)..(358): Ceres Seq. ID no. 12394700
  misc_feature (198)..(300): Pfam Name: PCI domain Pfam Description: PCI domain
  misc_feature (1)..(334): Homolog of NCBI NO: 27735458 NR Description: Similar to dendritic cell protein [Xenopus laevis]
  misc_feature (1)..(63): Homolog of NCBI NO: 32489165 NR Description: OSJNBa0094O15.2 [Oryza sativa (japonica
  misc_feature (63)..(358): Homolog of NCBI NO: 32489165 NR Description: OSJNBa0094O15.2 [Oryza sativa (japonica
  misc_feature (298)..(358): Homolog of NCBI NO: 15242346 NR Description: putative protein
  misc_feature (1)..(302): Homolog of NCBI NO: 15242346 NR Description: putative protein
  misc_feature (1)..(358): Homolog of NCBI NO: 30685439 NR Description: expressed protein [Arabidopsis thaliana]
  misc_feature (1)..(298): Homolog of NCBI NO: 30678503 NR Description: expressed protein [Arabidopsis thaliana]
  misc_feature (325)..(358): Homolog of NCBI NO: 6041797 NR Description: unknown protein [Arabidopsis thaliana]
  misc_feature (1)..(293): Homolog of NCBI NO: 6041797 NR Description: unknown protein [Arabidopsis thaliana]
  misc_feature (1)..(358): Homolog of NCBI NO: 22330807 NR Description: unknown protein
MVTSAELVSSKISEKDLECTYTIICSIVKNAKSPEQVLEMVKAIASKVAQQPSDKASLRLKILFNLYNLVDHPYARFQVYMKALTLAVDGKVTEYIVSSFKKIDNFLKEWNIDIKDQRELFLAIANVLKENKSLVNESLKFLTKYLATFSNEDAQVLDEAKEEAVRAVIEFVKASSIFQCDLLDLPAVAQLEKDAKYAPVYQLLKIFLTQRLNAYTEFQNANSGFLQSYGLSNEDCVTKMRLLSLVDLASDESGKIPYTSIKDTLQVNEQDVELWIVKAITAKLIECKMDQMNQVLIVSRSSEREFGTKQWQSLRTKLATWKDNISSIITTIESNKVTEEGSQASSSSAAAIQGLSVR

SEQ ID NO: 26391 - DNA, 961 bp, Arabidopsis thaliana
  misc_feature (1)..(961): Ceres Seq. ID no. 12422216
  misc_feature: MA Experiment ID: 108464 Result: Up-regulated in Transcription
  misc_feature: MA Experiment 108464 PARAMETER Experiment Name: At_Germinating_Seeds_cDNA_P Parameter: Age (day) Value: 4 vs. 0
  misc_feature: MA Experiment 108464 PARAMETER Experiment Name: At_Germinating_Seeds_cDNA_P Parameter: Tissue Value: Germinating Seeds
  misc_feature: MA Experiment ID: 108473 Result: Down-regulated in Transcription
  misc_feature: MA Experiment 108473 PARAMETER Experiment Name: At_Drought_Flowers_cDNA_P Parameter: Timepoint (hr) Value: 7 d
  misc_feature: MA Experiment 108473 PARAMETER Experiment Name: At_Drought_Flowers_cDNA_P Parameter: Tissue Value: Flower
  misc_feature: MA Experiment 108473 PARAMETER Experiment Name: At_Drought_Flowers_cDNA_P Parameter: Treatment Value: Drought vs. No Drought
  misc_feature: MA Experiment ID: 108489 Result: Down-regulated in Transcription
  misc_feature: MA Experiment ID: 20000070 Result: Down-regulated in Transcription
  misc_feature: MA Experiment 20000070 PARAMETER Experiment Name: At_100uM_ABA_Mutants_cDNA_P Parameter: Plant Line Value: CS24
  misc_feature: MA Experiment 20000070 PARAMETER Experiment Name: At_100uM_ABA_Mutants_cDNA_P Parameter: Timepoint (hr) Value: 6
  misc_feature: MA Experiment 20000070 PARAMETER Experiment Name: At_100uM_ABA_Mutants_cDNA_P Parameter: Tissue Value: Aerial
  misc_feature: MA Experiment 20000070 PARAMETER Experiment Name: At_100uM_ABA_Mutants_cDNA_P Parameter: Treatment Value: 100uM ABA vs. No Treatment
  misc_feature: MA Experiment ID: 20000071 Result: Down-regulated in Transcription
  misc_feature: MA Experiment 20000071 PARAMETER Experiment Name: At_100uM_ABA_Mutants_cDNA_P Parameter: Plant Line Value: CS8104
  misc_feature: MA Experiment 20000071 PARAMETER Experiment Name: At_100uM_ABA_Mutants_cDNA_P Parameter: Timepoint (hr) Value: 6
  misc_feature: MA Experiment 20000071 PARAMETER Experiment Name: At_100uM_ABA_Mutants_cDNA_P Parameter: Tissue Value: Aerial
  misc_feature: MA Experiment 20000071 PARAMETER Experiment Name: At_100uM_ABA_Mutants_cDNA_P Parameter: Treatment Value: 100uM ABA vs. No Treatment
  misc_feature: MA Experiment ID: 20000180 Result: Up-regulated in Transcription
  misc_feature: MA Experiment 20000180 PARAMETER Experiment Name: At_Germinating_Seeds_P Parameter: Age (hr) Value: 24 vs. 0
  misc_feature: MA Experiment 20000180 PARAMETER Experiment Name: At_Germinating_Seeds_P Parameter: Tissue Value: Germinating Seeds
  misc_feature: MA Experiment ID: 20000184 Result: Down-regulated in Transcription
  misc_feature: MA Experiment 20000184 PARAMETER Experiment Name: At_Shoots__P Parameter: Age (day) Value: 7
  misc_feature: MA Experiment 20000184 PARAMETER Experiment Name: At_Shoots__P Parameter: Tissue Value: Shoots vs. Whole Plant
  misc_feature: MA Experiment ID: 20000234 Result: Up-regulated in Transcription
  misc_feature: MA Experiment 20000234 PARAMETER Experiment Name: At_Siliques_P Parameter: Age (day) Value: 21
  misc_feature: MA Experiment 20000234 PARAMETER Experiment Name: At_Siliques_P Parameter: Organism Value: A. thaliana
  misc_feature: MA Experiment 20000234 PARAMETER Experiment Name: At_Siliques_P Parameter: Plant Line Value: WS
  misc_feature: MA Experiment 20000234 PARAMETER Experiment Name: At_Siliques_P Parameter: Tissue Value: Less Than 5mm Siliques vs. Whole Plant
  misc_feature: MA Experiment ID: 20000235 Result: Up-regulated in Transcription
  misc_feature: MA Experiment 20000235 PARAMETER Experiment Name: At_Siliques_P Parameter: Age (day) Value: 21
  misc_feature: MA Experiment 20000235 PARAMETER Experiment Name: At_Siliques_P Parameter: Organism Value: A. thaliana
  misc_feature: MA Experiment 20000235 PARAMETER Experiment Name: At_Siliques_P Parameter: Plant Line Value: WS
  misc_feature: MA Experiment 20000235 PARAMETER Experiment Name: At_Siliques_P Parameter: Tissue Value: 5-10mm Siliques vs. Whole Plant
  misc_feature: MA Experiment ID: 20000264 Result: Up-regulated in Transcription
  misc_feature: MA Experiment 20000264 PARAMETER Experiment Name: At_Open_Flower_P Parameter: Age (day) Value: 21
  misc_feature: MA Experiment 20000264 PARAMETER Experiment Name: At_Open_Flower_P Parameter: Plant Line Value: WS
  misc_feature: MA Experiment 20000264 PARAMETER Experiment Name: At_Open_Flower_P Parameter: Tissue Value: Open Flower vs. Whole Plant
  misc_feature: MA Experiment ID: 20000265 Result: Up-regulated in Transcription
  misc_feature: MA Experiment 20000265 PARAMETER Experiment Name: At_Open_Flower_P Parameter: Age (day) Value: 21
  misc_feature: MA Experiment 20000265 PARAMETER Experiment Name: At_Open_Flower_P Parameter: Plant Line Value: WS
  misc_feature: MA Experiment 20000265 PARAMETER Experiment Name: At_Open_Flower_P Parameter: Tissue Value: Closed Flower vs. Whole Plant
  misc_feature: MA Experiment ID: 20000286 Result: Up-regulated in Transcription
  misc_feature: MA Experiment 20000286 PARAMETER Experiment Name: At_Open_Flower_P Parameter: Age (day) Value: 21
  misc_feature: MA Experiment 20000286 PARAMETER Experiment Name: At_Open_Flower_P Parameter: Plant Line Value: WS
  misc_feature: MA Experiment 20000286 PARAMETER Experiment Name: At_Open_Flower_P Parameter: Tissue Value: Half Open vs. Whole Plant
  misc_feature: MA Experiment ID: 20000573 Result: Down-regulated in Transcription
  misc_feature: MA Experiment 20000573 PARAMETER Experiment Name: At_100uM_ABA_Mutants__P Parameter: Organism Value: A. thaliana
  misc_feature: MA Experiment 20000573 PARAMETER Experiment Name: At_100uM_ABA_Mutants__P Parameter: Plant Line Value: CS22 vs. Ler wt
  misc_feature: MA Experiment 20000573 PARAMETER Experiment Name: At_100uM_ABA_Mutants__P Parameter: Timepoint (hr) Value: N/A
  misc_feature: MA Experiment 20000573 PARAMETER Experiment Name: At_100uM_ABA_Mutants__P Parameter: Tissue Value: Whole Plant
  misc_feature: MA Experiment 20000573 PARAMETER Experiment Name: At_100uM_ABA_Mutants__P Parameter: Treatment Value: None
  misc_feature: MA Experiment ID: 20000574 Result: Down-regulated in Transcription
  misc_feature: MA Experiment 20000574 PARAMETER Experiment Name: At_100uM_ABA_Mutants__P Parameter: Organism Value: A. thaliana
  misc_feature: MA Experiment 20000574 PARAMETER Experiment Name: At_100uM_ABA_Mutants__P Parameter: Plant Line Value: CS23 vs. Ler wt
  misc_feature: MA Experiment 20000574 PARAMETER Experiment Name: At_100uM_ABA_Mutants__P Parameter: Timepoint (hr) Value: N/A
  misc_feature: MA Experiment 20000574 PARAMETER Experiment Name: At_100uM_ABA_Mutants__P Parameter: Tissue Value: Whole Plant
  misc_feature: MA Experiment 20000574 PARAMETER Experiment Name: At_100uM_ABA_Mutants__P Parameter: Treatment Value: None
  misc_feature: MA Experiment ID: 20001458 Result: Down-regulated in Transcription
  misc_feature: MA Experiment 20001458 PARAMETER Experiment Name: At_50mM_NH4NO3_L-to-H_P Parameter: Age (day) Value: Undefined
  misc_feature: MA Experiment 20001458 PARAMETER Experiment Name: At_50mM_NH4NO3_L-to-H_P Parameter: Organism Value: Undefined
  misc_feature: MA Experiment 20001458 PARAMETER Experiment Name: At_50mM_NH4NO3_L-to-H_P Parameter: Plant Line Value: Undefined
  misc_feature: MA Experiment 20001458 PARAMETER Experiment Name: At_50mM_NH4NO3_L-to-H_P Parameter: Timepoint (hr) Value: 2
  misc_feature: MA Experiment 20001458 PARAMETER Experiment Name: At_50mM_NH4NO3_L-to-H_P Parameter: Tissue Value: Siliques
  misc_feature: MA Experiment 20001458 PARAMETER Experiment Name: At_50mM_NH4NO3_L-to-H_P Parameter: Treatment Value: 50mM NH4NO3 vs. 100mM Manitol
  misc_feature: MA Experiment ID: 20001560 Result: Down-regulated in Transcription
  misc_feature: MA Experiment 20001560 PARAMETER Experiment Name: At_Drought_Soil_Dry_P Parameter: Age (day) Value: 28
  misc_feature: MA Experiment 20001560 PARAMETER Experiment Name: At_Drought_Soil_Dry_P Parameter: Organism Value: A. thaliana
  misc_feature: MA Experiment 20001560 PARAMETER Experiment Name: At_Drought_Soil_Dry_P Parameter: Plant Line Value: WS
  misc_feature: MA Experiment 20001560 PARAMETER Experiment Name: At_Drought_Soil_Dry_P Parameter: Post Timepoint (hr) Value: None
  misc_feature: MA Experiment 20001560 PARAMETER Experiment Name: At_Drought_Soil_Dry_P Parameter: Post-Treatment Value: None
  misc_feature: MA Experiment 20001560 PARAMETER Experiment Name: At_Drought_Soil_Dry_P Parameter: Timepoint (day) Value: 14
  misc_feature: MA Experiment 20001560 PARAMETER Experiment Name: At_Drought_Soil_Dry_P Parameter: Treatment Value: Drought vs. No Drought
  misc_feature: MA Experiment ID: 20001904 Result: Down-regulated in Transcription
  misc_feature: MA Experiment 20001904 PARAMETER Experiment Name: At_Drought_Reproduction_P Parameter: Age (day) Value: 37
  misc_feature: MA Experiment 20001904 PARAMETER Experiment Name: At_Drought_Reproduction_P Parameter: Organism Value: A. thaliana
  misc_feature: MA Experiment 20001904 PARAMETER Experiment Name: At_Drought_Reproduction_P Parameter: Plant Line Value: WS
  misc_feature: MA Experiment 20001904 PARAMETER Experiment Name: At_Drought_Reproduction_P Parameter: Timepoint (day) Value: 7
  misc_feature: MA Experiment 20001904 PARAMETER Experiment Name: At_Drought_Reproduction_P Parameter: Tissue Value: Rosettes
  misc_feature: MA Experiment 20001904 PARAMETER Experiment Name: At_Drought_Reproduction_P Parameter: Treatment Value: Drought vs. No Drought
atcattcatcaacatcatctctctttctctatctcgctgtccctccttctttttctcattcattgcaatgggcagaagatgctcacactgtggaaacgtaggacataactcaagaacatgttcttcttaccaaacaagagtagttaggctctttggtgttcatctagacaccacaagctcttctccgccgcctcctcctcctccctcgattttggccgctgcaataaagaaaagtttcagcatggattgcttgccggcatgttcctcctcttcctcttcctttgctggttatctctccgatggtctcgcccataaaacacctgaccgcaaaaaaggggttccatggacggcggaagagcaccggacgtttctaattggattagaaaagcttggaaaaggagattggagaggaatctctagaaacttcgtcgtcacaaaatccccgacacaagtggcaagtcatgctcaaaagtactttctccggcaaactaccactctccatcacaagagacgccgcaccagcctctttgatatggtttcggccggcaatggctgaagaaaatagtactactaagaggatatgtaatgatcatattgggtcgagctcaaaggttgtttggaaacaaggattactcaatcctcgtcttggatatccagatccgaaagtatcagtatccggctcgggtaactccggtggactcgatcttgagctgaagcttgcgtccattcaatctcctgaatcgaatattagacctattagcgttacgtgaatctatataacacgttatgatcagtttcattagtataattcaaatgtttacatatataatatcttatcgatcctatctaatttgattttgatttaacgttagttactttgataatttcgtcgatattgtttttttggttttttcattgtgagattttttgtcttggaagttggatccatacatatttctgg

SEQ ID NO: 26392 - protein, 184 aa, Arabidopsis thaliana
  peptide (1)..(184): Ceres Seq. ID no. 12422217
  misc_feature (112)..(159): Pfam Name: Myb-like DNA-binding domain Pfam Description: Myb-like DNA-binding domain
  misc_feature (21)..(178): Homolog of NCBI NO: 15240300 NR Description: transcriptional activator - like protein; protein
  misc_feature (23)..(40): Homolog of NCBI NO: 15228185 NR Description: putative MYB family transcription factor; protein
  misc_feature (96)..(180): Homolog of NCBI NO: 15228185 NR Description: putative MYB family transcription factor; protein
  misc_feature (23)..(42): Homolog of NCBI NO: 34912404 NR Description: putative Myb-related transcription factor
  misc_feature (96)..(184): Homolog of NCBI NO: 34912404 NR Description: putative Myb-related transcription factor
  misc_feature (23)..(179): Homolog of NCBI NO: 37536856 NR Description: putative Myb-related protein
  misc_feature (23)..(55): Homolog of NCBI NO: 2062176 NR Description: Myb-related transcription activator (MybSt1)
  misc_feature (96)..(180): Homolog of NCBI NO: 2062176 NR Description: Myb-related transcription activator (MybSt1)
  misc_feature (23)..(179): Homolog of NCBI NO: 24850307 NR Description: transcription factor MYBS3
  misc_feature (23)..(183): Homolog of NCBI NO: 15241963 NR Description: putative protein; protein id: At5g56840.1
SFINIISLSLSRCPSFFFSFIAMGRRCSHCGNVGHNSRTCSSYQTRVVRLFGVHLDTTSSSPPPPPPPSILAAAIKKSFSMDCLPACSSSSSSFAGYLSDGLAHKTPDRKKGVPWTAEEHRTFLIGLEKLGKGDWRGISRNFVVTKSPTQVASHAQKYFLRQTTTLHHKRRRTSLFDMVSAGNG

SEQ ID NO: 26393 - protein, 162 aa, Arabidopsis thaliana
  peptide (1)..(162): Ceres Seq. ID no. 12422218
  misc_feature (90)..(137): Pfam Name: Myb-like DNA-binding domain Pfam Description: Myb-like DNA-binding domain
  misc_feature (1)..(161): Homolog of NCBI NO: 15241963 NR Description: putative protein; protein id: At5g56840.1
  misc_feature (1)..(156): Homolog of NCBI NO: 15240300 NR Description: transcriptional activator - like protein; protein
  misc_feature (1)..(18): Homolog of NCBI NO: 15228185 NR Description: putative MYB family transcription factor; protein
  misc_feature (74)..(158): Homolog of NCBI NO: 15228185 NR Description: putative MYB family transcription factor; protein
  misc_feature (1)..(20): Homolog of NCBI NO: 34912404 NR Description: putative Myb-related transcription factor
  misc_feature (74)..(162): Homolog of NCBI NO: 34912404 NR Description: putative Myb-related transcription factor
  misc_feature (1)..(157): Homolog of NCBI NO: 37536856 NR Description: putative Myb-related protein
  misc_feature (1)..(33): Homolog of NCBI NO: 2062176 NR Description: Myb-related transcription activator (MybSt1)
  misc_feature (74)..(158): Homolog of NCBI NO: 2062176 NR Description: Myb-related transcription activator (MybSt1)
  misc_feature (1)..(157): Homolog of NCBI NO: 24850307 NR Description: transcription factor MYBS3
MGRRCSHCGNVGHNSRTCSSYQTRVVRLFGVHLDTTSSSPPPPPPPSILAAAIKKSFSMDCLPACSSSSSSFAGYLSDGLAHKTPDRKKGVPWTAEEHRTFLIGLEKLGKGDWRGISRNFVVTKSPTQVASHAQKYFLRQTTTLHHKRRRTSLFDMVSAGNG

SEQ ID NO: 26394 - protein, 104 aa, Arabidopsis thaliana
  peptide (1)..(104): Ceres Seq. ID no. 12422219
  misc_feature (32)..(79): Pfam Name: Myb-like DNA-binding domain Pfam Description: Myb-like DNA-binding domain
  misc_feature (1)..(104): Homolog of NCBI NO: 7705206 NR Description: MybSt1 [Solanum tuberosum]
  misc_feature (1)..(98): Homolog of NCBI NO: 15222521 NR Description: DNA binding protein MybSt1, putative; protein id:
  misc_feature (1)..(98): Homolog of NCBI NO: 34906444 NR Description: P0671B11.14 [Oryza sativa (japonica
  misc_feature (1)..(98): Homolog of NCBI NO: 15240300 NR Description: transcriptional activator - like protein; protein
  misc_feature (16)..(100): Homolog of NCBI NO: 15228185 NR Description: putative MYB family transcription factor; protein
  misc_feature (16)..(104): Homolog of NCBI NO: 34912404 NR Description: putative Myb-related transcription factor
  misc_feature (1)..(99): Homolog of NCBI NO: 37536856 NR Description: putative Myb-related protein
  misc_feature (16)..(100): Homolog of NCBI NO: 2062176 NR Description: Myb-related transcription activator (MybSt1)
  misc_feature (1)..(99): Homolog of NCBI NO: 24850307 NR Description: transcription factor MYBS3
  misc_feature (1)..(103): Homolog of NCBI NO: 15241963 NR Description: putative protein; protein id: At5g56840.1
MDCLPACSSSSSSFAGYLSDGLAHKTPDRKKGVPWTAEEHRTFLIGLEKLGKGDWRGISRNFVVTKSPTQVASHAQKYFLRQTTTLHHKRRRTSLFDMVSAGNG

SEQ ID NO: 26395 - DNA, 1124 bp, Arabidopsis thaliana
  misc_feature (1)..(1124): Ceres Seq. ID no. 12335713
  misc_feature: MA Experiment ID: 108433 Result: Up-regulated in Transcription
  misc_feature: MA Experiment 108433 PARAMETER Experiment Name: At_rhl_Mutant2_cDNA_P Parameter: Age (day) Value: 7
  misc_feature: MA Experiment 108433 PARAMETER Experiment Name: At_rhl_Mutant2_cDNA_P Parameter: Organism Value: A. thaliana
  misc_feature: MA Experiment 108433 PARAMETER Experiment Name: At_rhl_Mutant2_cDNA_P Parameter: Plant Line Value: rhl Mutant vs. wt landsburg
  misc_feature: MA Experiment 108433 PARAMETER Experiment Name: At_rhl_Mutant2_cDNA_P Parameter: Tissue Value: Roots
  misc_feature: MA Experiment ID: 108434 Result: Down-regulated in Transcription
  misc_feature: MA Experiment 108434 PARAMETER Experiment Name: At_Root_Tips_cDNA_P Parameter: Tissue Value: Root Tips
  misc_feature: MA Experiment ID: 20000069 Result: Up-regulated in Transcription
  misc_feature: MA Experiment 20000069 PARAMETER Experiment Name: At_100uM_ABA_Mutants_cDNA_P Parameter: Plant Line Value: CS23
  misc_feature: MA Experiment 20000069 PARAMETER Experiment Name: At_100uM_ABA_Mutants_cDNA_P Parameter: Timepoint (hr) Value: 6
  misc_feature: MA Experiment 20000069 PARAMETER Experiment Name: At_100uM_ABA_Mutants_cDNA_P Parameter: Tissue Value: Aerial
  misc_feature: MA Experiment 20000069 PARAMETER Experiment Name: At_100uM_ABA_Mutants_cDNA_P Parameter: Treatment Value: 100uM ABA vs. No Treatment
  misc_feature: MA Experiment ID: 20000089 Result: Up-regulated in Transcription
  misc_feature: MA Experiment ID: 20000111 Result: Down-regulated in Transcription
  misc_feature: MA Experiment 20000111 PARAMETER Experiment Name: At_42deg_Heat_cDNA_P Parameter: Temperature (deg C) Value: 42 vs. 22
  misc_feature: MA Experiment 20000111 PARAMETER Experiment Name: At_42deg_Heat_cDNA_P Parameter: Timepoint (hr) Value: 6
  misc_feature: MA Experiment 20000111 PARAMETER Experiment Name: At_42deg_Heat_cDNA_P Parameter: Tissue Value: Aerial
  misc_feature: MA Experiment ID: 20000144 Result: Down-regulated in Transcription
  misc_feature: MA Experiment 20000144 PARAMETER Experiment Name: At_42deg_Heat_cDNA_P Parameter: Temperature (deg C) Value: 42 vs. 22
  misc_feature: MA Experiment 20000144 PARAMETER Experiment Name: At_42deg_Heat_cDNA_P Parameter: Timepoint (hr) Value: 1
  misc_feature: MA Experiment 20000144 PARAMETER Experiment Name: At_42deg_Heat_cDNA_P Parameter: Tissue Value: Aerial
  misc_feature: MA Experiment ID: 20000173 Result: Down-regulated in Transcription
  misc_feature: MA Experiment 20000173 PARAMETER Experiment Name: At_42deg_Heat_P Parameter: Age (day) Value: 14
  misc_feature: MA Experiment 20000173 PARAMETER Experiment Name: At_42deg_Heat_P Parameter: Organism Value: A. thaliana
  misc_feature: MA Experiment 20000173 PARAMETER Experiment Name: At_42deg_Heat_P Parameter: Plant Line Value: WS
  misc_feature: MA Experiment 20000173 PARAMETER Experiment Name: At_42deg_Heat_P Parameter: Temperature (deg C) Value: 42 vs. 22
  misc_feature: MA Experiment 20000173 PARAMETER Experiment Name: At_42deg_Heat_P Parameter: Timepoint (hr) Value: 6
  misc_feature: MA Experiment 20000173 PARAMETER Experiment Name: At_42deg_Heat_P Parameter: Tissue Value: Aerial
  misc_feature: MA Experiment ID: 20000180 Result: Down-regulated in Transcription
  misc_feature: MA Experiment 20000180 PARAMETER Experiment Name: At_Germinating_Seeds_P Parameter: Age (hr) Value: 24 vs. 0
  misc_feature: MA Experiment 20000180 PARAMETER Experiment Name: At_Germinating_Seeds_P Parameter: Tissue Value: Germinating Seeds
  misc_feature: MA Experiment ID: 20000184 Result: Down-regulated in Transcription
  misc_feature: MA Experiment 20000184 PARAMETER Experiment Name: At_Shoots__P Parameter: Age (day) Value: 7
  misc_feature: MA Experiment 20000184 PARAMETER Experiment Name: At_Shoots__P Parameter: Tissue Value: Shoots vs. Whole Plant
  misc_feature: MA Experiment ID: 20000185 Result: Down-regulated in Transcription
  misc_feature: MA Experiment 20000185 PARAMETER Experiment Name: At_Roots__P Parameter: Age (day) Value: 7 vs. 21
  misc_feature: MA Experiment 20000185 PARAMETER Experiment Name: At_Roots__P Parameter: Organism Value: A. thaliana
  misc_feature: MA Experiment 20000185 PARAMETER Experiment Name: At_Roots__P Parameter: Tissue Value: Roots vs. Whole Plant
  misc_feature: MA Experiment ID: 20000227 Result: Down-regulated in Transcription
  misc_feature: MA Experiment 20000227 PARAMETER Experiment Name: At_Root-Tips-vs-Tops_P Parameter: Tissue Value: Root Tips vs. Root Tops
  misc_feature: MA Experiment ID: 20000234 Result: Up-regulated in Transcription
  misc_feature: MA Experiment 20000234 PARAMETER Experiment Name: At_Siliques_P Parameter: Age (day) Value: 21
  misc_feature: MA Experiment 20000234 PARAMETER Experiment Name: At_Siliques_P Parameter: Organism Value: A. thaliana
  misc_feature: MA Experiment 20000234 PARAMETER Experiment Name: At_Siliques_P Parameter: Plant Line Value: WS
  misc_feature: MA Experiment 20000234 PARAMETER Experiment Name: At_Siliques_P Parameter: Tissue Value: Less Than 5mm Siliques vs. Whole Plant
  misc_feature: MA Experiment ID: 20000438 Result: Down-regulated in Transcription
  misc_feature: MA Experiment 20000438 PARAMETER Experiment Name: At_Shoots__P Parameter: Age (day) Value: 14
  misc_feature: MA Experiment 20000438 PARAMETER Experiment Name: At_Shoots__P Parameter: Tissue Value: Shoots vs. Whole Plant
aacttagctcataagcatatctaatcggagctcggagaaatttcggttgtgaagagaagaaagatggggaatttgttttgttgtgtgcaagtggatcaatcaacggtagcgataaaggaaacattcgggaaattcgaagatgttcttgagcctggttgccattttcttccatggtgtcttggtagtcaagttgctggttacctctctctaagggttcagcaattggacgttcgttgcgagacaaagactaaggacaatgtgtttgttaatgttgttgcatcgattcagtaccgtgctttagctaataaggcaaatgatgcgtactacaagctcagtaacacaaggggtcagattcaagcttatgtgtttgatgttattagagcgagtgtcccgaagttgcttcttgatgatgtctttgagcagaagaatgatattgcgaaagctgttgaagaggagctcgagaaggcaatgtcggcttacggttatgagattgtgcaaactctcattgttgatatcgagcctgatgaacatgtcaaacgggccatgaacgaaatcaacgctgctgcaaggatgagattggctgcaaacgaaaaggcagaggcagagaaaatcctacagattaagagagctgaaggtgaagctgagtccaagtacctctctggtcttggtatcgcccgtcagaggcaggcgattgtcgatggattacgcgacagtgttttgggtttcgctgtgaatgtccctgggacaactgctaaagatgtgatggacatggtgctagttacacagtactttgacacaatgaaggagattggtgctagctccaagtcgtctgccgtgttcatacctcatggaccaggagcggttcgtgatgtggcttctcagattagagatggccttcttcaaggctcgtccgcaaacctgtgaagtgaattcactgattatgtcctcttttcttttgactatggtgtgattatcatcttcttctttcttttggattatgttcgaactcttttgttttggttttcttatttctatttgtatagacttattgggggtttataattcatatagaatattaaaacgtgtttagtactaattattattgtacacgaattatggtggtg

SEQ ID NO: 26396 - protein, 286 aa, Arabidopsis thaliana
  peptide (1)..(286): Ceres Seq. ID no. 12335714
  misc_feature (1)..(286): Homolog of NCBI NO: 3928150 NR Description: hypothetical protein [Cicer arietinum]
  misc_feature (1)..(282): Homolog of NCBI NO: 9998903 NR Description: putative membrane protein [Zea mays]
  misc_feature (1)..(282): Homolog of NCBI NO: 7716468 NR Description: hypersensitive-induced response protein [Zea mays]
  misc_feature (1)..(284): Homolog of NCBI NO: 15222481 NR Description: unknown protein
  misc_feature (1)..(280): Homolog of NCBI NO: 14150732 NR Description: hypersensitive-induced response protein [Oryza
  misc_feature (1)..(281): Homolog of NCBI NO: 23345042 NR Description: hypersensitive-induced reaction protein 1
  misc_feature (1)..(282): Homolog of NCBI NO: 7716466 NR Description: hypersensitive-induced response protein [Zea mays]
  misc_feature (1)..(285): Homolog of NCBI NO: 23345046 NR Description: hypersensitive-induced reaction protein 3
  misc_feature (1)..(283): Homolog of NCBI NO: 7716470 NR Description: hypersensitive-induced response protein [Zea mays]
  misc_feature (1)..(286): Homolog of NCBI NO: 15241939 NR Description: putative protein
MGNLFCCVQVDQSTVAIKETFGKFEDVLEPGCHFLPWCLGSQVAGYLSLRVQQLDVRCETKTKDNVFVNVVASIQYRALANKANDAYYKLSNTRGQIQAYVFDVIRASVPKLLLDDVFEQKNDIAKAVEEELEKAMSAYGYEIVQTLIVDIEPDEHVKRAMNEINAAARMRLAANEKAEAEKILQIKRAEGEAESKYLSGLGIARQRQAIVDGLRDSVLGFAVNVPGTTAKDVMDMVLVTQYFDTMKEIGASSKSSAVFIPHGPGAVRDVASQIRDGLLQGSSANL

SEQ ID NO: 26397 - protein, 151 aa, Arabidopsis thaliana
  peptide (1)..(151): Ceres Seq. ID no. 12335715
  misc_feature (1)..(151): Homolog of NCBI NO: 3928150 NR Description: hypothetical protein [Cicer arietinum]
  misc_feature (1)..(147): Homolog of NCBI NO: 9998903 NR Description: putative membrane protein [Zea mays]
  misc_feature (1)..(147): Homolog of NCBI NO: 7716468 NR Description: hypersensitive-induced response protein [Zea mays]
  misc_feature (1)..(149): Homolog of NCBI NO: 15222481 NR Description: unknown protein
  misc_feature (1)..(145): Homolog of NCBI NO: 14150732 NR Description: hypersensitive-induced response protein [Oryza
  misc_feature (1)..(146): Homolog of NCBI NO: 23345042 NR Description: hypersensitive-induced reaction protein 1
  misc_feature (1)..(147): Homolog of NCBI NO: 7716466 NR Description: hypersensitive-induced response protein [Zea mays]
  misc_feature (1)..(150): Homolog of NCBI NO: 23345046 NR Description: hypersensitive-induced reaction protein 3
  misc_feature (1)..(148): Homolog of NCBI NO: 7716470 NR Description: hypersensitive-induced response protein [Zea mays]
  misc_feature (1)..(151): Homolog of NCBI NO: 15241939 NR Description: putative protein
MSAYGYEIVQTLIVDIEPDEHVKRAMNEINAAARMRLAANEKAEAEKILQIKRAEGEAESKYLSGLGIARQRQAIVDGLRDSVLGFAVNVPGTTAKDVMDMVLVTQYFDTMKEIGASSKSSAVFIPHGPGAVRDVASQIRDGLLQGSSANL

SEQ ID NO: 26398 - DNA, 1430 bp, Arabidopsis thaliana
  misc_feature (1)..(1430): Ceres Seq. ID no. 13493929
  misc_feature: MA Experiment ID: 108434 Result: Down-regulated in Transcription
  misc_feature: MA Experiment 108434 PARAMETER Experiment Name: At_Root_Tips_cDNA_P Parameter: Tissue Value: Root Tips
  misc_feature: MA Experiment ID: 108461 Result: Up-regulated in Transcription
  misc_feature: MA Experiment 108461 PARAMETER Experiment Name: At_Germinating_Seeds_cDNA_P Parameter: Age (day) Value: 1 vs. 0
  misc_feature: MA Experiment 108461 PARAMETER Experiment Name: At_Germinating_Seeds_cDNA_P Parameter: Tissue Value: Germinating Seeds
  misc_feature: MA Experiment ID: 108462 Result: Up-regulated in Transcription
  misc_feature: MA Experiment 108462 PARAMETER Experiment Name: At_Germinating_Seeds_cDNA_P Parameter: Age (day) Value: 2 vs. 0
  misc_feature: MA Experiment 108462 PARAMETER Experiment Name: At_Germinating_Seeds_cDNA_P Parameter: Tissue Value: Germinating Seeds
  misc_feature: MA Experiment ID: 108464 Result: Up-regulated in Transcription
  misc_feature: MA Experiment 108464 PARAMETER Experiment Name: At_Germinating_Seeds_cDNA_P Parameter: Age (day) Value: 4 vs. 0
  misc_feature: MA Experiment 108464 PARAMETER Experiment Name: At_Germinating_Seeds_cDNA_P Parameter: Tissue Value: Germinating Seeds
  misc_feature: MA Experiment ID: 108569 Result: Up-regulated in Transcription
  misc_feature: MA Experiment 108569 PARAMETER Experiment Name: At_0.001%_MeJA__cDNA_P Parameter: Timepoint (hr) Value: 6
  misc_feature: MA Experiment 108569 PARAMETER Experiment Name: At_0.001%_MeJA__cDNA_P Parameter: Tissue Value: Aerial
  misc_feature: MA Experiment 108569 PARAMETER Experiment Name: At_0.001%_MeJA__cDNA_P Parameter: Treatment Value: 0.001% MeJA vs. No Treatment
  misc_feature: MA Experiment ID: 108573 Result: Up-regulated in Transcription
  misc_feature: MA Experiment 108573 PARAMETER Experiment Name: At_Drought_cDNA_P Parameter: Timepoint (hr) Value: 6
  misc_feature: MA Experiment 108573 PARAMETER Experiment Name: At_Drought_cDNA_P Parameter: Tissue Value: Aerial
  misc_feature: MA Experiment 108573 PARAMETER Experiment Name: At_Drought_cDNA_P Parameter: Treatment Value: Drought vs. No Drought
  misc_feature: MA Experiment ID: 20000069 Result: Down-regulated in Transcription
  misc_feature: MA Experiment 20000069 PARAMETER Experiment Name: At_100uM_ABA_Mutants_cDNA_P Parameter: Plant Line Value: CS23
  misc_feature: MA Experiment 20000069 PARAMETER Experiment Name: At_100uM_ABA_Mutants_cDNA_P Parameter: Timepoint (hr) Value: 6
  misc_feature: MA Experiment 20000069 PARAMETER Experiment Name: At_100uM_ABA_Mutants_cDNA_P Parameter: Tissue Value: Aerial
  misc_feature: MA Experiment 20000069 PARAMETER Experiment Name: At_100uM_ABA_Mutants_cDNA_P Parameter: Treatment Value: 100uM ABA vs. No Treatment
  misc_feature: MA Experiment ID: 20000071 Result: Down-regulated in Transcription
  misc_feature: MA Experiment 20000071 PARAMETER Experiment Name: At_100uM_ABA_Mutants_cDNA_P Parameter: Plant Line Value: CS8104
  misc_feature: MA Experiment 20000071 PARAMETER Experiment Name: At_100uM_ABA_Mutants_cDNA_P Parameter: Timepoint (hr) Value: 6
  misc_feature: MA Experiment 20000071 PARAMETER Experiment Name: At_100uM_ABA_Mutants_cDNA_P Parameter: Tissue Value: Aerial
  misc_feature: MA Experiment 20000071 PARAMETER Experiment Name: At_100uM_ABA_Mutants_cDNA_P Parameter: Treatment Value: 100uM ABA vs. No Treatment
  misc_feature: MA Experiment ID: 20000072 Result: Down-regulated in Transcription
  misc_feature: MA Experiment 20000072 PARAMETER Experiment Name: At_100uM_ABA_Mutants_cDNA_P Parameter: Plant Line Value: CS8105
  misc_feature: MA Experiment 20000072 PARAMETER Experiment Name: At_100uM_ABA_Mutants_cDNA_P Parameter: Timepoint (hr) Value: 6
  misc_feature: MA Experiment 20000072 PARAMETER Experiment Name: At_100uM_ABA_Mutants_cDNA_P Parameter: Tissue Value: Aerial
  misc_feature: MA Experiment 20000072 PARAMETER Experiment Name: At_100uM_ABA_Mutants_cDNA_P Parameter: Treatment Value: 100uM ABA vs. No Treatment
  misc_feature: MA Experiment ID: 20000087 Result: Down-regulated in Transcription
  misc_feature: MA Experiment 20000087 PARAMETER Experiment Name: At_100uM_ABA_Mutants_cDNA_P Parameter: Plant Line Value: WS
  misc_feature: MA Experiment 20000087 PARAMETER Experiment Name: At_100uM_ABA_Mutants_cDNA_P Parameter: Timepoint (hr) Value: 6
  misc_feature: MA Experiment 20000087 PARAMETER Experiment Name: At_100uM_ABA_Mutants_cDNA_P Parameter: Tissue Value: Aerial
  misc_feature: MA Experiment 20000087 PARAMETER Experiment Name: At_100uM_ABA_Mutants_cDNA_P Parameter: Treatment Value: 100uM ABA vs. No Treatment
  misc_feature: MA Experiment ID: 20000089 Result: Down-regulated in Transcription
  misc_feature: MA Experiment ID: 20000117 Result: Down-regulated in Transcription
  misc_feature: MA Experiment 20000117 PARAMETER Experiment Name: At_100uM_ABA_Mutants_cDNA_P Parameter: Plant Line Value: Columbia
  misc_feature: MA Experiment 20000117 PARAMETER Experiment Name: At_100uM_ABA_Mutants_cDNA_P Parameter: Timepoint (hr) Value: 6
  misc_feature: MA Experiment 20000117 PARAMETER Experiment Name: At_100uM_ABA_Mutants_cDNA_P Parameter: Tissue Value: Aerial
  misc_feature: MA Experiment 20000117 PARAMETER Experiment Name: At_100uM_ABA_Mutants_cDNA_P Parameter: Treatment Value: 100uM ABA vs. No Treatment
  misc_feature: MA Experiment ID: 20000180 Result: Up-regulated in Transcription
  misc_feature: MA Experiment 20000180 PARAMETER Experiment Name: At_Germinating_Seeds_P Parameter: Age (hr) Value: 24 vs. 0
  misc_feature: MA Experiment 20000180 PARAMETER Experiment Name: At_Germinating_Seeds_P Parameter: Tissue Value: Germinating Seeds
  misc_feature: MA Experiment ID: 20000185 Result: Up-regulated in Transcription
  misc_feature: MA Experiment 20000185 PARAMETER Experiment Name: At_Roots__P Parameter: Age (day) Value: 7 vs. 21
  misc_feature: MA Experiment 20000185 PARAMETER Experiment Name: At_Roots__P Parameter: Organism Value: A. thaliana
  misc_feature: MA Experiment 20000185 PARAMETER Experiment Name: At_Roots__P Parameter: Tissue Value: Roots vs. Whole Plant
  misc_feature: MA Experiment ID: 20000267 Result: Down-regulated in Transcription
  misc_feature: MA Experiment 20000267 PARAMETER Experiment Name: At_Drought_P Parameter: Age (day) Value: 7
  misc_feature: MA Experiment 20000267 PARAMETER Experiment Name: At_Drought_P Parameter: Organism Value: A. thaliana
  misc_feature: MA Experiment 20000267 PARAMETER Experiment Name: At_Drought_P Parameter: Plant Line Value: WS
  misc_feature: MA Experiment 20000267 PARAMETER Experiment Name: At_Drought_P Parameter: Timepoint (hr) Value: 6
  misc_feature: MA Experiment 20000267 PARAMETER Experiment Name: At_Drought_P Parameter: Tissue Value: Whole Plant
  misc_feature: MA Experiment 20000267 PARAMETER Experiment Name: At_Drought_P Parameter: Treatment Value: Drought vs. No Drought
  misc_feature: MA Experiment ID: 20000436 Result: Down-regulated in Transcription
  misc_feature: MA Experiment 20000436 PARAMETER Experiment Name: At_Drought_P Parameter: Age (day) Value: 7
  misc_feature: MA Experiment 20000436 PARAMETER Experiment Name: At_Drought_P Parameter: Organism Value: A. thaliana
  misc_feature: MA Experiment 20000436 PARAMETER Experiment Name: At_Drought_P Parameter: Plant Line Value: WS
  misc_feature: MA Experiment 20000436 PARAMETER Experiment Name: At_Drought_P Parameter: Timepoint (hr) Value: 12
  misc_feature: MA Experiment 20000436 PARAMETER Experiment Name: At_Drought_P Parameter: Tissue Value: Whole Plant
  misc_feature: MA Experiment 20000436 PARAMETER Experiment Name: At_Drought_P Parameter: Treatment Value: Drought vs. No Drought
  misc_feature: MA Experiment ID: 20000437 Result: Down-regulated in Transcription
  misc_feature: MA Experiment 20000437 PARAMETER Experiment Name: At_Drought_P Parameter: Age (day) Value: 8
  misc_feature: MA Experiment 20000437 PARAMETER Experiment Name: At_Drought_P Parameter: Organism Value: A. thaliana
  misc_feature: MA Experiment 20000437 PARAMETER Experiment Name: At_Drought_P Parameter: Plant Line Value: WS
  misc_feature: MA Experiment 20000437 PARAMETER Experiment Name: At_Drought_P Parameter: Timepoint (hr) Value: 24
  misc_feature: MA Experiment 20000437 PARAMETER Experiment Name: At_Drought_P Parameter: Tissue Value: Whole Plant
  misc_feature: MA Experiment 20000437 PARAMETER Experiment Name: At_Drought_P Parameter: Treatment Value: Drought vs. No Drought
  misc_feature: MA Experiment ID: 20000794 Result: Up-regulated in Transcription
  misc_feature: MA Experiment 20000794 PARAMETER Experiment Name: At_Petals_P Parameter: Age (day) Value: 23-25 days
  misc_feature: MA Experiment 20000794 PARAMETER Experiment Name: At_Petals_P Parameter: Plant Line Value: WS
  misc_feature: MA Experiment 20000794 PARAMETER Experiment Name: At_Petals_P Parameter: Tissue Value: Petals vs. Whole plant
  misc_feature: MA Experiment ID: 20001248 Result: Down-regulated in Transcription
  misc_feature: MA Experiment 20001248 PARAMETER Experiment Name: At_Far-red-induction_P Parameter: Age (day) Value: 7
  misc_feature: MA Experiment 20001248 PARAMETER Experiment Name: At_Far-red-induction_P Parameter: Light Value: Far-red vs. White
  misc_feature: MA Experiment 20001248 PARAMETER Experiment Name: At_Far-red-induction_P Parameter: Organism Value: A. thaliana
  misc_feature: MA Experiment 20001248 PARAMETER Experiment Name: At_Far-red-induction_P Parameter: Plant Line Value: Columbia
  misc_feature: MA Experiment 20001248 PARAMETER Experiment Name: At_Far-red-induction_P Parameter: Timepoint (hr) Value: 4
  misc_feature: MA Experiment 20001248 PARAMETER Experiment Name: At_Far-red-induction_P Parameter: Tissue Value: Whole Plant
  misc_feature: MA Experiment ID: 20001555 Result: Down-regulated in Transcription
  misc_feature: MA Experiment 20001555 PARAMETER Experiment Name: At_Drought_Soil_Dry_P Parameter: Age (day) Value: 24
  misc_feature: MA Experiment 20001555 PARAMETER Experiment Name: At_Drought_Soil_Dry_P Parameter: Organism Value: A. thaliana
  misc_feature: MA Experiment 20001555 PARAMETER Experiment Name: At_Drought_Soil_Dry_P Parameter: Plant Line Value: WS
  misc_feature: MA Experiment 20001555 PARAMETER Experiment Name: At_Drought_Soil_Dry_P Parameter: Post Timepoint (hr) Value: None
  misc_feature: MA Experiment 20001555 PARAMETER Experiment Name: At_Drought_Soil_Dry_P Parameter: Post-Treatment Value: None
  misc_feature: MA Experiment 20001555 PARAMETER Experiment Name: At_Drought_Soil_Dry_P Parameter: Timepoint (day) Value: 10
  misc_feature: MA Experiment 20001555 PARAMETER Experiment Name: At_Drought_Soil_Dry_P Parameter: Treatment Value: Drought vs. No Drought
gatcatctcattaacaaaaataaaacacacaatctcaagattttctacttcttattacaaagattcaatcttcttgtttcttcttgcaaccatgagtcttcttgcagatcttgttaaccttgacatctcagacaacagtgaaaagatcatcgctgaatacatatgggttggtggttctggtatggacatgagaagcaaagccaggactctccctggacctgtgaccgatccatcaaaacttccaaagtggaactatgatggttcaagcactggtcaagctcctggtcaagacagtgaagtgatcttataccctcaagcaattttcaaagatccattccgtagaggcaacaacatccttgttatgtgtgatgcttacactccagcgggagagccaatccctactaacaagcgacatgctgcggctgagatctttgctaaccctgatgttattgctgaagtgccatggtatggaatcgaacaagaatacactttgttgcagaaggatgtgaactggcctcttggatggcccattggtggcttccctggccctcagggaccatactactgcagtattggagctgacaaatcttttggaagagacattgttgatgctcactacaaagcctctttgtatgctggaatcaacatcagtgggatcaatggagaagtcatgccgggacaatgggagttccaagtcggcccatcggtcggtatctcagctgctgatgaaatatggatcgctcgttacattttggagaggatcacagagattgctggtgtggttgtatcttttgacccaaaacctattcctggtgactggaatggagctggtgctcacaccaattacagtactaaatcaatgagggaagaaggaggatacgagataatcaagaaggcgatcgagaagcttggcttgagacacaaggaacacatttccgcttacggtgaaggaaacgagcgtcgtctcacgggacaccatgaaactgctgacatcaacactttcctttggggtgttgcgaaccgtggtgcatcgatccgagtaggacgtgacaccgagaaagaagggaagggatactttgaggataggaggccagcttcaaacatggacccttacgttgttacttccatgattgcagagactacactcctctggaacccttgaaaggatgatccgtaactcttgaagttgcttctgattgggttttttggaagttccaagcttgtcttttctctacagtgtgtattaagcaattgtaccggttgacactgccggagtttgtgatttggggcctttctttctttttcttctttttataatcttttgggttctgtggttagagcaaattcggtttgctctgtttgtttgacctttattgaaacctttggtattggtactaataatacaatctgaaaaggcctcttcatgttcc

SEQ ID NO: 26399 - protein, 386 aa, Arabidopsis thaliana
  peptide (1)..(386): Ceres Seq. ID no. 13493930
  misc_feature (133)..(385): Pfam Name: Glutamine synthetase, catalytic domain Pfam Description: Glutamine synthetase, catalytic domain
  misc_feature (31)..(386): Homolog of NCBI NO: 1076475 NR Description: Gln 1.3 protein - radish
  misc_feature (31)..(386): Homolog of NCBI NO: 1084350 NR Description: glutamate-ammonia ligase (EC 6.3.1.2) - rape
  misc_feature (31)..(386): Homolog of NCBI NO: 15240288 NR Description: glutamate--ammonia ligase [Arabidopsis thaliana]
  misc_feature (31)..(386): Homolog of NCBI NO: 1076474 NR Description: Gln 1.2 protein - radish
  misc_feature (31)..(386): Homolog of NCBI NO: 1934756 NR Description: cytosolic glutamine synthetase [Brassica napus]
  misc_feature (31)..(386): Homolog of NCBI NO: 481914 NR Description: glutamate-ammonia ligase (EC 6.3.1.2) - rape
  misc_feature (31)..(386): Homolog of NCBI NO: 228455 NR Description: Gln synthetase
  misc_feature (31)..(386): Homolog of NCBI NO: 99697 NR Description: glutamate-ammonia ligase (EC 6.3.1.2), cytosolic
  misc_feature (31)..(386): Homolog of NCBI NO: 21554857 NR Description: glutamine synthetase, putative [Arabidopsis
  misc_feature (31)..(386): Homolog of NCBI NO: 15219598 NR Description: glutamine synthetase -related [Arabidopsis
IISLTKIKHTISRFSTSYYKDSIFLFLLATMSLLADLVNLDISDNSEKIIAEYIWVGGSGMDMRSKARTLPGPVTDPSKLPKWNYDGSSTGQAPGQDSEVILYPQAIFKDPFRRGNNILVMCDAYTPAGEPIPTNKRHAAAEIFANPDVIAEVPWYGIEQEYTLLQKDVNWPLGWPIGGFPGPQGPYYCSIGADKSFGRDIVDAHYKASLYAGINISGINGEVMPGQWEFQVGPSVGISAADEIWIARYILERITEIAGVVVSFDPKPIPGDWNGAGAHTNYSTKSMREEGGYEIIKKAIEKLGLRHKEHISAYGEGNERRLTGHHETADINTFLWGVANRGASIRVGRDTEKEGKGYFEDRRPASNMDPYVVTSMIAETTLLWNP

SEQ ID NO: 26400 - protein, 356 aa, Arabidopsis thaliana
  peptide (1)..(356): Ceres Seq. ID no. 13493931
  misc_feature (103)..(355): Pfam Name: Glutamine synthetase, catalytic domain Pfam Description: Glutamine synthetase, catalytic domain
  misc_feature (1)..(356): Homolog of NCBI NO: 1076475 NR Description: Gln 1.3 protein - radish
  misc_feature (1)..(356): Homolog of NCBI NO: 1084350 NR Description: glutamate-ammonia ligase (EC 6.3.1.2) - rape
  misc_feature (1)..(356): Homolog of NCBI NO: 15240288 NR Description: glutamate--ammonia ligase [Arabidopsis thaliana]
  misc_feature (1)..(356): Homolog of NCBI NO: 1076474 NR Description: Gln 1.2 protein - radish
  misc_feature (1)..(356): Homolog of NCBI NO: 1934756 NR Description: cytosolic glutamine synthetase [Brassica napus]
  misc_feature (1)..(356): Homolog of NCBI NO: 481914 NR Description: glutamate-ammonia ligase (EC 6.3.1.2) - rape
  misc_feature (1)..(356): Homolog of NCBI NO: 228455 NR Description: Gln synthetase
  misc_feature (1)..(356): Homolog of NCBI NO: 99697 NR Description: glutamate-ammonia ligase (EC 6.3.1.2), cytosolic
  misc_feature (1)..(356): Homolog of NCBI NO: 21554857 NR Description: glutamine synthetase, putative [Arabidopsis
  misc_feature (1)..(356): Homolog of NCBI NO: 15219598 NR Description: glutamine synthetase -related [Arabidopsis
MSLLADLVNLDISDNSEKIIAEYIWVGGSGMDMRSKARTLPGPVTDPSKLPKWNYDGSSTGQAPGQDSEVILYPQAIFKDPFRRGNNILVMCDAYTPAGEPIPTNKRHAAAEIFANPDVIAEVPWYGIEQEYTLLQKDVNWPLGWPIGGFPGPQGPYYCSIGADKSFGRDIVDAHYKASLYAGINISGINGEVMPGQWEFQVGPSVGISAADEIWIARYILERITEIAGVVVSFDPKPIPGDWNGAGAHTNYSTKSMREEGGYEIIKKAIEKLGLRHKEHISAYGEGNERRLTGHHETADINTFLWGVANRGASIRVGRDTEKEGKGYFEDRRPASNMDPYVVTSMIAETTLLWNP

SEQ ID NO: 26401 - protein, 326 aa, Arabidopsis thaliana
  peptide (1)..(326): Ceres Seq. ID no. 13493932
  misc_feature (73)..(325): Pfam Name: Glutamine synthetase, catalytic domain Pfam Description: Glutamine synthetase, catalytic domain
  misc_feature (1)..(326): Homolog of NCBI NO: 1076475 NR Description: Gln 1.3 protein - radish
  misc_feature (1)..(326): Homolog of NCBI NO: 1084350 NR Description: glutamate-ammonia ligase (EC 6.3.1.2) - rape
  misc_feature (1)..(326): Homolog of NCBI NO: 15240288 NR Description: glutamate--ammonia ligase [Arabidopsis thaliana]
  misc_feature (1)..(326): Homolog of NCBI NO: 1076474 NR Description: Gln 1.2 protein - radish
  misc_feature (1)..(326): Homolog of NCBI NO: 1934756 NR Description: cytosolic glutamine synthetase [Brassica napus]
  misc_feature (1)..(326): Homolog of NCBI NO: 481914 NR Description: glutamate-ammonia ligase (EC 6.3.1.2) - rape
  misc_feature (1)..(326): Homolog of NCBI NO: 228455 NR Description: Gln synthetase
  misc_feature (1)..(326): Homolog of NCBI NO: 99697 NR Description: glutamate-ammonia ligase (EC 6.3.1.2), cytosolic
  misc_feature (1)..(326): Homolog of NCBI NO: 21554857 NR Description: glutamine synthetase, putative [Arabidopsis
  misc_feature (1)..(326): Homolog of NCBI NO: 15219598 NR Description: glutamine synthetase -related [Arabidopsis
MDMRSKARTLPGPVTDPSKLPKWNYDGSSTGQAPGQDSEVILYPQAIFKDPFRRGNNILVMCDAYTPAGEPIPTNKRHAAAEIFANPDVIAEVPWYGIEQEYTLLQKDVNWPLGWPIGGFPGPQGPYYCSIGADKSFGRDIVDAHYKASLYAGINISGINGEVMPGQWEFQVGPSVGISAADEIWIARYILERITEIAGVVVSFDPKPIPGDWNGAGAHTNYSTKSMREEGGYEIIKKAIEKLGLRHKEHISAYGEGNERRLTGHHETADINTFLWGVANRGASIRVGRDTEKEGKGYFEDRRPASNMDPYVVTSMIAETTLLWNP

SEQ ID NO: 26402 - DNA, 860 bp, Arabidopsis thaliana
  misc_feature (1)..(860): Ceres Seq. ID no. 13505019
  misc_feature: MA Experiment ID: 108488 Result: Down-regulated in Transcription
  misc_feature: MA Experiment ID: 108576 Result: Down-regulated in Transcription
  misc_feature: MA Experiment 108576 PARAMETER Experiment Name: At_42deg_Heat_cDNA_P Parameter: Temperature (deg C) Value: 42 vs. 22
  misc_feature: MA Experiment 108576 PARAMETER Experiment Name: At_42deg_Heat_cDNA_P Parameter: Timepoint (hr) Value: 1
  misc_feature: MA Experiment 108576 PARAMETER Experiment Name: At_42deg_Heat_cDNA_P Parameter: Tissue Value: Aerial
  misc_feature: MA Experiment ID: 108577 Result: Down-regulated in Transcription
  misc_feature: MA Experiment 108577 PARAMETER Experiment Name: At_42deg_Heat_cDNA_P Parameter: Temperature (deg C) Value: 42 vs. 22
  misc_feature: MA Experiment 108577 PARAMETER Experiment Name: At_42deg_Heat_cDNA_P Parameter: Timepoint (hr) Value: 6
  misc_feature: MA Experiment 108577 PARAMETER Experiment Name: At_42deg_Heat_cDNA_P Parameter: Tissue Value: Aerial
  misc_feature: MA Experiment ID: 20000111 Result: Down-regulated in Transcription
  misc_feature: MA Experiment 20000111 PARAMETER Experiment Name: At_42deg_Heat_cDNA_P Parameter: Temperature (deg C) Value: 42 vs. 22
  misc_feature: MA Experiment 20000111 PARAMETER Experiment Name: At_42deg_Heat_cDNA_P Parameter: Timepoint (hr) Value: 6
  misc_feature: MA Experiment 20000111 PARAMETER Experiment Name: At_42deg_Heat_cDNA_P Parameter: Tissue Value: Aerial
  misc_feature: MA Experiment ID: 20000113 Result: Down-regulated in Transcription
  misc_feature: MA Experiment 20000113 PARAMETER Experiment Name: At_42deg_Heat_cDNA_P Parameter: Temperature (deg C) Value: 42 vs. 22
  misc_feature: MA Experiment 20000113 PARAMETER Experiment Name: At_42deg_Heat_cDNA_P Parameter: Timepoint (hr) Value: 8
  misc_feature: MA Experiment 20000113 PARAMETER Experiment Name: At_42deg_Heat_cDNA_P Parameter: Tissue Value: Aerial
  misc_feature: MA Experiment ID: 20000144 Result: Down-regulated in Transcription
  misc_feature: MA Experiment 20000144 PARAMETER Experiment Name: At_42deg_Heat_cDNA_P Parameter: Temperature (deg C) Value: 42 vs. 22
  misc_feature: MA Experiment 20000144 PARAMETER Experiment Name: At_42deg_Heat_cDNA_P Parameter: Timepoint (hr) Value: 1
  misc_feature: MA Experiment 20000144 PARAMETER Experiment Name: At_42deg_Heat_cDNA_P Parameter: Tissue Value: Aerial
  misc_feature: MA Experiment ID: 20000224 Result: Down-regulated in Transcription
  misc_feature: MA Experiment ID: 20000227 Result: Down-regulated in Transcription
  misc_feature: MA Experiment 20000227 PARAMETER Experiment Name: At_Root-Tips-vs-Tops_P Parameter: Tissue Value: Root Tips vs. Root Tops
aatatcaatagccgtacacgcgtgaagactgacaatattatctttttcgaattcggagctcaagtttgaaattcggagaagctagagagttttctgagatggctcgtactaagcaaacagctcgtaagtctactggaggaaaggctcctaggaagcagcttgctacaaaggctgcacgtaagtctgcaccaaccactggaggagtcaagaagccccatcgttaccgtccaggaactgttgcactacgtgaaattcgtaagtaccagaagagtaccgagttgctgatcaggaagctccctttccagaggctagttcgtgagattgcccaggatttcaagactgacttgcgtttccagagccatgctgtgcttgcactccaggaggctgctgaagcataccttgtgggtctctttgaggacactaacctctgcgccatccatgccaagcgtgtgaccataatgcccaaagacattcagctcgctcgcaggatcagaggagaacgtgcttaattgtgattgggaagtagttggattatgtgaatgtgggtggttttctaaatagatagttggaattagataatggcttaaaaagcttttgggtgtaggagacttggaaacaatggtgttttttttttcttttctttctgtttcttgtctagtcggtttatgatttgcttgtgttcttcttagctacgttttgtggtgtgtattgctttcttctttggcaatgttgaacaccttttgttgttgaattcatctctgaaacatatgaatatgttaaagtttctgactcttgtttcatctgtatctgttcgatattgtatgattgagttttattgtttatcaataagctttctgttt

SEQ ID NO: 26403 - protein, 136 aa, Arabidopsis thaliana
  peptide (1)..(136): Ceres Seq. ID no. 13505020
  misc_feature (17)..(135): Pfam Name: Core histone H2A/H2B/H3/H4 Pfam Description: Core histone H2A/H2B/H3/H4
  misc_feature (17)..(135): Pfam Name: Core histone H2A/H2B/H3/H4 Pfam Description: Core histone H2A/H2B/H3/H4
  misc_feature (1)..(136): Homolog of NCBI NO: 34876394 NR Description: similar to histone protein Hist2h3c1 [Rattus
  misc_feature (1)..(136): Homolog of NCBI NO: 30061401 NR Description: histone 2, H3ca1 [Mus musculus]
  misc_feature (1)..(136): Homolog of NCBI NO: 7305139 NR Description: histone 1, H3f; histone H3; histone gene complex
  misc_feature (1)..(136): Homolog of NCBI NO: 2119013 NR Description: histone H3.2 protein - shrew mouse
  misc_feature (1)..(136): Homolog of NCBI NO: 34858260 NR Description: similar to histone protein Hist2h3c1 [Rattus
  misc_feature (1)..(136): Homolog of NCBI NO: 34876394 NR Description: similar to histone protein Hist2h3c1 [Rattus
  misc_feature (1)..(136): Homolog of NCBI NO: 7305139 NR Description: histone 1, H3f; histone H3; histone gene complex
  misc_feature (1)..(136): Homolog of NCBI NO: 34858260 NR Description: similar to histone protein Hist2h3c1 [Rattus
  misc_feature (1)..(136): Homolog of NCBI NO: 15236103 NR Description: histone H3.2 [Arabidopsis thaliana]
  misc_feature (1)..(136): Homolog of NCBI NO: 18698662 NR Description: disease-resistent-related protein [Oryza sativa]
  misc_feature (1)..(136): Homolog of NCBI NO: 34876396 NR Description: similar to H3 histone family, member I [Rattus
  misc_feature (1)..(136): Homolog of NCBI NO: 34876364 NR Description: similar to CG31613-PA [Rattus norvegicus]
  misc_feature (1)..(136): Homolog of NCBI NO: 34858254 NR Description: similar to histone protein Hist2h3c1 [Rattus
  misc_feature (1)..(136): Homolog of NCBI NO: 2119013 NR Description: histone H3.2 protein - shrew mouse
  misc_feature (1)..(136): Homolog of NCBI NO: 30061401 NR Description: histone 2, H3ca1 [Mus musculus]
  misc_feature (1)..(136): Homolog of NCBI NO: 34858254 NR Description: similar to histone protein Hist2h3c1 [Rattus
  misc_feature (1)..(136): Homolog of NCBI NO: 34876364 NR Description: similar to CG31613-PA [Rattus norvegicus]
  misc_feature (1)..(136): Homolog of NCBI NO: 34876396 NR Description: similar to H3 histone family, member I [Rattus
  misc_feature (1)..(136): Homolog of NCBI NO: 18698662 NR Description: disease-resistent-related protein [Oryza sativa]
  misc_feature (1)..(136): Homolog of NCBI NO: 15236103 NR Description: histone H3.2 [Arabidopsis thaliana]
MARTKQTARKSTGGKAPRKQLATKAARKSAPTTGGVKKPHRYRPGTVALREIRKYQKSTELLIRKLPFQRLVREIAQDFKTDLRFQSHAVLALQEAAEAYLVGLFEDTNLCAIHAKRVTIMPKDIQLARRIRGERA

SEQ ID NO: 26404 - DNA, 624 bp, Arabidopsis thaliana
  misc_feature (1)..(624): Ceres Seq. ID no. 12331703
  misc_feature: MA Experiment ID: 108434 Result: Up-regulated in Transcription
  misc_feature: MA Experiment 108434 PARAMETER Experiment Name: At_Root_Tips_cDNA_P Parameter: Tissue Value: Root Tips
  misc_feature: MA Experiment ID: 108461 Result: Down-regulated in Transcription
  misc_feature: MA Experiment 108461 PARAMETER Experiment Name: At_Germinating_Seeds_cDNA_P Parameter: Age (day) Value: 1 vs. 0
  misc_feature: MA Experiment 108461 PARAMETER Experiment Name: At_Germinating_Seeds_cDNA_P Parameter: Tissue Value: Germinating Seeds
  misc_feature: MA Experiment ID: 108462 Result: Down-regulated in Transcription
  misc_feature: MA Experiment 108462 PARAMETER Experiment Name: At_Germinating_Seeds_cDNA_P Parameter: Age (day) Value: 2 vs. 0
  misc_feature: MA Experiment 108462 PARAMETER Experiment Name: At_Germinating_Seeds_cDNA_P Parameter: Tissue Value: Germinating Seeds
  misc_feature: MA Experiment ID: 108463 Result: Down-regulated in Transcription
  misc_feature: MA Experiment 108463 PARAMETER Experiment Name: At_Germinating_Seeds_cDNA_P Parameter: Age (day) Value: 3 vs. 0
  misc_feature: MA Experiment 108463 PARAMETER Experiment Name: At_Germinating_Seeds_cDNA_P Parameter: Tissue Value: Germinating Seeds
  misc_feature: MA Experiment ID: 108464 Result: Down-regulated in Transcription
  misc_feature: MA Experiment 108464 PARAMETER Experiment Name: At_Germinating_Seeds_cDNA_P Parameter: Age (day) Value: 4 vs. 0
  misc_feature: MA Experiment 108464 PARAMETER Experiment Name: At_Germinating_Seeds_cDNA_P Parameter: Tissue Value: Germinating Seeds
  misc_feature: MA Experiment ID: 108573 Result: Down-regulated in Transcription
  misc_feature: MA Experiment 108573 PARAMETER Experiment Name: At_Drought_cDNA_P Parameter: Timepoint (hr) Value: 6
  misc_feature: MA Experiment 108573 PARAMETER Experiment Name: At_Drought_cDNA_P Parameter: Tissue Value: Aerial
  misc_feature: MA Experiment 108573 PARAMETER Experiment Name: At_Drought_cDNA_P Parameter: Treatment Value: Drought vs. No Drought
  misc_feature: MA Experiment ID: 108579 Result: Up-regulated in Transcription
  misc_feature: MA Experiment 108579 PARAMETER Experiment Name: At_4deg_Cold_cDNA_P Parameter: Temperature (deg C) Value: 4 vs. 22
  misc_feature: MA Experiment 108579 PARAMETER Experiment Name: At_4deg_Cold_cDNA_P Parameter: Timepoint (hr) Value: 6
  misc_feature: MA Experiment 108579 PARAMETER Experiment Name: At_4deg_Cold_cDNA_P Parameter: Tissue Value: Aerial
  misc_feature: MA Experiment ID: 20000180 Result: Down-regulated in Transcription
  misc_feature: MA Experiment 20000180 PARAMETER Experiment Name: At_Germinating_Seeds_P Parameter: Age (hr) Value: 24 vs. 0
  misc_feature: MA Experiment 20000180 PARAMETER Experiment Name: At_Germinating_Seeds_P Parameter: Tissue Value: Germinating Seeds
  misc_feature: MA Experiment ID: 20000184 Result: Up-regulated in Transcription
  misc_feature: MA Experiment 20000184 PARAMETER Experiment Name: At_Shoots__P Parameter: Age (day) Value: 7
  misc_feature: MA Experiment 20000184 PARAMETER Experiment Name: At_Shoots__P Parameter: Tissue Value: Shoots vs. Whole Plant
  misc_feature: MA Experiment ID: 20000227 Result: Up-regulated in Transcription
  misc_feature: MA Experiment 20000227 PARAMETER Experiment Name: At_Root-Tips-vs-Tops_P Parameter: Tissue Value: Root Tips vs. Root Tops
  misc_feature: MA Experiment ID: 20001247 Result: Down-regulated in Transcription
  misc_feature: MA Experiment 20001247 PARAMETER Experiment Name: At_Far-red-induction_P Parameter: Age (day) Value: 7
  misc_feature: MA Experiment 20001247 PARAMETER Experiment Name: At_Far-red-induction_P Parameter: Light Value: Far-red vs. White
  misc_feature: MA Experiment 20001247 PARAMETER Experiment Name: At_Far-red-induction_P Parameter: Organism Value: A. thaliana
  misc_feature: MA Experiment 20001247 PARAMETER Experiment Name: At_Far-red-induction_P Parameter: Plant Line Value: Columbia
  misc_feature: MA Experiment 20001247 PARAMETER Experiment Name: At_Far-red-induction_P Parameter: Timepoint (hr) Value: 1
  misc_feature: MA Experiment 20001247 PARAMETER Experiment Name: At_Far-red-induction_P Parameter: Tissue Value: Whole Plant
  misc_feature: MA Experiment ID: 20001451 Result: Down-regulated in Transcription
  misc_feature: MA Experiment 20001451 PARAMETER Experiment Name: At_Far-red-induction_P Parameter: Age (day) Value: 7
  misc_feature: MA Experiment 20001451 PARAMETER Experiment Name: At_Far-red-induction_P Parameter: Light Value: Far-red vs. White
  misc_feature: MA Experiment 20001451 PARAMETER Experiment Name: At_Far-red-induction_P Parameter: Organism Value: A. thaliana
  misc_feature: MA Experiment 20001451 PARAMETER Experiment Name: At_Far-red-induction_P Parameter: Plant Line Value: Columbia
  misc_feature: MA Experiment 20001451 PARAMETER Experiment Name: At_Far-red-induction_P Parameter: Timepoint (hr) Value: 24
  misc_feature: MA Experiment 20001451 PARAMETER Experiment Name: At_Far-red-induction_P Parameter: Tissue Value: Whole Plant
  misc_feature: MA Experiment ID: 20001560 Result: Up-regulated in Transcription
  misc_feature: MA Experiment 20001560 PARAMETER Experiment Name: At_Drought_Soil_Dry_P Parameter: Age (day) Value: 28
  misc_feature: MA Experiment 20001560 PARAMETER Experiment Name: At_Drought_Soil_Dry_P Parameter: Organism Value: A. thaliana
  misc_feature: MA Experiment 20001560 PARAMETER Experiment Name: At_Drought_Soil_Dry_P Parameter: Plant Line Value: WS
  misc_feature: MA Experiment 20001560 PARAMETER Experiment Name: At_Drought_Soil_Dry_P Parameter: Post Timepoint (hr) Value: None
  misc_feature: MA Experiment 20001560 PARAMETER Experiment Name: At_Drought_Soil_Dry_P Parameter: Post-Treatment Value: None
  misc_feature: MA Experiment 20001560 PARAMETER Experiment Name: At_Drought_Soil_Dry_P Parameter: Timepoint (day) Value: 14
  misc_feature: MA Experiment 20001560 PARAMETER Experiment Name: At_Drought_Soil_Dry_P Parameter: Treatment Value: Drought vs. No Drought
aaaggacagatttgtaaacattctcaaatccttcaaaaaccctaatttctttctgtgaggttattgagaacgaagaagatgacgggagaggtagtgaaccctaaggcgtacccgttagcagattctcagctttcgataacaataatggatcttgttcaacaagctactaactacaagcagcttaagaagggagctaatgaagctaccaaaacattgaaccgtggaatctctgagttcgttgttatggctgctgatgctgaaccacttgagattcttcttcatcttcctttgcttgccgaagataagaatgtgccatatgtgtttgtaccttcgaaacaagcattgggaagagcatgtggagtaacaagacctgttattgcttgttcagtgacatcgaatgaggcaagccagttgaaatcgcagattcagcatctcaaggatgcgattgagaagctcctgatctaaggatttctgctcagtatgaagagtctctgcaatgtggaatggctctgactgaagttagtttgtgtgatttacctatttgaagaatgtattgtgactggtgttaatgcttagtatgtggatcatcatcgctcatttgtgcaattgagtttcttagatttt

SEQ ID NO: 26405 - protein, 128 aa, Arabidopsis thaliana
  peptide (1)..(128): Ceres Seq. ID no. 12331704
  misc_feature (20)..(114): Pfam Name: Ribosomal protein L7Ae/L30e/S12e/Gadd45 family Pfam Description: Ribosomal protein L7Ae/L30e/S12e/Gadd45 family
  misc_feature (1)..(128): Homolog of NCBI NO: 15235416 NR Description: Ribosomal protein L7Ae -like
  misc_feature (1)..(128): Homolog of NCBI NO: 21592866 NR Description: Ribosomal protein L7Ae-like [Arabidopsis thaliana]
  misc_feature (1)..(46): Homolog of NCBI NO: 30687670 NR Description: ribosomal protein L7Ae family [Arabidopsis
  misc_feature (1)..(128): Homolog of NCBI NO: 17535189 NR Description: Ribosomal protein L7Ae/L30e/S12e/Gadd45 family
  misc_feature (6)..(128): Homolog of NCBI NO: 37530712 NR Description: putative ribosomal protein L7Ae-like
  misc_feature (1)..(108): Homolog of NCBI NO: 25295061 NR Description: Ribosomal protein L7Ae-like (partial)
  misc_feature (1)..(128): Homolog of NCBI NO: 38174386 NR Description: Unknown (protein for MGC:75724) [Silurana
  misc_feature (42)..(128): Homolog of NCBI NO: 30687670 NR Description: ribosomal protein L7Ae family [Arabidopsis
  misc_feature (1)..(128): Homolog of NCBI NO: 15241276 NR Description: ribosomal protein L7Ae-like
  misc_feature (1)..(128): Homolog of NCBI NO: 15236127 NR Description: Ribosomal protein L7Ae - like; protein id:
MTGEVVNPKAYPLADSQLSITIMDLVQQATNYKQLKKGANEATKTLNRGISEFVVMAADAEPLEILLHLPLLAEDKNVPYVFVPSKQALGRACGVTRPVIACSVTSNEASQLKSQIQHLKDAIEKLLI

SEQ ID NO: 26406 - protein, 106 aa, Arabidopsis thaliana
  peptide (1)..(106): Ceres Seq. ID no. 12331705
  misc_feature (1)..(92): Pfam Name: Ribosomal protein L7Ae/L30e/S12e/Gadd45 family Pfam Description: Ribosomal protein L7Ae/L30e/S12e/Gadd45 family
  misc_feature (1)..(106): Homolog of NCBI NO: 17535189 NR Description: Ribosomal protein L7Ae/L30e/S12e/Gadd45 family
  misc_feature (1)..(106): Homolog of NCBI NO: 38174386 NR Description: Unknown (protein for MGC:75724) [Silurana
  misc_feature (1)..(106): Homolog of NCBI NO: 37530712 NR Description: putative ribosomal protein L7Ae-like
  misc_feature (1)..(86): Homolog of NCBI NO: 25295061 NR Description: Ribosomal protein L7Ae-like (partial)
  misc_feature (1)..(106): Homolog of NCBI NO: 15235416 NR Description: Ribosomal protein L7Ae -like
  misc_feature (1)..(106): Homolog of NCBI NO: 21592866 NR Description: Ribosomal protein L7Ae-like [Arabidopsis thaliana]
  misc_feature (1)..(24): Homolog of NCBI NO: 30687670 NR Description: ribosomal protein L7Ae family [Arabidopsis
  misc_feature (20)..(106): Homolog of NCBI NO: 30687670 NR Description: ribosomal protein L7Ae family [Arabidopsis
  misc_feature (1)..(106): Homolog of NCBI NO: 15241276 NR Description: ribosomal protein L7Ae-like
  misc_feature (1)..(106): Homolog of NCBI NO: 15236127 NR Description: Ribosomal protein L7Ae - like; protein id:
MDLVQQATNYKQLKKGANEATKTLNRGISEFVVMAADAEPLEILLHLPLLAEDKNVPYVFVPSKQALGRACGVTRPVIACSVTSNEASQLKSQIQHLKDAIEKLLI

SEQ ID NO: 26407 - protein, 73 aa, Arabidopsis thaliana; identical to SEQ ID NO: 21543
  peptide (1)..(73): Ceres Seq. ID no. 12331706
  misc_feature (1)..(59): Pfam Name: Ribosomal protein L7Ae/L30e/S12e/Gadd45 family Pfam Description: Ribosomal protein L7Ae/L30e/S12e/Gadd45 family
  misc_feature (1)..(73): Homolog of NCBI NO: 28302201 NR Description: Similar to NHP2 non-histone chromosome protein
  misc_feature (1)..(73): Homolog of NCBI NO: 17535189 NR Description: Ribosomal protein L7Ae/L30e/S12e/Gadd45 family
  misc_feature (1)..(73): Homolog of NCBI NO: 38174386 NR Description: Unknown (protein for MGC:75724) [Silurana
  misc_feature (1)..(73): Homolog of NCBI NO: 37530712 NR Description: putative ribosomal protein L7Ae-like
  misc_feature (1)..(53): Homolog of NCBI NO: 25295061 NR Description: Ribosomal protein L7Ae-like (partial)
  misc_feature (1)..(73): Homolog of NCBI NO: 15235416 NR Description: Ribosomal protein L7Ae -like
  misc_feature (1)..(73): Homolog of NCBI NO: 21592866 NR Description: Ribosomal protein L7Ae-like [Arabidopsis thaliana]
  misc_feature (1)..(73): Homolog of NCBI NO: 30687670 NR Description: ribosomal protein L7Ae family [Arabidopsis
  misc_feature (1)..(73): Homolog of NCBI NO: 15241276 NR Description: ribosomal protein L7Ae-like
  misc_feature (1)..(73): Homolog of NCBI NO: 15236127 NR Description: Ribosomal protein L7Ae - like; protein id:

SEQ ID NO: 26408 - DNA, 670 bp, Arabidopsis thaliana
  misc_feature (1)..(670): Ceres Seq. ID no. 12393732
  misc_feature: MA Experiment ID: 108489 Result: Down-regulated in Transcription
  misc_feature: MA Experiment ID: 20000264 Result: Up-regulated in Transcription
  misc_feature: MA Experiment 20000264 PARAMETER Experiment Name: At_Open_Flower_P Parameter: Age (day) Value: 21
  misc_feature: MA Experiment 20000264 PARAMETER Experiment Name: At_Open_Flower_P Parameter: Plant Line Value: WS
  misc_feature: MA Experiment 20000264 PARAMETER Experiment Name: At_Open_Flower_P Parameter: Tissue Value: Open Flower vs. Whole Plant
  misc_feature: MA Experiment ID: 20000438 Result: Down-regulated in Transcription
  misc_feature: MA Experiment 20000438 PARAMETER Experiment Name: At_Shoots__P Parameter: Age (day) Value: 14
  misc_feature: MA Experiment 20000438 PARAMETER Experiment Name: At_Shoots__P Parameter: Tissue Value: Shoots vs. Whole Plant
  misc_feature: MA Experiment ID: 20000440 Result: Up-regulated in Transcription
  misc_feature: MA Experiment 20000440 PARAMETER Experiment Name: At_Closed-Flower__Sub_P Parameter: Tissue Value: Closed Flower vs. Whole Plant
  misc_feature: MA Experiment ID: 20000794 Result: Up-regulated in Transcription
  misc_feature: MA Experiment 20000794 PARAMETER Experiment Name: At_Petals_P Parameter: Age (day) Value: 23-25 days
  misc_feature: MA Experiment 20000794 PARAMETER Experiment Name: At_Petals_P Parameter: Plant Line Value: WS
  misc_feature: MA Experiment 20000794 PARAMETER Experiment Name: At_Petals_P Parameter: Tissue Value: Petals vs. Whole plant
  misc_feature: MA Experiment ID: 20001757 Result: Down-regulated in Transcription
  misc_feature: MA Experiment 20001757 PARAMETER Experiment Name: At_50mM_NH4NO3_L-to-H_P Parameter: Timepoint (hr) Value: 6
  misc_feature: MA Experiment 20001757 PARAMETER Experiment Name: At_50mM_NH4NO3_L-to-H_P Parameter: Tissue Value: Leaf
  misc_feature: MA Experiment 20001757 PARAMETER Experiment Name: At_50mM_NH4NO3_L-to-H_P Parameter: Treatment Value: 50mM NH4NO3 vs 100mM Mannitol
  misc_feature: MA Experiment ID: 20001911 Result: Down-regulated in Transcription
  misc_feature: MA Experiment 20001911 PARAMETER Experiment Name: At_Drought_Reproduction_P Parameter: Age (day) Value: 40
  misc_feature: MA Experiment 20001911 PARAMETER Experiment Name: At_Drought_Reproduction_P Parameter: Organism Value: A. thaliana
  misc_feature: MA Experiment 20001911 PARAMETER Experiment Name: At_Drought_Reproduction_P Parameter: Plant Line Value: WS
  misc_feature: MA Experiment 20001911 PARAMETER Experiment Name: At_Drought_Reproduction_P Parameter: Timepoint (day) Value: 10
  misc_feature: MA Experiment 20001911 PARAMETER Experiment Name: At_Drought_Reproduction_P Parameter: Tissue Value: Flowers
  misc_feature: MA Experiment 20001911 PARAMETER Experiment Name: At_Drought_Reproduction_P Parameter: Treatment Value: Drought vs. No Drought
ccaacactcgtaagtagtcctccttcatcattcatgcatatgtatatcagagtgaccattcacggctattaatgggtttcttaattgatcatatatgtgtgtatatatatatatatagttattgtagcaactactacggccagtttgcggagcctaccgagatttgcgactggtgccgcagcgacgaccggaagctgagcaacgttgctagacatggcggttcttcttcaaagaagccttcttcttcggttaaatatgaaaatgacttctcaaacagatcggaatattcgcccggccaccggatcaagcataacaataaccgtcacgatcaagtagccaagggcgttgctggagatggaggcggagttacgtcgcctaagacggccacacgaaggtacaagcttctcaaagatgtcatgtgttagttccacctaaacgagaggtattagaagacttactataatcatactactctttcgagactgtgtgattaaattatgtataattagccactacggagagagcaaattaaaaaagaaaacgtcgttgtttgttttcatcctttttctcctttttactttgtgtttatatatatgaaatgaatgtgtgtttggcgtgagcttgtgttttcttaatcaccatataagctattaataactgcaatttgcgc

SEQ ID NO: 26409 - protein, 117 aa, Arabidopsis thaliana
  peptide (1)..(117): Ceres Seq. ID no. 12393733
  misc_feature (9)..(117): Homolog of NCBI NO: 38345466 NR Description: OSJNBa0010H02.4 [Oryza sativa (japonica
  misc_feature (9)..(117): Homolog of NCBI NO: 21554245 NR Description: unknown [Arabidopsis thaliana]
  misc_feature (9)..(117): Homolog of NCBI NO: 15232353 NR Description: putative protein
  misc_feature (3)..(117): Homolog of NCBI NO: 21553800 NR Description: unknown [Arabidopsis thaliana]
  misc_feature (3)..(117): Homolog of NCBI NO: 18378917 NR Description: hypothetical protein    predicted by genefinder
MGFLIDHICVYIYIYSYCSNYYGQFAEPTEICDWCRSDDRKLSNVARHGGSSSKKPSSSVKYENDFSNRSEYSPGHRIKHNNNRHDQVAKGVAGDGGGVTSPKTATRRYKLLKDVMC

SEQ ID NO: 26410 - DNA, 1373 bp, Arabidopsis thaliana
  misc_feature (1)..(1373): Ceres Seq. ID no. 12421682
  misc_feature: MA Experiment ID: 108461 Result: Up-regulated in Transcription
  misc_feature: MA Experiment 108461 PARAMETER Experiment Name: At_Germinating_Seeds_cDNA_P Parameter: Age (day) Value: 1 vs. 0
  misc_feature: MA Experiment 108461 PARAMETER Experiment Name: At_Germinating_Seeds_cDNA_P Parameter: Tissue Value: Germinating Seeds
  misc_feature: MA Experiment ID: 20000069 Result: Up-regulated in Transcription
  misc_feature: MA Experiment 20000069 PARAMETER Experiment Name: At_100uM_ABA_Mutants_cDNA_P Parameter: Plant Line Value: CS23
  misc_feature: MA Experiment 20000069 PARAMETER Experiment Name: At_100uM_ABA_Mutants_cDNA_P Parameter: Timepoint (hr) Value: 6
  misc_feature: MA Experiment 20000069 PARAMETER Experiment Name: At_100uM_ABA_Mutants_cDNA_P Parameter: Tissue Value: Aerial
  misc_feature: MA Experiment 20000069 PARAMETER Experiment Name: At_100uM_ABA_Mutants_cDNA_P Parameter: Treatment Value: 100uM ABA vs. No Treatment
  misc_feature: MA Experiment ID: 20000070 Result: Up-regulated in Transcription
  misc_feature: MA Experiment 20000070 PARAMETER Experiment Name: At_100uM_ABA_Mutants_cDNA_P Parameter: Plant Line Value: CS24
  misc_feature: MA Experiment 20000070 PARAMETER Experiment Name: At_100uM_ABA_Mutants_cDNA_P Parameter: Timepoint (hr) Value: 6
  misc_feature: MA Experiment 20000070 PARAMETER Experiment Name: At_100uM_ABA_Mutants_cDNA_P Parameter: Tissue Value: Aerial
  misc_feature: MA Experiment 20000070 PARAMETER Experiment Name: At_100uM_ABA_Mutants_cDNA_P Parameter: Treatment Value: 100uM ABA vs. No Treatment
  misc_feature: MA Experiment ID: 20000071 Result: Up-regulated in Transcription
  misc_feature: MA Experiment 20000071 PARAMETER Experiment Name: At_100uM_ABA_Mutants_cDNA_P Parameter: Plant Line Value: CS8104
  misc_feature: MA Experiment 20000071 PARAMETER Experiment Name: At_100uM_ABA_Mutants_cDNA_P Parameter: Timepoint (hr) Value: 6
  misc_feature: MA Experiment 20000071 PARAMETER Experiment Name: At_100uM_ABA_Mutants_cDNA_P Parameter: Tissue Value: Aerial
  misc_feature: MA Experiment 20000071 PARAMETER Experiment Name: At_100uM_ABA_Mutants_cDNA_P Parameter: Treatment Value: 100uM ABA vs. No Treatment
  misc_feature: MA Experiment ID: 20000087 Result: Up-regulated in Transcription
  misc_feature: MA Experiment 20000087 PARAMETER Experiment Name: At_100uM_ABA_Mutants_cDNA_P Parameter: Plant Line Value: WS
  misc_feature: MA Experiment 20000087 PARAMETER Experiment Name: At_100uM_ABA_Mutants_cDNA_P Parameter: Timepoint (hr) Value: 6
  misc_feature: MA Experiment 20000087 PARAMETER Experiment Name: At_100uM_ABA_Mutants_cDNA_P Parameter: Tissue Value: Aerial
  misc_feature: MA Experiment 20000087 PARAMETER Experiment Name: At_100uM_ABA_Mutants_cDNA_P Parameter: Treatment Value: 100uM ABA vs. No Treatment
  misc_feature: MA Experiment ID: 20000088 Result: Up-regulated in Transcription
  misc_feature: MA Experiment 20000088 PARAMETER Experiment Name: At_100uM_ABA_Mutants_cDNA_P Parameter: Plant Line Value: Landsberg
  misc_feature: MA Experiment 20000088 PARAMETER Experiment Name: At_100uM_ABA_Mutants_cDNA_P Parameter: Timepoint (hr) Value: 6
  misc_feature: MA Experiment 20000088 PARAMETER Experiment Name: At_100uM_ABA_Mutants_cDNA_P Parameter: Tissue Value: Aerial
  misc_feature: MA Experiment 20000088 PARAMETER Experiment Name: At_100uM_ABA_Mutants_cDNA_P Parameter: Treatment Value: 100uM ABA vs. No Treatment
  misc_feature: MA Experiment ID: 20000089 Result: Up-regulated in Transcription
  misc_feature: MA Experiment ID: 20000090 Result: Up-regulated in Transcription
  misc_feature: MA Experiment ID: 20000144 Result: Up-regulated in Transcription
  misc_feature: MA Experiment 20000144 PARAMETER Experiment Name: At_42deg_Heat_cDNA_P Parameter: Temperature (deg C) Value: 42 vs. 22
  misc_feature: MA Experiment 20000144 PARAMETER Experiment Name: At_42deg_Heat_cDNA_P Parameter: Timepoint (hr) Value: 1
  misc_feature: MA Experiment 20000144 PARAMETER Experiment Name: At_42deg_Heat_cDNA_P Parameter: Tissue Value: Aerial
  misc_feature: MA Experiment ID: 20000171 Result: Up-regulated in Transcription
  misc_feature: MA Experiment 20000171 PARAMETER Experiment Name: At_42deg_Heat_P Parameter: Age (day) Value: 14
  misc_feature: MA Experiment 20000171 PARAMETER Experiment Name: At_42deg_Heat_P Parameter: Organism Value: A. thaliana
  misc_feature: MA Experiment 20000171 PARAMETER Experiment Name: At_42deg_Heat_P Parameter: Plant Line Value: WS
  misc_feature: MA Experiment 20000171 PARAMETER Experiment Name: At_42deg_Heat_P Parameter: Temperature (deg C) Value: 42 vs. 22
  misc_feature: MA Experiment 20000171 PARAMETER Experiment Name: At_42deg_Heat_P Parameter: Timepoint (hr) Value: 1
  misc_feature: MA Experiment 20000171 PARAMETER Experiment Name: At_42deg_Heat_P Parameter: Tissue Value: Aerial
  misc_feature: MA Experiment ID: 20000184 Result: Down-regulated in Transcription
  misc_feature: MA Experiment 20000184 PARAMETER Experiment Name: At_Shoots__P Parameter: Age (day) Value: 7
  misc_feature: MA Experiment 20000184 PARAMETER Experiment Name: At_Shoots__P Parameter: Tissue Value: Shoots vs. Whole Plant
  misc_feature: MA Experiment ID: 20000224 Result: Up-regulated in Transcription
  misc_feature: MA Experiment ID: 20000234 Result: Up-regulated in Transcription
  misc_feature: MA Experiment 20000234 PARAMETER Experiment Name: At_Siliques_P Parameter: Age (day) Value: 21
  misc_feature: MA Experiment 20000234 PARAMETER Experiment Name: At_Siliques_P Parameter: Organism Value: A. thaliana
  misc_feature: MA Experiment 20000234 PARAMETER Experiment Name: At_Siliques_P Parameter: Plant Line Value: WS
  misc_feature: MA Experiment 20000234 PARAMETER Experiment Name: At_Siliques_P Parameter: Tissue Value: Less Than 5mm Siliques vs. Whole Plant
  misc_feature: MA Experiment ID: 20000235 Result: Up-regulated in Transcription
  misc_feature: MA Experiment 20000235 PARAMETER Experiment Name: At_Siliques_P Parameter: Age (day) Value: 21
  misc_feature: MA Experiment 20000235 PARAMETER Experiment Name: At_Siliques_P Parameter: Organism Value: A. thaliana
  misc_feature: MA Experiment 20000235 PARAMETER Experiment Name: At_Siliques_P Parameter: Plant Line Value: WS
  misc_feature: MA Experiment 20000235 PARAMETER Experiment Name: At_Siliques_P Parameter: Tissue Value: 5-10mm Siliques vs. Whole Plant
  misc_feature: MA Experiment ID: 20000264 Result: Up-regulated in Transcription
  misc_feature: MA Experiment 20000264 PARAMETER Experiment Name: At_Open_Flower_P Parameter: Age (day) Value: 21
  misc_feature: MA Experiment 20000264 PARAMETER Experiment Name: At_Open_Flower_P Parameter: Plant Line Value: WS
  misc_feature: MA Experiment 20000264 PARAMETER Experiment Name: At_Open_Flower_P Parameter: Tissue Value: Open Flower vs. Whole Plant
  misc_feature: MA Experiment ID: 20000265 Result: Up-regulated in Transcription
  misc_feature: MA Experiment 20000265 PARAMETER Experiment Name: At_Open_Flower_P Parameter: Age (day) Value: 21
  misc_feature: MA Experiment 20000265 PARAMETER Experiment Name: At_Open_Flower_P Parameter: Plant Line Value: WS
  misc_feature: MA Experiment 20000265 PARAMETER Experiment Name: At_Open_Flower_P Parameter: Tissue Value: Closed Flower vs. Whole Plant
  misc_feature: MA Experiment ID: 20000437 Result: Up-regulated in Transcription
  misc_feature: MA Experiment 20000437 PARAMETER Experiment Name: At_Drought_P Parameter: Age (day) Value: 8
  misc_feature: MA Experiment 20000437 PARAMETER Experiment Name: At_Drought_P Parameter: Organism Value: A. thaliana
  misc_feature: MA Experiment 20000437 PARAMETER Experiment Name: At_Drought_P Parameter: Plant Line Value: WS
  misc_feature: MA Experiment 20000437 PARAMETER Experiment Name: At_Drought_P Parameter: Timepoint (hr) Value: 24
  misc_feature: MA Experiment 20000437 PARAMETER Experiment Name: At_Drought_P Parameter: Tissue Value: Whole Plant
  misc_feature: MA Experiment 20000437 PARAMETER Experiment Name: At_Drought_P Parameter: Treatment Value: Drought vs. No Drought
  misc_feature: MA Experiment ID: 20000495 Result: Up-regulated in Transcription
  misc_feature: MA Experiment 20000495 PARAMETER Experiment Name: At_Guard_Cells_P Parameter: Harvest Date Value: 8/2/2002
  misc_feature: MA Experiment 20000495 PARAMETER Experiment Name: At_Guard_Cells_P Parameter: Organism Value: A. thaliana
  misc_feature: MA Experiment 20000495 PARAMETER Experiment Name: At_Guard_Cells_P Parameter: Tissue Value: Guard Cells vs. Leaves
gtttcttcttcacactctgattctcttactattttactctgttgttgttgttgtgatatcaagagagtgggtttgagatcatgccaaattctggaaaaagtttgagtttttaattccaatcgagaaaaaataaaaatgggttctttaggtgatgagcttagtttgggatcgatctttgggagaggagtttcgatgaatgttgtggcggtggagaaagttgatgaacatgttaagaagcttgaagaagagaagagaaagctcgaaagttgtcaacttgagcttcctctgtctttgcagattttaaacgatgcgattttgtatctgaaggataagagatgttcagagatggagactcaaccattgttgaaagatttcatttctgttaataaacctattcaaggagaaagaggaatagaattgctgaaaagagaggagctaatgagggagaagaagtttcagcaatggaaagctaatgatgatcacactagtaagatcaagagcaagcttgagattaagagaaatgaggagaaatctcctatgttgttgattccaaaggtggaaactggtttaggcctcggtttaagttcgagttcgataagaagaaaagggattgttgcctcatgtggctttacttctaactctatgccacaaccaccaacaccagcagtaccacaacaaccagcatttcttaagcagcaagctttacggaagcaaagaaggtgttggaatccagagttgcatcgccgatttgtcgatgcattgcaacagctaggtggaccgggagtggcaactcctaaacaaattagagaacatatgcaagaagaaggcttaaccaatgatgaagtcaagagtcatttacagaaatacaggttacacatcaggaagccaaattcgaatgcggagaaacaatcagcagttgttttagggtttaacttgtggaattcttcagcacaagatgaagaagagacatgtgaaggaggagaatcattgaagagacgcaatgcgcaatcagattctcctcaaggtcctttgcagttaccgtctacaacaacaacaactggtggagatagtagcatggaagatgttgaagatgctaagtctgagagctttcaactggagagattgagatcaccataaatctcaagaaaccaaactcttgatcacggttttgttattttggattcattactatatctattagtagtgaatgagaacaataattatagaaaggtttatagatatatatatagagaaaaagagagagtgaggatggttcaaattatttgcagagattatacttagccttgtttttgtaaacggctttttttggttgggtttttatttttcttgaggcattatccaatattcaagtg

SEQ ID NO: 26411 - protein, 333 aa, Arabidopsis thaliana
  peptide (1)..(333): Ceres Seq. ID no. 12421683
  misc_feature (194)..(245): Pfam Name: Myb-like DNA-binding domain Pfam Description: Myb-like DNA-binding domain
  misc_feature (25)..(85): Homolog of NCBI NO: 25404762 NR Description: F24J5.9 [imported] - Arabidopsis thaliana
  misc_feature (25)..(85): Homolog of NCBI NO: 21593572 NR Description: unknown [Arabidopsis thaliana]
  misc_feature (25)..(85): Homolog of NCBI NO: 18409089 NR Description: expressed protein
  misc_feature (191)..(274): Homolog of NCBI NO: 21593572 NR Description: unknown [Arabidopsis thaliana]
  misc_feature (191)..(274): Homolog of NCBI NO: 25404762 NR Description: F24J5.9 [imported] - Arabidopsis thaliana
  misc_feature (191)..(274): Homolog of NCBI NO: 18409089 NR Description: expressed protein
  misc_feature (4)..(66): Homolog of NCBI NO: 31415946 NR Description: putative Myb-like DNA-binding protein
  misc_feature (159)..(325): Homolog of NCBI NO: 31415946 NR Description: putative Myb-like DNA-binding protein
  misc_feature (1)..(333): Homolog of NCBI NO: 18402692 NR Description: expressed protein
  misc_feature (1)..(333): Homolog of NCBI NO: 21554992 NR Description: unknown [Arabidopsis thaliana]
MGSLGDELSLGSIFGRGVSMNVVAVEKVDEHVKKLEEEKRKLESCQLELPLSLQILNDAILYLKDKRCSEMETQPLLKDFISVNKPIQGERGIELLKREELMREKKFQQWKANDDHTSKIKSKLEIKRNEEKSPMLLIPKVETGLGLGLSSSSIRRKGIVASCGFTSNSMPQPPTPAVPQQPAFLKQQALRKQRRCWNPELHRRFVDALQQLGGPGVATPKQIREHMQEEGLTNDEVKSHLQKYRLHIRKPNSNAEKQSAVVLGFNLWNSSAQDEEETCEGGESLKRRNAQSDSPQGPLQLPSTTTTTGGDSSMEDVEDAKSESFQLERLRSP

SEQ ID NO: 26412 - protein, 314 aa, Arabidopsis thaliana
  peptide (1)..(314): Ceres Seq. ID no. 12421684
  misc_feature (175)..(226): Pfam Name: Myb-like DNA-binding domain Pfam Description: Myb-like DNA-binding domain
  misc_feature (6)..(66): Homolog of NCBI NO: 21593572 NR Description: unknown [Arabidopsis thaliana]
  misc_feature (6)..(66): Homolog of NCBI NO: 25404762 NR Description: F24J5.9 [imported] - Arabidopsis thaliana
  misc_feature (6)..(66): Homolog of NCBI NO: 18409089 NR Description: expressed protein
  misc_feature (172)..(255): Homolog of NCBI NO: 21593572 NR Description: unknown [Arabidopsis thaliana]
  misc_feature (172)..(255): Homolog of NCBI NO: 25404762 NR Description: F24J5.9 [imported] - Arabidopsis thaliana
  misc_feature (172)..(255): Homolog of NCBI NO: 18409089 NR Description: expressed protein
  misc_feature (1)..(47): Homolog of NCBI NO: 31415946 NR Description: putative Myb-like DNA-binding protein
  misc_feature (140)..(306): Homolog of NCBI NO: 31415946 NR Description: putative Myb-like DNA-binding protein
  misc_feature (1)..(314): Homolog of NCBI NO: 18402692 NR Description: expressed protein
  misc_feature (1)..(314): Homolog of NCBI NO: 21554992 NR Description: unknown [Arabidopsis thaliana]
MNVVAVEKVDEHVKKLEEEKRKLESCQLELPLSLQILNDAILYLKDKRCSEMETQPLLKDFISVNKPIQGERGIELLKREELMREKKFQQWKANDDHTSKIKSKLEIKRNEEKSPMLLIPKVETGLGLGLSSSSIRRKGIVASCGFTSNSMPQPPTPAVPQQPAFLKQQALRKQRRCWNPELHRRFVDALQQLGGPGVATPKQIREHMQEEGLTNDEVKSHLQKYRLHIRKPNSNAEKQSAVVLGFNLWNSSAQDEEETCEGGESLKRRNAQSDSPQGPLQLPSTTTTTGGDSSMEDVEDAKSESFQLERLRSP

SEQ ID NO: 26413 - protein, 263 aa, Arabidopsis thaliana
  peptide (1)..(263): Ceres Seq. ID no. 12421685
  misc_feature (124)..(175): Pfam Name: Myb-like DNA-binding domain Pfam Description: Myb-like DNA-binding domain
  misc_feature (121)..(253): Homolog of NCBI NO: 18419989 NR Description: putative cytoskeletal protein; protein id:
  misc_feature (1)..(15): Homolog of NCBI NO: 25404762 NR Description: F24J5.9 [imported] - Arabidopsis thaliana
  misc_feature (1)..(15): Homolog of NCBI NO: 21593572 NR Description: unknown [Arabidopsis thaliana]
  misc_feature (1)..(15): Homolog of NCBI NO: 18409089 NR Description: expressed protein
  misc_feature (121)..(204): Homolog of NCBI NO: 25404762 NR Description: F24J5.9 [imported] - Arabidopsis thaliana
  misc_feature (121)..(204): Homolog of NCBI NO: 21593572 NR Description: unknown [Arabidopsis thaliana]
  misc_feature (121)..(204): Homolog of NCBI NO: 18409089 NR Description: expressed protein
  misc_feature (89)..(255): Homolog of NCBI NO: 31415946 NR Description: putative Myb-like DNA-binding protein
  misc_feature (1)..(263): Homolog of NCBI NO: 18402692 NR Description: expressed protein
  misc_feature (1)..(263): Homolog of NCBI NO: 21554992 NR Description: unknown [Arabidopsis thaliana]
METQPLLKDFISVNKPIQGERGIELLKREELMREKKFQQWKANDDHTSKIKSKLEIKRNEEKSPMLLIPKVETGLGLGLSSSSIRRKGIVASCGFTSNSMPQPPTPAVPQQPAFLKQQALRKQRRCWNPELHRRFVDALQQLGGPGVATPKQIREHMQEEGLTNDEVKSHLQKYRLHIRKPNSNAEKQSAVVLGFNLWNSSAQDEEETCEGGESLKRRNAQSDSPQGPLQLPSTTTTTGGDSSMEDVEDAKSESFQLERLRSP

SEQ ID NO: 26414 - DNA, 1152 bp, Arabidopsis thaliana
  misc_feature (1)..(1152): Ceres Seq. ID no. 12333562
  misc_feature: MA Experiment ID: 108488 Result: Down-regulated in Transcription
  misc_feature: MA Experiment ID: 108573 Result: Up-regulated in Transcription
  misc_feature: MA Experiment 108573 PARAMETER Experiment Name: At_Drought_cDNA_P Parameter: Timepoint (hr) Value: 6
  misc_feature: MA Experiment 108573 PARAMETER Experiment Name: At_Drought_cDNA_P Parameter: Tissue Value: Aerial
  misc_feature: MA Experiment 108573 PARAMETER Experiment Name: At_Drought_cDNA_P Parameter: Treatment Value: Drought vs. No Drought
  misc_feature: MA Experiment ID: 20000179 Result: Up-regulated in Transcription
  misc_feature: MA Experiment 20000179 PARAMETER Experiment Name: At_Germinating_Seeds_P Parameter: Age (hr) Value: 6 vs. 0
  misc_feature: MA Experiment 20000179 PARAMETER Experiment Name: At_Germinating_Seeds_P Parameter: Tissue Value: Germinating Seeds
  misc_feature: MA Experiment ID: 20000180 Result: Up-regulated in Transcription
  misc_feature: MA Experiment 20000180 PARAMETER Experiment Name: At_Germinating_Seeds_P Parameter: Age (hr) Value: 24 vs. 0
  misc_feature: MA Experiment 20000180 PARAMETER Experiment Name: At_Germinating_Seeds_P Parameter: Tissue Value: Germinating Seeds
  misc_feature: MA Experiment ID: 20000214 Result: Down-regulated in Transcription
  misc_feature: MA Experiment 20000214 PARAMETER Experiment Name: At_4deg_Cold_P Parameter: Timepoint (hr) Value: 6
  misc_feature: MA Experiment ID: 20000437 Result: Up-regulated in Transcription
  misc_feature: MA Experiment 20000437 PARAMETER Experiment Name: At_Drought_P Parameter: Age (day) Value: 8
  misc_feature: MA Experiment 20000437 PARAMETER Experiment Name: At_Drought_P Parameter: Organism Value: A. thaliana
  misc_feature: MA Experiment 20000437 PARAMETER Experiment Name: At_Drought_P Parameter: Plant Line Value: WS
  misc_feature: MA Experiment 20000437 PARAMETER Experiment Name: At_Drought_P Parameter: Timepoint (hr) Value: 24
  misc_feature: MA Experiment 20000437 PARAMETER Experiment Name: At_Drought_P Parameter: Tissue Value: Whole Plant
  misc_feature: MA Experiment 20000437 PARAMETER Experiment Name: At_Drought_P Parameter: Treatment Value: Drought vs. No Drought
gattacgatcgccggcgattcaaagaagcagatagaaaaatggcggagatgaagagtgtcggagtagttggtgctggacaaatgggttcaggaatcgcgcaactcgccgccacgagtggcctcgacgtttggctcatggacgctgatcgagatgccctctctcgagccaccgcagctatctcctcctccgtcaaacgattcgtctccaaaggtctaatctccaaggaagttggtgatgatgctatgcatcgtctacgattaacatcgaatcttgaagatttgtgttctgctgatatcatcgttgaagccattgtggaatcagaagacattaagaagaagctgtttaaggatctagatggtatagctaagagttctgcgattttagcttctaacacaagttctatatccattactcgtcttgcatctgctacgagaagacccagccaggtcattggaatgcactttatgaaccctcctccaataatgaaactggttgaaatcattcgcggtgcagatacctcagaagagacgtttcttgctacaaaagttctggctgaaaggtttggcaagacaacagtctgctcacaagactatgcgggattcgtagtgaaccgaatcctcatgcctatgatcaatgaagcgttccacacactttacacaggggtagctacaaaggaagacattgacagcggaatgaaacacggcacaaaccacccgatgggtcctttggagttggcggacttaatcggtctagacgtgtgcttgtccgtaatgaaagtgttgcacgagggacttggggactcaaagtacgcaccttgccctcttcttgttcaatacgttgatgctgggagattaggaagaaaacgaggagtaggagtttatgattaccgtgaagctacacagaagctgtctccgcggctctgagaaagcaaataccaaagtaaaaaaacaaaaagaagaaacgtttagcactcaagacaagaacagtaaatgctgtgtggatcgtttctggattatttctttgttcctttgtttcttggtagatatgaagttactggtcatcattagcgaccttgtgttgtaatcttgatattgtactaaataaagtttagcttcaacaaatcaataaggtgttgttaccatgttgttatc

SEQ ID NO: 26415 - protein, 307 aa, Arabidopsis thaliana
  peptide (1)..(307): Ceres Seq. ID no. 12333563
  misc_feature (14)..(198): Pfam Name: 3-hydroxyacyl-CoA dehydrogenase, NAD binding domain Pfam Description: 3-hydroxyacyl-CoA dehydrogenase, NAD binding
  misc_feature (16)..(300): Homolog of NCBI NO: 23010122 NR Description: hypothetical protein [Magnetospirillum
  misc_feature (14)..(300): Homolog of NCBI NO: 23013719 NR Description: hypothetical protein [Magnetospirillum
  misc_feature (17)..(297): Homolog of NCBI NO: 23502817 NR Description: 3-hydroxybutyryl-CoA dehydrogenase [Brucella suis
  misc_feature (17)..(296): Homolog of NCBI NO: 23053816 NR Description: hypothetical protein [Geobacter metallireducens]
  misc_feature (17)..(297): Homolog of NCBI NO: 17986383 NR Description: 3-HYDROXYBUTYRYL-COA DEHYDROGENASE [Brucella
  misc_feature (15)..(297): Homolog of NCBI NO: 22961911 NR Description: hypothetical protein [Rhodopseudomonas palustris]
  misc_feature (17)..(296): Homolog of NCBI NO: 12003356 NR Description: S(+)-beta-hydroxybutyryl CoA dehydrogenase
  misc_feature (15)..(299): Homolog of NCBI NO: 27376490 NR Description: 3-hydroxybutyryl-CoA dehydrogenase
  misc_feature (16)..(306): Homolog of NCBI NO: 34908888 NR Description: putative 3-hydroxybutyryl-CoA dehydrogenase
  misc_feature (14)..(307): Homolog of NCBI NO: 15232545 NR Description: putative 3-hydroxybutyryl-CoA dehydrogenase
DYDRRRFKEADRKMAEMKSVGVVGAGQMGSGIAQLAATSGLDVWLMDADRDALSRATAAISSSVKRFVSKGLISKEVGDDAMHRLRLTSNLEDLCSADIIVEAIVESEDIKKKLFKDLDGIAKSSAILASNTSSISITRLASATRRPSQVIGMHFMNPPPIMKLVEIIRGADTSEETFLATKVLAERFGKTTVCSQDYAGFVVNRILMPMINEAFHTLYTGVATKEDIDSGMKHGTNHPMGPLELADLIGLDVCLSVMKVLHEGLGDSKYAPCPLLVQYVDAGRLGRKRGVGVYDYREATQKLSPRL

SEQ ID NO: 26416 - protein, 294 aa, Arabidopsis thaliana
  peptide (1)..(294): Ceres Seq. ID no. 12333564
  misc_feature (1)..(185): Pfam Name: 3-hydroxyacyl-CoA dehydrogenase, NAD binding domain Pfam Description: 3-hydroxyacyl-CoA dehydrogenase, NAD binding
  misc_feature (3)..(287): Homolog of NCBI NO: 23010122 NR Description: hypothetical protein [Magnetospirillum
  misc_feature (1)..(287): Homolog of NCBI NO: 23013719 NR Description: hypothetical protein [Magnetospirillum
  misc_feature (4)..(284): Homolog of NCBI NO: 23502817 NR Description: 3-hydroxybutyryl-CoA dehydrogenase [Brucella suis
  misc_feature (4)..(283): Homolog of NCBI NO: 23053816 NR Description: hypothetical protein [Geobacter metallireducens]
  misc_feature (4)..(284): Homolog of NCBI NO: 17986383 NR Description: 3-HYDROXYBUTYRYL-COA DEHYDROGENASE [Brucella
  misc_feature (2)..(284): Homolog of NCBI NO: 22961911 NR Description: hypothetical protein [Rhodopseudomonas palustris]
  misc_feature (4)..(283): Homolog of NCBI NO: 12003356 NR Description: S(+)-beta-hydroxybutyryl CoA dehydrogenase
  misc_feature (2)..(286): Homolog of NCBI NO: 27376490 NR Description: 3-hydroxybutyryl-CoA dehydrogenase
  misc_feature (3)..(293): Homolog of NCBI NO: 34908888 NR Description: putative 3-hydroxybutyryl-CoA dehydrogenase
  misc_feature (1)..(294): Homolog of NCBI NO: 15232545 NR Description: putative 3-hydroxybutyryl-CoA dehydrogenase
MAEMKSVGVVGAGQMGSGIAQLAATSGLDVWLMDADRDALSRATAAISSSVKRFVSKGLISKEVGDDAMHRLRLTSNLEDLCSADIIVEAIVESEDIKKKLFKDLDGIAKSSAILASNTSSISITRLASATRRPSQVIGMHFMNPPPIMKLVEIIRGADTSEETFLATKVLAERFGKTTVCSQDYAGFVVNRILMPMINEAFHTLYTGVATKEDIDSGMKHGTNHPMGPLELADLIGLDVCLSVMKVLHEGLGDSKYAPCPLLVQYVDAGRLGRKRGVGVYDYREATQKLSPRL

SEQ ID NO: 26417 - protein, 291 aa, Arabidopsis thaliana
  peptide (1)..(291): Ceres Seq. ID no. 12333565
  misc_feature (1)..(182): Pfam Name: 3-hydroxyacyl-CoA dehydrogenase, NAD binding domain Pfam Description: 3-hydroxyacyl-CoA dehydrogenase, NAD binding
  misc_feature (1)..(280): Homolog of NCBI NO: 12003356 NR Description: S(+)-beta-hydroxybutyryl CoA dehydrogenase
  misc_feature (1)..(283): Homolog of NCBI NO: 27376490 NR Description: 3-hydroxybutyryl-CoA dehydrogenase
  misc_feature (1)..(281): Homolog of NCBI NO: 17986383 NR Description: 3-HYDROXYBUTYRYL-COA DEHYDROGENASE [Brucella
  misc_feature (1)..(284): Homolog of NCBI NO: 23010122 NR Description: hypothetical protein [Magnetospirillum
  misc_feature (1)..(281): Homolog of NCBI NO: 23502817 NR Description: 3-hydroxybutyryl-CoA dehydrogenase [Brucella suis
  misc_feature (1)..(280): Homolog of NCBI NO: 23053816 NR Description: hypothetical protein [Geobacter metallireducens]
  misc_feature (1)..(284): Homolog of NCBI NO: 23013719 NR Description: hypothetical protein [Magnetospirillum
  misc_feature (1)..(281): Homolog of NCBI NO: 22961911 NR Description: hypothetical protein [Rhodopseudomonas palustris]
  misc_feature (1)..(290): Homolog of NCBI NO: 34908888 NR Description: putative 3-hydroxybutyryl-CoA dehydrogenase
  misc_feature (1)..(291): Homolog of NCBI NO: 15232545 NR Description: putative 3-hydroxybutyryl-CoA dehydrogenase
MKSVGVVGAGQMGSGIAQLAATSGLDVWLMDADRDALSRATAAISSSVKRFVSKGLISKEVGDDAMHRLRLTSNLEDLCSADIIVEAIVESEDIKKKLFKDLDGIAKSSAILASNTSSISITRLASATRRPSQVIGMHFMNPPPIMKLVEIIRGADTSEETFLATKVLAERFGKTTVCSQDYAGFVVNRILMPMINEAFHTLYTGVATKEDIDSGMKHGTNHPMGPLELADLIGLDVCLSVMKVLHEGLGDSKYAPCPLLVQYVDAGRLGRKRGVGVYDYREATQKLSPRL

SEQ ID NO: 26418 - DNA, 1465 bp, Arabidopsis thaliana
  misc_feature (1)..(1465): Ceres Seq. ID no. 13494252
  misc_feature: MA Experiment ID: 108434 Result: Up-regulated in Transcription
  misc_feature: MA Experiment 108434 PARAMETER Experiment Name: At_Root_Tips_cDNA_P Parameter: Tissue Value: Root Tips
  misc_feature: MA Experiment ID: 20000112 Result: Down-regulated in Transcription
  misc_feature: MA Experiment 20000112 PARAMETER Experiment Name: At_42deg_Heat_cDNA_P Parameter: Temperature (deg C) Value: 42 vs. 22
  misc_feature: MA Experiment 20000112 PARAMETER Experiment Name: At_42deg_Heat_cDNA_P Parameter: Timepoint (hr) Value: 2
  misc_feature: MA Experiment 20000112 PARAMETER Experiment Name: At_42deg_Heat_cDNA_P Parameter: Tissue Value: Aerial
  misc_feature: MA Experiment ID: 20000144 Result: Down-regulated in Transcription
  misc_feature: MA Experiment 20000144 PARAMETER Experiment Name: At_42deg_Heat_cDNA_P Parameter: Temperature (deg C) Value: 42 vs. 22
  misc_feature: MA Experiment 20000144 PARAMETER Experiment Name: At_42deg_Heat_cDNA_P Parameter: Timepoint (hr) Value: 1
  misc_feature: MA Experiment 20000144 PARAMETER Experiment Name: At_42deg_Heat_cDNA_P Parameter: Tissue Value: Aerial
  misc_feature: MA Experiment ID: 20000171 Result: Down-regulated in Transcription
  misc_feature: MA Experiment 20000171 PARAMETER Experiment Name: At_42deg_Heat_P Parameter: Age (day) Value: 14
  misc_feature: MA Experiment 20000171 PARAMETER Experiment Name: At_42deg_Heat_P Parameter: Organism Value: A. thaliana
  misc_feature: MA Experiment 20000171 PARAMETER Experiment Name: At_42deg_Heat_P Parameter: Plant Line Value: WS
  misc_feature: MA Experiment 20000171 PARAMETER Experiment Name: At_42deg_Heat_P Parameter: Temperature (deg C) Value: 42 vs. 22
  misc_feature: MA Experiment 20000171 PARAMETER Experiment Name: At_42deg_Heat_P Parameter: Timepoint (hr) Value: 1
  misc_feature: MA Experiment 20000171 PARAMETER Experiment Name: At_42deg_Heat_P Parameter: Tissue Value: Aerial
  misc_feature: MA Experiment ID: 20000173 Result: Down-regulated in Transcription
  misc_feature: MA Experiment 20000173 PARAMETER Experiment Name: At_42deg_Heat_P Parameter: Age (day) Value: 14
  misc_feature: MA Experiment 20000173 PARAMETER Experiment Name: At_42deg_Heat_P Parameter: Organism Value: A. thaliana
  misc_feature: MA Experiment 20000173 PARAMETER Experiment Name: At_42deg_Heat_P Parameter: Plant Line Value: WS
  misc_feature: MA Experiment 20000173 PARAMETER Experiment Name: At_42deg_Heat_P Parameter: Temperature (deg C) Value: 42 vs. 22
  misc_feature: MA Experiment 20000173 PARAMETER Experiment Name: At_42deg_Heat_P Parameter: Timepoint (hr) Value: 6
  misc_feature: MA Experiment 20000173 PARAMETER Experiment Name: At_42deg_Heat_P Parameter: Tissue Value: Aerial
  misc_feature: MA Experiment ID: 20000184 Result: Up-regulated in Transcription
  misc_feature: MA Experiment 20000184 PARAMETER Experiment Name: At_Shoots__P Parameter: Age (day) Value: 7
  misc_feature: MA Experiment 20000184 PARAMETER Experiment Name: At_Shoots__P Parameter: Tissue Value: Shoots vs. Whole Plant
  misc_feature: MA Experiment ID: 20000185 Result: Down-regulated in Transcription
  misc_feature: MA Experiment 20000185 PARAMETER Experiment Name: At_Roots__P Parameter: Age (day) Value: 7 vs. 21
  misc_feature: MA Experiment 20000185 PARAMETER Experiment Name: At_Roots__P Parameter: Organism Value: A. thaliana
  misc_feature: MA Experiment 20000185 PARAMETER Experiment Name: At_Roots__P Parameter: Tissue Value: Roots vs. Whole Plant
  misc_feature: MA Experiment ID: 20000224 Result: Down-regulated in Transcription
  misc_feature: MA Experiment ID: 20000227 Result: Up-regulated in Transcription
  misc_feature: MA Experiment 20000227 PARAMETER Experiment Name: At_Root-Tips-vs-Tops_P Parameter: Tissue Value: Root Tips vs. Root Tops
  misc_feature: MA Experiment ID: 20000437 Result: Down-regulated in Transcription
  misc_feature: MA Experiment 20000437 PARAMETER Experiment Name: At_Drought_P Parameter: Age (day) Value: 8
  misc_feature: MA Experiment 20000437 PARAMETER Experiment Name: At_Drought_P Parameter: Organism Value: A. thaliana
  misc_feature: MA Experiment 20000437 PARAMETER Experiment Name: At_Drought_P Parameter: Plant Line Value: WS
  misc_feature: MA Experiment 20000437 PARAMETER Experiment Name: At_Drought_P Parameter: Timepoint (hr) Value: 24
  misc_feature: MA Experiment 20000437 PARAMETER Experiment Name: At_Drought_P Parameter: Tissue Value: Whole Plant
  misc_feature: MA Experiment 20000437 PARAMETER Experiment Name: At_Drought_P Parameter: Treatment Value: Drought vs. No Drought
  misc_feature: MA Experiment ID: 20000439 Result: Down-regulated in Transcription
  misc_feature: MA Experiment 20000439 PARAMETER Experiment Name: At_Roots__P Parameter: Age (day) Value: 14 vs. 21
  misc_feature: MA Experiment 20000439 PARAMETER Experiment Name: At_Roots__P Parameter: Organism Value: A. thaliana
  misc_feature: MA Experiment 20000439 PARAMETER Experiment Name: At_Roots__P Parameter: Tissue Value: Roots vs. Whole Plant
  misc_feature: MA Experiment ID: 20000452 Result: Down-regulated in Transcription
  misc_feature: MA Experiment 20000452 PARAMETER Experiment Name: At_CS6879_Shoots-Roots_P Parameter: Age (day) Value: 14
  misc_feature: MA Experiment 20000452 PARAMETER Experiment Name: At_CS6879_Shoots-Roots_P Parameter: Organism Value: A. thaliana
  misc_feature: MA Experiment 20000452 PARAMETER Experiment Name: At_CS6879_Shoots-Roots_P Parameter: Plant Line Value: CS6879 vs. WS
  misc_feature: MA Experiment 20000452 PARAMETER Experiment Name: At_CS6879_Shoots-Roots_P Parameter: Tissue Value: Shoots
  misc_feature: MA Experiment ID: 20000794 Result: Down-regulated in Transcription
  misc_feature: MA Experiment 20000794 PARAMETER Experiment Name: At_Petals_P Parameter: Age (day) Value: 23-25 days
  misc_feature: MA Experiment 20000794 PARAMETER Experiment Name: At_Petals_P Parameter: Plant Line Value: WS
  misc_feature: MA Experiment 20000794 PARAMETER Experiment Name: At_Petals_P Parameter: Tissue Value: Petals vs. Whole plant
  misc_feature: MA Experiment ID: 20001247 Result: Up-regulated in Transcription
  misc_feature: MA Experiment 20001247 PARAMETER Experiment Name: At_Far-red-induction_P Parameter: Age (day) Value: 7
  misc_feature: MA Experiment 20001247 PARAMETER Experiment Name: At_Far-red-induction_P Parameter: Light Value: Far-red vs. White
  misc_feature: MA Experiment 20001247 PARAMETER Experiment Name: At_Far-red-induction_P Parameter: Organism Value: A. thaliana
  misc_feature: MA Experiment 20001247 PARAMETER Experiment Name: At_Far-red-induction_P Parameter: Plant Line Value: Columbia
  misc_feature: MA Experiment 20001247 PARAMETER Experiment Name: At_Far-red-induction_P Parameter: Timepoint (hr) Value: 1
  misc_feature: MA Experiment 20001247 PARAMETER Experiment Name: At_Far-red-induction_P Parameter: Tissue Value: Whole Plant
  misc_feature: MA Experiment ID: 20001450 Result: Up-regulated in Transcription
  misc_feature: MA Experiment 20001450 PARAMETER Experiment Name: At_Far-red-induction_P Parameter: Age (day) Value: 7
  misc_feature: MA Experiment 20001450 PARAMETER Experiment Name: At_Far-red-induction_P Parameter: Light Value: Far-red vs. White
  misc_feature: MA Experiment 20001450 PARAMETER Experiment Name: At_Far-red-induction_P Parameter: Organism Value: A. thaliana
  misc_feature: MA Experiment 20001450 PARAMETER Experiment Name: At_Far-red-induction_P Parameter: Plant Line Value: Columbia
  misc_feature: MA Experiment 20001450 PARAMETER Experiment Name: At_Far-red-induction_P Parameter: Timepoint (hr) Value: 8
  misc_feature: MA Experiment 20001450 PARAMETER Experiment Name: At_Far-red-induction_P Parameter: Tissue Value: Whole Plant
  misc_feature: MA Experiment ID: 20001451 Result: Up-regulated in Transcription
  misc_feature: MA Experiment 20001451 PARAMETER Experiment Name: At_Far-red-induction_P Parameter: Age (day) Value: 7
  misc_feature: MA Experiment 20001451 PARAMETER Experiment Name: At_Far-red-induction_P Parameter: Light Value: Far-red vs. White
  misc_feature: MA Experiment 20001451 PARAMETER Experiment Name: At_Far-red-induction_P Parameter: Organism Value: A. thaliana
  misc_feature: MA Experiment 20001451 PARAMETER Experiment Name: At_Far-red-induction_P Parameter: Plant Line Value: Columbia
  misc_feature: MA Experiment 20001451 PARAMETER Experiment Name: At_Far-red-induction_P Parameter: Timepoint (hr) Value: 24
  misc_feature: MA Experiment 20001451 PARAMETER Experiment Name: At_Far-red-induction_P Parameter: Tissue Value: Whole Plant
  misc_feature: MA Experiment ID: 20001554 Result: Down-regulated in Transcription
  misc_feature: MA Experiment 20001554 PARAMETER Experiment Name: At_Drought_Soil_Dry_P Parameter: Age (day) Value: 21
  misc_feature: MA Experiment 20001554 PARAMETER Experiment Name: At_Drought_Soil_Dry_P Parameter: Organism Value: A. thaliana
  misc_feature: MA Experiment 20001554 PARAMETER Experiment Name: At_Drought_Soil_Dry_P Parameter: Plant Line Value: WS
  misc_feature: MA Experiment 20001554 PARAMETER Experiment Name: At_Drought_Soil_Dry_P Parameter: Post Timepoint (hr) Value: None
  misc_feature: MA Experiment 20001554 PARAMETER Experiment Name: At_Drought_Soil_Dry_P Parameter: Post-Treatment Value: None
  misc_feature: MA Experiment 20001554 PARAMETER Experiment Name: At_Drought_Soil_Dry_P Parameter: Timepoint (day) Value: 7
  misc_feature: MA Experiment 20001554 PARAMETER Experiment Name: At_Drought_Soil_Dry_P Parameter: Treatment Value: Drought vs. No Drought
  misc_feature: MA Experiment ID: 20001555 Result: Down-regulated in Transcription
  misc_feature: MA Experiment 20001555 PARAMETER Experiment Name: At_Drought_Soil_Dry_P Parameter: Age (day) Value: 24
  misc_feature: MA Experiment 20001555 PARAMETER Experiment Name: At_Drought_Soil_Dry_P Parameter: Organism Value: A. thaliana
  misc_feature: MA Experiment 20001555 PARAMETER Experiment Name: At_Drought_Soil_Dry_P Parameter: Plant Line Value: WS
  misc_feature: MA Experiment 20001555 PARAMETER Experiment Name: At_Drought_Soil_Dry_P Parameter: Post Timepoint (hr) Value: None
  misc_feature: MA Experiment 20001555 PARAMETER Experiment Name: At_Drought_Soil_Dry_P Parameter: Post-Treatment Value: None
  misc_feature: MA Experiment 20001555 PARAMETER Experiment Name: At_Drought_Soil_Dry_P Parameter: Timepoint (day) Value: 10
  misc_feature: MA Experiment 20001555 PARAMETER Experiment Name: At_Drought_Soil_Dry_P Parameter: Treatment Value: Drought vs. No Drought
  misc_feature: MA Experiment ID: 20001556 Result: Down-regulated in Transcription
  misc_feature: MA Experiment 20001556 PARAMETER Experiment Name: At_Drought_Soil_Dry_P Parameter: Age (day) Value: 26
  misc_feature: MA Experiment 20001556 PARAMETER Experiment Name: At_Drought_Soil_Dry_P Parameter: Organism Value: A. thaliana
  misc_feature: MA Experiment 20001556 PARAMETER Experiment Name: At_Drought_Soil_Dry_P Parameter: Plant Line Value: WS
  misc_feature: MA Experiment 20001556 PARAMETER Experiment Name: At_Drought_Soil_Dry_P Parameter: Post Timepoint (hr) Value: None
  misc_feature: MA Experiment 20001556 PARAMETER Experiment Name: At_Drought_Soil_Dry_P Parameter: Post-Treatment Value: None
  misc_feature: MA Experiment 20001556 PARAMETER Experiment Name: At_Drought_Soil_Dry_P Parameter: Timepoint (day) Value: 12
  misc_feature: MA Experiment 20001556 PARAMETER Experiment Name: At_Drought_Soil_Dry_P Parameter: Treatment Value: Drought vs. No Drought
  misc_feature: MA Experiment ID: 20001557 Result: Up-regulated in Transcription
  misc_feature: MA Experiment 20001557 PARAMETER Experiment Name: At_Drought_Soil_Dry_P Parameter: Age (day) Value: 27
  misc_feature: MA Experiment 20001557 PARAMETER Experiment Name: At_Drought_Soil_Dry_P Parameter: Organism Value: A. thaliana
  misc_feature: MA Experiment 20001557 PARAMETER Experiment Name: At_Drought_Soil_Dry_P Parameter: Plant Line Value: WS
  misc_feature: MA Experiment 20001557 PARAMETER Experiment Name: At_Drought_Soil_Dry_P Parameter: Post Timepoint (hr) Value: 3
  misc_feature: MA Experiment 20001557 PARAMETER Experiment Name: At_Drought_Soil_Dry_P Parameter: Post-Treatment Value: Re-Water vs. No Drought
  misc_feature: MA Experiment 20001557 PARAMETER Experiment Name: At_Drought_Soil_Dry_P Parameter: Timepoint (day) Value: 13
  misc_feature: MA Experiment 20001557 PARAMETER Experiment Name: At_Drought_Soil_Dry_P Parameter: Treatment Value: Drought vs. No Drought
  misc_feature: MA Experiment ID: 20001558 Result: Up-regulated in Transcription
  misc_feature: MA Experiment 20001558 PARAMETER Experiment Name: At_Drought_Soil_Dry_P Parameter: Age (day) Value: 27
  misc_feature: MA Experiment 20001558 PARAMETER Experiment Name: At_Drought_Soil_Dry_P Parameter: Organism Value: A. thaliana
  misc_feature: MA Experiment 20001558 PARAMETER Experiment Name: At_Drought_Soil_Dry_P Parameter: Plant Line Value: WS
  misc_feature: MA Experiment 20001558 PARAMETER Experiment Name: At_Drought_Soil_Dry_P Parameter: Post Timepoint (hr) Value: 6
  misc_feature: MA Experiment 20001558 PARAMETER Experiment Name: At_Drought_Soil_Dry_P Parameter: Post-Treatment Value: Re-Water vs. No Drought
  misc_feature: MA Experiment 20001558 PARAMETER Experiment Name: At_Drought_Soil_Dry_P Parameter: Timepoint (day) Value: 13
  misc_feature: MA Experiment 20001558 PARAMETER Experiment Name: At_Drought_Soil_Dry_P Parameter: Treatment Value: Drought vs. No Drought
  misc_feature: MA Experiment ID: 20001560 Result: Up-regulated in Transcription
  misc_feature: MA Experiment 20001560 PARAMETER Experiment Name: At_Drought_Soil_Dry_P Parameter: Age (day) Value: 28
  misc_feature: MA Experiment 20001560 PARAMETER Experiment Name: At_Drought_Soil_Dry_P Parameter: Organism Value: A. thaliana
  misc_feature: MA Experiment 20001560 PARAMETER Experiment Name: At_Drought_Soil_Dry_P Parameter: Plant Line Value: WS
  misc_feature: MA Experiment 20001560 PARAMETER Experiment Name: At_Drought_Soil_Dry_P Parameter: Post Timepoint (hr) Value: None
  misc_feature: MA Experiment 20001560 PARAMETER Experiment Name: At_Drought_Soil_Dry_P Parameter: Post-Treatment Value: None
  misc_feature: MA Experiment 20001560 PARAMETER Experiment Name: At_Drought_Soil_Dry_P Parameter: Timepoint (day) Value: 14
  misc_feature: MA Experiment 20001560 PARAMETER Experiment Name: At_Drought_Soil_Dry_P Parameter: Treatment Value: Drought vs. No Drought
  misc_feature: MA Experiment ID: 20001757 Result: Up-regulated in Transcription
  misc_feature: MA Experiment 20001757 PARAMETER Experiment Name: At_50mM_NH4NO3_L-to-H_P Parameter: Timepoint (hr) Value: 6
  misc_feature: MA Experiment 20001757 PARAMETER Experiment Name: At_50mM_NH4NO3_L-to-H_P Parameter: Tissue Value: Leaf
  misc_feature: MA Experiment 20001757 PARAMETER Experiment Name: At_50mM_NH4NO3_L-to-H_P Parameter: Treatment Value: 50mM NH4NO3 vs 100mM Mannitol
  misc_feature: MA Experiment ID: 20001904 Result: Down-regulated in Transcription
  misc_feature: MA Experiment 20001904 PARAMETER Experiment Name: At_Drought_Reproduction_P Parameter: Age (day) Value: 37
  misc_feature: MA Experiment 20001904 PARAMETER Experiment Name: At_Drought_Reproduction_P Parameter: Organism Value: A. thaliana
  misc_feature: MA Experiment 20001904 PARAMETER Experiment Name: At_Drought_Reproduction_P Parameter: Plant Line Value: WS
  misc_feature: MA Experiment 20001904 PARAMETER Experiment Name: At_Drought_Reproduction_P Parameter: Timepoint (day) Value: 7
  misc_feature: MA Experiment 20001904 PARAMETER Experiment Name: At_Drought_Reproduction_P Parameter: Tissue Value: Rosettes
  misc_feature: MA Experiment 20001904 PARAMETER Experiment Name: At_Drought_Reproduction_P Parameter: Treatment Value: Drought vs. No Drought
  misc_feature: MA Experiment ID: 20001905 Result: Down-regulated in Transcription
  misc_feature: MA Experiment 20001905 PARAMETER Experiment Name: At_Drought_Reproduction_P Parameter: Age (day) Value: 40
  misc_feature: MA Experiment 20001905 PARAMETER Experiment Name: At_Drought_Reproduction_P Parameter: Organism Value: A. thaliana
  misc_feature: MA Experiment 20001905 PARAMETER Experiment Name: At_Drought_Reproduction_P Parameter: Plant Line Value: WS
  misc_feature: MA Experiment 20001905 PARAMETER Experiment Name: At_Drought_Reproduction_P Parameter: Timepoint (day) Value: 10
  misc_feature: MA Experiment 20001905 PARAMETER Experiment Name: At_Drought_Reproduction_P Parameter: Tissue Value: Rosettes
  misc_feature: MA Experiment 20001905 PARAMETER Experiment Name: At_Drought_Reproduction_P Parameter: Treatment Value: Drought vs. No Drought
  misc_feature: MA Experiment ID: 20001906 Result: Down-regulated in Transcription
  misc_feature: MA Experiment 20001906 PARAMETER Experiment Name: At_Drought_Reproduction_P Parameter: Age (day) Value: 35
  misc_feature: MA Experiment 20001906 PARAMETER Experiment Name: At_Drought_Reproduction_P Parameter: Organism Value: A. thaliana
  misc_feature: MA Experiment 20001906 PARAMETER Experiment Name: At_Drought_Reproduction_P Parameter: Plant Line Value: WS
  misc_feature: MA Experiment 20001906 PARAMETER Experiment Name: At_Drought_Reproduction_P Parameter: Timepoint (day) Value: 5
  misc_feature: MA Experiment 20001906 PARAMETER Experiment Name: At_Drought_Reproduction_P Parameter: Tissue Value: Siliques
  misc_feature: MA Experiment 20001906 PARAMETER Experiment Name: At_Drought_Reproduction_P Parameter: Treatment Value: Drought vs. No Drought
  misc_feature: MA Experiment ID: 20001911 Result: Down-regulated in Transcription
  misc_feature: MA Experiment 20001911 PARAMETER Experiment Name: At_Drought_Reproduction_P Parameter: Age (day) Value: 40
  misc_feature: MA Experiment 20001911 PARAMETER Experiment Name: At_Drought_Reproduction_P Parameter: Organism Value: A. thaliana
  misc_feature: MA Experiment 20001911 PARAMETER Experiment Name: At_Drought_Reproduction_P Parameter: Plant Line Value: WS
  misc_feature: MA Experiment 20001911 PARAMETER Experiment Name: At_Drought_Reproduction_P Parameter: Timepoint (day) Value: 10
  misc_feature: MA Experiment 20001911 PARAMETER Experiment Name: At_Drought_Reproduction_P Parameter: Tissue Value: Flowers
  misc_feature: MA Experiment 20001911 PARAMETER Experiment Name: At_Drought_Reproduction_P Parameter: Treatment Value: Drought vs. No Drought
agattaaaaactctttaaaaactttttgtcataaatcaggcaaagaagtaaaagaggcttaaaactctctctctctcttggtcttcctcactcttaacgaaaatggactctctaacactcttcttcaccggcgcactcgtcgccgtcggtatctactggttcctctgcgttctcggtccagcagagcgtaaaggcaaacgagccgtagatctctctggcggctcaatctccgccgagaaagtccaagacaactacaaacagtactggtctttcttccgccgtccaaaagaaatcgaaaccgccgagaaagttccagacttcgtcgacacattctacaatctcgtcaccgacatatacgagtggggatggggacaatccttccacttctcaccatcaatccccggaaaatctcacaaagacgccacgcgcctccacgaagagatggccgtagatctgatccaagtcaaacctggtcaaaagatcctagacgtcggatdcggcgtcggcggtbcgatgcgagcgattgcatctcactcgcgagctaacgtagtcgggattacgataaacgagtatcaggtgaacagagctcgtctccacaataagaaagctggtctcgacgcgctttgcgaggtcgtctgtggtaacttcctccagatgccgttcgatgacaacagtttcgacggtgcttattccatcgaagccacgtgtcacgcgccgaagctggaggaagtgtacgcagagatctacagggtgttgaaacccggatctatgtatgtgtcgtacgagtgggttacgacggagaaatttaaggcggaggatgacgaaacacgtggaggtaatccaagggattgagagaggtgatgcgttacctgggcttaggcttacgtggatattgctgagacggctaaaaaggttgggtttgagatagtgaaggagaaggatctggcgagtccaccggctgagccgtggtggactaggcttaagatgggtaggcttgcttattggaggaatcacattgtggttcagattttgtcagcggttggagttgctcctaaaggaactgttgatgttcatgagatgttgtttaagactgctgattatttgaccagaggaggtgaaaccggaatattctctccgatgcatatgattctctgcagaaaaccggagtcaccggaggagagttcttgagaaaggtagaaaggaaacatcaccggaaaaagtatggagaattttctcaatttgtttttatttttaagttaaatcaacttggttattgtactatttttgtgttttaatttggtttgtgtttcaagaattattagtttttttttgttttgttgcatatgagaatcttactcttgatttctccgccgtagtgccggcgagacataggggattattagtatttttaagtgtgtttaagattgattaacaagttagtaaaataaaatgtacttaggtgtcg

SEQ ID NO: 26419 - protein, 249 aa, Arabidopsis thaliana
  peptide (1)..(249): Ceres Seq. ID no. 15222920
  misc_feature (82)..(241): Pfam Name: ubiE/COQ5 methyltransferase family Pfam Description: ubiE/COQ5 methyltransferase family
  misc_feature (1)..(249): Homolog of NCBI NO: 3560533 NR Description: 24-methylene lophenol C24(1)methyltransferase
  misc_feature (9)..(249): Homolog of NCBI NO: 7443717 NR Description: probable sterol 24-C-methyltransferase (EC
  misc_feature (1)..(249): Homolog of NCBI NO: 7443718 NR Description: probable sterol 24-C-methyltransferase (EC
  misc_feature (1)..(249): Homolog of NCBI NO: 2246456 NR Description: S-adenosyl-methionine-sterol-C-methyltransferase
  misc_feature (1)..(249): Homolog of NCBI NO: 15222955 NR Description: S-adenosyl-methionine-sterol-C-methyltransferase
  misc_feature (1)..(249): Homolog of NCBI NO: 1061040 NR Description: sterol-C-methyltransferase [Arabidopsis thaliana]
  misc_feature (1)..(249): Homolog of NCBI NO: 23397216 NR Description: putative sterol-C-methyltransferase [Arabidopsis
  misc_feature (1)..(249): Homolog of NCBI NO: 22136020 NR Description: 24-sterol C-methyltransferase [Arabidopsis
  misc_feature (1)..(249): Homolog of NCBI NO: 15217917 NR Description: sterol-C-methyltransferase [Arabidopsis thaliana]
  misc_feature (1)..(249): Homolog of NCBI NO: 21555010 NR Description: sterol-C-methyltransferase [Arabidopsis thaliana]
  misc_feature (132)..(132): Xaa is any aa, unknown or other
  misc_feature (137)..(137): Xaa is any aa, unknown or other
MDSLTLFFTGALVAVGIYWFLCVLGPAERKGKRAVDLSGGSISAEKVQDNYKQYWSFFRRPKEIETAEKVPDFVDTFYNLVTDIYEWGWGQSFHFSPSIPGKSHKDATRLHEEMAVDLIQVKPGQKILDVGXGVGGXMRAIASHSRANVVGITINEYQVNRARLHNKKAGLDALCEVVCGNFLQMPFDDNSFDGAYSIEATCHAPKLEEVYAEIYRVLKPGSMYVSYEWVTTEKFKAEDDETRGGNPRD

SEQ ID NO: 26420 - protein, 136 aa, Arabidopsis thaliana
  peptide (1)..(136): Ceres Seq. ID no. 15222921
  misc_feature (1)..(128): Pfam Name: ubiE/COQ5 methyltransferase family Pfam Description: ubiE/COQ5 methyltransferase family
  misc_feature (1)..(136): Homolog of NCBI NO: 3560533 NR Description: 24-methylene lophenol C24(1)methyltransferase
  misc_feature (1)..(136): Homolog of NCBI NO: 7443717 NR Description: probable sterol 24-C-methyltransferase (EC
  misc_feature (1)..(136): Homolog of NCBI NO: 7443718 NR Description: probable sterol 24-C-methyltransferase (EC
  misc_feature (1)..(136): Homolog of NCBI NO: 2246456 NR Description: S-adenosyl-methionine-sterol-C-methyltransferase
  misc_feature (1)..(136): Homolog of NCBI NO: 15222955 NR Description: S-adenosyl-methionine-sterol-C-methyltransferase
  misc_feature (1)..(136): Homolog of NCBI NO: 1061040 NR Description: sterol-C-methyltransferase [Arabidopsis thaliana]
  misc_feature (1)..(136): Homolog of NCBI NO: 23397216 NR Description: putative sterol-C-methyltransferase [Arabidopsis
  misc_feature (1)..(136): Homolog of NCBI NO: 22136020 NR Description: 24-sterol C-methyltransferase [Arabidopsis
  misc_feature (1)..(136): Homolog of NCBI NO: 15217917 NR Description: sterol-C-methyltransferase [Arabidopsis thaliana]
  misc_feature (1)..(136): Homolog of NCBI NO: 21555010 NR Description: sterol-C-methyltransferase [Arabidopsis thaliana]
  misc_feature (19)..(19): Xaa is any aa, unknown or other
  misc_feature (24)..(24): Xaa is any aa, unknown or other
MAVDLIQVKPGQKILDVGXGVGGXMRAIASHSRANVVGITINEYQVNRARLHNKKAGLDALCEVVCGNFLQMPFDDNSFDGAYSIEATCHAPKLEEVYAEIYRVLKPGSMYVSYEWVTTEKFKAEDDETRGGNPRD

SEQ ID NO: 26421 - DNA, 879 bp, Arabidopsis thaliana
  misc_feature (1)..(879): Ceres Seq. ID no. 12325426
  misc_feature: MA Experiment ID: 108434 Result: Up-regulated in Transcription
  misc_feature: MA Experiment 108434 PARAMETER Experiment Name: At_Root_Tips_cDNA_P Parameter: Tissue Value: Root Tips
  misc_feature: MA Experiment ID: 108462 Result: Down-regulated in Transcription
  misc_feature: MA Experiment 108462 PARAMETER Experiment Name: At_Germinating_Seeds_cDNA_P Parameter: Age (day) Value: 2 vs. 0
  misc_feature: MA Experiment 108462 PARAMETER Experiment Name: At_Germinating_Seeds_cDNA_P Parameter: Tissue Value: Germinating Seeds
  misc_feature: MA Experiment ID: 108463 Result: Down-regulated in Transcription
  misc_feature: MA Experiment 108463 PARAMETER Experiment Name: At_Germinating_Seeds_cDNA_P Parameter: Age (day) Value: 3 vs. 0
  misc_feature: MA Experiment 108463 PARAMETER Experiment Name: At_Germinating_Seeds_cDNA_P Parameter: Tissue Value: Germinating Seeds
  misc_feature: MA Experiment ID: 108464 Result: Down-regulated in Transcription
  misc_feature: MA Experiment 108464 PARAMETER Experiment Name: At_Germinating_Seeds_cDNA_P Parameter: Age (day) Value: 4 vs. 0
  misc_feature: MA Experiment 108464 PARAMETER Experiment Name: At_Germinating_Seeds_cDNA_P Parameter: Tissue Value: Germinating Seeds
  misc_feature: MA Experiment ID: 20000227 Result: Up-regulated in Transcription
  misc_feature: MA Experiment 20000227 PARAMETER Experiment Name: At_Root-Tips-vs-Tops_P Parameter: Tissue Value: Root Tips vs. Root Tops
gtgtcttcgtcgtctctggtaaaacaataacagatcaagcgaagaagaaaagtgaagaagctcagcaacaatgtcgtggatgaaaggtgatttactttccaaaaccaggaggcttgttggtggcttagctacacgagagcctgtttggcttaaagccatggaagcatcaccacctcctgtgtttcctcgctccaatggaaaaatccagaagattgttctccctgaggatccttacgttcgtaaattcgctaataagcatcctggaaccaaaattgatgaccctgccaagatatcagcatttattccagatcaagcacgtgtgtatggttgccgggtacttgaattgaaggagcatggcatcagtgagggtgacgccatgtctgtagctaatatggaatatctttcagagagaaaggaaatgaagaaagcatacaaacgcttaaaggagcttgcggtaatgcaagataaggatccacctcctaaaccgtatcctagtgccaagaaagggttaataactcaatcgaagacatccgctaaggatcgcttccagactcctagcgtccgcaggctagttaaccagttgaaaaatgagaaagatgtgttgctgcaagacagaaccggaggaagtgctaatcaggataattggatcgacgaataaattactcaaaatcatcgttttctttttatgcacactactcatccaatttctttgtagaactggcttttttcatatatgacattctttgactacaaatgttttgcaacaaaacaagtgttatttccatttgaatgtctttgtaataatatcattggatgtttccttccatgaggcaaggaattacagaaaaccaaaatggttactctctctattgatcctac

SEQ ID NO: 26422 - protein, 195 aa, Arabidopsis thaliana
  peptide (1)..(195): Ceres Seq. ID no. 12325427
  misc_feature (103)..(195): Homolog of NCBI NO: 9295724 NR Description: T24P13.13 [Arabidopsis thaliana]
  misc_feature (1)..(195): Homolog of NCBI NO: 21555186 NR Description: unknown [Arabidopsis thaliana]
  misc_feature (1)..(195): Homolog of NCBI NO: 18396035 NR Description: expressed protein
MSWMKGDLLSKTRRLVGGLATREPVWLKAMEASPPPVFPRSNGKIQKIVLPEDPYVRKFANKHPGTKIDDPAKISAFIPDQARVYGCRVLELKEHGISEGDAMSVANMEYLSERKEMKKAYKRLKELAVMQDKDPPPKPYPSAKKGLITQSKTSAKDRFQTPSVRRLVNQLKNEKDVLLQDRTGGSANQDNWIDE

SEQ ID NO: 26423 - protein, 192 aa, Arabidopsis thaliana
  peptide (1)..(192): Ceres Seq. ID no. 12325428
  misc_feature (100)..(192): Homolog of NCBI NO: 9295724 NR Description: T24P13.13 [Arabidopsis thaliana]
  misc_feature (1)..(192): Homolog of NCBI NO: 21555186 NR Description: unknown [Arabidopsis thaliana]
  misc_feature (1)..(192): Homolog of NCBI NO: 18396035 NR Description: expressed protein
MKGDLLSKTRRLVGGLATREPVWLKAMEASPPPVFPRSNGKIQKIVLPEDPYVRKFANKHPGTKIDDPAKISAFIPDQARVYGCRVLELKEHGISEGDAMSVANMEYLSERKEMKKAYKRLKELAVMQDKDPPPKPYPSAKKGLITQSKTSAKDRFQTPSVRRLVNQLKNEKDVLLQDRTGGSANQDNWIDE

SEQ ID NO: 26424 - protein, 166 aa, Arabidopsis thaliana
  peptide (1)..(166): Ceres Seq. ID no. 12325429
  misc_feature (74)..(166): Homolog of NCBI NO: 9295724 NR Description: T24P13.13 [Arabidopsis thaliana]
  misc_feature (1)..(166): Homolog of NCBI NO: 21555186 NR Description: unknown [Arabidopsis thaliana]
  misc_feature (1)..(166): Homolog of NCBI NO: 18396035 NR Description: expressed protein
MEASPPPVFPRSNGKIQKIVLPEDPYVRKFANKHPGTKIDDPAKISAFIPDQARVYGCRVLELKEHGISEGDAMSVANMEYLSERKEMKKAYKRLKELAVMQDKDPPPKPYPSAKKGLITQSKTSAKDRFQTPSVRRLVNQLKNEKDVLLQDRTGGSANQDNWIDE

SEQ ID NO: 26425 - DNA, 1496 bp, Arabidopsis thaliana
  misc_feature (1)..(1496): Ceres Seq. ID no. 13490187
  misc_feature: MA Experiment ID: 108462 Result: Up-regulated in Transcription
  misc_feature: MA Experiment 108462 PARAMETER Experiment Name: At_Germinating_Seeds_cDNA_P Parameter: Age (day) Value: 2 vs. 0
  misc_feature: MA Experiment 108462 PARAMETER Experiment Name: At_Germinating_Seeds_cDNA_P Parameter: Tissue Value: Germinating Seeds
  misc_feature: MA Experiment ID: 108463 Result: Up-regulated in Transcription
  misc_feature: MA Experiment 108463 PARAMETER Experiment Name: At_Germinating_Seeds_cDNA_P Parameter: Age (day) Value: 3 vs. 0
  misc_feature: MA Experiment 108463 PARAMETER Experiment Name: At_Germinating_Seeds_cDNA_P Parameter: Tissue Value: Germinating Seeds
  misc_feature: MA Experiment ID: 108464 Result: Up-regulated in Transcription
  misc_feature: MA Experiment 108464 PARAMETER Experiment Name: At_Germinating_Seeds_cDNA_P Parameter: Age (day) Value: 4 vs. 0
  misc_feature: MA Experiment 108464 PARAMETER Experiment Name: At_Germinating_Seeds_cDNA_P Parameter: Tissue Value: Germinating Seeds
  misc_feature: MA Experiment ID: 108561 Result: Down-regulated in Transcription
  misc_feature: MA Experiment 108561 PARAMETER Experiment Name: At_100uM_ABA_cDNA_P Parameter: Timepoint (hr) Value: 6
  misc_feature: MA Experiment 108561 PARAMETER Experiment Name: At_100uM_ABA_cDNA_P Parameter: Tissue Value: Aerial
  misc_feature: MA Experiment 108561 PARAMETER Experiment Name: At_100uM_ABA_cDNA_P Parameter: Treatment Value: 100uM ABA vs. No Treatment
  misc_feature: MA Experiment ID: 108573 Result: Down-regulated in Transcription
  misc_feature: MA Experiment 108573 PARAMETER Experiment Name: At_Drought_cDNA_P Parameter: Timepoint (hr) Value: 6
  misc_feature: MA Experiment 108573 PARAMETER Experiment Name: At_Drought_cDNA_P Parameter: Tissue Value: Aerial
  misc_feature: MA Experiment 108573 PARAMETER Experiment Name: At_Drought_cDNA_P Parameter: Treatment Value: Drought vs. No Drought
  misc_feature: MA Experiment ID: 108576 Result: Down-regulated in Transcription
  misc_feature: MA Experiment 108576 PARAMETER Experiment Name: At_42deg_Heat_cDNA_P Parameter: Temperature (deg C) Value: 42 vs. 22
  misc_feature: MA Experiment 108576 PARAMETER Experiment Name: At_42deg_Heat_cDNA_P Parameter: Timepoint (hr) Value: 1
  misc_feature: MA Experiment 108576 PARAMETER Experiment Name: At_42deg_Heat_cDNA_P Parameter: Tissue Value: Aerial
  misc_feature: MA Experiment ID: 108585 Result: Down-regulated in Transcription
  misc_feature: MA Experiment 108585 PARAMETER Experiment Name: At_5mM_NaNP_cDNA_P Parameter: Timepoint (hr) Value: 6
  misc_feature: MA Experiment 108585 PARAMETER Experiment Name: At_5mM_NaNP_cDNA_P Parameter: Tissue Value: Aerial
  misc_feature: MA Experiment 108585 PARAMETER Experiment Name: At_5mM_NaNP_cDNA_P Parameter: Treatment Value: null
  misc_feature: MA Experiment ID: 108595 Result: Down-regulated in Transcription
  misc_feature: MA Experiment 108595 PARAMETER Experiment Name: At_Ler-pi_Ovule_cDNA_P Parameter: Plant Line Value: null
  misc_feature: MA Experiment ID: 108607 Result: Down-regulated in Transcription
  misc_feature: MA Experiment 108607 PARAMETER Experiment Name: At_100uM_ABA_cDNA_P Parameter: Timepoint (hr) Value: 4
  misc_feature: MA Experiment 108607 PARAMETER Experiment Name: At_100uM_ABA_cDNA_P Parameter: Tissue Value: Aerial
  misc_feature: MA Experiment 108607 PARAMETER Experiment Name: At_100uM_ABA_cDNA_P Parameter: Treatment Value: 100uM ABA vs. No Treatment
  misc_feature: MA Experiment ID: 108608 Result: Down-regulated in Transcription
  misc_feature: MA Experiment 108608 PARAMETER Experiment Name: At_100uM_ABA_cDNA_P Parameter: Timepoint (hr) Value: 1
  misc_feature: MA Experiment 108608 PARAMETER Experiment Name: At_100uM_ABA_cDNA_P Parameter: Tissue Value: Aerial
  misc_feature: MA Experiment 108608 PARAMETER Experiment Name: At_100uM_ABA_cDNA_P Parameter: Treatment Value: 100uM ABA vs. No Treatment
  misc_feature: MA Experiment ID: 108609 Result: Down-regulated in Transcription
  misc_feature: MA Experiment 108609 PARAMETER Experiment Name: At_100uM_ABA_cDNA_P Parameter: Timepoint (hr) Value: 24
  misc_feature: MA Experiment 108609 PARAMETER Experiment Name: At_100uM_ABA_cDNA_P Parameter: Tissue Value: Aerial
  misc_feature: MA Experiment 108609 PARAMETER Experiment Name: At_100uM_ABA_cDNA_P Parameter: Treatment Value: 100uM ABA vs. No Treatment
  misc_feature: MA Experiment ID: 108667 Result: Down-regulated in Transcription
  misc_feature: MA Experiment 108667 PARAMETER Experiment Name: At_2mM_SA_cDNA_P Parameter: Plant Line Value: WS
  misc_feature: MA Experiment 108667 PARAMETER Experiment Name: At_2mM_SA_cDNA_P Parameter: Timepoint (hr) Value: 1
  misc_feature: MA Experiment 108667 PARAMETER Experiment Name: At_2mM_SA_cDNA_P Parameter: Treatment Value: 2mM SA vs. No Treatment
  misc_feature: MA Experiment ID: 20000069 Result: Down-regulated in Transcription
  misc_feature: MA Experiment 20000069 PARAMETER Experiment Name: At_100uM_ABA_Mutants_cDNA_P Parameter: Plant Line Value: CS23
  misc_feature: MA Experiment 20000069 PARAMETER Experiment Name: At_100uM_ABA_Mutants_cDNA_P Parameter: Timepoint (hr) Value: 6
  misc_feature: MA Experiment 20000069 PARAMETER Experiment Name: At_100uM_ABA_Mutants_cDNA_P Parameter: Tissue Value: Aerial
  misc_feature: MA Experiment 20000069 PARAMETER Experiment Name: At_100uM_ABA_Mutants_cDNA_P Parameter: Treatment Value: 100uM ABA vs. No Treatment
  misc_feature: MA Experiment ID: 20000070 Result: Down-regulated in Transcription
  misc_feature: MA Experiment 20000070 PARAMETER Experiment Name: At_100uM_ABA_Mutants_cDNA_P Parameter: Plant Line Value: CS24
  misc_feature: MA Experiment 20000070 PARAMETER Experiment Name: At_100uM_ABA_Mutants_cDNA_P Parameter: Timepoint (hr) Value: 6
  misc_feature: MA Experiment 20000070 PARAMETER Experiment Name: At_100uM_ABA_Mutants_cDNA_P Parameter: Tissue Value: Aerial
  misc_feature: MA Experiment 20000070 PARAMETER Experiment Name: At_100uM_ABA_Mutants_cDNA_P Parameter: Treatment Value: 100uM ABA vs. No Treatment
  misc_feature: MA Experiment ID: 20000071 Result: Down-regulated in Transcription
  misc_feature: MA Experiment 20000071 PARAMETER Experiment Name: At_100uM_ABA_Mutants_cDNA_P Parameter: Plant Line Value: CS8104
  misc_feature: MA Experiment 20000071 PARAMETER Experiment Name: At_100uM_ABA_Mutants_cDNA_P Parameter: Timepoint (hr) Value: 6
  misc_feature: MA Experiment 20000071 PARAMETER Experiment Name: At_100uM_ABA_Mutants_cDNA_P Parameter: Tissue Value: Aerial
  misc_feature: MA Experiment 20000071 PARAMETER Experiment Name: At_100uM_ABA_Mutants_cDNA_P Parameter: Treatment Value: 100uM ABA vs. No Treatment
  misc_feature: MA Experiment ID: 20000072 Result: Down-regulated in Transcription
  misc_feature: MA Experiment 20000072 PARAMETER Experiment Name: At_100uM_ABA_Mutants_cDNA_P Parameter: Plant Line Value: CS8105
  misc_feature: MA Experiment 20000072 PARAMETER Experiment Name: At_100uM_ABA_Mutants_cDNA_P Parameter: Timepoint (hr) Value: 6
  misc_feature: MA Experiment 20000072 PARAMETER Experiment Name: At_100uM_ABA_Mutants_cDNA_P Parameter: Tissue Value: Aerial
  misc_feature: MA Experiment 20000072 PARAMETER Experiment Name: At_100uM_ABA_Mutants_cDNA_P Parameter: Treatment Value: 100uM ABA vs. No Treatment
  misc_feature: MA Experiment ID: 20000086 Result: Down-regulated in Transcription
  misc_feature: MA Experiment 20000086 PARAMETER Experiment Name: At_100uM_ABA_Mutants_cDNA_P Parameter: Plant Line Value: CS22
  misc_feature: MA Experiment 20000086 PARAMETER Experiment Name: At_100uM_ABA_Mutants_cDNA_P Parameter: Timepoint (hr) Value: 6
  misc_feature: MA Experiment 20000086 PARAMETER Experiment Name: At_100uM_ABA_Mutants_cDNA_P Parameter: Tissue Value: Aerial
  misc_feature: MA Experiment 20000086 PARAMETER Experiment Name: At_100uM_ABA_Mutants_cDNA_P Parameter: Treatment Value: 100uM ABA vs. No Treatment
  misc_feature: MA Experiment ID: 20000087 Result: Down-regulated in Transcription
  misc_feature: MA Experiment 20000087 PARAMETER Experiment Name: At_100uM_ABA_Mutants_cDNA_P Parameter: Plant Line Value: WS
  misc_feature: MA Experiment 20000087 PARAMETER Experiment Name: At_100uM_ABA_Mutants_cDNA_P Parameter: Timepoint (hr) Value: 6
  misc_feature: MA Experiment 20000087 PARAMETER Experiment Name: At_100uM_ABA_Mutants_cDNA_P Parameter: Tissue Value: Aerial
  misc_feature: MA Experiment 20000087 PARAMETER Experiment Name: At_100uM_ABA_Mutants_cDNA_P Parameter: Treatment Value: 100uM ABA vs. No Treatment
  misc_feature: MA Experiment ID: 20000111 Result: Down-regulated in Transcription
  misc_feature: MA Experiment 20000111 PARAMETER Experiment Name: At_42deg_Heat_cDNA_P Parameter: Temperature (deg C) Value: 42 vs. 22
  misc_feature: MA Experiment 20000111 PARAMETER Experiment Name: At_42deg_Heat_cDNA_P Parameter: Timepoint (hr) Value: 6
  misc_feature: MA Experiment 20000111 PARAMETER Experiment Name: At_42deg_Heat_cDNA_P Parameter: Tissue Value: Aerial
  misc_feature: MA Experiment ID: 20000113 Result: Down-regulated in Transcription
  misc_feature: MA Experiment 20000113 PARAMETER Experiment Name: At_42deg_Heat_cDNA_P Parameter: Temperature (deg C) Value: 42 vs. 22
  misc_feature: MA Experiment 20000113 PARAMETER Experiment Name: At_42deg_Heat_cDNA_P Parameter: Timepoint (hr) Value: 8
  misc_feature: MA Experiment 20000113 PARAMETER Experiment Name: At_42deg_Heat_cDNA_P Parameter: Tissue Value: Aerial
  misc_feature: MA Experiment ID: 20000117 Result: Down-regulated in Transcription
  misc_feature: MA Experiment 20000117 PARAMETER Experiment Name: At_100uM_ABA_Mutants_cDNA_P Parameter: Plant Line Value: Columbia
  misc_feature: MA Experiment 20000117 PARAMETER Experiment Name: At_100uM_ABA_Mutants_cDNA_P Parameter: Timepoint (hr) Value: 6
  misc_feature: MA Experiment 20000117 PARAMETER Experiment Name: At_100uM_ABA_Mutants_cDNA_P Parameter: Tissue Value: Aerial
  misc_feature: MA Experiment 20000117 PARAMETER Experiment Name: At_100uM_ABA_Mutants_cDNA_P Parameter: Treatment Value: 100uM ABA vs. No Treatment
  misc_feature: MA Experiment ID: 20000144 Result: Down-regulated in Transcription
  misc_feature: MA Experiment 20000144 PARAMETER Experiment Name: At_42deg_Heat_cDNA_P Parameter: Temperature (deg C) Value: 42 vs. 22
  misc_feature: MA Experiment 20000144 PARAMETER Experiment Name: At_42deg_Heat_cDNA_P Parameter: Timepoint (hr) Value: 1
  misc_feature: MA Experiment 20000144 PARAMETER Experiment Name: At_42deg_Heat_cDNA_P Parameter: Tissue Value: Aerial
  misc_feature: MA Experiment ID: 20000166 Result: Down-regulated in Transcription
  misc_feature: MA Experiment 20000166 PARAMETER Experiment Name: At_100uM_ABA_P Parameter: Age (day) Value: 14
  misc_feature: MA Experiment 20000166 PARAMETER Experiment Name: At_100uM_ABA_P Parameter: Organism Value: A. thaliana
  misc_feature: MA Experiment 20000166 PARAMETER Experiment Name: At_100uM_ABA_P Parameter: Plant Line Value: WS
  misc_feature: MA Experiment 20000166 PARAMETER Experiment Name: At_100uM_ABA_P Parameter: Timepoint (hr) Value: 1
  misc_feature: MA Experiment 20000166 PARAMETER Experiment Name: At_100uM_ABA_P Parameter: Tissue Value: Aerial
  misc_feature: MA Experiment 20000166 PARAMETER Experiment Name: At_100uM_ABA_P Parameter: Treatment Value: 100uM ABA vs. No Treatment
  misc_feature: MA Experiment ID: 20000169 Result: Down-regulated in Transcription
  misc_feature: MA Experiment 20000169 PARAMETER Experiment Name: At_100uM_ABA_P Parameter: Age (day) Value: 14
  misc_feature: MA Experiment 20000169 PARAMETER Experiment Name: At_100uM_ABA_P Parameter: Organism Value: A. thaliana
  misc_feature: MA Experiment 20000169 PARAMETER Experiment Name: At_100uM_ABA_P Parameter: Plant Line Value: WS
  misc_feature: MA Experiment 20000169 PARAMETER Experiment Name: At_100uM_ABA_P Parameter: Timepoint (hr) Value: 6
  misc_feature: MA Experiment 20000169 PARAMETER Experiment Name: At_100uM_ABA_P Parameter: Tissue Value: Aerial
  misc_feature: MA Experiment 20000169 PARAMETER Experiment Name: At_100uM_ABA_P Parameter: Treatment Value: 100uM ABA vs. No Treatment
  misc_feature: MA Experiment ID: 20000171 Result: Down-regulated in Transcription
  misc_feature: MA Experiment 20000171 PARAMETER Experiment Name: At_42deg_Heat_P Parameter: Age (day) Value: 14
  misc_feature: MA Experiment 20000171 PARAMETER Experiment Name: At_42deg_Heat_P Parameter: Organism Value: A. thaliana
  misc_feature: MA Experiment 20000171 PARAMETER Experiment Name: At_42deg_Heat_P Parameter: Plant Line Value: WS
  misc_feature: MA Experiment 20000171 PARAMETER Experiment Name: At_42deg_Heat_P Parameter: Temperature (deg C) Value: 42 vs. 22
  misc_feature: MA Experiment 20000171 PARAMETER Experiment Name: At_42deg_Heat_P Parameter: Timepoint (hr) Value: 1
  misc_feature: MA Experiment 20000171 PARAMETER Experiment Name: At_42deg_Heat_P Parameter: Tissue Value: Aerial
  misc_feature: MA Experiment ID: 20000173 Result: Down-regulated in Transcription
  misc_feature: MA Experiment 20000173 PARAMETER Experiment Name: At_42deg_Heat_P Parameter: Age (day) Value: 14
  misc_feature: MA Experiment 20000173 PARAMETER Experiment Name: At_42deg_Heat_P Parameter: Organism Value: A. thaliana
  misc_feature: MA Experiment 20000173 PARAMETER Experiment Name: At_42deg_Heat_P Parameter: Plant Line Value: WS
  misc_feature: MA Experiment 20000173 PARAMETER Experiment Name: At_42deg_Heat_P Parameter: Temperature (deg C) Value: 42 vs. 22
  misc_feature: MA Experiment 20000173 PARAMETER Experiment Name: At_42deg_Heat_P Parameter: Timepoint (hr) Value: 6
  misc_feature: MA Experiment 20000173 PARAMETER Experiment Name: At_42deg_Heat_P Parameter: Tissue Value: Aerial
  misc_feature: MA Experiment ID: 20000185 Result: Down-regulated in Transcription
  misc_feature: MA Experiment 20000185 PARAMETER Experiment Name: At_Roots__P Parameter: Age (day) Value: 7 vs. 21
  misc_feature: MA Experiment 20000185 PARAMETER Experiment Name: At_Roots__P Parameter: Organism Value: A. thaliana
  misc_feature: MA Experiment 20000185 PARAMETER Experiment Name: At_Roots__P Parameter: Tissue Value: Roots vs. Whole Plant
  misc_feature: MA Experiment ID: 20000224 Result: Up-regulated in Transcription
  misc_feature: MA Experiment ID: 20000234 Result: Down-regulated in Transcription
  misc_feature: MA Experiment 20000234 PARAMETER Experiment Name: At_Siliques_P Parameter: Age (day) Value: 21
  misc_feature: MA Experiment 20000234 PARAMETER Experiment Name: At_Siliques_P Parameter: Organism Value: A. thaliana
  misc_feature: MA Experiment 20000234 PARAMETER Experiment Name: At_Siliques_P Parameter: Plant Line Value: WS
  misc_feature: MA Experiment 20000234 PARAMETER Experiment Name: At_Siliques_P Parameter: Tissue Value: Less Than 5mm Siliques vs. Whole Plant
  misc_feature: MA Experiment ID: 20000235 Result: Down-regulated in Transcription
  misc_feature: MA Experiment 20000235 PARAMETER Experiment Name: At_Siliques_P Parameter: Age (day) Value: 21
  misc_feature: MA Experiment 20000235 PARAMETER Experiment Name: At_Siliques_P Parameter: Organism Value: A. thaliana
  misc_feature: MA Experiment 20000235 PARAMETER Experiment Name: At_Siliques_P Parameter: Plant Line Value: WS
  misc_feature: MA Experiment 20000235 PARAMETER Experiment Name: At_Siliques_P Parameter: Tissue Value: 5-10mm Siliques vs. Whole Plant
  misc_feature: MA Experiment ID: 20000264 Result: Down-regulated in Transcription
  misc_feature: MA Experiment 20000264 PARAMETER Experiment Name: At_Open_Flower_P Parameter: Age (day) Value: 21
  misc_feature: MA Experiment 20000264 PARAMETER Experiment Name: At_Open_Flower_P Parameter: Plant Line Value: WS
  misc_feature: MA Experiment 20000264 PARAMETER Experiment Name: At_Open_Flower_P Parameter: Tissue Value: Open Flower vs. Whole Plant
  misc_feature: MA Experiment ID: 20000265 Result: Down-regulated in Transcription
  misc_feature: MA Experiment 20000265 PARAMETER Experiment Name: At_Open_Flower_P Parameter: Age (day) Value: 21
  misc_feature: MA Experiment 20000265 PARAMETER Experiment Name: At_Open_Flower_P Parameter: Plant Line Value: WS
  misc_feature: MA Experiment 20000265 PARAMETER Experiment Name: At_Open_Flower_P Parameter: Tissue Value: Closed Flower vs. Whole Plant
  misc_feature: MA Experiment ID: 20000267 Result: Down-regulated in Transcription
  misc_feature: MA Experiment 20000267 PARAMETER Experiment Name: At_Drought_P Parameter: Age (day) Value: 7
  misc_feature: MA Experiment 20000267 PARAMETER Experiment Name: At_Drought_P Parameter: Organism Value: A. thaliana
  misc_feature: MA Experiment 20000267 PARAMETER Experiment Name: At_Drought_P Parameter: Plant Line Value: WS
  misc_feature: MA Experiment 20000267 PARAMETER Experiment Name: At_Drought_P Parameter: Timepoint (hr) Value: 6
  misc_feature: MA Experiment 20000267 PARAMETER Experiment Name: At_Drought_P Parameter: Tissue Value: Whole Plant
  misc_feature: MA Experiment 20000267 PARAMETER Experiment Name: At_Drought_P Parameter: Treatment Value: Drought vs. No Drought
  misc_feature: MA Experiment ID: 20000268 Result: Down-regulated in Transcription
  misc_feature: MA Experiment 20000268 PARAMETER Experiment Name: At_100mM_NaCl__P Parameter: Age (day) Value: 14
  misc_feature: MA Experiment 20000268 PARAMETER Experiment Name: At_100mM_NaCl__P Parameter: Organism Value: A. thaliana
  misc_feature: MA Experiment 20000268 PARAMETER Experiment Name: At_100mM_NaCl__P Parameter: Plant Line Value: WS
  misc_feature: MA Experiment 20000268 PARAMETER Experiment Name: At_100mM_NaCl__P Parameter: Timepoint (hr) Value: 6
  misc_feature: MA Experiment 20000268 PARAMETER Experiment Name: At_100mM_NaCl__P Parameter: Tissue Value: Whole Plant
  misc_feature: MA Experiment 20000268 PARAMETER Experiment Name: At_100mM_NaCl__P Parameter: Treatment Value: 100mM NaCl vs. No Treatment
  misc_feature: MA Experiment ID: 20000286 Result: Down-regulated in Transcription
  misc_feature: MA Experiment 20000286 PARAMETER Experiment Name: At_Open_Flower_P Parameter: Age (day) Value: 21
  misc_feature: MA Experiment 20000286 PARAMETER Experiment Name: At_Open_Flower_P Parameter: Plant Line Value: WS
  misc_feature: MA Experiment 20000286 PARAMETER Experiment Name: At_Open_Flower_P Parameter: Tissue Value: Half Open vs. Whole Plant
  misc_feature: MA Experiment ID: 20000436 Result: Down-regulated in Transcription
  misc_feature: MA Experiment 20000436 PARAMETER Experiment Name: At_Drought_P Parameter: Age (day) Value: 7
  misc_feature: MA Experiment 20000436 PARAMETER Experiment Name: At_Drought_P Parameter: Organism Value: A. thaliana
  misc_feature: MA Experiment 20000436 PARAMETER Experiment Name: At_Drought_P Parameter: Plant Line Value: WS
  misc_feature: MA Experiment 20000436 PARAMETER Experiment Name: At_Drought_P Parameter: Timepoint (hr) Value: 12
  misc_feature: MA Experiment 20000436 PARAMETER Experiment Name: At_Drought_P Parameter: Tissue Value: Whole Plant
  misc_feature: MA Experiment 20000436 PARAMETER Experiment Name: At_Drought_P Parameter: Treatment Value: Drought vs. No Drought
  misc_feature: MA Experiment ID: 20000437 Result: Down-regulated in Transcription
  misc_feature: MA Experiment 20000437 PARAMETER Experiment Name: At_Drought_P Parameter: Age (day) Value: 8
  misc_feature: MA Experiment 20000437 PARAMETER Experiment Name: At_Drought_P Parameter: Organism Value: A. thaliana
  misc_feature: MA Experiment 20000437 PARAMETER Experiment Name: At_Drought_P Parameter: Plant Line Value: WS
  misc_feature: MA Experiment 20000437 PARAMETER Experiment Name: At_Drought_P Parameter: Timepoint (hr) Value: 24
  misc_feature: MA Experiment 20000437 PARAMETER Experiment Name: At_Drought_P Parameter: Tissue Value: Whole Plant
  misc_feature: MA Experiment 20000437 PARAMETER Experiment Name: At_Drought_P Parameter: Treatment Value: Drought vs. No Drought
  misc_feature: MA Experiment ID: 20000439 Result: Down-regulated in Transcription
  misc_feature: MA Experiment 20000439 PARAMETER Experiment Name: At_Roots__P Parameter: Age (day) Value: 14 vs. 21
  misc_feature: MA Experiment 20000439 PARAMETER Experiment Name: At_Roots__P Parameter: Organism Value: A. thaliana
  misc_feature: MA Experiment 20000439 PARAMETER Experiment Name: At_Roots__P Parameter: Tissue Value: Roots vs. Whole Plant
  misc_feature: MA Experiment ID: 20000441 Result: Up-regulated in Transcription
  misc_feature: MA Experiment 20000441 PARAMETER Experiment Name: At_1uM_BR-BRZ__P Parameter: Tissue Value: Shoot Apices
  misc_feature: MA Experiment 20000441 PARAMETER Experiment Name: At_1uM_BR-BRZ__P Parameter: Treatment Value: 1uM BR vs. No Treatment
  misc_feature: MA Experiment ID: 20000453 Result: Down-regulated in Transcription
  misc_feature: MA Experiment 20000453 PARAMETER Experiment Name: At_100uM_ABA_P Parameter: Age (day) Value: 15
  misc_feature: MA Experiment 20000453 PARAMETER Experiment Name: At_100uM_ABA_P Parameter: Organism Value: A. thaliana
  misc_feature: MA Experiment 20000453 PARAMETER Experiment Name: At_100uM_ABA_P Parameter: Plant Line Value: WS
  misc_feature: MA Experiment 20000453 PARAMETER Experiment Name: At_100uM_ABA_P Parameter: Timepoint (hr) Value: 24
  misc_feature: MA Experiment 20000453 PARAMETER Experiment Name: At_100uM_ABA_P Parameter: Tissue Value: Aerial
  misc_feature: MA Experiment 20000453 PARAMETER Experiment Name: At_100uM_ABA_P Parameter: Treatment Value: 100uM ABA vs. No Treatment
  misc_feature: MA Experiment ID: 20000495 Result: Down-regulated in Transcription
  misc_feature: MA Experiment 20000495 PARAMETER Experiment Name: At_Guard_Cells_P Parameter: Harvest Date Value: 8/2/2002
  misc_feature: MA Experiment 20000495 PARAMETER Experiment Name: At_Guard_Cells_P Parameter: Organism Value: A. thaliana
  misc_feature: MA Experiment 20000495 PARAMETER Experiment Name: At_Guard_Cells_P Parameter: Tissue Value: Guard Cells vs. Leaves
  misc_feature: MA Experiment ID: 20000496 Result: Down-regulated in Transcription
  misc_feature: MA Experiment 20000496 PARAMETER Experiment Name: At_Guard_Cells_P Parameter: Harvest Date Value: 7/19/2002
  misc_feature: MA Experiment 20000496 PARAMETER Experiment Name: At_Guard_Cells_P Parameter: Organism Value: Canola
  misc_feature: MA Experiment 20000496 PARAMETER Experiment Name: At_Guard_Cells_P Parameter: Tissue Value: Guard Cells vs. Leaves
  misc_feature: MA Experiment ID: 20000709 Result: Up-regulated in Transcription
  misc_feature: MA Experiment 20000709 PARAMETER Experiment Name: At_15mM_NH4NO3_L-to-H_P Parameter: Age (hr) Value: 14
  misc_feature: MA Experiment 20000709 PARAMETER Experiment Name: At_15mM_NH4NO3_L-to-H_P Parameter: Organism Value: A. thaliana
  misc_feature: MA Experiment 20000709 PARAMETER Experiment Name: At_15mM_NH4NO3_L-to-H_P Parameter: Plant Line Value: WS
  misc_feature: MA Experiment 20000709 PARAMETER Experiment Name: At_15mM_NH4NO3_L-to-H_P Parameter: Timepoint (hr) Value: 4
  misc_feature: MA Experiment 20000709 PARAMETER Experiment Name: At_15mM_NH4NO3_L-to-H_P Parameter: Tissue Value: Aerial
  misc_feature: MA Experiment 20000709 PARAMETER Experiment Name: At_15mM_NH4NO3_L-to-H_P Parameter: Treatment Value: 15mM NH4NO3 vs. 30mM Mannitol
  misc_feature: MA Experiment ID: 20000794 Result: Down-regulated in Transcription
  misc_feature: MA Experiment 20000794 PARAMETER Experiment Name: At_Petals_P Parameter: Age (day) Value: 23-25 days
  misc_feature: MA Experiment 20000794 PARAMETER Experiment Name: At_Petals_P Parameter: Plant Line Value: WS
  misc_feature: MA Experiment 20000794 PARAMETER Experiment Name: At_Petals_P Parameter: Tissue Value: Petals vs. Whole plant
  misc_feature: MA Experiment ID: 20001554 Result: Down-regulated in Transcription
  misc_feature: MA Experiment 20001554 PARAMETER Experiment Name: At_Drought_Soil_Dry_P Parameter: Age (day) Value: 21
  misc_feature: MA Experiment 20001554 PARAMETER Experiment Name: At_Drought_Soil_Dry_P Parameter: Organism Value: A. thaliana
  misc_feature: MA Experiment 20001554 PARAMETER Experiment Name: At_Drought_Soil_Dry_P Parameter: Plant Line Value: WS
  misc_feature: MA Experiment 20001554 PARAMETER Experiment Name: At_Drought_Soil_Dry_P Parameter: Post Timepoint (hr) Value: None
  misc_feature: MA Experiment 20001554 PARAMETER Experiment Name: At_Drought_Soil_Dry_P Parameter: Post-Treatment Value: None
  misc_feature: MA Experiment 20001554 PARAMETER Experiment Name: At_Drought_Soil_Dry_P Parameter: Timepoint (day) Value: 7
  misc_feature: MA Experiment 20001554 PARAMETER Experiment Name: At_Drought_Soil_Dry_P Parameter: Treatment Value: Drought vs. No Drought
  misc_feature: MA Experiment ID: 20001555 Result: Down-regulated in Transcription
  misc_feature: MA Experiment 20001555 PARAMETER Experiment Name: At_Drought_Soil_Dry_P Parameter: Age (day) Value: 24
  misc_feature: MA Experiment 20001555 PARAMETER Experiment Name: At_Drought_Soil_Dry_P Parameter: Organism Value: A. thaliana
  misc_feature: MA Experiment 20001555 PARAMETER Experiment Name: At_Drought_Soil_Dry_P Parameter: Plant Line Value: WS
  misc_feature: MA Experiment 20001555 PARAMETER Experiment Name: At_Drought_Soil_Dry_P Parameter: Post Timepoint (hr) Value: None
  misc_feature: MA Experiment 20001555 PARAMETER Experiment Name: At_Drought_Soil_Dry_P Parameter: Post-Treatment Value: None
  misc_feature: MA Experiment 20001555 PARAMETER Experiment Name: At_Drought_Soil_Dry_P Parameter: Timepoint (day) Value: 10
  misc_feature: MA Experiment 20001555 PARAMETER Experiment Name: At_Drought_Soil_Dry_P Parameter: Treatment Value: Drought vs. No Drought
  misc_feature: MA Experiment ID: 20001556 Result: Down-regulated in Transcription
  misc_feature: MA Experiment 20001556 PARAMETER Experiment Name: At_Drought_Soil_Dry_P Parameter: Age (day) Value: 26
  misc_feature: MA Experiment 20001556 PARAMETER Experiment Name: At_Drought_Soil_Dry_P Parameter: Organism Value: A. thaliana
  misc_feature: MA Experiment 20001556 PARAMETER Experiment Name: At_Drought_Soil_Dry_P Parameter: Plant Line Value: WS
  misc_feature: MA Experiment 20001556 PARAMETER Experiment Name: At_Drought_Soil_Dry_P Parameter: Post Timepoint (hr) Value: None
  misc_feature: MA Experiment 20001556 PARAMETER Experiment Name: At_Drought_Soil_Dry_P Parameter: Post-Treatment Value: None
  misc_feature: MA Experiment 20001556 PARAMETER Experiment Name: At_Drought_Soil_Dry_P Parameter: Timepoint (day) Value: 12
  misc_feature: MA Experiment 20001556 PARAMETER Experiment Name: At_Drought_Soil_Dry_P Parameter: Treatment Value: Drought vs. No Drought
  misc_feature: MA Experiment ID: 20001560 Result: Down-regulated in Transcription
  misc_feature: MA Experiment 20001560 PARAMETER Experiment Name: At_Drought_Soil_Dry_P Parameter: Age (day) Value: 28
  misc_feature: MA Experiment 20001560 PARAMETER Experiment Name: At_Drought_Soil_Dry_P Parameter: Organism Value: A. thaliana
  misc_feature: MA Experiment 20001560 PARAMETER Experiment Name: At_Drought_Soil_Dry_P Parameter: Plant Line Value: WS
  misc_feature: MA Experiment 20001560 PARAMETER Experiment Name: At_Drought_Soil_Dry_P Parameter: Post Timepoint (hr) Value: None
  misc_feature: MA Experiment 20001560 PARAMETER Experiment Name: At_Drought_Soil_Dry_P Parameter: Post-Treatment Value: None
  misc_feature: MA Experiment 20001560 PARAMETER Experiment Name: At_Drought_Soil_Dry_P Parameter: Timepoint (day) Value: 14
  misc_feature: MA Experiment 20001560 PARAMETER Experiment Name: At_Drought_Soil_Dry_P Parameter: Treatment Value: Drought vs. No Drought
  misc_feature: MA Experiment ID: 20001755 Result: Up-regulated in Transcription
  misc_feature: MA Experiment 20001755 PARAMETER Experiment Name: At_50mM_NH4NO3_L-to-H_P Parameter: Timepoint (hr) Value: 2
  misc_feature: MA Experiment 20001755 PARAMETER Experiment Name: At_50mM_NH4NO3_L-to-H_P Parameter: Tissue Value: Leaf
  misc_feature: MA Experiment 20001755 PARAMETER Experiment Name: At_50mM_NH4NO3_L-to-H_P Parameter: Treatment Value: 50mM NH4NO3 vs 100mM Mannitol
  misc_feature: MA Experiment ID: 20001904 Result: Down-regulated in Transcription
  misc_feature: MA Experiment 20001904 PARAMETER Experiment Name: At_Drought_Reproduction_P Parameter: Age (day) Value: 37
  misc_feature: MA Experiment 20001904 PARAMETER Experiment Name: At_Drought_Reproduction_P Parameter: Organism Value: A. thaliana
  misc_feature: MA Experiment 20001904 PARAMETER Experiment Name: At_Drought_Reproduction_P Parameter: Plant Line Value: WS
  misc_feature: MA Experiment 20001904 PARAMETER Experiment Name: At_Drought_Reproduction_P Parameter: Timepoint (day) Value: 7
  misc_feature: MA Experiment 20001904 PARAMETER Experiment Name: At_Drought_Reproduction_P Parameter: Tissue Value: Rosettes
  misc_feature: MA Experiment 20001904 PARAMETER Experiment Name: At_Drought_Reproduction_P Parameter: Treatment Value: Drought vs. No Drought
atatagcaaatcctcttttgctttaaacccaccaaataactcagagcttttttgattttttcccattctctattttgttttgtacttttggtctcactttaaaagatcataagttgaaagatttctgcagagaacaatatgttggaaggtcttgtctctcaagaaagcttgtccttaaactctatggacatgtctgtacttgaaaggcttaaatgggtacaacagcaacaacagcaactgcaacaagttgtgtcccatagcagtaataattcacctgaacttcttcagatacttcagttccatggaagcaacaatgatgagttgttggagagtagtttcagccaatttcaaatgcttggatctggttttggaccaaactataacatgggttttggtcctccacatgaatccatttcaagaacaagtagctgccatatggaacctgtggatacaatggaggttttgttgaagaccggtgaagaaaccagagccgttgccttgaagaacaagagaaaaccagaggttaagacaagggaagagcaaaagacagagaagaagatcaaagtagaggctgagacagagtcaagcatgaaaggaaaatcaaacatgggaaacactgaagcatcttcagacacttcaaaggagacatcgaaaggagcttcagagaatcagaaattagattatatccacgtgagagctcgtcgaggccaagccactgacagacacagcttagcagaaagggcgagaagagaaaagatcagcaagaaaatgaaatatctgcaagatattgtgcctggatgcaataaggtcacaggaaaagctggtatgcttgatgagatcatcaattatgttcaatgtctccaaagacaagtcgagttcctgtcgatgaaacttgctgtcttgaacccggaactagagcttgccgtggaagatgtatccgtaaaacagtttcaggcttactttacaaatgtagttgcttcaaagcaatcaataatggttgatgtgccattgtttccgttagaccagcaaggatctttagattcgtttgcgataaacccgaaccaaacgacatctatcgaagctccatttggaagctgggaaactcaatcacagagtctttacaacacatctagcctcggttttcattactaagcaagattcattgaaacaacatggttgacatcaatcaatcatcaaaatcagaagcaaattctattacatttgctcatcaaagtagtaatttcgaaatttggttaatgcattatcctttgatccttgttttctgatatttaaaccagaagaactggagatagcaatccaatgatcttgtcaccatcaatctttgtgtatagattatatagagagatagataaatatgttttagaggagttatagatatatatcatatttgtagaagaaagagagaaaactcttgtggtaattacaattcttgtttgtttttttggatatataaatatctaagaaaattataaaac

SEQ ID NO: 26426 - protein, 337 aa, Arabidopsis thaliana
  peptide (1)..(337): Ceres Seq. ID no. 13490188
  misc_feature (192)..(242): Pfam Name: Helix-loop-helix DNA-binding domain Pfam Description: Helix-loop-helix DNA-binding domain
  misc_feature (85)..(330): Homolog of NCBI NO: 21537215 NR Description: unknown [Arabidopsis thaliana]
  misc_feature (85)..(330): Homolog of NCBI NO: 20127056 NR Description: putative bHLH transcription factor [Arabidopsis
  misc_feature (85)..(330): Homolog of NCBI NO: 34391435 NR Description: putative bHLH transcription factor [Arabidopsis
  misc_feature (85)..(330): Homolog of NCBI NO: 15451016 NR Description: Unknown protein [Arabidopsis thaliana]
  misc_feature (85)..(330): Homolog of NCBI NO: 25407737 NR Description: hypothetical protein AT4g36540 [imported] -
  misc_feature (85)..(330): Homolog of NCBI NO: 15234436 NR Description: expressed protein [Arabidopsis thaliana]
  misc_feature (18)..(315): Homolog of NCBI NO: 25411856 NR Description: hypothetical protein At2g18300 [imported] -
  misc_feature (18)..(337): Homolog of NCBI NO: 20127068 NR Description: putative bHLH transcription factor [Arabidopsis
  misc_feature (1)..(337): Homolog of NCBI NO: 18398703 NR Description: bHLH064 putative bHLH transcription factor
  misc_feature (1)..(337): Homolog of NCBI NO: 30680338 NR Description: bHLH064 putative bHLH transcription factor
MLEGLVSQESLSLNSMDMSVLERLKWVQQQQQQLQQVVSHSSNNSPELLQILQFHGSNNDELLESSFSQFQMLGSGFGPNYNMGFGPPHESISRTSSCHMEPVDTMEVLLKTGEETRAVALKNKRKPEVKTREEQKTEKKIKVEAETESSMKGKSNMGNTEASSDTSKETSKGASENQKLDYIHVRARRGQATDRHSLAERARREKISKKMKYLQDIVPGCNKVTGKAGMLDEIINYVQCLQRQVEFLSMKLAVLNPELELAVEDVSVKQFQAYFTNVVASKQSIMVDVPLFPLDQQGSLDSFAINPNQTTSIEAPFGSWETQSQSLYNTSSLGFHY

SEQ ID NO: 26427 - protein, 322 aa, Arabidopsis thaliana
  peptide (1)..(322): Ceres Seq. ID no. 13490189
  misc_feature (177)..(227): Pfam Name: Helix-loop-helix DNA-binding domain Pfam Description: Helix-loop-helix DNA-binding domain
  misc_feature (70)..(315): Homolog of NCBI NO: 21537215 NR Description: unknown [Arabidopsis thaliana]
  misc_feature (70)..(315): Homolog of NCBI NO: 20127056 NR Description: putative bHLH transcription factor [Arabidopsis
  misc_feature (70)..(315): Homolog of NCBI NO: 34391435 NR Description: putative bHLH transcription factor [Arabidopsis
  misc_feature (70)..(315): Homolog of NCBI NO: 25407737 NR Description: hypothetical protein AT4g36540 [imported] -
  misc_feature (70)..(315): Homolog of NCBI NO: 15451016 NR Description: Unknown protein [Arabidopsis thaliana]
  misc_feature (70)..(315): Homolog of NCBI NO: 15234436 NR Description: expressed protein [Arabidopsis thaliana]
  misc_feature (3)..(300): Homolog of NCBI NO: 25411856 NR Description: hypothetical protein At2g18300 [imported] -
  misc_feature (3)..(322): Homolog of NCBI NO: 20127068 NR Description: putative bHLH transcription factor [Arabidopsis
  misc_feature (1)..(322): Homolog of NCBI NO: 18398703 NR Description: bHLH064 putative bHLH transcription factor
  misc_feature (1)..(322): Homolog of NCBI NO: 30680338 NR Description: bHLH064 putative bHLH transcription factor
MDMSVLERLKWVQQQQQQLQQVVSHSSNNSPELLQILQFHGSNNDELLESSFSQFQMLGSGFGPNYNMGFGPPHESISRTSSCHMEPVDTMEVLLKTGEETRAVALKNKRKPEVKTREEQKTEKKIKVEAETESSMKGKSNMGNTEASSDTSKETSKGASENQKLDYIHVRARRGQATDRHSLAERARREKISKKMKYLQDIVPGCNKVTGKAGMLDEIINYVQCLQRQVEFLSMKLAVLNPELELAVEDVSVKQFQAYFTNVVASKQSIMVDVPLFPLDQQGSLDSFAINPNQTTSIEAPFGSWETQSQSLYNTSSLGFHY

SEQ ID NO: 26428 - protein, 320 aa, Arabidopsis thaliana
  peptide (1)..(320): Ceres Seq. ID no. 13490190
  misc_feature (175)..(225): Pfam Name: Helix-loop-helix DNA-binding domain Pfam Description: Helix-loop-helix DNA-binding domain
  misc_feature (68)..(313): Homolog of NCBI NO: 21537215 NR Description: unknown [Arabidopsis thaliana]
  misc_feature (68)..(313): Homolog of NCBI NO: 20127056 NR Description: putative bHLH transcription factor [Arabidopsis
  misc_feature (68)..(313): Homolog of NCBI NO: 34391435 NR Description: putative bHLH transcription factor [Arabidopsis
  misc_feature (68)..(313): Homolog of NCBI NO: 25407737 NR Description: hypothetical protein AT4g36540 [imported] -
  misc_feature (68)..(313): Homolog of NCBI NO: 15451016 NR Description: Unknown protein [Arabidopsis thaliana]
  misc_feature (68)..(313): Homolog of NCBI NO: 15234436 NR Description: expressed protein [Arabidopsis thaliana]
  misc_feature (1)..(298): Homolog of NCBI NO: 25411856 NR Description: hypothetical protein At2g18300 [imported] -
  misc_feature (1)..(320): Homolog of NCBI NO: 20127068 NR Description: putative bHLH transcription factor [Arabidopsis
  misc_feature (1)..(320): Homolog of NCBI NO: 18398703 NR Description: bHLH064 putative bHLH transcription factor
  misc_feature (1)..(320): Homolog of NCBI NO: 30680338 NR Description: bHLH064 putative bHLH transcription factor
MSVLERLKWVQQQQQQLQQVVSHSSNNSPELLQILQFHGSNNDELLESSFSQFQMLGSGFGPNYNMGFGPPHESISRTSSCHMEPVDTMEVLLKTGEETRAVALKNKRKPEVKTREEQKTEKKIKVEAETESSMKGKSNMGNTEASSDTSKETSKGASENQKLDYIHVRARRGQATDRHSLAERARREKISKKMKYLQDIVPGCNKVTGKAGMLDEIINYVQCLQRQVEFLSMKLAVLNPELELAVEDVSVKQFQAYFTNVVASKQSIMVDVPLFPLDQQGSLDSFAINPNQTTSIEAPFGSWETQSQSLYNTSSLGFHY

SEQ ID NO: 26429 - DNA, 988 bp, Arabidopsis thaliana
  misc_feature (1)..(988): Ceres Seq. ID no. 12340511
  misc_feature: MA Experiment ID: 108434 Result: Down-regulated in Transcription
  misc_feature: MA Experiment 108434 PARAMETER Experiment Name: At_Root_Tips_cDNA_P Parameter: Tissue Value: Root Tips
  misc_feature: MA Experiment ID: 108469 Result: Up-regulated in Transcription
  misc_feature: MA Experiment ID: 108595 Result: Down-regulated in Transcription
  misc_feature: MA Experiment 108595 PARAMETER Experiment Name: At_Ler-pi_Ovule_cDNA_P Parameter: Plant Line Value: null
  misc_feature: MA Experiment ID: 20000794 Result: Up-regulated in Transcription
  misc_feature: MA Experiment 20000794 PARAMETER Experiment Name: At_Petals_P Parameter: Age (day) Value: 23-25 days
  misc_feature: MA Experiment 20000794 PARAMETER Experiment Name: At_Petals_P Parameter: Plant Line Value: WS
  misc_feature: MA Experiment 20000794 PARAMETER Experiment Name: At_Petals_P Parameter: Tissue Value: Petals vs. Whole plant
atttccctcgccgcacgccggcggatggaggttagtttagtcttttaacctttttctctgtttttgtcccaaaagataaaacgaaaatgacttcttttgaaaaggagagaaggcatatatcgcgtggatttgaagacgaagaggaatcataaaaagcctaacgaagaagacgaagaagaagaggaacaaacaaccatgggtgaagtggttaaggatggaagagaagaagtgatccaggcatggtatatggatgatagcgaagaggatcagagacttcctcaccacaaggatcctaaggagtttctatctttggacaaacttgcagagctgggagtacttagctggagacttgatgctgataactatgaaaccgatgaggatttgaaaaagatccgcgaatctcgtggttactcttacatggacttttgtgaggtatgcccggaaaagcttccaaactatgaagtgaaagtgaagagctttttcgaagaacatttgcacactgatgaagagatccgttactgcgttgcaggaagcggttactttgatgtgagggatcgcaatgaagcttggattagagtatgggtaaagaagggaggtatgatagtcttacctgctggaatatatcatcgcttcaccgtagactcagacaactatatcaaggcaatgcggcttttcgtgggtgaaccggtctggacaccatacaatcgcccacacgaccacctccctgcaaggaaagagtacatcgataatttcgtgaaggtgaatgaaggtggtgtcatagacgcgtcagcctagaggattctcagtcttatgcatcagatttctataaactaagcatacaataaagagagctttctgtctcatgttggatattatgtcatctacagatccacttgtgaagaaactttgattcgtgtggctttggcattatggttgtgttgtaactgtatttatagtttatactccagaaatcaaactgtgttacatt

SEQ ID NO: 26430 - protein, 199 aa, Arabidopsis thaliana
  peptide (1)..(199): Ceres Seq. ID no. 12340512
  misc_feature (14)..(168): Pfam Name: ARD/ARD' family Pfam Description: ARD/ARD' family
  misc_feature (7)..(192): Homolog of NCBI NO: 37534408 NR Description: putative zinc finger protein ID1
  misc_feature (6)..(192): Homolog of NCBI NO: 7489558 NR Description: probable submergence induced protein 2 - rice
  misc_feature (5)..(193): Homolog of NCBI NO: 34902616 NR Description: Putative probable submergence induced,
  misc_feature (6)..(193): Homolog of NCBI NO: 14522834 NR Description: iron-deficiency induced gene [Hordeum vulgare]
  misc_feature (6)..(193): Homolog of NCBI NO: 7489559 NR Description: probable submergence induced, nickel-binding
  misc_feature (1)..(199): Homolog of NCBI NO: 15225298 NR Description: unknown protein; protein id: At2g26400.1
  misc_feature (1)..(75): Homolog of NCBI NO: 7485194 NR Description: hypothetical protein - Arabidopsis thaliana
  misc_feature (69)..(179): Homolog of NCBI NO: 7485194 NR Description: hypothetical protein - Arabidopsis thaliana
  misc_feature (1)..(187): Homolog of NCBI NO: 18414293 NR Description: Expressed protein
  misc_feature (1)..(199): Homolog of NCBI NO: 18414289 NR Description: Expressed protein
MGEVVKDGREEVIQAWYMDDSEEDQRLPHHKDPKEFLSLDKLAELGVLSWRLDADNYETDEDLKKIRESRGYSYMDFCEVCPEKLPNYEVKVKSFFEEHLHTDEEIRYCVAGSGYFDVRDRNEAWIRVWVKKGGMIVLPAGIYHRFTVDSDNYIKAMRLFVGEPVWTPYNRPHDHLPARKEYIDNFVKVNEGGVIDASA

SEQ ID NO: 26431 - protein, 182 aa, Arabidopsis thaliana
  peptide (1)..(182): Ceres Seq. ID no. 12340513
  misc_feature (1)..(151): Pfam Name: ARD/ARD' family Pfam Description: ARD/ARD' family
  misc_feature (1)..(175): Homolog of NCBI NO: 7489558 NR Description: probable submergence induced protein 2 - rice
  misc_feature (1)..(176): Homolog of NCBI NO: 34902616 NR Description: Putative probable submergence induced,
  misc_feature (1)..(176): Homolog of NCBI NO: 14522834 NR Description: iron-deficiency induced gene [Hordeum vulgare]
  misc_feature (1)..(176): Homolog of NCBI NO: 7489559 NR Description: probable submergence induced, nickel-binding
  misc_feature (1)..(182): Homolog of NCBI NO: 15225298 NR Description: unknown protein; protein id: At2g26400.1
  misc_feature (1)..(175): Homolog of NCBI NO: 37534408 NR Description: putative zinc finger protein ID1
  misc_feature (1)..(58): Homolog of NCBI NO: 7485194 NR Description: hypothetical protein - Arabidopsis thaliana
  misc_feature (52)..(162): Homolog of NCBI NO: 7485194 NR Description: hypothetical protein - Arabidopsis thaliana
  misc_feature (1)..(170): Homolog of NCBI NO: 18414293 NR Description: Expressed protein
  misc_feature (1)..(182): Homolog of NCBI NO: 18414289 NR Description: Expressed protein
MDDSEEDQRLPHHKDPKEFLSLDKLAELGVLSWRLDADNYETDEDLKKIRESRGYSYMDFCEVCPEKLPNYEVKVKSFFEEHLHTDEEIRYCVAGSGYFDVRDRNEAWIRVWVKKGGMIVLPAGIYHRFTVDSDNYIKAMRLFVGEPVWTPYNRPHDHLPARKEYIDNFVKVNEGGVIDASA

SEQ ID NO: 26432 - protein, 125 aa, Arabidopsis thaliana; identical to SEQ ID NO: 25190
  peptide (1)..(125): Ceres Seq. ID no. 12340514
  misc_feature (1)..(94): Pfam Name: ARD/ARD' family Pfam Description: ARD/ARD' family
  misc_feature (1)..(109): Homolog of NCBI NO: 10177955 NR Description: gene_id:MQD19.21~pir||T02918~similar to unknown
  misc_feature (1)..(118): Homolog of NCBI NO: 37534408 NR Description: putative zinc finger protein ID1
  misc_feature (1)..(118): Homolog of NCBI NO: 7489558 NR Description: probable submergence induced protein 2 - rice
  misc_feature (1)..(119): Homolog of NCBI NO: 34902616 NR Description: Putative probable submergence induced,
  misc_feature (1)..(119): Homolog of NCBI NO: 14522834 NR Description: iron-deficiency induced gene [Hordeum vulgare]
  misc_feature (1)..(119): Homolog of NCBI NO: 7489559 NR Description: probable submergence induced, nickel-binding
  misc_feature (1)..(125): Homolog of NCBI NO: 15225298 NR Description: unknown protein; protein id: At2g26400.1
  misc_feature (1)..(105): Homolog of NCBI NO: 7485194 NR Description: hypothetical protein - Arabidopsis thaliana
  misc_feature (1)..(113): Homolog of NCBI NO: 18414293 NR Description: Expressed protein
  misc_feature (1)..(125): Homolog of NCBI NO: 18414289 NR Description: Expressed protein

SEQ ID NO: 26433 - DNA, 771 bp, Arabidopsis thaliana
  misc_feature (1)..(771): Ceres Seq. ID no. 13489956
  misc_feature: MA Experiment ID: 108585 Result: Up-regulated in Transcription
  misc_feature: MA Experiment 108585 PARAMETER Experiment Name: At_5mM_NaNP_cDNA_P Parameter: Timepoint (hr) Value: 6
  misc_feature: MA Experiment 108585 PARAMETER Experiment Name: At_5mM_NaNP_cDNA_P Parameter: Tissue Value: Aerial
  misc_feature: MA Experiment 108585 PARAMETER Experiment Name: At_5mM_NaNP_cDNA_P Parameter: Treatment Value: null
  misc_feature: MA Experiment ID: 20000185 Result: Up-regulated in Transcription
  misc_feature: MA Experiment 20000185 PARAMETER Experiment Name: At_Roots__P Parameter: Age (day) Value: 7 vs. 21
  misc_feature: MA Experiment 20000185 PARAMETER Experiment Name: At_Roots__P Parameter: Organism Value: A. thaliana
  misc_feature: MA Experiment 20000185 PARAMETER Experiment Name: At_Roots__P Parameter: Tissue Value: Roots vs. Whole Plant
  misc_feature: MA Experiment ID: 20000227 Result: Up-regulated in Transcription
  misc_feature: MA Experiment 20000227 PARAMETER Experiment Name: At_Root-Tips-vs-Tops_P Parameter: Tissue Value: Root Tips vs. Root Tops
  misc_feature: MA Experiment ID: 20000234 Result: Up-regulated in Transcription
  misc_feature: MA Experiment 20000234 PARAMETER Experiment Name: At_Siliques_P Parameter: Age (day) Value: 21
  misc_feature: MA Experiment 20000234 PARAMETER Experiment Name: At_Siliques_P Parameter: Organism Value: A. thaliana
  misc_feature: MA Experiment 20000234 PARAMETER Experiment Name: At_Siliques_P Parameter: Plant Line Value: WS
  misc_feature: MA Experiment 20000234 PARAMETER Experiment Name: At_Siliques_P Parameter: Tissue Value: Less Than 5mm Siliques vs. Whole Plant
  misc_feature: MA Experiment ID: 20000235 Result: Up-regulated in Transcription
  misc_feature: MA Experiment 20000235 PARAMETER Experiment Name: At_Siliques_P Parameter: Age (day) Value: 21
  misc_feature: MA Experiment 20000235 PARAMETER Experiment Name: At_Siliques_P Parameter: Organism Value: A. thaliana
  misc_feature: MA Experiment 20000235 PARAMETER Experiment Name: At_Siliques_P Parameter: Plant Line Value: WS
  misc_feature: MA Experiment 20000235 PARAMETER Experiment Name: At_Siliques_P Parameter: Tissue Value: 5-10mm Siliques vs. Whole Plant
  misc_feature: MA Experiment ID: 20000264 Result: Up-regulated in Transcription
  misc_feature: MA Experiment 20000264 PARAMETER Experiment Name: At_Open_Flower_P Parameter: Age (day) Value: 21
  misc_feature: MA Experiment 20000264 PARAMETER Experiment Name: At_Open_Flower_P Parameter: Plant Line Value: WS
  misc_feature: MA Experiment 20000264 PARAMETER Experiment Name: At_Open_Flower_P Parameter: Tissue Value: Open Flower vs. Whole Plant
  misc_feature: MA Experiment ID: 20000265 Result: Up-regulated in Transcription
  misc_feature: MA Experiment 20000265 PARAMETER Experiment Name: At_Open_Flower_P Parameter: Age (day) Value: 21
  misc_feature: MA Experiment 20000265 PARAMETER Experiment Name: At_Open_Flower_P Parameter: Plant Line Value: WS
  misc_feature: MA Experiment 20000265 PARAMETER Experiment Name: At_Open_Flower_P Parameter: Tissue Value: Closed Flower vs. Whole Plant
  misc_feature: MA Experiment ID: 20000286 Result: Up-regulated in Transcription
  misc_feature: MA Experiment 20000286 PARAMETER Experiment Name: At_Open_Flower_P Parameter: Age (day) Value: 21
  misc_feature: MA Experiment 20000286 PARAMETER Experiment Name: At_Open_Flower_P Parameter: Plant Line Value: WS
  misc_feature: MA Experiment 20000286 PARAMETER Experiment Name: At_Open_Flower_P Parameter: Tissue Value: Half Open vs. Whole Plant
  misc_feature: MA Experiment ID: 20000439 Result: Up-regulated in Transcription
  misc_feature: MA Experiment 20000439 PARAMETER Experiment Name: At_Roots__P Parameter: Age (day) Value: 14 vs. 21
  misc_feature: MA Experiment 20000439 PARAMETER Experiment Name: At_Roots__P Parameter: Organism Value: A. thaliana
  misc_feature: MA Experiment 20000439 PARAMETER Experiment Name: At_Roots__P Parameter: Tissue Value: Roots vs. Whole Plant
  misc_feature: MA Experiment ID: 20000496 Result: Down-regulated in Transcription
  misc_feature: MA Experiment 20000496 PARAMETER Experiment Name: At_Guard_Cells_P Parameter: Harvest Date Value: 7/19/2002
  misc_feature: MA Experiment 20000496 PARAMETER Experiment Name: At_Guard_Cells_P Parameter: Organism Value: Canola
  misc_feature: MA Experiment 20000496 PARAMETER Experiment Name: At_Guard_Cells_P Parameter: Tissue Value: Guard Cells vs. Leaves
  misc_feature: MA Experiment ID: 20000527 Result: Down-regulated in Transcription
  misc_feature: MA Experiment 20000527 PARAMETER Experiment Name: At_10percent_PEG_P Parameter: Age (day) Value: 20
  misc_feature: MA Experiment 20000527 PARAMETER Experiment Name: At_10percent_PEG_P Parameter: Organism Value: A. thaliana
  misc_feature: MA Experiment 20000527 PARAMETER Experiment Name: At_10percent_PEG_P Parameter: Plant Line Value: WS
  misc_feature: MA Experiment 20000527 PARAMETER Experiment Name: At_10percent_PEG_P Parameter: Timepoint (day) Value: 20
  misc_feature: MA Experiment 20000527 PARAMETER Experiment Name: At_10percent_PEG_P Parameter: Tissue Value: Whole Plant
  misc_feature: MA Experiment 20000527 PARAMETER Experiment Name: At_10percent_PEG_P Parameter: Treatment Value: 10percent PEG vs. No Treatment
  misc_feature: MA Experiment ID: 20001450 Result: Down-regulated in Transcription
  misc_feature: MA Experiment 20001450 PARAMETER Experiment Name: At_Far-red-induction_P Parameter: Age (day) Value: 7
  misc_feature: MA Experiment 20001450 PARAMETER Experiment Name: At_Far-red-induction_P Parameter: Light Value: Far-red vs. White
  misc_feature: MA Experiment 20001450 PARAMETER Experiment Name: At_Far-red-induction_P Parameter: Organism Value: A. thaliana
  misc_feature: MA Experiment 20001450 PARAMETER Experiment Name: At_Far-red-induction_P Parameter: Plant Line Value: Columbia
  misc_feature: MA Experiment 20001450 PARAMETER Experiment Name: At_Far-red-induction_P Parameter: Timepoint (hr) Value: 8
  misc_feature: MA Experiment 20001450 PARAMETER Experiment Name: At_Far-red-induction_P Parameter: Tissue Value: Whole Plant
gagccataaactttagaaaagagagagagagacaaagagagatctgatcctttgaagaaacaacaccaaaaaaaaaaaaaaaagaatggcatcagcggatgaaaaggtggtggaagagaaggcttcggtgatttcaagcttgttggacaaagccaaaggtttctttgcggagaagctggcgaatattccgacgccggaagcaaccgtggacgacgttgatttcaaaggcgtgacacgtgatggagtagattatcacgccaaggtctccgtcaagaatccttactctcaatccatccctatctgccagatctcttacatcctcaagagtgccacaaggacgatcgcgtcaggcacgataccggacccgggttcgttggttgggagcggcacgacggttctggacgtaccggttaaggtggcttatagcatagcggttagtctgatgaaggatatgtgtacggactgggacattgactatcaactagacattgggctaaccttcgacattcctgttgttggtgatatcaccattcctgtctctactcagggagagatcaagctcccttcccttcgcgacttcttttaattaccttagttcaaatatagttttcttaaatcataatctaattttcaataatgtacgatccataaacatagacgatcggagattaatacatttctggaatcctttttttattttgttgatttcaacaaggattttattggttattaattatgtatgtttttcaattgtgtgtgtgatttatcttt

SEQ ID NO: 26434 - protein, 166 aa, Arabidopsis thaliana
  peptide (1)..(166): Ceres Seq. ID no. 13489957
  misc_feature (17)..(166): Pfam Name: Late embryogenesis abundant protein Pfam Description: Late embryogenesis abundant protein
  misc_feature (16)..(166): Homolog of NCBI NO: 1170745 NR Description: Late embryogenesis abundant protein Lea14-A
  misc_feature (16)..(166): Homolog of NCBI NO: 1170746 NR Description: Desiccation protectant protein Lea14 homolog
  misc_feature (1)..(166): Homolog of NCBI NO: 3789986 NR Description: desiccation protein [Brassica napus]
  misc_feature (1)..(166): Homolog of NCBI NO: 21555248 NR Description: putative desiccation related protein [Arabidopsis
  misc_feature (1)..(166): Homolog of NCBI NO: 15225930 NR Description: desiccation related protein -related [Arabidopsis
MASADEKVVEEKASVISSLLDKAKGFFAEKLANIPTPEATVDDVDFKGVTRDGVDYHAKVSVKNPYSQSIPICQISYILKSATRTIASGTIPDPGSLVGSGTTVLDVPVKVAYSIAVSLMKDMCTDWDIDYQLDIGLTFDIPVVGDITIPVSTQGEIKLPSLRDFF

SEQ ID NO: 26435 - DNA, 780 bp, Arabidopsis thaliana; identical to SEQ ID NO: 21927
  misc_feature (1)..(780): Ceres Seq. ID no. 12331618
  misc_feature: MA Experiment ID: 20000180 Result: Up-regulated in Transcription
  misc_feature: MA Experiment 20000180 PARAMETER Experiment Name: At_Germinating_Seeds_P Parameter: Age (hr) Value: 24 vs. 0
  misc_feature: MA Experiment 20000180 PARAMETER Experiment Name: At_Germinating_Seeds_P Parameter: Tissue Value: Germinating Seeds
  misc_feature: MA Experiment ID: 20000184 Result: Up-regulated in Transcription
  misc_feature: MA Experiment 20000184 PARAMETER Experiment Name: At_Shoots__P Parameter: Age (day) Value: 7
  misc_feature: MA Experiment 20000184 PARAMETER Experiment Name: At_Shoots__P Parameter: Tissue Value: Shoots vs. Whole Plant
  misc_feature: MA Experiment ID: 20000185 Result: Down-regulated in Transcription
  misc_feature: MA Experiment 20000185 PARAMETER Experiment Name: At_Roots__P Parameter: Age (day) Value: 7 vs. 21
  misc_feature: MA Experiment 20000185 PARAMETER Experiment Name: At_Roots__P Parameter: Organism Value: A. thaliana
  misc_feature: MA Experiment 20000185 PARAMETER Experiment Name: At_Roots__P Parameter: Tissue Value: Roots vs. Whole Plant
  misc_feature: MA Experiment ID: 20000286 Result: Down-regulated in Transcription
  misc_feature: MA Experiment 20000286 PARAMETER Experiment Name: At_Open_Flower_P Parameter: Age (day) Value: 21
  misc_feature: MA Experiment 20000286 PARAMETER Experiment Name: At_Open_Flower_P Parameter: Plant Line Value: WS
  misc_feature: MA Experiment 20000286 PARAMETER Experiment Name: At_Open_Flower_P Parameter: Tissue Value: Half Open vs. Whole Plant
  misc_feature: MA Experiment ID: 20000437 Result: Down-regulated in Transcription
  misc_feature: MA Experiment 20000437 PARAMETER Experiment Name: At_Drought_P Parameter: Age (day) Value: 8
  misc_feature: MA Experiment 20000437 PARAMETER Experiment Name: At_Drought_P Parameter: Organism Value: A. thaliana
  misc_feature: MA Experiment 20000437 PARAMETER Experiment Name: At_Drought_P Parameter: Plant Line Value: WS
  misc_feature: MA Experiment 20000437 PARAMETER Experiment Name: At_Drought_P Parameter: Timepoint (hr) Value: 24
  misc_feature: MA Experiment 20000437 PARAMETER Experiment Name: At_Drought_P Parameter: Tissue Value: Whole Plant
  misc_feature: MA Experiment 20000437 PARAMETER Experiment Name: At_Drought_P Parameter: Treatment Value: Drought vs. No Drought
  misc_feature: MA Experiment ID: 20000438 Result: Up-regulated in Transcription
  misc_feature: MA Experiment 20000438 PARAMETER Experiment Name: At_Shoots__P Parameter: Age (day) Value: 14
  misc_feature: MA Experiment 20000438 PARAMETER Experiment Name: At_Shoots__P Parameter: Tissue Value: Shoots vs. Whole Plant
  misc_feature: MA Experiment ID: 20000439 Result: Down-regulated in Transcription
  misc_feature: MA Experiment 20000439 PARAMETER Experiment Name: At_Roots__P Parameter: Age (day) Value: 14 vs. 21
  misc_feature: MA Experiment 20000439 PARAMETER Experiment Name: At_Roots__P Parameter: Organism Value: A. thaliana
  misc_feature: MA Experiment 20000439 PARAMETER Experiment Name: At_Roots__P Parameter: Tissue Value: Roots vs. Whole Plant
  misc_feature: MA Experiment ID: 20000527 Result: Down-regulated in Transcription
  misc_feature: MA Experiment 20000527 PARAMETER Experiment Name: At_10percent_PEG_P Parameter: Age (day) Value: 20
  misc_feature: MA Experiment 20000527 PARAMETER Experiment Name: At_10percent_PEG_P Parameter: Organism Value: A. thaliana
  misc_feature: MA Experiment 20000527 PARAMETER Experiment Name: At_10percent_PEG_P Parameter: Plant Line Value: WS
  misc_feature: MA Experiment 20000527 PARAMETER Experiment Name: At_10percent_PEG_P Parameter: Timepoint (day) Value: 20
  misc_feature: MA Experiment 20000527 PARAMETER Experiment Name: At_10percent_PEG_P Parameter: Tissue Value: Whole Plant
  misc_feature: MA Experiment 20000527 PARAMETER Experiment Name: At_10percent_PEG_P Parameter: Treatment Value: 10percent PEG vs. No Treatment
  misc_feature: MA Experiment ID: 20000573 Result: Down-regulated in Transcription
  misc_feature: MA Experiment 20000573 PARAMETER Experiment Name: At_100uM_ABA_Mutants__P Parameter: Organism Value: A. thaliana
  misc_feature: MA Experiment 20000573 PARAMETER Experiment Name: At_100uM_ABA_Mutants__P Parameter: Plant Line Value: CS22 vs. Ler wt
  misc_feature: MA Experiment 20000573 PARAMETER Experiment Name: At_100uM_ABA_Mutants__P Parameter: Timepoint (hr) Value: N/A
  misc_feature: MA Experiment 20000573 PARAMETER Experiment Name: At_100uM_ABA_Mutants__P Parameter: Tissue Value: Whole Plant
  misc_feature: MA Experiment 20000573 PARAMETER Experiment Name: At_100uM_ABA_Mutants__P Parameter: Treatment Value: None
  misc_feature: MA Experiment ID: 20000574 Result: Down-regulated in Transcription
  misc_feature: MA Experiment 20000574 PARAMETER Experiment Name: At_100uM_ABA_Mutants__P Parameter: Organism Value: A. thaliana
  misc_feature: MA Experiment 20000574 PARAMETER Experiment Name: At_100uM_ABA_Mutants__P Parameter: Plant Line Value: CS23 vs. Ler wt
  misc_feature: MA Experiment 20000574 PARAMETER Experiment Name: At_100uM_ABA_Mutants__P Parameter: Timepoint (hr) Value: N/A
  misc_feature: MA Experiment 20000574 PARAMETER Experiment Name: At_100uM_ABA_Mutants__P Parameter: Tissue Value: Whole Plant
  misc_feature: MA Experiment 20000574 PARAMETER Experiment Name: At_100uM_ABA_Mutants__P Parameter: Treatment Value: None
  misc_feature: MA Experiment ID: 20000794 Result: Down-regulated in Transcription
  misc_feature: MA Experiment 20000794 PARAMETER Experiment Name: At_Petals_P Parameter: Age (day) Value: 23-25 days
  misc_feature: MA Experiment 20000794 PARAMETER Experiment Name: At_Petals_P Parameter: Plant Line Value: WS
  misc_feature: MA Experiment 20000794 PARAMETER Experiment Name: At_Petals_P Parameter: Tissue Value: Petals vs. Whole plant
  misc_feature: MA Experiment ID: 20001248 Result: Down-regulated in Transcription
  misc_feature: MA Experiment 20001248 PARAMETER Experiment Name: At_Far-red-induction_P Parameter: Age (day) Value: 7
  misc_feature: MA Experiment 20001248 PARAMETER Experiment Name: At_Far-red-induction_P Parameter: Light Value: Far-red vs. White
  misc_feature: MA Experiment 20001248 PARAMETER Experiment Name: At_Far-red-induction_P Parameter: Organism Value: A. thaliana
  misc_feature: MA Experiment 20001248 PARAMETER Experiment Name: At_Far-red-induction_P Parameter: Plant Line Value: Columbia
  misc_feature: MA Experiment 20001248 PARAMETER Experiment Name: At_Far-red-induction_P Parameter: Timepoint (hr) Value: 4
  misc_feature: MA Experiment 20001248 PARAMETER Experiment Name: At_Far-red-induction_P Parameter: Tissue Value: Whole Plant
  misc_feature: MA Experiment ID: 20001555 Result: Down-regulated in Transcription
  misc_feature: MA Experiment 20001555 PARAMETER Experiment Name: At_Drought_Soil_Dry_P Parameter: Age (day) Value: 24
  misc_feature: MA Experiment 20001555 PARAMETER Experiment Name: At_Drought_Soil_Dry_P Parameter: Organism Value: A. thaliana
  misc_feature: MA Experiment 20001555 PARAMETER Experiment Name: At_Drought_Soil_Dry_P Parameter: Plant Line Value: WS
  misc_feature: MA Experiment 20001555 PARAMETER Experiment Name: At_Drought_Soil_Dry_P Parameter: Post Timepoint (hr) Value: None
  misc_feature: MA Experiment 20001555 PARAMETER Experiment Name: At_Drought_Soil_Dry_P Parameter: Post-Treatment Value: None
  misc_feature: MA Experiment 20001555 PARAMETER Experiment Name: At_Drought_Soil_Dry_P Parameter: Timepoint (day) Value: 10
  misc_feature: MA Experiment 20001555 PARAMETER Experiment Name: At_Drought_Soil_Dry_P Parameter: Treatment Value: Drought vs. No Drought
  misc_feature: MA Experiment ID: 20001556 Result: Down-regulated in Transcription
  misc_feature: MA Experiment 20001556 PARAMETER Experiment Name: At_Drought_Soil_Dry_P Parameter: Age (day) Value: 26
  misc_feature: MA Experiment 20001556 PARAMETER Experiment Name: At_Drought_Soil_Dry_P Parameter: Organism Value: A. thaliana
  misc_feature: MA Experiment 20001556 PARAMETER Experiment Name: At_Drought_Soil_Dry_P Parameter: Plant Line Value: WS
  misc_feature: MA Experiment 20001556 PARAMETER Experiment Name: At_Drought_Soil_Dry_P Parameter: Post Timepoint (hr) Value: None
  misc_feature: MA Experiment 20001556 PARAMETER Experiment Name: At_Drought_Soil_Dry_P Parameter: Post-Treatment Value: None
  misc_feature: MA Experiment 20001556 PARAMETER Experiment Name: At_Drought_Soil_Dry_P Parameter: Timepoint (day) Value: 12
  misc_feature: MA Experiment 20001556 PARAMETER Experiment Name: At_Drought_Soil_Dry_P Parameter: Treatment Value: Drought vs. No Drought
  misc_feature: MA Experiment ID: 20001557 Result: Down-regulated in Transcription
  misc_feature: MA Experiment 20001557 PARAMETER Experiment Name: At_Drought_Soil_Dry_P Parameter: Age (day) Value: 27
  misc_feature: MA Experiment 20001557 PARAMETER Experiment Name: At_Drought_Soil_Dry_P Parameter: Organism Value: A. thaliana
  misc_feature: MA Experiment 20001557 PARAMETER Experiment Name: At_Drought_Soil_Dry_P Parameter: Plant Line Value: WS
  misc_feature: MA Experiment 20001557 PARAMETER Experiment Name: At_Drought_Soil_Dry_P Parameter: Post Timepoint (hr) Value: 3
  misc_feature: MA Experiment 20001557 PARAMETER Experiment Name: At_Drought_Soil_Dry_P Parameter: Post-Treatment Value: Re-Water vs. No Drought
  misc_feature: MA Experiment 20001557 PARAMETER Experiment Name: At_Drought_Soil_Dry_P Parameter: Timepoint (day) Value: 13
  misc_feature: MA Experiment 20001557 PARAMETER Experiment Name: At_Drought_Soil_Dry_P Parameter: Treatment Value: Drought vs. No Drought
  misc_feature: MA Experiment ID: 20001558 Result: Down-regulated in Transcription
  misc_feature: MA Experiment 20001558 PARAMETER Experiment Name: At_Drought_Soil_Dry_P Parameter: Age (day) Value: 27
  misc_feature: MA Experiment 20001558 PARAMETER Experiment Name: At_Drought_Soil_Dry_P Parameter: Organism Value: A. thaliana
  misc_feature: MA Experiment 20001558 PARAMETER Experiment Name: At_Drought_Soil_Dry_P Parameter: Plant Line Value: WS
  misc_feature: MA Experiment 20001558 PARAMETER Experiment Name: At_Drought_Soil_Dry_P Parameter: Post Timepoint (hr) Value: 6
  misc_feature: MA Experiment 20001558 PARAMETER Experiment Name: At_Drought_Soil_Dry_P Parameter: Post-Treatment Value: Re-Water vs. No Drought
  misc_feature: MA Experiment 20001558 PARAMETER Experiment Name: At_Drought_Soil_Dry_P Parameter: Timepoint (day) Value: 13
  misc_feature: MA Experiment 20001558 PARAMETER Experiment Name: At_Drought_Soil_Dry_P Parameter: Treatment Value: Drought vs. No Drought
  misc_feature: MA Experiment ID: 20001757 Result: Up-regulated in Transcription
  misc_feature: MA Experiment 20001757 PARAMETER Experiment Name: At_50mM_NH4NO3_L-to-H_P Parameter: Timepoint (hr) Value: 6
  misc_feature: MA Experiment 20001757 PARAMETER Experiment Name: At_50mM_NH4NO3_L-to-H_P Parameter: Tissue Value: Leaf
  misc_feature: MA Experiment 20001757 PARAMETER Experiment Name: At_50mM_NH4NO3_L-to-H_P Parameter: Treatment Value: 50mM NH4NO3 vs 100mM Mannitol
  misc_feature: MA Experiment ID: 20001904 Result: Down-regulated in Transcription
  misc_feature: MA Experiment 20001904 PARAMETER Experiment Name: At_Drought_Reproduction_P Parameter: Age (day) Value: 37
  misc_feature: MA Experiment 20001904 PARAMETER Experiment Name: At_Drought_Reproduction_P Parameter: Organism Value: A. thaliana
  misc_feature: MA Experiment 20001904 PARAMETER Experiment Name: At_Drought_Reproduction_P Parameter: Plant Line Value: WS
  misc_feature: MA Experiment 20001904 PARAMETER Experiment Name: At_Drought_Reproduction_P Parameter: Timepoint (day) Value: 7
  misc_feature: MA Experiment 20001904 PARAMETER Experiment Name: At_Drought_Reproduction_P Parameter: Tissue Value: Rosettes
  misc_feature: MA Experiment 20001904 PARAMETER Experiment Name: At_Drought_Reproduction_P Parameter: Treatment Value: Drought vs. No Drought
  misc_feature: MA Experiment ID: 20001905 Result: Down-regulated in Transcription
  misc_feature: MA Experiment 20001905 PARAMETER Experiment Name: At_Drought_Reproduction_P Parameter: Age (day) Value: 40
  misc_feature: MA Experiment 20001905 PARAMETER Experiment Name: At_Drought_Reproduction_P Parameter: Organism Value: A. thaliana
  misc_feature: MA Experiment 20001905 PARAMETER Experiment Name: At_Drought_Reproduction_P Parameter: Plant Line Value: WS
  misc_feature: MA Experiment 20001905 PARAMETER Experiment Name: At_Drought_Reproduction_P Parameter: Timepoint (day) Value: 10
  misc_feature: MA Experiment 20001905 PARAMETER Experiment Name: At_Drought_Reproduction_P Parameter: Tissue Value: Rosettes
  misc_feature: MA Experiment 20001905 PARAMETER Experiment Name: At_Drought_Reproduction_P Parameter: Treatment Value: Drought vs. No Drought
  misc_feature: MA Experiment ID: 20001906 Result: Down-regulated in Transcription
  misc_feature: MA Experiment 20001906 PARAMETER Experiment Name: At_Drought_Reproduction_P Parameter: Age (day) Value: 35
  misc_feature: MA Experiment 20001906 PARAMETER Experiment Name: At_Drought_Reproduction_P Parameter: Organism Value: A. thaliana
  misc_feature: MA Experiment 20001906 PARAMETER Experiment Name: At_Drought_Reproduction_P Parameter: Plant Line Value: WS
  misc_feature: MA Experiment 20001906 PARAMETER Experiment Name: At_Drought_Reproduction_P Parameter: Timepoint (day) Value: 5
  misc_feature: MA Experiment 20001906 PARAMETER Experiment Name: At_Drought_Reproduction_P Parameter: Tissue Value: Siliques
  misc_feature: MA Experiment 20001906 PARAMETER Experiment Name: At_Drought_Reproduction_P Parameter: Treatment Value: Drought vs. No Drought
  misc_feature: MA Experiment ID: 20001908 Result: Down-regulated in Transcription
  misc_feature: MA Experiment 20001908 PARAMETER Experiment Name: At_Drought_Reproduction_P Parameter: Age (day) Value: 40
  misc_feature: MA Experiment 20001908 PARAMETER Experiment Name: At_Drought_Reproduction_P Parameter: Organism Value: A. thaliana
  misc_feature: MA Experiment 20001908 PARAMETER Experiment Name: At_Drought_Reproduction_P Parameter: Plant Line Value: WS
  misc_feature: MA Experiment 20001908 PARAMETER Experiment Name: At_Drought_Reproduction_P Parameter: Timepoint (day) Value: 10
  misc_feature: MA Experiment 20001908 PARAMETER Experiment Name: At_Drought_Reproduction_P Parameter: Tissue Value: Siliques
  misc_feature: MA Experiment 20001908 PARAMETER Experiment Name: At_Drought_Reproduction_P Parameter: Treatment Value: Drought vs. No Drought

SEQ ID NO: 26436 - protein, 222 aa, Arabidopsis thaliana; identical to SEQ ID NO: 21928
  peptide (1)..(222): Ceres Seq. ID no. 12331619
  misc_feature (84)..(221): Pfam Name: PsaD Pfam Description: PsaD
  misc_feature (84)..(221): Pfam Name: PsaD Pfam Description: PsaD
  misc_feature (84)..(221): Pfam Name: PsaD Pfam Description: PsaD
  misc_feature (19)..(222): Homolog of NCBI NO: 131166 NR Description: Photosystem I reaction center subunit II,
  misc_feature (19)..(222): Homolog of NCBI NO: 131167 NR Description: Photosystem I reaction center subunit II,
  misc_feature (19)..(222): Homolog of NCBI NO: 34787117 NR Description: putative photosystem I reaction centre PSI-D
  misc_feature (19)..(222): Homolog of NCBI NO: 21293 NR Description: 20 kDa protein (AA 1-212) [Spinacia oleracea]
  misc_feature (19)..(222): Homolog of NCBI NO: 19855891 NR Description: Photosystem I reaction center subunit II,
  misc_feature (19)..(222): Homolog of NCBI NO: 131166 NR Description: Photosystem I reaction center subunit II,
  misc_feature (19)..(222): Homolog of NCBI NO: 34787117 NR Description: putative photosystem I reaction centre PSI-D
  misc_feature (19)..(222): Homolog of NCBI NO: 19855891 NR Description: Photosystem I reaction center subunit II,
  misc_feature (19)..(222): Homolog of NCBI NO: 21293 NR Description: 20 kDa protein (AA 1-212) [Spinacia oleracea]
  misc_feature (19)..(222): Homolog of NCBI NO: 34787117 NR Description: putative photosystem I reaction centre PSI-D
  misc_feature (19)..(222): Homolog of NCBI NO: 131167 NR Description: Photosystem I reaction center subunit II,
  misc_feature (19)..(222): Homolog of NCBI NO: 131166 NR Description: Photosystem I reaction center subunit II,
  misc_feature (19)..(222): Homolog of NCBI NO: 15218708 NR Description: putative photosystem I reaction center subunit II
  misc_feature (19)..(222): Homolog of NCBI NO: 5732201 NR Description: photosystem I subunit II precursor [Arabidopsis
  misc_feature (19)..(222): Homolog of NCBI NO: 15235503 NR Description: putative photosystem I reaction center subunit II
  misc_feature (19)..(222): Homolog of NCBI NO: 21595031 NR Description: putative photosystem I reaction center subunit II
  misc_feature (19)..(222): Homolog of NCBI NO: 72680 NR Description: photosystem I chain II precursor - spinach
  misc_feature (19)..(222): Homolog of NCBI NO: 15218708 NR Description: putative photosystem I reaction center subunit II
  misc_feature (19)..(222): Homolog of NCBI NO: 5732201 NR Description: photosystem I subunit II precursor [Arabidopsis
  misc_feature (19)..(222): Homolog of NCBI NO: 15235503 NR Description: putative photosystem I reaction center subunit II
  misc_feature (19)..(222): Homolog of NCBI NO: 21595031 NR Description: putative photosystem I reaction center subunit II
  misc_feature (19)..(222): Homolog of NCBI NO: 72680 NR Description: photosystem I chain II precursor - spinach
  misc_feature (19)..(222): Homolog of NCBI NO: 19855891 NR Description: Photosystem I reaction center subunit II,
  misc_feature (19)..(222): Homolog of NCBI NO: 21293 NR Description: 20 kDa protein (AA 1-212) [Spinacia oleracea]
  misc_feature (19)..(222): Homolog of NCBI NO: 131167 NR Description: Photosystem I reaction center subunit II,
  misc_feature (19)..(222): Homolog of NCBI NO: 72680 NR Description: photosystem I chain II precursor - spinach
  misc_feature (19)..(222): Homolog of NCBI NO: 21595031 NR Description: putative photosystem I reaction center subunit II
  misc_feature (19)..(222): Homolog of NCBI NO: 15235503 NR Description: putative photosystem I reaction center subunit II
  misc_feature (19)..(222): Homolog of NCBI NO: 5732201 NR Description: photosystem I subunit II precursor [Arabidopsis
  misc_feature (19)..(222): Homolog of NCBI NO: 15218708 NR Description: putative photosystem I reaction center subunit II

SEQ ID NO: 26437 - protein, 204 aa, Arabidopsis thaliana; identical to SEQ ID NO: 21929
  peptide (1)..(204): Ceres Seq. ID no. 12331620
  misc_feature (66)..(203): Pfam Name: PsaD Pfam Description: PsaD
  misc_feature (66)..(203): Pfam Name: PsaD Pfam Description: PsaD
  misc_feature (66)..(203): Pfam Name: PsaD Pfam Description: PsaD
  misc_feature (1)..(204): Homolog of NCBI NO: 131166 NR Description: Photosystem I reaction center subunit II,
  misc_feature (1)..(204): Homolog of NCBI NO: 131167 NR Description: Photosystem I reaction center subunit II,
  misc_feature (1)..(204): Homolog of NCBI NO: 34787117 NR Description: putative photosystem I reaction centre PSI-D
  misc_feature (1)..(204): Homolog of NCBI NO: 21293 NR Description: 20 kDa protein (AA 1-212) [Spinacia oleracea]
  misc_feature (1)..(204): Homolog of NCBI NO: 19855891 NR Description: Photosystem I reaction center subunit II,
  misc_feature (1)..(204): Homolog of NCBI NO: 5732201 NR Description: photosystem I subunit II precursor [Arabidopsis
  misc_feature (1)..(204): Homolog of NCBI NO: 131167 NR Description: Photosystem I reaction center subunit II,
  misc_feature (1)..(204): Homolog of NCBI NO: 34787117 NR Description: putative photosystem I reaction centre PSI-D
  misc_feature (1)..(204): Homolog of NCBI NO: 131167 NR Description: Photosystem I reaction center subunit II,
  misc_feature (1)..(204): Homolog of NCBI NO: 131166 NR Description: Photosystem I reaction center subunit II,
  misc_feature (1)..(204): Homolog of NCBI NO: 15235503 NR Description: putative photosystem I reaction center subunit II
  misc_feature (1)..(204): Homolog of NCBI NO: 21595031 NR Description: putative photosystem I reaction center subunit II
  misc_feature (1)..(204): Homolog of NCBI NO: 72680 NR Description: photosystem I chain II precursor - spinach
  misc_feature (1)..(204): Homolog of NCBI NO: 19855891 NR Description: Photosystem I reaction center subunit II,
  misc_feature (1)..(204): Homolog of NCBI NO: 21293 NR Description: 20 kDa protein (AA 1-212) [Spinacia oleracea]
  misc_feature (1)..(204): Homolog of NCBI NO: 34787117 NR Description: putative photosystem I reaction centre PSI-D
  misc_feature (1)..(204): Homolog of NCBI NO: 15218708 NR Description: putative photosystem I reaction center subunit II
  misc_feature (1)..(204): Homolog of NCBI NO: 5732201 NR Description: photosystem I subunit II precursor [Arabidopsis
  misc_feature (1)..(204): Homolog of NCBI NO: 15235503 NR Description: putative photosystem I reaction center subunit II
  misc_feature (1)..(204): Homolog of NCBI NO: 21595031 NR Description: putative photosystem I reaction center subunit II
  misc_feature (1)..(204): Homolog of NCBI NO: 72680 NR Description: photosystem I chain II precursor - spinach
  misc_feature (1)..(204): Homolog of NCBI NO: 19855891 NR Description: Photosystem I reaction center subunit II,
  misc_feature (1)..(204): Homolog of NCBI NO: 21293 NR Description: 20 kDa protein (AA 1-212) [Spinacia oleracea]
  misc_feature (1)..(204): Homolog of NCBI NO: 131166 NR Description: Photosystem I reaction center subunit II,
  misc_feature (1)..(204): Homolog of NCBI NO: 15218708 NR Description: putative photosystem I reaction center subunit II
  misc_feature (1)..(204): Homolog of NCBI NO: 72680 NR Description: photosystem I chain II precursor - spinach
  misc_feature (1)..(204): Homolog of NCBI NO: 21595031 NR Description: putative photosystem I reaction center subunit II
  misc_feature (1)..(204): Homolog of NCBI NO: 15235503 NR Description: putative photosystem I reaction center subunit II
  misc_feature (1)..(204): Homolog of NCBI NO: 5732201 NR Description: photosystem I subunit II precursor [Arabidopsis
  misc_feature (1)..(204): Homolog of NCBI NO: 15218708 NR Description: putative photosystem I reaction center subunit II

SEQ ID NO: 26438 - DNA, 794 bp, Arabidopsis thaliana
  misc_feature (1)..(794): Ceres Seq. ID no. 12333407
  misc_feature: MA Experiment ID: 108488 Result: Down-regulated in Transcription
  misc_feature: MA Experiment ID: 20000184 Result: Down-regulated in Transcription
  misc_feature: MA Experiment 20000184 PARAMETER Experiment Name: At_Shoots__P Parameter: Age (day) Value: 7
  misc_feature: MA Experiment 20000184 PARAMETER Experiment Name: At_Shoots__P Parameter: Tissue Value: Shoots vs. Whole Plant
  misc_feature: MA Experiment ID: 20000495 Result: Up-regulated in Transcription
  misc_feature: MA Experiment 20000495 PARAMETER Experiment Name: At_Guard_Cells_P Parameter: Harvest Date Value: 8/2/2002
  misc_feature: MA Experiment 20000495 PARAMETER Experiment Name: At_Guard_Cells_P Parameter: Organism Value: A. thaliana
  misc_feature: MA Experiment 20000495 PARAMETER Experiment Name: At_Guard_Cells_P Parameter: Tissue Value: Guard Cells vs. Leaves
  misc_feature: MA Experiment ID: 20000496 Result: Up-regulated in Transcription
  misc_feature: MA Experiment 20000496 PARAMETER Experiment Name: At_Guard_Cells_P Parameter: Harvest Date Value: 7/19/2002
  misc_feature: MA Experiment 20000496 PARAMETER Experiment Name: At_Guard_Cells_P Parameter: Organism Value: Canola
  misc_feature: MA Experiment 20000496 PARAMETER Experiment Name: At_Guard_Cells_P Parameter: Tissue Value: Guard Cells vs. Leaves
  misc_feature: MA Experiment ID: 20000794 Result: Up-regulated in Transcription
  misc_feature: MA Experiment 20000794 PARAMETER Experiment Name: At_Petals_P Parameter: Age (day) Value: 23-25 days
  misc_feature: MA Experiment 20000794 PARAMETER Experiment Name: At_Petals_P Parameter: Plant Line Value: WS
  misc_feature: MA Experiment 20000794 PARAMETER Experiment Name: At_Petals_P Parameter: Tissue Value: Petals vs. Whole plant
  misc_feature: MA Experiment ID: 20001451 Result: Up-regulated in Transcription
  misc_feature: MA Experiment 20001451 PARAMETER Experiment Name: At_Far-red-induction_P Parameter: Age (day) Value: 7
  misc_feature: MA Experiment 20001451 PARAMETER Experiment Name: At_Far-red-induction_P Parameter: Light Value: Far-red vs. White
  misc_feature: MA Experiment 20001451 PARAMETER Experiment Name: At_Far-red-induction_P Parameter: Organism Value: A. thaliana
  misc_feature: MA Experiment 20001451 PARAMETER Experiment Name: At_Far-red-induction_P Parameter: Plant Line Value: Columbia
  misc_feature: MA Experiment 20001451 PARAMETER Experiment Name: At_Far-red-induction_P Parameter: Timepoint (hr) Value: 24
  misc_feature: MA Experiment 20001451 PARAMETER Experiment Name: At_Far-red-induction_P Parameter: Tissue Value: Whole Plant
aaaaggatcaaaggggcacgaaactagagacgacgaagcgtactcgattattatcagcctttggtagcttcgttctctctcaaaaaccctaacttctctgtgacgatcgaatccgatagcgtgcgataatggccaatagtaatcttccccgacgaatcatcaaggaaactcaacgtctgcttagtgaacctgctcctgggataagtgcgtctccatcagaggaaaatatgagatatttcaatgttatgattcttggtcctactcaatctccttatgaaggaggagttttcaagttggagctctttttgcctgaagaatatcctatggcagctcccaaggttaggtttctcaccaagatttaccatcctaacatcgacaagcttggaagaatctgccttgacatactgaaagacaagtggagtcctgcactacaaatacgaactgtgctcttgagtatccaagctcttttaagtgcaccaaacccagatgatcctctgtctgagaacatagctaagcattggaagagcaatgaggcagaagctgtggaaacagctaaggaatggactcgtctttacgcaagtggtgcttaaagaagactgcaaatggagaaagatcattgtcatttaaataacattatatatggtgaaactctatctcaaggttttatctgaatcctttttctgaaaacagaggaaaaagatttgtactctctgaatttgtataactagggggatctaagactcgtttacccatatctggaatctaactttcttcaattgtgcttgcttttgatc

SEQ ID NO: 26439 - protein, 153 aa, Arabidopsis thaliana
  peptide (1)..(153): Ceres Seq. ID no. 12333408
  misc_feature (4)..(150): Homolog of NCBI NO: 27882519 NR Description: Similar to ubiquitin-conjugating enzyme E2N
  misc_feature (4)..(150): Homolog of NCBI NO: 30583959 NR Description: Homo sapiens ubiquitin-conjugating enzyme E2N
  misc_feature (4)..(150): Homolog of NCBI NO: 28174992 NR Description: similar to ubiquitin-conjugating enzyme E2N [Mus
  misc_feature (4)..(150): Homolog of NCBI NO: 4507793 NR Description: ubiquitin-conjugating enzyme E2N (UBC13 homolog,
  misc_feature (4)..(150): Homolog of NCBI NO: 16758810 NR Description: ubiquitin-conjugating enzyme E2N (homologous to
  misc_feature (1)..(141): Homolog of NCBI NO: 25293666 NR Description: hypothetical protein F9K20.8 [imported] -
  misc_feature (1)..(153): Homolog of NCBI NO: 5381319 NR Description: ubiquitin-conjugating enzyme E2 [Catharanthus
  misc_feature (1)..(153): Homolog of NCBI NO: 34911052 NR Description: ubiquitin-conjugating enzyme E2
  misc_feature (1)..(153): Homolog of NCBI NO: 18412149 NR Description: E2, ubiquitin-conjugating enzyme, putative
  misc_feature (1)..(153): Homolog of NCBI NO: 18394416 NR Description: E2, ubiquitin-conjugating enzyme, putative
MANSNLPRRIIKETQRLLSEPAPGISASPSEENMRYFNVMILGPTQSPYEGGVFKLELFLPEEYPMAAPKVRFLTKIYHPNIDKLGRICLDILKDKWSPALQIRTVLLSIQALLSAPNPDDPLSENIAKHWKSNEAEAVETAKEWTRLYASGA

SEQ ID NO: 26440 - protein, 120 aa, Arabidopsis thaliana
  peptide (1)..(120): Ceres Seq. ID no. 12333409
  misc_feature (1)..(117): Homolog of NCBI NO: 27882519 NR Description: Similar to ubiquitin-conjugating enzyme E2N
  misc_feature (1)..(117): Homolog of NCBI NO: 30583959 NR Description: Homo sapiens ubiquitin-conjugating enzyme E2N
  misc_feature (1)..(117): Homolog of NCBI NO: 28174992 NR Description: similar to ubiquitin-conjugating enzyme E2N [Mus
  misc_feature (1)..(117): Homolog of NCBI NO: 4507793 NR Description: ubiquitin-conjugating enzyme E2N (UBC13 homolog,
  misc_feature (1)..(117): Homolog of NCBI NO: 16758810 NR Description: ubiquitin-conjugating enzyme E2N (homologous to
  misc_feature (1)..(108): Homolog of NCBI NO: 25293666 NR Description: hypothetical protein F9K20.8 [imported] -
  misc_feature (1)..(120): Homolog of NCBI NO: 5381319 NR Description: ubiquitin-conjugating enzyme E2 [Catharanthus
  misc_feature (1)..(120): Homolog of NCBI NO: 34911052 NR Description: ubiquitin-conjugating enzyme E2
  misc_feature (1)..(120): Homolog of NCBI NO: 18412149 NR Description: E2, ubiquitin-conjugating enzyme, putative
  misc_feature (1)..(120): Homolog of NCBI NO: 18394416 NR Description: E2, ubiquitin-conjugating enzyme, putative
MRYFNVMILGPTQSPYEGGVFKLELFLPEEYPMAAPKVRFLTKIYHPNIDKLGRICLDILKDKWSPALQIRTVLLSIQALLSAPNPDDPLSENIAKHWKSNEAEAVETAKEWTRLYASGA

SEQ ID NO: 26441 - protein, 114 aa, Arabidopsis thaliana
  peptide (1)..(114): Ceres Seq. ID no. 12333410
  misc_feature (1)..(111): Homolog of NCBI NO: 27882519 NR Description: Similar to ubiquitin-conjugating enzyme E2N
  misc_feature (1)..(111): Homolog of NCBI NO: 30583959 NR Description: Homo sapiens ubiquitin-conjugating enzyme E2N
  misc_feature (1)..(111): Homolog of NCBI NO: 28174992 NR Description: similar to ubiquitin-conjugating enzyme E2N [Mus
  misc_feature (1)..(111): Homolog of NCBI NO: 4507793 NR Description: ubiquitin-conjugating enzyme E2N (UBC13 homolog,
  misc_feature (1)..(111): Homolog of NCBI NO: 16758810 NR Description: ubiquitin-conjugating enzyme E2N (homologous to
  misc_feature (1)..(102): Homolog of NCBI NO: 25293666 NR Description: hypothetical protein F9K20.8 [imported] -
  misc_feature (1)..(114): Homolog of NCBI NO: 5381319 NR Description: ubiquitin-conjugating enzyme E2 [Catharanthus
  misc_feature (1)..(114): Homolog of NCBI NO: 34911052 NR Description: ubiquitin-conjugating enzyme E2
  misc_feature (1)..(114): Homolog of NCBI NO: 18412149 NR Description: E2, ubiquitin-conjugating enzyme, putative
  misc_feature (1)..(114): Homolog of NCBI NO: 18394416 NR Description: E2, ubiquitin-conjugating enzyme, putative
MILGPTQSPYEGGVFKLELFLPEEYPMAAPKVRFLTKIYHPNIDKLGRICLDILKDKWSPALQIRTVLLSIQALLSAPNPDDPLSENIAKHWKSNEAEAVETAKEWTRLYASGA

SEQ ID NO: 26442 - DNA, 602 bp, Arabidopsis thaliana
  misc_feature (1)..(602): Ceres Seq. ID no. 12337761
  misc_feature: MA Experiment ID: 108434 Result: Down-regulated in Transcription
  misc_feature: MA Experiment 108434 PARAMETER Experiment Name: At_Root_Tips_cDNA_P Parameter: Tissue Value: Root Tips
  misc_feature: MA Experiment ID: 108573 Result: Up-regulated in Transcription
  misc_feature: MA Experiment 108573 PARAMETER Experiment Name: At_Drought_cDNA_P Parameter: Timepoint (hr) Value: 6
  misc_feature: MA Experiment 108573 PARAMETER Experiment Name: At_Drought_cDNA_P Parameter: Tissue Value: Aerial
  misc_feature: MA Experiment 108573 PARAMETER Experiment Name: At_Drought_cDNA_P Parameter: Treatment Value: Drought vs. No Drought
  misc_feature: MA Experiment ID: 108579 Result: Down-regulated in Transcription
  misc_feature: MA Experiment 108579 PARAMETER Experiment Name: At_4deg_Cold_cDNA_P Parameter: Temperature (deg C) Value: 4 vs. 22
  misc_feature: MA Experiment 108579 PARAMETER Experiment Name: At_4deg_Cold_cDNA_P Parameter: Timepoint (hr) Value: 6
  misc_feature: MA Experiment 108579 PARAMETER Experiment Name: At_4deg_Cold_cDNA_P Parameter: Tissue Value: Aerial
  misc_feature: MA Experiment ID: 20000111 Result: Up-regulated in Transcription
  misc_feature: MA Experiment 20000111 PARAMETER Experiment Name: At_42deg_Heat_cDNA_P Parameter: Temperature (deg C) Value: 42 vs. 22
  misc_feature: MA Experiment 20000111 PARAMETER Experiment Name: At_42deg_Heat_cDNA_P Parameter: Timepoint (hr) Value: 6
  misc_feature: MA Experiment 20000111 PARAMETER Experiment Name: At_42deg_Heat_cDNA_P Parameter: Tissue Value: Aerial
  misc_feature: MA Experiment ID: 20000113 Result: Up-regulated in Transcription
  misc_feature: MA Experiment 20000113 PARAMETER Experiment Name: At_42deg_Heat_cDNA_P Parameter: Temperature (deg C) Value: 42 vs. 22
  misc_feature: MA Experiment 20000113 PARAMETER Experiment Name: At_42deg_Heat_cDNA_P Parameter: Timepoint (hr) Value: 8
  misc_feature: MA Experiment 20000113 PARAMETER Experiment Name: At_42deg_Heat_cDNA_P Parameter: Tissue Value: Aerial
  misc_feature: MA Experiment ID: 20000173 Result: Up-regulated in Transcription
  misc_feature: MA Experiment 20000173 PARAMETER Experiment Name: At_42deg_Heat_P Parameter: Age (day) Value: 14
  misc_feature: MA Experiment 20000173 PARAMETER Experiment Name: At_42deg_Heat_P Parameter: Organism Value: A. thaliana
  misc_feature: MA Experiment 20000173 PARAMETER Experiment Name: At_42deg_Heat_P Parameter: Plant Line Value: WS
  misc_feature: MA Experiment 20000173 PARAMETER Experiment Name: At_42deg_Heat_P Parameter: Temperature (deg C) Value: 42 vs. 22
  misc_feature: MA Experiment 20000173 PARAMETER Experiment Name: At_42deg_Heat_P Parameter: Timepoint (hr) Value: 6
  misc_feature: MA Experiment 20000173 PARAMETER Experiment Name: At_42deg_Heat_P Parameter: Tissue Value: Aerial
  misc_feature: MA Experiment ID: 20000227 Result: Down-regulated in Transcription
  misc_feature: MA Experiment 20000227 PARAMETER Experiment Name: At_Root-Tips-vs-Tops_P Parameter: Tissue Value: Root Tips vs. Root Tops
  misc_feature: MA Experiment ID: 20000234 Result: Down-regulated in Transcription
  misc_feature: MA Experiment 20000234 PARAMETER Experiment Name: At_Siliques_P Parameter: Age (day) Value: 21
  misc_feature: MA Experiment 20000234 PARAMETER Experiment Name: At_Siliques_P Parameter: Organism Value: A. thaliana
  misc_feature: MA Experiment 20000234 PARAMETER Experiment Name: At_Siliques_P Parameter: Plant Line Value: WS
  misc_feature: MA Experiment 20000234 PARAMETER Experiment Name: At_Siliques_P Parameter: Tissue Value: Less Than 5mm Siliques vs. Whole Plant
  misc_feature: MA Experiment ID: 20000265 Result: Down-regulated in Transcription
  misc_feature: MA Experiment 20000265 PARAMETER Experiment Name: At_Open_Flower_P Parameter: Age (day) Value: 21
  misc_feature: MA Experiment 20000265 PARAMETER Experiment Name: At_Open_Flower_P Parameter: Plant Line Value: WS
  misc_feature: MA Experiment 20000265 PARAMETER Experiment Name: At_Open_Flower_P Parameter: Tissue Value: Closed Flower vs. Whole Plant
  misc_feature: MA Experiment ID: 20000286 Result: Down-regulated in Transcription
  misc_feature: MA Experiment 20000286 PARAMETER Experiment Name: At_Open_Flower_P Parameter: Age (day) Value: 21
  misc_feature: MA Experiment 20000286 PARAMETER Experiment Name: At_Open_Flower_P Parameter: Plant Line Value: WS
  misc_feature: MA Experiment 20000286 PARAMETER Experiment Name: At_Open_Flower_P Parameter: Tissue Value: Half Open vs. Whole Plant
atcgagcgatggatttggcagaactgtgggcgattttcggacccggattctccggcgccgttttcggaaccgggtggtggggtcgacgccgtcgtttgcagttccatccaagttcccttcgtccattaccttcccggcatattcgcttctctcggagctttgatgttcaattgcgtcagaaaagaagacattgattactctccttacgacgaaggcgagtggagattgaagctgtggcttttcatagcgtatgtcgtagcatttgtttccttagctgcttctgttggcttgctgattcaagattcggttgtgaagactgggccttcaacttggactggtgtggctggtgtctttcaatgtgtatttgtattgataagtgggctaatgtattggacatcgcactcagagtagcgcacaggcacatacttcatctccgactcagattcatactgtgacaacttacaagttcctctcgtttctctactatgtaaattcctgtgtcttgtcttgtcaccttggcattgtgtgcgagattcctctgttgcatcagtgtgtgtttctgttaaaactttgtgtgaatgttattgaaaatactccaaacc

SEQ ID NO: 26443 - protein, 136 aa, Arabidopsis thaliana
  peptide (1)..(136): Ceres Seq. ID no. 12337762
  misc_feature (28)..(135): Pfam Name: Uncharacterised protein family (UPF0220) Pfam Description: Uncharacterised protein family (UPF0220)
  misc_feature (28)..(136): Homolog of NCBI NO: 34610239 NR Description: small membrane protein 1 [Mus musculus]
  misc_feature (28)..(136): Homolog of NCBI NO: 27732805 NR Description: similar to Small membrane protein 1 [Rattus
  misc_feature (28)..(136): Homolog of NCBI NO: 7657595 NR Description: small membrane protein 1 [Homo sapiens]
  misc_feature (37)..(136): Homolog of NCBI NO: 38047947 NR Description: similar to Drosophila melanogaster CG15012
  misc_feature (28)..(136): Homolog of NCBI NO: 24657484 NR Description: CG15012-PB [Drosophila melanogaster]
  misc_feature (28)..(98): Homolog of NCBI NO: 25373092 NR Description: protein T32E20.29 [imported] - Arabidopsis
  misc_feature (28)..(136): Homolog of NCBI NO: 18400231 NR Description: expressed protein
IERWIWQNCGRFSDPDSPAPFSEPGGGVDAVVCSSIQVPFVHYLPGIFASLGALMFNCVRKEDIDYSPYDEGEWRLKLWLFIAYVVAFVSLAASVGLLIQDSVVKTGPSTWTGVAGVFQCVFVLISGLMYWTSHSE

SEQ ID NO: 26444 - protein, 82 aa, Arabidopsis thaliana
  peptide (1)..(82): Ceres Seq. ID no. 12337763
  misc_feature (1)..(81): Pfam Name: Uncharacterised protein family (UPF0220) Pfam Description: Uncharacterised protein family (UPF0220)
  misc_feature (1)..(82): Homolog of NCBI NO: 34610239 NR Description: small membrane protein 1 [Mus musculus]
  misc_feature (1)..(82): Homolog of NCBI NO: 27732805 NR Description: similar to Small membrane protein 1 [Rattus
  misc_feature (1)..(82): Homolog of NCBI NO: 7657595 NR Description: small membrane protein 1 [Homo sapiens]
  misc_feature (1)..(82): Homolog of NCBI NO: 38047947 NR Description: similar to Drosophila melanogaster CG15012
  misc_feature (1)..(82): Homolog of NCBI NO: 24657484 NR Description: CG15012-PB [Drosophila melanogaster]
  misc_feature (1)..(44): Homolog of NCBI NO: 25373092 NR Description: protein T32E20.29 [imported] - Arabidopsis
  misc_feature (1)..(82): Homolog of NCBI NO: 18400231 NR Description: expressed protein
MFNCVRKEDIDYSPYDEGEWRLKLWLFIAYVVAFVSLAASVGLLIQDSVVKTGPSTWTGVAGVFQCVFVLISGLMYWTSHSE

SEQ ID NO: 26445 - DNA, 1123 bp, Arabidopsis thaliana
  misc_feature (1)..(1123): Ceres Seq. ID no. 13489747
  misc_feature: MA Experiment ID: 108434 Result: Up-regulated in Transcription
  misc_feature: MA Experiment 108434 PARAMETER Experiment Name: At_Root_Tips_cDNA_P Parameter: Tissue Value: Root Tips
  misc_feature: MA Experiment ID: 108462 Result: Down-regulated in Transcription
  misc_feature: MA Experiment 108462 PARAMETER Experiment Name: At_Germinating_Seeds_cDNA_P Parameter: Age (day) Value: 2 vs. 0
  misc_feature: MA Experiment 108462 PARAMETER Experiment Name: At_Germinating_Seeds_cDNA_P Parameter: Tissue Value: Germinating Seeds
  misc_feature: MA Experiment ID: 108463 Result: Down-regulated in Transcription
  misc_feature: MA Experiment 108463 PARAMETER Experiment Name: At_Germinating_Seeds_cDNA_P Parameter: Age (day) Value: 3 vs. 0
  misc_feature: MA Experiment 108463 PARAMETER Experiment Name: At_Germinating_Seeds_cDNA_P Parameter: Tissue Value: Germinating Seeds
  misc_feature: MA Experiment ID: 108464 Result: Down-regulated in Transcription
  misc_feature: MA Experiment 108464 PARAMETER Experiment Name: At_Germinating_Seeds_cDNA_P Parameter: Age (day) Value: 4 vs. 0
  misc_feature: MA Experiment 108464 PARAMETER Experiment Name: At_Germinating_Seeds_cDNA_P Parameter: Tissue Value: Germinating Seeds
  misc_feature: MA Experiment ID: 108573 Result: Down-regulated in Transcription
  misc_feature: MA Experiment 108573 PARAMETER Experiment Name: At_Drought_cDNA_P Parameter: Timepoint (hr) Value: 6
  misc_feature: MA Experiment 108573 PARAMETER Experiment Name: At_Drought_cDNA_P Parameter: Tissue Value: Aerial
  misc_feature: MA Experiment 108573 PARAMETER Experiment Name: At_Drought_cDNA_P Parameter: Treatment Value: Drought vs. No Drought
  misc_feature: MA Experiment ID: 108585 Result: Down-regulated in Transcription
  misc_feature: MA Experiment 108585 PARAMETER Experiment Name: At_5mM_NaNP_cDNA_P Parameter: Timepoint (hr) Value: 6
  misc_feature: MA Experiment 108585 PARAMETER Experiment Name: At_5mM_NaNP_cDNA_P Parameter: Tissue Value: Aerial
  misc_feature: MA Experiment 108585 PARAMETER Experiment Name: At_5mM_NaNP_cDNA_P Parameter: Treatment Value: null
  misc_feature: MA Experiment ID: 108668 Result: Down-regulated in Transcription
  misc_feature: MA Experiment 108668 PARAMETER Experiment Name: At_2mM_SA_cDNA_P Parameter: Plant Line Value: WS
  misc_feature: MA Experiment 108668 PARAMETER Experiment Name: At_2mM_SA_cDNA_P Parameter: Timepoint (hr) Value: 6
  misc_feature: MA Experiment 108668 PARAMETER Experiment Name: At_2mM_SA_cDNA_P Parameter: Treatment Value: 2mM SA vs. No Treatment
  misc_feature: MA Experiment ID: 20000182 Result: Down-regulated in Transcription
  misc_feature: MA Experiment 20000182 PARAMETER Experiment Name: At_2mM_SA_P Parameter: Age (day) Value: 14
  misc_feature: MA Experiment 20000182 PARAMETER Experiment Name: At_2mM_SA_P Parameter: Organism Value: A. thaliana
  misc_feature: MA Experiment 20000182 PARAMETER Experiment Name: At_2mM_SA_P Parameter: Plant Line Value: WS
  misc_feature: MA Experiment 20000182 PARAMETER Experiment Name: At_2mM_SA_P Parameter: Timepoint (hr) Value: 6
  misc_feature: MA Experiment 20000182 PARAMETER Experiment Name: At_2mM_SA_P Parameter: Tissue Value: Aerial
  misc_feature: MA Experiment 20000182 PARAMETER Experiment Name: At_2mM_SA_P Parameter: Treatment Value: 2mM SA vs. No Treatment
  misc_feature: MA Experiment ID: 20000437 Result: Down-regulated in Transcription
  misc_feature: MA Experiment 20000437 PARAMETER Experiment Name: At_Drought_P Parameter: Age (day) Value: 8
  misc_feature: MA Experiment 20000437 PARAMETER Experiment Name: At_Drought_P Parameter: Organism Value: A. thaliana
  misc_feature: MA Experiment 20000437 PARAMETER Experiment Name: At_Drought_P Parameter: Plant Line Value: WS
  misc_feature: MA Experiment 20000437 PARAMETER Experiment Name: At_Drought_P Parameter: Timepoint (hr) Value: 24
  misc_feature: MA Experiment 20000437 PARAMETER Experiment Name: At_Drought_P Parameter: Tissue Value: Whole Plant
  misc_feature: MA Experiment 20000437 PARAMETER Experiment Name: At_Drought_P Parameter: Treatment Value: Drought vs. No Drought
  misc_feature: MA Experiment ID: 20000794 Result: Down-regulated in Transcription
  misc_feature: MA Experiment 20000794 PARAMETER Experiment Name: At_Petals_P Parameter: Age (day) Value: 23-25 days
  misc_feature: MA Experiment 20000794 PARAMETER Experiment Name: At_Petals_P Parameter: Plant Line Value: WS
  misc_feature: MA Experiment 20000794 PARAMETER Experiment Name: At_Petals_P Parameter: Tissue Value: Petals vs. Whole plant
  misc_feature: MA Experiment ID: 20001560 Result: Up-regulated in Transcription
  misc_feature: MA Experiment 20001560 PARAMETER Experiment Name: At_Drought_Soil_Dry_P Parameter: Age (day) Value: 28
  misc_feature: MA Experiment 20001560 PARAMETER Experiment Name: At_Drought_Soil_Dry_P Parameter: Organism Value: A. thaliana
  misc_feature: MA Experiment 20001560 PARAMETER Experiment Name: At_Drought_Soil_Dry_P Parameter: Plant Line Value: WS
  misc_feature: MA Experiment 20001560 PARAMETER Experiment Name: At_Drought_Soil_Dry_P Parameter: Post Timepoint (hr) Value: None
  misc_feature: MA Experiment 20001560 PARAMETER Experiment Name: At_Drought_Soil_Dry_P Parameter: Post-Treatment Value: None
  misc_feature: MA Experiment 20001560 PARAMETER Experiment Name: At_Drought_Soil_Dry_P Parameter: Timepoint (day) Value: 14
  misc_feature: MA Experiment 20001560 PARAMETER Experiment Name: At_Drought_Soil_Dry_P Parameter: Treatment Value: Drought vs. No Drought
gcttactgattacagtttcagttccaaagatgagaactttgagctcccaattatactccaatggtggtctcacttggttccagaagaagaatcagagctctctgttcatcaagcatctcagagtctctaaaccatcgagggttcagctcatatctgctgttcaattccgtccgtgcatcgatattcataagggaaaagtgaaacagatagttggatccacacttcgtgacttgaaagaggatggttcagttctcgttacgaattttgaatcggataagtctgcggaagagtatgcaaagatgtacaaagaagatgggcttacgggtggtcatgtgataatgcttggagcagaccctttaagccaagctgcagctattggagcattacatgcttatcctggcggtttgcaagttggaggtggaatcaattctgagaattgcatgagttatattgaggagggagcaagccatgtcattgtcacttcgtatgtatttaacaatggaaagattgatcttgaaagactcaaagatattgtgagcattgttgggaaacaaagactgatattggaccttagctgcagaaagaaggatggaagatacgcaattgttactgatagatggcagaagttcagcgacgtcatccttgacgagaaatcattggagtttcttggaggattttcagatgagtttctggtgcatggcgtagacgttgaaggaaagaagctagggatcgatgaagagcttgtagcattgcttggcaactactctccgattccagtaacttatgcgggaggtgtgacggtaatggatgatgtagagaggatcaaggacgcaggaaagggacgtgtagatgtaacagtgggaagtgccttagacattttcgggggaaatcttccatacaaagacgtcgtcgcttggcatcacaagcagcactcactccattgatatcgccattttcacctttgctcatcttttttatttgcattaccccaaaccttaagcttcaatatttgcaacattaatcttcagctttaaacttttgtgcttctttctaaactcttcaagaatttgtcaattttgaatattttttcgattaatcaagtttatggtttggtttgactacc

SEQ ID NO: 26446 - protein, 313 aa, Arabidopsis thaliana
  peptide (1)..(313): Ceres Seq. ID no. 13489748
  misc_feature (57)..(306): Pfam Name: Histidine biosynthesis protein Pfam Description: Histidine biosynthesis protein
  misc_feature (57)..(305): Homolog of NCBI NO: 23027167 NR Description: hypothetical protein [Microbulbifer degradans
  misc_feature (76)..(290): Homolog of NCBI NO: 15669727 NR Description: phosphoribosylformimino-5-aminoimidazole
  misc_feature (57)..(290): Homolog of NCBI NO: 20093802 NR Description: Phosphoribosylformimino-5-aminoimidazole
  misc_feature (54)..(224): Homolog of NCBI NO: 40745248 NR Description: hypothetical protein AN2293.2 [Aspergillus
  misc_feature (54)..(306): Homolog of NCBI NO: 10444341 NR Description: 5-proFAR isomerase [Candida albicans]
  misc_feature (54)..(309): Homolog of NCBI NO: 6322169 NR Description:
  misc_feature (54)..(309): Homolog of NCBI NO: 38105940 NR Description: hypothetical protein MG04998.4 [Magnaporthe
  misc_feature (54)..(309): Homolog of NCBI NO: 32403246 NR Description: hypothetical protein [Neurospora crassa]
  misc_feature (55)..(308): Homolog of NCBI NO: 19114853 NR Description: probable phosphoribosylformimino-5-aminoimidazole
  misc_feature (10)..(313): Homolog of NCBI NO: 15227607 NR Description: phosphoribosylformimino-5-aminoimidazole
LLITVSVPKMRTLSSQLYSNGGLTWFQKKNQSSLFIKHLRVSKPSRVQLISAVQFRPCIDIHKGKVKQIVGSTLRDLKEDGSVLVTNFESDKSAEEYAKMYKEDGLTGGHVIMLGADPLSQAAAIGALHAYPGGLQVGGGINSENCMSYIEEGASHVIVTSYVFNNGKIDLERLKDIVSIVGKQRLILDLSCRKKDGRYAIVTDRWQKFSDVILDEKSLEFLGGFSDEFLVHGVDVEGKKLGIDEELVALLGNYSPIPVTYAGGVTVMDDVERIKDAGKGRVDVTVGSALDIFGGNLPYKDVVAWHHKQHSLH

SEQ ID NO: 26447 - protein, 304 aa, Arabidopsis thaliana
  peptide (1)..(304): Ceres Seq. ID no. 13489749
  misc_feature (48)..(297): Pfam Name: Histidine biosynthesis protein Pfam Description: Histidine biosynthesis protein
  misc_feature (48)..(296): Homolog of NCBI NO: 23027167 NR Description: hypothetical protein [Microbulbifer degradans
  misc_feature (67)..(281): Homolog of NCBI NO: 15669727 NR Description: phosphoribosylformimino-5-aminoimidazole
  misc_feature (48)..(281): Homolog of NCBI NO: 20093802 NR Description: Phosphoribosylformimino-5-aminoimidazole
  misc_feature (45)..(215): Homolog of NCBI NO: 40745248 NR Description: hypothetical protein AN2293.2 [Aspergillus
  misc_feature (45)..(297): Homolog of NCBI NO: 10444341 NR Description: 5-proFAR isomerase [Candida albicans]
  misc_feature (45)..(300): Homolog of NCBI NO: 6322169 NR Description:
  misc_feature (45)..(300): Homolog of NCBI NO: 38105940 NR Description: hypothetical protein MG04998.4 [Magnaporthe
  misc_feature (45)..(300): Homolog of NCBI NO: 32403246 NR Description: hypothetical protein [Neurospora crassa]
  misc_feature (46)..(299): Homolog of NCBI NO: 19114853 NR Description: probable phosphoribosylformimino-5-aminoimidazole
  misc_feature (1)..(304): Homolog of NCBI NO: 15227607 NR Description: phosphoribosylformimino-5-aminoimidazole
MRTLSSQLYSNGGLTWFQKKNQSSLFIKHLRVSKPSRVQLISAVQFRPCIDIHKGKVKQIVGSTLRDLKEDGSVLVTNFESDKSAEEYAKMYKEDGLTGGHVIMLGADPLSQAAAIGALHAYPGGLQVGGGINSENCMSYIEEGASHVIVTSYVFNNGKIDLERLKDIVSIVGKQRLILDLSCRKKDGRYAIVTDRWQKFSDVILDEKSLEFLGGFSDEFLVHGVDVEGKKLGIDEELVALLGNYSPIPVTYAGGVTVMDDVERIKDAGKGRVDVTVGSALDIFGGNLPYKDVVAWHHKQHSLH

SEQ ID NO: 26448 - protein, 214 aa, Arabidopsis thaliana
  peptide (1)..(214): Ceres Seq. ID no. 13489750
  misc_feature (1)..(207): Pfam Name: Histidine biosynthesis protein Pfam Description: Histidine biosynthesis protein
  misc_feature (1)..(206): Homolog of NCBI NO: 23027167 NR Description: hypothetical protein [Microbulbifer degradans
  misc_feature (1)..(191): Homolog of NCBI NO: 15669727 NR Description: phosphoribosylformimino-5-aminoimidazole
  misc_feature (1)..(191): Homolog of NCBI NO: 20093802 NR Description: Phosphoribosylformimino-5-aminoimidazole
  misc_feature (1)..(125): Homolog of NCBI NO: 40745248 NR Description: hypothetical protein AN2293.2 [Aspergillus
  misc_feature (1)..(207): Homolog of NCBI NO: 10444341 NR Description: 5-proFAR isomerase [Candida albicans]
  misc_feature (1)..(210): Homolog of NCBI NO: 6322169 NR Description:
  misc_feature (1)..(210): Homolog of NCBI NO: 38105940 NR Description: hypothetical protein MG04998.4 [Magnaporthe
  misc_feature (1)..(210): Homolog of NCBI NO: 32403246 NR Description: hypothetical protein [Neurospora crassa]
  misc_feature (1)..(209): Homolog of NCBI NO: 19114853 NR Description: probable phosphoribosylformimino-5-aminoimidazole
  misc_feature (1)..(214): Homolog of NCBI NO: 15227607 NR Description: phosphoribosylformimino-5-aminoimidazole
MYKEDGLTGGHVIMLGADPLSQAAAIGALHAYPGGLQVGGGINSENCMSYIEEGASHVIVTSYVFNNGKIDLERLKDIVSIVGKQRLILDLSCRKKDGRYAIVTDRWQKFSDVILDEKSLEFLGGFSDEFLVHGVDVEGKKLGIDEELVALLGNYSPIPVTYAGGVTVMDDVERIKDAGKGRVDVTVGSALDIFGGNLPYKDVVAWHHKQHSLH

SEQ ID NO: 26449 - DNA, 824 bp, Arabidopsis thaliana
  misc_feature (1)..(824): Ceres Seq. ID no. 12393741
  misc_feature: MA Experiment ID: 108469 Result: Down-regulated in Transcription
  misc_feature: MA Experiment ID: 108561 Result: Down-regulated in Transcription
  misc_feature: MA Experiment 108561 PARAMETER Experiment Name: At_100uM_ABA_cDNA_P Parameter: Timepoint (hr) Value: 6
  misc_feature: MA Experiment 108561 PARAMETER Experiment Name: At_100uM_ABA_cDNA_P Parameter: Tissue Value: Aerial
  misc_feature: MA Experiment 108561 PARAMETER Experiment Name: At_100uM_ABA_cDNA_P Parameter: Treatment Value: 100uM ABA vs. No Treatment
  misc_feature: MA Experiment ID: 108572 Result: Down-regulated in Transcription
  misc_feature: MA Experiment 108572 PARAMETER Experiment Name: At_Drought_cDNA_P Parameter: Timepoint (hr) Value: 1
  misc_feature: MA Experiment 108572 PARAMETER Experiment Name: At_Drought_cDNA_P Parameter: Tissue Value: Aerial
  misc_feature: MA Experiment 108572 PARAMETER Experiment Name: At_Drought_cDNA_P Parameter: Treatment Value: Drought vs. No Drought
  misc_feature: MA Experiment ID: 108573 Result: Down-regulated in Transcription
  misc_feature: MA Experiment 108573 PARAMETER Experiment Name: At_Drought_cDNA_P Parameter: Timepoint (hr) Value: 6
  misc_feature: MA Experiment 108573 PARAMETER Experiment Name: At_Drought_cDNA_P Parameter: Tissue Value: Aerial
  misc_feature: MA Experiment 108573 PARAMETER Experiment Name: At_Drought_cDNA_P Parameter: Treatment Value: Drought vs. No Drought
  misc_feature: MA Experiment ID: 108574 Result: Up-regulated in Transcription
  misc_feature: MA Experiment 108574 PARAMETER Experiment Name: At_Wounding__cDNA_P Parameter: Timepoint (hr) Value: 1
  misc_feature: MA Experiment 108574 PARAMETER Experiment Name: At_Wounding__cDNA_P Parameter: Tissue Value: Aerial
  misc_feature: MA Experiment 108574 PARAMETER Experiment Name: At_Wounding__cDNA_P Parameter: Treatment Value: Wounding vs. No Wounding
  misc_feature: MA Experiment ID: 108577 Result: Down-regulated in Transcription
  misc_feature: MA Experiment 108577 PARAMETER Experiment Name: At_42deg_Heat_cDNA_P Parameter: Temperature (deg C) Value: 42 vs. 22
  misc_feature: MA Experiment 108577 PARAMETER Experiment Name: At_42deg_Heat_cDNA_P Parameter: Timepoint (hr) Value: 6
  misc_feature: MA Experiment 108577 PARAMETER Experiment Name: At_42deg_Heat_cDNA_P Parameter: Tissue Value: Aerial
  misc_feature: MA Experiment ID: 108579 Result: Up-regulated in Transcription
  misc_feature: MA Experiment 108579 PARAMETER Experiment Name: At_4deg_Cold_cDNA_P Parameter: Temperature (deg C) Value: 4 vs. 22
  misc_feature: MA Experiment 108579 PARAMETER Experiment Name: At_4deg_Cold_cDNA_P Parameter: Timepoint (hr) Value: 6
  misc_feature: MA Experiment 108579 PARAMETER Experiment Name: At_4deg_Cold_cDNA_P Parameter: Tissue Value: Aerial
  misc_feature: MA Experiment ID: 108585 Result: Down-regulated in Transcription
  misc_feature: MA Experiment 108585 PARAMETER Experiment Name: At_5mM_NaNP_cDNA_P Parameter: Timepoint (hr) Value: 6
  misc_feature: MA Experiment 108585 PARAMETER Experiment Name: At_5mM_NaNP_cDNA_P Parameter: Tissue Value: Aerial
  misc_feature: MA Experiment 108585 PARAMETER Experiment Name: At_5mM_NaNP_cDNA_P Parameter: Treatment Value: null
  misc_feature: MA Experiment ID: 108594 Result: Up-regulated in Transcription
  misc_feature: MA Experiment 108594 PARAMETER Experiment Name: At_Ler-rhl_Root_cDNA_P Parameter: Plant Line Value: null
  misc_feature: MA Experiment ID: 108607 Result: Down-regulated in Transcription
  misc_feature: MA Experiment 108607 PARAMETER Experiment Name: At_100uM_ABA_cDNA_P Parameter: Timepoint (hr) Value: 4
  misc_feature: MA Experiment 108607 PARAMETER Experiment Name: At_100uM_ABA_cDNA_P Parameter: Tissue Value: Aerial
  misc_feature: MA Experiment 108607 PARAMETER Experiment Name: At_100uM_ABA_cDNA_P Parameter: Treatment Value: 100uM ABA vs. No Treatment
  misc_feature: MA Experiment ID: 108668 Result: Down-regulated in Transcription
  misc_feature: MA Experiment 108668 PARAMETER Experiment Name: At_2mM_SA_cDNA_P Parameter: Plant Line Value: WS
  misc_feature: MA Experiment 108668 PARAMETER Experiment Name: At_2mM_SA_cDNA_P Parameter: Timepoint (hr) Value: 6
  misc_feature: MA Experiment 108668 PARAMETER Experiment Name: At_2mM_SA_cDNA_P Parameter: Treatment Value: 2mM SA vs. No Treatment
  misc_feature: MA Experiment ID: 20000069 Result: Up-regulated in Transcription
  misc_feature: MA Experiment 20000069 PARAMETER Experiment Name: At_100uM_ABA_Mutants_cDNA_P Parameter: Plant Line Value: CS23
  misc_feature: MA Experiment 20000069 PARAMETER Experiment Name: At_100uM_ABA_Mutants_cDNA_P Parameter: Timepoint (hr) Value: 6
  misc_feature: MA Experiment 20000069 PARAMETER Experiment Name: At_100uM_ABA_Mutants_cDNA_P Parameter: Tissue Value: Aerial
  misc_feature: MA Experiment 20000069 PARAMETER Experiment Name: At_100uM_ABA_Mutants_cDNA_P Parameter: Treatment Value: 100uM ABA vs. No Treatment
  misc_feature: MA Experiment ID: 20000070 Result: Up-regulated in Transcription
  misc_feature: MA Experiment 20000070 PARAMETER Experiment Name: At_100uM_ABA_Mutants_cDNA_P Parameter: Plant Line Value: CS24
  misc_feature: MA Experiment 20000070 PARAMETER Experiment Name: At_100uM_ABA_Mutants_cDNA_P Parameter: Timepoint (hr) Value: 6
  misc_feature: MA Experiment 20000070 PARAMETER Experiment Name: At_100uM_ABA_Mutants_cDNA_P Parameter: Tissue Value: Aerial
  misc_feature: MA Experiment 20000070 PARAMETER Experiment Name: At_100uM_ABA_Mutants_cDNA_P Parameter: Treatment Value: 100uM ABA vs. No Treatment
  misc_feature: MA Experiment ID: 20000071 Result: Up-regulated in Transcription
  misc_feature: MA Experiment 20000071 PARAMETER Experiment Name: At_100uM_ABA_Mutants_cDNA_P Parameter: Plant Line Value: CS8104
  misc_feature: MA Experiment 20000071 PARAMETER Experiment Name: At_100uM_ABA_Mutants_cDNA_P Parameter: Timepoint (hr) Value: 6
  misc_feature: MA Experiment 20000071 PARAMETER Experiment Name: At_100uM_ABA_Mutants_cDNA_P Parameter: Tissue Value: Aerial
  misc_feature: MA Experiment 20000071 PARAMETER Experiment Name: At_100uM_ABA_Mutants_cDNA_P Parameter: Treatment Value: 100uM ABA vs. No Treatment
  misc_feature: MA Experiment ID: 20000072 Result: Up-regulated in Transcription
  misc_feature: MA Experiment 20000072 PARAMETER Experiment Name: At_100uM_ABA_Mutants_cDNA_P Parameter: Plant Line Value: CS8105
  misc_feature: MA Experiment 20000072 PARAMETER Experiment Name: At_100uM_ABA_Mutants_cDNA_P Parameter: Timepoint (hr) Value: 6
  misc_feature: MA Experiment 20000072 PARAMETER Experiment Name: At_100uM_ABA_Mutants_cDNA_P Parameter: Tissue Value: Aerial
  misc_feature: MA Experiment 20000072 PARAMETER Experiment Name: At_100uM_ABA_Mutants_cDNA_P Parameter: Treatment Value: 100uM ABA vs. No Treatment
  misc_feature: MA Experiment ID: 20000086 Result: Up-regulated in Transcription
  misc_feature: MA Experiment 20000086 PARAMETER Experiment Name: At_100uM_ABA_Mutants_cDNA_P Parameter: Plant Line Value: CS22
  misc_feature: MA Experiment 20000086 PARAMETER Experiment Name: At_100uM_ABA_Mutants_cDNA_P Parameter: Timepoint (hr) Value: 6
  misc_feature: MA Experiment 20000086 PARAMETER Experiment Name: At_100uM_ABA_Mutants_cDNA_P Parameter: Tissue Value: Aerial
  misc_feature: MA Experiment 20000086 PARAMETER Experiment Name: At_100uM_ABA_Mutants_cDNA_P Parameter: Treatment Value: 100uM ABA vs. No Treatment
  misc_feature: MA Experiment ID: 20000088 Result: Up-regulated in Transcription
  misc_feature: MA Experiment 20000088 PARAMETER Experiment Name: At_100uM_ABA_Mutants_cDNA_P Parameter: Plant Line Value: Landsberg
  misc_feature: MA Experiment 20000088 PARAMETER Experiment Name: At_100uM_ABA_Mutants_cDNA_P Parameter: Timepoint (hr) Value: 6
  misc_feature: MA Experiment 20000088 PARAMETER Experiment Name: At_100uM_ABA_Mutants_cDNA_P Parameter: Tissue Value: Aerial
  misc_feature: MA Experiment 20000088 PARAMETER Experiment Name: At_100uM_ABA_Mutants_cDNA_P Parameter: Treatment Value: 100uM ABA vs. No Treatment
  misc_feature: MA Experiment ID: 20000089 Result: Up-regulated in Transcription
  misc_feature: MA Experiment ID: 20000090 Result: Up-regulated in Transcription
  misc_feature: MA Experiment ID: 20000111 Result: Down-regulated in Transcription
  misc_feature: MA Experiment 20000111 PARAMETER Experiment Name: At_42deg_Heat_cDNA_P Parameter: Temperature (deg C) Value: 42 vs. 22
  misc_feature: MA Experiment 20000111 PARAMETER Experiment Name: At_42deg_Heat_cDNA_P Parameter: Timepoint (hr) Value: 6
  misc_feature: MA Experiment 20000111 PARAMETER Experiment Name: At_42deg_Heat_cDNA_P Parameter: Tissue Value: Aerial
  misc_feature: MA Experiment ID: 20000169 Result: Down-regulated in Transcription
  misc_feature: MA Experiment 20000169 PARAMETER Experiment Name: At_100uM_ABA_P Parameter: Age (day) Value: 14
  misc_feature: MA Experiment 20000169 PARAMETER Experiment Name: At_100uM_ABA_P Parameter: Organism Value: A. thaliana
  misc_feature: MA Experiment 20000169 PARAMETER Experiment Name: At_100uM_ABA_P Parameter: Plant Line Value: WS
  misc_feature: MA Experiment 20000169 PARAMETER Experiment Name: At_100uM_ABA_P Parameter: Timepoint (hr) Value: 6
  misc_feature: MA Experiment 20000169 PARAMETER Experiment Name: At_100uM_ABA_P Parameter: Tissue Value: Aerial
  misc_feature: MA Experiment 20000169 PARAMETER Experiment Name: At_100uM_ABA_P Parameter: Treatment Value: 100uM ABA vs. No Treatment
  misc_feature: MA Experiment ID: 20000173 Result: Down-regulated in Transcription
  misc_feature: MA Experiment 20000173 PARAMETER Experiment Name: At_42deg_Heat_P Parameter: Age (day) Value: 14
  misc_feature: MA Experiment 20000173 PARAMETER Experiment Name: At_42deg_Heat_P Parameter: Organism Value: A. thaliana
  misc_feature: MA Experiment 20000173 PARAMETER Experiment Name: At_42deg_Heat_P Parameter: Plant Line Value: WS
  misc_feature: MA Experiment 20000173 PARAMETER Experiment Name: At_42deg_Heat_P Parameter: Temperature (deg C) Value: 42 vs. 22
  misc_feature: MA Experiment 20000173 PARAMETER Experiment Name: At_42deg_Heat_P Parameter: Timepoint (hr) Value: 6
  misc_feature: MA Experiment 20000173 PARAMETER Experiment Name: At_42deg_Heat_P Parameter: Tissue Value: Aerial
  misc_feature: MA Experiment ID: 20000182 Result: Down-regulated in Transcription
  misc_feature: MA Experiment 20000182 PARAMETER Experiment Name: At_2mM_SA_P Parameter: Age (day) Value: 14
  misc_feature: MA Experiment 20000182 PARAMETER Experiment Name: At_2mM_SA_P Parameter: Organism Value: A. thaliana
  misc_feature: MA Experiment 20000182 PARAMETER Experiment Name: At_2mM_SA_P Parameter: Plant Line Value: WS
  misc_feature: MA Experiment 20000182 PARAMETER Experiment Name: At_2mM_SA_P Parameter: Timepoint (hr) Value: 6
  misc_feature: MA Experiment 20000182 PARAMETER Experiment Name: At_2mM_SA_P Parameter: Tissue Value: Aerial
  misc_feature: MA Experiment 20000182 PARAMETER Experiment Name: At_2mM_SA_P Parameter: Treatment Value: 2mM SA vs. No Treatment
  misc_feature: MA Experiment ID: 20000184 Result: Down-regulated in Transcription
  misc_feature: MA Experiment 20000184 PARAMETER Experiment Name: At_Shoots__P Parameter: Age (day) Value: 7
  misc_feature: MA Experiment 20000184 PARAMETER Experiment Name: At_Shoots__P Parameter: Tissue Value: Shoots vs. Whole Plant
  misc_feature: MA Experiment ID: 20000185 Result: Down-regulated in Transcription
  misc_feature: MA Experiment 20000185 PARAMETER Experiment Name: At_Roots__P Parameter: Age (day) Value: 7 vs. 21
  misc_feature: MA Experiment 20000185 PARAMETER Experiment Name: At_Roots__P Parameter: Organism Value: A. thaliana
  misc_feature: MA Experiment 20000185 PARAMETER Experiment Name: At_Roots__P Parameter: Tissue Value: Roots vs. Whole Plant
  misc_feature: MA Experiment ID: 20000211 Result: Up-regulated in Transcription
  misc_feature: MA Experiment 20000211 PARAMETER Experiment Name: At_0.001percent_MeJA__P Parameter: Age (day) Value: 14
  misc_feature: MA Experiment 20000211 PARAMETER Experiment Name: At_0.001percent_MeJA__P Parameter: Organism Value: A. thaliana
  misc_feature: MA Experiment 20000211 PARAMETER Experiment Name: At_0.001percent_MeJA__P Parameter: Plant Line Value: WS
  misc_feature: MA Experiment 20000211 PARAMETER Experiment Name: At_0.001percent_MeJA__P Parameter: Timepoint (hr) Value: 1
  misc_feature: MA Experiment 20000211 PARAMETER Experiment Name: At_0.001percent_MeJA__P Parameter: Tissue Value: Aerial
  misc_feature: MA Experiment 20000211 PARAMETER Experiment Name: At_0.001percent_MeJA__P Parameter: Treatment Value: 0.001percent MeJA vs. No Treatment
  misc_feature: MA Experiment ID: 20000213 Result: Up-regulated in Transcription
  misc_feature: MA Experiment 20000213 PARAMETER Experiment Name: At_4deg_Cold_P Parameter: Timepoint (hr) Value: 2
  misc_feature: MA Experiment ID: 20000214 Result: Up-regulated in Transcription
  misc_feature: MA Experiment 20000214 PARAMETER Experiment Name: At_4deg_Cold_P Parameter: Timepoint (hr) Value: 6
  misc_feature: MA Experiment ID: 20000234 Result: Up-regulated in Transcription
  misc_feature: MA Experiment 20000234 PARAMETER Experiment Name: At_Siliques_P Parameter: Age (day) Value: 21
  misc_feature: MA Experiment 20000234 PARAMETER Experiment Name: At_Siliques_P Parameter: Organism Value: A. thaliana
  misc_feature: MA Experiment 20000234 PARAMETER Experiment Name: At_Siliques_P Parameter: Plant Line Value: WS
  misc_feature: MA Experiment 20000234 PARAMETER Experiment Name: At_Siliques_P Parameter: Tissue Value: Less Than 5mm Siliques vs. Whole Plant
  misc_feature: MA Experiment ID: 20000264 Result: Up-regulated in Transcription
  misc_feature: MA Experiment 20000264 PARAMETER Experiment Name: At_Open_Flower_P Parameter: Age (day) Value: 21
  misc_feature: MA Experiment 20000264 PARAMETER Experiment Name: At_Open_Flower_P Parameter: Plant Line Value: WS
  misc_feature: MA Experiment 20000264 PARAMETER Experiment Name: At_Open_Flower_P Parameter: Tissue Value: Open Flower vs. Whole Plant
  misc_feature: MA Experiment ID: 20000268 Result: Down-regulated in Transcription
  misc_feature: MA Experiment 20000268 PARAMETER Experiment Name: At_100mM_NaCl__P Parameter: Age (day) Value: 14
  misc_feature: MA Experiment 20000268 PARAMETER Experiment Name: At_100mM_NaCl__P Parameter: Organism Value: A. thaliana
  misc_feature: MA Experiment 20000268 PARAMETER Experiment Name: At_100mM_NaCl__P Parameter: Plant Line Value: WS
  misc_feature: MA Experiment 20000268 PARAMETER Experiment Name: At_100mM_NaCl__P Parameter: Timepoint (hr) Value: 6
  misc_feature: MA Experiment 20000268 PARAMETER Experiment Name: At_100mM_NaCl__P Parameter: Tissue Value: Whole Plant
  misc_feature: MA Experiment 20000268 PARAMETER Experiment Name: At_100mM_NaCl__P Parameter: Treatment Value: 100mM NaCl vs. No Treatment
  misc_feature: MA Experiment ID: 20000286 Result: Up-regulated in Transcription
  misc_feature: MA Experiment 20000286 PARAMETER Experiment Name: At_Open_Flower_P Parameter: Age (day) Value: 21
  misc_feature: MA Experiment 20000286 PARAMETER Experiment Name: At_Open_Flower_P Parameter: Plant Line Value: WS
  misc_feature: MA Experiment 20000286 PARAMETER Experiment Name: At_Open_Flower_P Parameter: Tissue Value: Half Open vs. Whole Plant
  misc_feature: MA Experiment ID: 20000436 Result: Down-regulated in Transcription
  misc_feature: MA Experiment 20000436 PARAMETER Experiment Name: At_Drought_P Parameter: Age (day) Value: 7
  misc_feature: MA Experiment 20000436 PARAMETER Experiment Name: At_Drought_P Parameter: Organism Value: A. thaliana
  misc_feature: MA Experiment 20000436 PARAMETER Experiment Name: At_Drought_P Parameter: Plant Line Value: WS
  misc_feature: MA Experiment 20000436 PARAMETER Experiment Name: At_Drought_P Parameter: Timepoint (hr) Value: 12
  misc_feature: MA Experiment 20000436 PARAMETER Experiment Name: At_Drought_P Parameter: Tissue Value: Whole Plant
  misc_feature: MA Experiment 20000436 PARAMETER Experiment Name: At_Drought_P Parameter: Treatment Value: Drought vs. No Drought
  misc_feature: MA Experiment ID: 20000438 Result: Down-regulated in Transcription
  misc_feature: MA Experiment 20000438 PARAMETER Experiment Name: At_Shoots__P Parameter: Age (day) Value: 14
  misc_feature: MA Experiment 20000438 PARAMETER Experiment Name: At_Shoots__P Parameter: Tissue Value: Shoots vs. Whole Plant
  misc_feature: MA Experiment ID: 20000439 Result: Down-regulated in Transcription
  misc_feature: MA Experiment 20000439 PARAMETER Experiment Name: At_Roots__P Parameter: Age (day) Value: 14 vs. 21
  misc_feature: MA Experiment 20000439 PARAMETER Experiment Name: At_Roots__P Parameter: Organism Value: A. thaliana
  misc_feature: MA Experiment 20000439 PARAMETER Experiment Name: At_Roots__P Parameter: Tissue Value: Roots vs. Whole Plant
  misc_feature: MA Experiment ID: 20000445 Result: Down-regulated in Transcription
  misc_feature: MA Experiment 20000445 PARAMETER Experiment Name: At_100uM_NAA__P Parameter: Age (day) Value: 14
  misc_feature: MA Experiment 20000445 PARAMETER Experiment Name: At_100uM_NAA__P Parameter: Organism Value: A. thaliana
  misc_feature: MA Experiment 20000445 PARAMETER Experiment Name: At_100uM_NAA__P Parameter: Plant Line Value: WS
  misc_feature: MA Experiment 20000445 PARAMETER Experiment Name: At_100uM_NAA__P Parameter: Timepoint (hr) Value: 6
  misc_feature: MA Experiment 20000445 PARAMETER Experiment Name: At_100uM_NAA__P Parameter: Tissue Value: Aerial
  misc_feature: MA Experiment 20000445 PARAMETER Experiment Name: At_100uM_NAA__P Parameter: Treatment Value: 100uM NAA vs. No Treatment
  misc_feature: MA Experiment ID: 20000460 Result: Down-regulated in Transcription
  misc_feature: MA Experiment 20000460 PARAMETER Experiment Name: At_10percent_PEG_P Parameter: Age (day) Value: 12
  misc_feature: MA Experiment 20000460 PARAMETER Experiment Name: At_10percent_PEG_P Parameter: Organism Value: A. thaliana
  misc_feature: MA Experiment 20000460 PARAMETER Experiment Name: At_10percent_PEG_P Parameter: Plant Line Value: WS
  misc_feature: MA Experiment 20000460 PARAMETER Experiment Name: At_10percent_PEG_P Parameter: Timepoint (day) Value: 12
  misc_feature: MA Experiment 20000460 PARAMETER Experiment Name: At_10percent_PEG_P Parameter: Tissue Value: Whole Plant
  misc_feature: MA Experiment 20000460 PARAMETER Experiment Name: At_10percent_PEG_P Parameter: Treatment Value: 10percent PEG vs. No Treatment
  misc_feature: MA Experiment ID: 20000495 Result: Down-regulated in Transcription
  misc_feature: MA Experiment 20000495 PARAMETER Experiment Name: At_Guard_Cells_P Parameter: Harvest Date Value: 8/2/2002
  misc_feature: MA Experiment 20000495 PARAMETER Experiment Name: At_Guard_Cells_P Parameter: Organism Value: A. thaliana
  misc_feature: MA Experiment 20000495 PARAMETER Experiment Name: At_Guard_Cells_P Parameter: Tissue Value: Guard Cells vs. Leaves
  misc_feature: MA Experiment ID: 20000496 Result: Down-regulated in Transcription
  misc_feature: MA Experiment 20000496 PARAMETER Experiment Name: At_Guard_Cells_P Parameter: Harvest Date Value: 7/19/2002
  misc_feature: MA Experiment 20000496 PARAMETER Experiment Name: At_Guard_Cells_P Parameter: Organism Value: Canola
  misc_feature: MA Experiment 20000496 PARAMETER Experiment Name: At_Guard_Cells_P Parameter: Tissue Value: Guard Cells vs. Leaves
  misc_feature: MA Experiment ID: 20001247 Result: Down-regulated in Transcription
  misc_feature: MA Experiment 20001247 PARAMETER Experiment Name: At_Far-red-induction_P Parameter: Age (day) Value: 7
  misc_feature: MA Experiment 20001247 PARAMETER Experiment Name: At_Far-red-induction_P Parameter: Light Value: Far-red vs. White
  misc_feature: MA Experiment 20001247 PARAMETER Experiment Name: At_Far-red-induction_P Parameter: Organism Value: A. thaliana
  misc_feature: MA Experiment 20001247 PARAMETER Experiment Name: At_Far-red-induction_P Parameter: Plant Line Value: Columbia
  misc_feature: MA Experiment 20001247 PARAMETER Experiment Name: At_Far-red-induction_P Parameter: Timepoint (hr) Value: 1
  misc_feature: MA Experiment 20001247 PARAMETER Experiment Name: At_Far-red-induction_P Parameter: Tissue Value: Whole Plant
  misc_feature: MA Experiment ID: 20001248 Result: Up-regulated in Transcription
  misc_feature: MA Experiment 20001248 PARAMETER Experiment Name: At_Far-red-induction_P Parameter: Age (day) Value: 7
  misc_feature: MA Experiment 20001248 PARAMETER Experiment Name: At_Far-red-induction_P Parameter: Light Value: Far-red vs. White
  misc_feature: MA Experiment 20001248 PARAMETER Experiment Name: At_Far-red-induction_P Parameter: Organism Value: A. thaliana
  misc_feature: MA Experiment 20001248 PARAMETER Experiment Name: At_Far-red-induction_P Parameter: Plant Line Value: Columbia
  misc_feature: MA Experiment 20001248 PARAMETER Experiment Name: At_Far-red-induction_P Parameter: Timepoint (hr) Value: 4
  misc_feature: MA Experiment 20001248 PARAMETER Experiment Name: At_Far-red-induction_P Parameter: Tissue Value: Whole Plant
  misc_feature: MA Experiment ID: 20001450 Result: Down-regulated in Transcription
  misc_feature: MA Experiment 20001450 PARAMETER Experiment Name: At_Far-red-induction_P Parameter: Age (day) Value: 7
  misc_feature: MA Experiment 20001450 PARAMETER Experiment Name: At_Far-red-induction_P Parameter: Light Value: Far-red vs. White
  misc_feature: MA Experiment 20001450 PARAMETER Experiment Name: At_Far-red-induction_P Parameter: Organism Value: A. thaliana
  misc_feature: MA Experiment 20001450 PARAMETER Experiment Name: At_Far-red-induction_P Parameter: Plant Line Value: Columbia
  misc_feature: MA Experiment 20001450 PARAMETER Experiment Name: At_Far-red-induction_P Parameter: Timepoint (hr) Value: 8
  misc_feature: MA Experiment 20001450 PARAMETER Experiment Name: At_Far-red-induction_P Parameter: Tissue Value: Whole Plant
  misc_feature: MA Experiment ID: 20001451 Result: Down-regulated in Transcription
  misc_feature: MA Experiment 20001451 PARAMETER Experiment Name: At_Far-red-induction_P Parameter: Age (day) Value: 7
  misc_feature: MA Experiment 20001451 PARAMETER Experiment Name: At_Far-red-induction_P Parameter: Light Value: Far-red vs. White
  misc_feature: MA Experiment 20001451 PARAMETER Experiment Name: At_Far-red-induction_P Parameter: Organism Value: A. thaliana
  misc_feature: MA Experiment 20001451 PARAMETER Experiment Name: At_Far-red-induction_P Parameter: Plant Line Value: Columbia
  misc_feature: MA Experiment 20001451 PARAMETER Experiment Name: At_Far-red-induction_P Parameter: Timepoint (hr) Value: 24
  misc_feature: MA Experiment 20001451 PARAMETER Experiment Name: At_Far-red-induction_P Parameter: Tissue Value: Whole Plant
  misc_feature: MA Experiment ID: 20001503 Result: Down-regulated in Transcription
  misc_feature: MA Experiment 20001503 PARAMETER Experiment Name: At_Far-red-enriched_P Parameter: Age (day) Value: 7
  misc_feature: MA Experiment 20001503 PARAMETER Experiment Name: At_Far-red-enriched_P Parameter: Light Value: Far-red enriched vs. White
  misc_feature: MA Experiment 20001503 PARAMETER Experiment Name: At_Far-red-enriched_P Parameter: Organism Value: A. thaliana
  misc_feature: MA Experiment 20001503 PARAMETER Experiment Name: At_Far-red-enriched_P Parameter: Plant Line Value: Columbia
  misc_feature: MA Experiment 20001503 PARAMETER Experiment Name: At_Far-red-enriched_P Parameter: Timepoint (day) Value: 3
  misc_feature: MA Experiment 20001503 PARAMETER Experiment Name: At_Far-red-enriched_P Parameter: Tissue Value: Whole Plant
  misc_feature: MA Experiment ID: 20001555 Result: Down-regulated in Transcription
  misc_feature: MA Experiment 20001555 PARAMETER Experiment Name: At_Drought_Soil_Dry_P Parameter: Age (day) Value: 24
  misc_feature: MA Experiment 20001555 PARAMETER Experiment Name: At_Drought_Soil_Dry_P Parameter: Organism Value: A. thaliana
  misc_feature: MA Experiment 20001555 PARAMETER Experiment Name: At_Drought_Soil_Dry_P Parameter: Plant Line Value: WS
  misc_feature: MA Experiment 20001555 PARAMETER Experiment Name: At_Drought_Soil_Dry_P Parameter: Post Timepoint (hr) Value: None
  misc_feature: MA Experiment 20001555 PARAMETER Experiment Name: At_Drought_Soil_Dry_P Parameter: Post-Treatment Value: None
  misc_feature: MA Experiment 20001555 PARAMETER Experiment Name: At_Drought_Soil_Dry_P Parameter: Timepoint (day) Value: 10
  misc_feature: MA Experiment 20001555 PARAMETER Experiment Name: At_Drought_Soil_Dry_P Parameter: Treatment Value: Drought vs. No Drought
  misc_feature: MA Experiment ID: 20001556 Result: Down-regulated in Transcription
  misc_feature: MA Experiment 20001556 PARAMETER Experiment Name: At_Drought_Soil_Dry_P Parameter: Age (day) Value: 26
  misc_feature: MA Experiment 20001556 PARAMETER Experiment Name: At_Drought_Soil_Dry_P Parameter: Organism Value: A. thaliana
  misc_feature: MA Experiment 20001556 PARAMETER Experiment Name: At_Drought_Soil_Dry_P Parameter: Plant Line Value: WS
  misc_feature: MA Experiment 20001556 PARAMETER Experiment Name: At_Drought_Soil_Dry_P Parameter: Post Timepoint (hr) Value: None
  misc_feature: MA Experiment 20001556 PARAMETER Experiment Name: At_Drought_Soil_Dry_P Parameter: Post-Treatment Value: None
  misc_feature: MA Experiment 20001556 PARAMETER Experiment Name: At_Drought_Soil_Dry_P Parameter: Timepoint (day) Value: 12
  misc_feature: MA Experiment 20001556 PARAMETER Experiment Name: At_Drought_Soil_Dry_P Parameter: Treatment Value: Drought vs. No Drought
  misc_feature: MA Experiment ID: 20001557 Result: Up-regulated in Transcription
  misc_feature: MA Experiment 20001557 PARAMETER Experiment Name: At_Drought_Soil_Dry_P Parameter: Age (day) Value: 27
  misc_feature: MA Experiment 20001557 PARAMETER Experiment Name: At_Drought_Soil_Dry_P Parameter: Organism Value: A. thaliana
  misc_feature: MA Experiment 20001557 PARAMETER Experiment Name: At_Drought_Soil_Dry_P Parameter: Plant Line Value: WS
  misc_feature: MA Experiment 20001557 PARAMETER Experiment Name: At_Drought_Soil_Dry_P Parameter: Post Timepoint (hr) Value: 3
  misc_feature: MA Experiment 20001557 PARAMETER Experiment Name: At_Drought_Soil_Dry_P Parameter: Post-Treatment Value: Re-Water vs. No Drought
  misc_feature: MA Experiment 20001557 PARAMETER Experiment Name: At_Drought_Soil_Dry_P Parameter: Timepoint (day) Value: 13
  misc_feature: MA Experiment 20001557 PARAMETER Experiment Name: At_Drought_Soil_Dry_P Parameter: Treatment Value: Drought vs. No Drought
  misc_feature: MA Experiment ID: 20001757 Result: Up-regulated in Transcription
  misc_feature: MA Experiment 20001757 PARAMETER Experiment Name: At_50mM_NH4NO3_L-to-H_P Parameter: Timepoint (hr) Value: 6
  misc_feature: MA Experiment 20001757 PARAMETER Experiment Name: At_50mM_NH4NO3_L-to-H_P Parameter: Tissue Value: Leaf
  misc_feature: MA Experiment 20001757 PARAMETER Experiment Name: At_50mM_NH4NO3_L-to-H_P Parameter: Treatment Value: 50mM NH4NO3 vs 100mM Mannitol
  misc_feature: MA Experiment ID: 20001905 Result: Down-regulated in Transcription
  misc_feature: MA Experiment 20001905 PARAMETER Experiment Name: At_Drought_Reproduction_P Parameter: Age (day) Value: 40
  misc_feature: MA Experiment 20001905 PARAMETER Experiment Name: At_Drought_Reproduction_P Parameter: Organism Value: A. thaliana
  misc_feature: MA Experiment 20001905 PARAMETER Experiment Name: At_Drought_Reproduction_P Parameter: Plant Line Value: WS
  misc_feature: MA Experiment 20001905 PARAMETER Experiment Name: At_Drought_Reproduction_P Parameter: Timepoint (day) Value: 10
  misc_feature: MA Experiment 20001905 PARAMETER Experiment Name: At_Drought_Reproduction_P Parameter: Tissue Value: Rosettes
  misc_feature: MA Experiment 20001905 PARAMETER Experiment Name: At_Drought_Reproduction_P Parameter: Treatment Value: Drought vs. No Drought
  misc_feature: MA Experiment ID: 20001911 Result: Down-regulated in Transcription
  misc_feature: MA Experiment 20001911 PARAMETER Experiment Name: At_Drought_Reproduction_P Parameter: Age (day) Value: 40
  misc_feature: MA Experiment 20001911 PARAMETER Experiment Name: At_Drought_Reproduction_P Parameter: Organism Value: A. thaliana
  misc_feature: MA Experiment 20001911 PARAMETER Experiment Name: At_Drought_Reproduction_P Parameter: Plant Line Value: WS
  misc_feature: MA Experiment 20001911 PARAMETER Experiment Name: At_Drought_Reproduction_P Parameter: Timepoint (day) Value: 10
  misc_feature: MA Experiment 20001911 PARAMETER Experiment Name: At_Drought_Reproduction_P Parameter: Tissue Value: Flowers
  misc_feature: MA Experiment 20001911 PARAMETER Experiment Name: At_Drought_Reproduction_P Parameter: Treatment Value: Drought vs. No Drought
actagaaaacatatcattatcacactttcataaagctcataacatacataaaaaatgggtgaatcttttagattattcaatcatcatcatttcctcacaacttttctcataatcatagccatgctcaaattggttcatacaacaacaacaacaacaacaacaacaacaacaacaacaacaacaacaaacaccgagttcgtaaaatcatcatgcactttcacaacgtacccaagactctgtttctcttcactctcaactcatgctagtctcatccaaacaagccccaagctcatggctcatgcggctctcaacatcacattagcctcggctaaagtaacttcagcaatgatggtgcgtctctcgaatagtcggctcaagcctaaagaagtctcggccatgagagactgcgtcgaggagttaggtgacacgttggaggagcttaggaaatcgattggtgagatgtgtcagctaagtggctcgaactatgaagtttacataagcgatatacagacttgggtcagtgcggctttgacagatgtgaacacatgtactgacggatttgaaggagaagatatggacgggaaggttaaggttttggttagagggaggattttggttattgctcatttaacaagtaatgctttagctttgattaatcactttgcttctattcatggctaaagagagttatgataagtactgttagtttgttttttattgatttttctagtgattttgtgtgtataatgataatataatgtatgtgtctttatgattccagaatcaatatgtaacaaatgaagtgtttcatgaaaattgatttt

SEQ ID NO: 26450 - protein, 208 aa, Arabidopsis thaliana
  peptide (1)..(208): Ceres Seq. ID no. 12393742
  misc_feature (29)..(205): Homolog of NCBI NO: 30696750 NR Description: hypothetical protein [Arabidopsis thaliana]
  misc_feature (47)..(207): Homolog of NCBI NO: 112717 NR Description: 21 KD PROTEIN PRECURSOR (1.2 PROTEIN)
  misc_feature (13)..(204): Homolog of NCBI NO: 15232790 NR Description: putative protein; protein id: At3g47380.1
  misc_feature (18)..(205): Homolog of NCBI NO: 7406663 NR Description: putative ripening-related protein [Vitis vinifera]
  misc_feature (36)..(207): Homolog of NCBI NO: 7488727 NR Description: 21K protein precursor - alfalfa
  misc_feature (13)..(207): Homolog of NCBI NO: 21618088 NR Description: ripening-related protein-like [Arabidopsis
  misc_feature (13)..(207): Homolog of NCBI NO: 15241799 NR Description: ripening-related protein - like
  misc_feature (9)..(208): Homolog of NCBI NO: 8096279 NR Description: DC1.2 homologue [Nicotiana tabacum]
  misc_feature (1)..(208): Homolog of NCBI NO: 30697666 NR Description: pectinesterase family [Arabidopsis thaliana]
  misc_feature (1)..(208): Homolog of NCBI NO: 24417332 NR Description: unknown [Arabidopsis thaliana]
MGESFRLFNHHHFLTTFLIIIAMLKLVHTTTTTTTTTTTTTTTTNTEFVKSSCTFTTYPRLCFSSLSTHASLIQTSPKLMAHAALNITLASAKVTSAMMVRLSNSRLKPKEVSAMRDCVEELGDTLEELRKSIGEMCQLSGSNYEVYISDIQTWVSAALTDVNTCTDGFEGEDMDGKVKVLVRGRILVIAHLTSNALALINHFASIHG

SEQ ID NO: 26451 - protein, 186 aa, Arabidopsis thaliana
  peptide (1)..(186): Ceres Seq. ID no. 12393743
  misc_feature (7)..(183): Homolog of NCBI NO: 30696750 NR Description: hypothetical protein [Arabidopsis thaliana]
  misc_feature (25)..(185): Homolog of NCBI NO: 112717 NR Description: 21 KD PROTEIN PRECURSOR (1.2 PROTEIN)
  misc_feature (1)..(182): Homolog of NCBI NO: 15232790 NR Description: putative protein; protein id: At3g47380.1
  misc_feature (1)..(183): Homolog of NCBI NO: 7406663 NR Description: putative ripening-related protein [Vitis vinifera]
  misc_feature (14)..(185): Homolog of NCBI NO: 7488727 NR Description: 21K protein precursor - alfalfa
  misc_feature (1)..(185): Homolog of NCBI NO: 21618088 NR Description: ripening-related protein-like [Arabidopsis
  misc_feature (1)..(185): Homolog of NCBI NO: 15241799 NR Description: ripening-related protein - like
  misc_feature (1)..(186): Homolog of NCBI NO: 8096279 NR Description: DC1.2 homologue [Nicotiana tabacum]
  misc_feature (1)..(186): Homolog of NCBI NO: 30697666 NR Description: pectinesterase family [Arabidopsis thaliana]
  misc_feature (1)..(186): Homolog of NCBI NO: 24417332 NR Description: unknown [Arabidopsis thaliana]
MLKLVHTTTTTTTTTTTTTTTTNTEFVKSSCTFTTYPRLCFSSLSTHASLIQTSPKLMAHAALNITLASAKVTSAMMVRLSNSRLKPKEVSAMRDCVEELGDTLEELRKSIGEMCQLSGSNYEVYISDIQTWVSAALTDVNTCTDGFEGEDMDGKVKVLVRGRILVIAHLTSNALALINHFASIHG

SEQ ID NO: 26452 - protein, 129 aa, Arabidopsis thaliana
  peptide (1)..(129): Ceres Seq. ID no. 12393744
  misc_feature (1)..(126): Homolog of NCBI NO: 30696750 NR Description: hypothetical protein [Arabidopsis thaliana]
  misc_feature (1)..(128): Homolog of NCBI NO: 112717 NR Description: 21 KD PROTEIN PRECURSOR (1.2 PROTEIN)
  misc_feature (1)..(125): Homolog of NCBI NO: 15232790 NR Description: putative protein; protein id: At3g47380.1
  misc_feature (1)..(126): Homolog of NCBI NO: 7406663 NR Description: putative ripening-related protein [Vitis vinifera]
  misc_feature (1)..(128): Homolog of NCBI NO: 7488727 NR Description: 21K protein precursor - alfalfa
  misc_feature (1)..(128): Homolog of NCBI NO: 21618088 NR Description: ripening-related protein-like [Arabidopsis
  misc_feature (1)..(128): Homolog of NCBI NO: 15241799 NR Description: ripening-related protein - like
  misc_feature (1)..(129): Homolog of NCBI NO: 8096279 NR Description: DC1.2 homologue [Nicotiana tabacum]
  misc_feature (1)..(129): Homolog of NCBI NO: 30697666 NR Description: pectinesterase family [Arabidopsis thaliana]
  misc_feature (1)..(129): Homolog of NCBI NO: 24417332 NR Description: unknown [Arabidopsis thaliana]
MAHAALNITLASAKVTSAMMVRLSNSRLKPKEVSAMRDCVEELGDTLEELRKSIGEMCQLSGSNYEVYISDIQTWVSAALTDVNTCTDGFEGEDMDGKVKVLVRGRILVIAHLTSNALALINHFASIHG

SEQ ID NO: 26453 - DNA, 1226 bp, Arabidopsis thaliana
  misc_feature (1)..(1226): Ceres Seq. ID no. 13491506
  misc_feature: MA Experiment ID: 20000268 Result: Down-regulated in Transcription
  misc_feature: MA Experiment 20000268 PARAMETER Experiment Name: At_100mM_NaCl__P Parameter: Age (day) Value: 14
  misc_feature: MA Experiment 20000268 PARAMETER Experiment Name: At_100mM_NaCl__P Parameter: Organism Value: A. thaliana
  misc_feature: MA Experiment 20000268 PARAMETER Experiment Name: At_100mM_NaCl__P Parameter: Plant Line Value: WS
  misc_feature: MA Experiment 20000268 PARAMETER Experiment Name: At_100mM_NaCl__P Parameter: Timepoint (hr) Value: 6
  misc_feature: MA Experiment 20000268 PARAMETER Experiment Name: At_100mM_NaCl__P Parameter: Tissue Value: Whole Plant
  misc_feature: MA Experiment 20000268 PARAMETER Experiment Name: At_100mM_NaCl__P Parameter: Treatment Value: 100mM NaCl vs. No Treatment
tttctttcgtttggcctttgatcctatcataagctttttttcgtttatcaatcttctcgattcagccacaattcttgtttctcagataattcatctcctttctttgattcgtttccttctcttctgtcactcagatctagatctagatctaggtttttttctttctcatcggaaatttggcttagaggcttgttttgatctagggtttggtttttgggaattttgaaaaaaaaaaaaacaaaattaggaatgaatctatgagctactcaatcctgtttcgtcggattcgaattctacactctttctccgtcgtttacctctactacacctacgttttctcatgaagtaatcgttctcgatctcagttttcgtttttgatctaacttattctttgatagatttagaaatcggggattttcagattgtgtttttgagaggtttttataggaaaatatctctagaagaagaagaataatattatattgattttaattttggtgagaagaagtcaaaaagtcaacgagaaatggggtcgttgcaaatgcaaacaagtcctgaatccgataatgatccgaggtacgccacggtgacggatgagaggaagaggaagagaatgatctctaacagagaatctgctcggaggtcaaggatgaggaaacagaagcaacttggtgatttgatcaacgaagtcactcttctcaagaatgataacgctaaaatcactgagcaggttgatgaagcttcaaagaaatacattgaaatggagtctaagaacaatgtcttgagggcacaggcttcggagttgacggataggttgagatcattgaactctgtgcttgagatggttgaagaaattagtggtcaggctttggatattcctgagattcctgaatctatgcagaacccttggcagatgccttgtccaatgcaaccaatcagagcttctgctgatatgtttgattgctgaagatggatgattcatatctgaaggatcaaaaatgaagcattgagttcgagtctttggtctgttttacttactgtccttgttgtaacaattagtgtgtcattggtgaattgagtcttgtgttgtcaatggacaacgcaatctttatgcaatttcaatttgttcgtgtctttgtatggttttgtagcctcagtcctctagtcttgtgtctcatgtaattggtgtctaatgtgtttcttattgaattcaagctttcttattg

SEQ ID NO: 26454 - protein, 146 aa, Arabidopsis thaliana; identical to SEQ ID NO: 21432
  peptide (1)..(146): Ceres Seq. ID no. 13491507
  misc_feature (21)..(85): Pfam Name: bZIP transcription factor Pfam Description: bZIP transcription factor
  misc_feature (12)..(141): Homolog of NCBI NO: 40019253 NR Description: ocs-element binding factor 1 [Secale cereale]
  misc_feature (1)..(143): Homolog of NCBI NO: 3986151 NR Description: rdLIP [Raphanus sativus]
  misc_feature (1)..(146): Homolog of NCBI NO: 7489297 NR Description: DNA-binding protein bZIP-1 - garden snapdragon
  misc_feature (1)..(144): Homolog of NCBI NO: 5901747 NR Description: bZIP DNA-binding protein [Lycopersicon esculentum]
  misc_feature (1)..(143): Homolog of NCBI NO: 7489118 NR Description: DNA-binding protein tbz17 - common tobacco
  misc_feature (7)..(144): Homolog of NCBI NO: 7489298 NR Description: DNA-binding protein bZIP-2 - garden snapdragon
  misc_feature (1)..(144): Homolog of NCBI NO: 16580132 NR Description: bZIP transcription factor BZI-3 [Nicotiana
  misc_feature (1)..(144): Homolog of NCBI NO: 10241920 NR Description: TBZF [Nicotiana tabacum]
  misc_feature (5)..(144): Homolog of NCBI NO: 9650826 NR Description: common plant regulatory factor 6 [Petroselinum
  misc_feature (1)..(146): Homolog of NCBI NO: 15228754 NR Description: bZIP family transcription factor [Arabidopsis

SEQ ID NO: 26455 - protein, 141 aa, Arabidopsis thaliana; identical to SEQ ID NO: 21433
  peptide (1)..(141): Ceres Seq. ID no. 13491508
  misc_feature (16)..(80): Pfam Name: bZIP transcription factor Pfam Description: bZIP transcription factor
  misc_feature (7)..(136): Homolog of NCBI NO: 40019253 NR Description: ocs-element binding factor 1 [Secale cereale]
  misc_feature (1)..(138): Homolog of NCBI NO: 3986151 NR Description: rdLIP [Raphanus sativus]
  misc_feature (1)..(141): Homolog of NCBI NO: 7489297 NR Description: DNA-binding protein bZIP-1 - garden snapdragon
  misc_feature (1)..(139): Homolog of NCBI NO: 5901747 NR Description: bZIP DNA-binding protein [Lycopersicon esculentum]
  misc_feature (1)..(138): Homolog of NCBI NO: 7489118 NR Description: DNA-binding protein tbz17 - common tobacco
  misc_feature (2)..(139): Homolog of NCBI NO: 7489298 NR Description: DNA-binding protein bZIP-2 - garden snapdragon
  misc_feature (1)..(139): Homolog of NCBI NO: 16580132 NR Description: bZIP transcription factor BZI-3 [Nicotiana
  misc_feature (1)..(139): Homolog of NCBI NO: 10241920 NR Description: TBZF [Nicotiana tabacum]
  misc_feature (1)..(139): Homolog of NCBI NO: 9650826 NR Description: common plant regulatory factor 6 [Petroselinum
  misc_feature (1)..(141): Homolog of NCBI NO: 15228754 NR Description: bZIP family transcription factor [Arabidopsis

SEQ ID NO: 26456 - protein, 117 aa, Arabidopsis thaliana; identical to SEQ ID NO: 21434
  peptide (1)..(117): Ceres Seq. ID no. 13491509
  misc_feature (1)..(56): Pfam Name: bZIP transcription factor Pfam Description: bZIP transcription factor
  misc_feature (1)..(117): Homolog of NCBI NO: 15228754 NR Description: bZIP family transcription factor [Arabidopsis
  misc_feature (1)..(112): Homolog of NCBI NO: 40019253 NR Description: ocs-element binding factor 1 [Secale cereale]
  misc_feature (1)..(114): Homolog of NCBI NO: 3986151 NR Description: rdLIP [Raphanus sativus]
  misc_feature (1)..(117): Homolog of NCBI NO: 7489297 NR Description: DNA-binding protein bZIP-1 - garden snapdragon
  misc_feature (1)..(115): Homolog of NCBI NO: 5901747 NR Description: bZIP DNA-binding protein [Lycopersicon esculentum]
  misc_feature (1)..(114): Homolog of NCBI NO: 7489118 NR Description: DNA-binding protein tbz17 - common tobacco
  misc_feature (1)..(115): Homolog of NCBI NO: 7489298 NR Description: DNA-binding protein bZIP-2 - garden snapdragon
  misc_feature (1)..(115): Homolog of NCBI NO: 16580132 NR Description: bZIP transcription factor BZI-3 [Nicotiana
  misc_feature (1)..(115): Homolog of NCBI NO: 10241920 NR Description: TBZF [Nicotiana tabacum]
  misc_feature (1)..(115): Homolog of NCBI NO: 9650826 NR Description: common plant regulatory factor 6 [Petroselinum

SEQ ID NO: 26457 - DNA, 638 bp, Arabidopsis thaliana
  misc_feature (1)..(638): Ceres Seq. ID no. 12420535
  misc_feature: MA Experiment ID: 108461 Result: Up-regulated in Transcription
  misc_feature: MA Experiment 108461 PARAMETER Experiment Name: At_Germinating_Seeds_cDNA_P Parameter: Age (day) Value: 1 vs. 0
  misc_feature: MA Experiment 108461 PARAMETER Experiment Name: At_Germinating_Seeds_cDNA_P Parameter: Tissue Value: Germinating Seeds
  misc_feature: MA Experiment ID: 108464 Result: Up-regulated in Transcription
  misc_feature: MA Experiment 108464 PARAMETER Experiment Name: At_Germinating_Seeds_cDNA_P Parameter: Age (day) Value: 4 vs. 0
  misc_feature: MA Experiment 108464 PARAMETER Experiment Name: At_Germinating_Seeds_cDNA_P Parameter: Tissue Value: Germinating Seeds
  misc_feature: MA Experiment ID: 108501 Result: Up-regulated in Transcription
  misc_feature: MA Experiment 108501 PARAMETER Experiment Name: At_ap2_floral_buds_cDNA_P Parameter: Plant Line Value: ap2 (Ler.)
  misc_feature: MA Experiment 108501 PARAMETER Experiment Name: At_ap2_floral_buds_cDNA_P Parameter: Tissue Value: Closed Flower
  misc_feature: MA Experiment ID: 108579 Result: Up-regulated in Transcription
  misc_feature: MA Experiment 108579 PARAMETER Experiment Name: At_4deg_Cold_cDNA_P Parameter: Temperature (deg C) Value: 4 vs. 22
  misc_feature: MA Experiment 108579 PARAMETER Experiment Name: At_4deg_Cold_cDNA_P Parameter: Timepoint (hr) Value: 6
  misc_feature: MA Experiment 108579 PARAMETER Experiment Name: At_4deg_Cold_cDNA_P Parameter: Tissue Value: Aerial
  misc_feature: MA Experiment ID: 20000069 Result: Down-regulated in Transcription
  misc_feature: MA Experiment 20000069 PARAMETER Experiment Name: At_100uM_ABA_Mutants_cDNA_P Parameter: Plant Line Value: CS23
  misc_feature: MA Experiment 20000069 PARAMETER Experiment Name: At_100uM_ABA_Mutants_cDNA_P Parameter: Timepoint (hr) Value: 6
  misc_feature: MA Experiment 20000069 PARAMETER Experiment Name: At_100uM_ABA_Mutants_cDNA_P Parameter: Tissue Value: Aerial
  misc_feature: MA Experiment 20000069 PARAMETER Experiment Name: At_100uM_ABA_Mutants_cDNA_P Parameter: Treatment Value: 100uM ABA vs. No Treatment
  misc_feature: MA Experiment ID: 20000086 Result: Down-regulated in Transcription
  misc_feature: MA Experiment 20000086 PARAMETER Experiment Name: At_100uM_ABA_Mutants_cDNA_P Parameter: Plant Line Value: CS22
  misc_feature: MA Experiment 20000086 PARAMETER Experiment Name: At_100uM_ABA_Mutants_cDNA_P Parameter: Timepoint (hr) Value: 6
  misc_feature: MA Experiment 20000086 PARAMETER Experiment Name: At_100uM_ABA_Mutants_cDNA_P Parameter: Tissue Value: Aerial
  misc_feature: MA Experiment 20000086 PARAMETER Experiment Name: At_100uM_ABA_Mutants_cDNA_P Parameter: Treatment Value: 100uM ABA vs. No Treatment
  misc_feature: MA Experiment ID: 20000093 Result: Down-regulated in Transcription
  misc_feature: MA Experiment 20000093 PARAMETER Experiment Name: At_42deg_Heat_cDNA_P Parameter: Temperature (deg C) Value: 42 vs. 22
  misc_feature: MA Experiment 20000093 PARAMETER Experiment Name: At_42deg_Heat_cDNA_P Parameter: Timepoint (hr) Value: 0.5
  misc_feature: MA Experiment 20000093 PARAMETER Experiment Name: At_42deg_Heat_cDNA_P Parameter: Tissue Value: Aerial
  misc_feature: MA Experiment ID: 20000111 Result: Down-regulated in Transcription
  misc_feature: MA Experiment 20000111 PARAMETER Experiment Name: At_42deg_Heat_cDNA_P Parameter: Temperature (deg C) Value: 42 vs. 22
  misc_feature: MA Experiment 20000111 PARAMETER Experiment Name: At_42deg_Heat_cDNA_P Parameter: Timepoint (hr) Value: 6
  misc_feature: MA Experiment 20000111 PARAMETER Experiment Name: At_42deg_Heat_cDNA_P Parameter: Tissue Value: Aerial
  misc_feature: MA Experiment ID: 20000144 Result: Down-regulated in Transcription
  misc_feature: MA Experiment 20000144 PARAMETER Experiment Name: At_42deg_Heat_cDNA_P Parameter: Temperature (deg C) Value: 42 vs. 22
  misc_feature: MA Experiment 20000144 PARAMETER Experiment Name: At_42deg_Heat_cDNA_P Parameter: Timepoint (hr) Value: 1
  misc_feature: MA Experiment 20000144 PARAMETER Experiment Name: At_42deg_Heat_cDNA_P Parameter: Tissue Value: Aerial
  misc_feature: MA Experiment ID: 20000179 Result: Up-regulated in Transcription
  misc_feature: MA Experiment 20000179 PARAMETER Experiment Name: At_Germinating_Seeds_P Parameter: Age (hr) Value: 6 vs. 0
  misc_feature: MA Experiment 20000179 PARAMETER Experiment Name: At_Germinating_Seeds_P Parameter: Tissue Value: Germinating Seeds
  misc_feature: MA Experiment ID: 20000180 Result: Up-regulated in Transcription
  misc_feature: MA Experiment 20000180 PARAMETER Experiment Name: At_Germinating_Seeds_P Parameter: Age (hr) Value: 24 vs. 0
  misc_feature: MA Experiment 20000180 PARAMETER Experiment Name: At_Germinating_Seeds_P Parameter: Tissue Value: Germinating Seeds
  misc_feature: MA Experiment ID: 20000184 Result: Up-regulated in Transcription
  misc_feature: MA Experiment 20000184 PARAMETER Experiment Name: At_Shoots__P Parameter: Age (day) Value: 7
  misc_feature: MA Experiment 20000184 PARAMETER Experiment Name: At_Shoots__P Parameter: Tissue Value: Shoots vs. Whole Plant
  misc_feature: MA Experiment ID: 20000185 Result: Up-regulated in Transcription
  misc_feature: MA Experiment 20000185 PARAMETER Experiment Name: At_Roots__P Parameter: Age (day) Value: 7 vs. 21
  misc_feature: MA Experiment 20000185 PARAMETER Experiment Name: At_Roots__P Parameter: Organism Value: A. thaliana
  misc_feature: MA Experiment 20000185 PARAMETER Experiment Name: At_Roots__P Parameter: Tissue Value: Roots vs. Whole Plant
  misc_feature: MA Experiment ID: 20000264 Result: Up-regulated in Transcription
  misc_feature: MA Experiment 20000264 PARAMETER Experiment Name: At_Open_Flower_P Parameter: Age (day) Value: 21
  misc_feature: MA Experiment 20000264 PARAMETER Experiment Name: At_Open_Flower_P Parameter: Plant Line Value: WS
  misc_feature: MA Experiment 20000264 PARAMETER Experiment Name: At_Open_Flower_P Parameter: Tissue Value: Open Flower vs. Whole Plant
  misc_feature: MA Experiment ID: 20000265 Result: Up-regulated in Transcription
  misc_feature: MA Experiment 20000265 PARAMETER Experiment Name: At_Open_Flower_P Parameter: Age (day) Value: 21
  misc_feature: MA Experiment 20000265 PARAMETER Experiment Name: At_Open_Flower_P Parameter: Plant Line Value: WS
  misc_feature: MA Experiment 20000265 PARAMETER Experiment Name: At_Open_Flower_P Parameter: Tissue Value: Closed Flower vs. Whole Plant
  misc_feature: MA Experiment ID: 20000286 Result: Up-regulated in Transcription
  misc_feature: MA Experiment 20000286 PARAMETER Experiment Name: At_Open_Flower_P Parameter: Age (day) Value: 21
  misc_feature: MA Experiment 20000286 PARAMETER Experiment Name: At_Open_Flower_P Parameter: Plant Line Value: WS
  misc_feature: MA Experiment 20000286 PARAMETER Experiment Name: At_Open_Flower_P Parameter: Tissue Value: Half Open vs. Whole Plant
  misc_feature: MA Experiment ID: 20000438 Result: Up-regulated in Transcription
  misc_feature: MA Experiment 20000438 PARAMETER Experiment Name: At_Shoots__P Parameter: Age (day) Value: 14
  misc_feature: MA Experiment 20000438 PARAMETER Experiment Name: At_Shoots__P Parameter: Tissue Value: Shoots vs. Whole Plant
  misc_feature: MA Experiment ID: 20000439 Result: Up-regulated in Transcription
  misc_feature: MA Experiment 20000439 PARAMETER Experiment Name: At_Roots__P Parameter: Age (day) Value: 14 vs. 21
  misc_feature: MA Experiment 20000439 PARAMETER Experiment Name: At_Roots__P Parameter: Organism Value: A. thaliana
  misc_feature: MA Experiment 20000439 PARAMETER Experiment Name: At_Roots__P Parameter: Tissue Value: Roots vs. Whole Plant
  misc_feature: MA Experiment ID: 20000452 Result: Up-regulated in Transcription
  misc_feature: MA Experiment 20000452 PARAMETER Experiment Name: At_CS6879_Shoots-Roots_P Parameter: Age (day) Value: 14
  misc_feature: MA Experiment 20000452 PARAMETER Experiment Name: At_CS6879_Shoots-Roots_P Parameter: Organism Value: A. thaliana
  misc_feature: MA Experiment 20000452 PARAMETER Experiment Name: At_CS6879_Shoots-Roots_P Parameter: Plant Line Value: CS6879 vs. WS
  misc_feature: MA Experiment 20000452 PARAMETER Experiment Name: At_CS6879_Shoots-Roots_P Parameter: Tissue Value: Shoots
  misc_feature: MA Experiment ID: 20000527 Result: Up-regulated in Transcription
  misc_feature: MA Experiment 20000527 PARAMETER Experiment Name: At_10percent_PEG_P Parameter: Age (day) Value: 20
  misc_feature: MA Experiment 20000527 PARAMETER Experiment Name: At_10percent_PEG_P Parameter: Organism Value: A. thaliana
  misc_feature: MA Experiment 20000527 PARAMETER Experiment Name: At_10percent_PEG_P Parameter: Plant Line Value: WS
  misc_feature: MA Experiment 20000527 PARAMETER Experiment Name: At_10percent_PEG_P Parameter: Timepoint (day) Value: 20
  misc_feature: MA Experiment 20000527 PARAMETER Experiment Name: At_10percent_PEG_P Parameter: Tissue Value: Whole Plant
  misc_feature: MA Experiment 20000527 PARAMETER Experiment Name: At_10percent_PEG_P Parameter: Treatment Value: 10percent PEG vs. No Treatment
  misc_feature: MA Experiment ID: 20000573 Result: Down-regulated in Transcription
  misc_feature: MA Experiment 20000573 PARAMETER Experiment Name: At_100uM_ABA_Mutants__P Parameter: Organism Value: A. thaliana
  misc_feature: MA Experiment 20000573 PARAMETER Experiment Name: At_100uM_ABA_Mutants__P Parameter: Plant Line Value: CS22 vs. Ler wt
  misc_feature: MA Experiment 20000573 PARAMETER Experiment Name: At_100uM_ABA_Mutants__P Parameter: Timepoint (hr) Value: N/A
  misc_feature: MA Experiment 20000573 PARAMETER Experiment Name: At_100uM_ABA_Mutants__P Parameter: Tissue Value: Whole Plant
  misc_feature: MA Experiment 20000573 PARAMETER Experiment Name: At_100uM_ABA_Mutants__P Parameter: Treatment Value: None
  misc_feature: MA Experiment ID: 20001248 Result: Down-regulated in Transcription
  misc_feature: MA Experiment 20001248 PARAMETER Experiment Name: At_Far-red-induction_P Parameter: Age (day) Value: 7
  misc_feature: MA Experiment 20001248 PARAMETER Experiment Name: At_Far-red-induction_P Parameter: Light Value: Far-red vs. White
  misc_feature: MA Experiment 20001248 PARAMETER Experiment Name: At_Far-red-induction_P Parameter: Organism Value: A. thaliana
  misc_feature: MA Experiment 20001248 PARAMETER Experiment Name: At_Far-red-induction_P Parameter: Plant Line Value: Columbia
  misc_feature: MA Experiment 20001248 PARAMETER Experiment Name: At_Far-red-induction_P Parameter: Timepoint (hr) Value: 4
  misc_feature: MA Experiment 20001248 PARAMETER Experiment Name: At_Far-red-induction_P Parameter: Tissue Value: Whole Plant
  misc_feature: MA Experiment ID: 20001450 Result: Down-regulated in Transcription
  misc_feature: MA Experiment 20001450 PARAMETER Experiment Name: At_Far-red-induction_P Parameter: Age (day) Value: 7
  misc_feature: MA Experiment 20001450 PARAMETER Experiment Name: At_Far-red-induction_P Parameter: Light Value: Far-red vs. White
  misc_feature: MA Experiment 20001450 PARAMETER Experiment Name: At_Far-red-induction_P Parameter: Organism Value: A. thaliana
  misc_feature: MA Experiment 20001450 PARAMETER Experiment Name: At_Far-red-induction_P Parameter: Plant Line Value: Columbia
  misc_feature: MA Experiment 20001450 PARAMETER Experiment Name: At_Far-red-induction_P Parameter: Timepoint (hr) Value: 8
  misc_feature: MA Experiment 20001450 PARAMETER Experiment Name: At_Far-red-induction_P Parameter: Tissue Value: Whole Plant
  misc_feature: MA Experiment ID: 20001905 Result: Up-regulated in Transcription
  misc_feature: MA Experiment 20001905 PARAMETER Experiment Name: At_Drought_Reproduction_P Parameter: Age (day) Value: 40
  misc_feature: MA Experiment 20001905 PARAMETER Experiment Name: At_Drought_Reproduction_P Parameter: Organism Value: A. thaliana
  misc_feature: MA Experiment 20001905 PARAMETER Experiment Name: At_Drought_Reproduction_P Parameter: Plant Line Value: WS
  misc_feature: MA Experiment 20001905 PARAMETER Experiment Name: At_Drought_Reproduction_P Parameter: Timepoint (day) Value: 10
  misc_feature: MA Experiment 20001905 PARAMETER Experiment Name: At_Drought_Reproduction_P Parameter: Tissue Value: Rosettes
  misc_feature: MA Experiment 20001905 PARAMETER Experiment Name: At_Drought_Reproduction_P Parameter: Treatment Value: Drought vs. No Drought
  misc_feature: MA Experiment ID: 20001911 Result: Up-regulated in Transcription
  misc_feature: MA Experiment 20001911 PARAMETER Experiment Name: At_Drought_Reproduction_P Parameter: Age (day) Value: 40
  misc_feature: MA Experiment 20001911 PARAMETER Experiment Name: At_Drought_Reproduction_P Parameter: Organism Value: A. thaliana
  misc_feature: MA Experiment 20001911 PARAMETER Experiment Name: At_Drought_Reproduction_P Parameter: Plant Line Value: WS
  misc_feature: MA Experiment 20001911 PARAMETER Experiment Name: At_Drought_Reproduction_P Parameter: Timepoint (day) Value: 10
  misc_feature: MA Experiment 20001911 PARAMETER Experiment Name: At_Drought_Reproduction_P Parameter: Tissue Value: Flowers
  misc_feature: MA Experiment 20001911 PARAMETER Experiment Name: At_Drought_Reproduction_P Parameter: Treatment Value: Drought vs. No Drought
  misc_feature: Phenotype: WHOLE PLANT Size-Large
  misc_feature: Phenotype: INFLORESCENCE Flowering Time-Late Flowering
  misc_feature: Phenotype: WHOLE PLANT Size-Large
  misc_feature: Phenotype: INFLORESCENCE Flowering Time-Late Flowering
  misc_feature: Phenotype: WHOLE PLANT Size-Large
  misc_feature: Phenotype: INFLORESCENCE Flowering Time-Late Flowering
  misc_feature: Phenotype: WHOLE PLANT Size-Large
  misc_feature: Phenotype: INFLORESCENCE Flowering Time-Late Flowering
  misc_feature: Phenotype: WHOLE PLANT Size-Large
  misc_feature: Phenotype: INFLORESCENCE Flowering Time-Late Flowering
  misc_feature: Phenotype: WHOLE PLANT Size-Large
  misc_feature: Phenotype: INFLORESCENCE Flowering Time-Late Flowering
aacaccgaatctctcaacacaaacaaaatcacacatctctcttcatctttttgtttcctgcaagaatctgaatctgctttactattgtgtcatcatgatgaacatcgacgatacgacgtctccaatggcccacccgatcggtccatctcagcctccttccgaccaaaccaaacaagatccgccaagtttgccccaagaagcagcttcttctgtttcggccgacaagaaagatctagctttgcttgaagagaaaccgaagcagagtcaagaagaagatagagtggacactgggagagagaggttaaagaagcatcggagagagatcgctggtagggtttggataccggagatatggggacaagaagagcttcttaaggattggatcgattgttcaacgtttgacacgtgtctagtccctgccggaatctcgtctgcacgtactgctctcgtagaggaagctaggcgagctgcttcagcttctggtgggttacataatcgttgcttgatcttacgttgaatttaatataataagataacatacttataaatgtggttcttgttcctcaataatataaggcactattgttacattgttgataatattctaactcattttactcgtaactttatgaaacatt

SEQ ID NO: 26458 - protein, 171 aa, Arabidopsis thaliana
  peptide (1)..(171): Ceres Seq. ID no. 12420536
  misc_feature (62)..(166): Homolog of NCBI NO: 15229972 NR Description: putative protein; protein id: At3g44450.1
  misc_feature (63)..(155): Homolog of NCBI NO: 38346335 NR Description: OSJNBa0073L04.6 [Oryza sativa (japonica
  misc_feature (32)..(171): Homolog of NCBI NO: 18409685 NR Description: expressed protein
TPNLSTQTKSHISLHLFVSCKNLNLLYYCVIMMNIDDTTSPMAHPIGPSQPPSDQTKQDPPSLPQEAASSVSADKKDLALLEEKPKQSQEEDRVDTGRERLKKHRREIAGRVWIPEIWGQEELLKDWIDCSTFDTCLVPAGISSARTALVEEARRAASASGGLHNRCLILR

SEQ ID NO: 26459 - protein, 140 aa, Arabidopsis thaliana
  peptide (1)..(140): Ceres Seq. ID no. 12420537
  misc_feature (31)..(135): Homolog of NCBI NO: 15229972 NR Description: putative protein; protein id: At3g44450.1
  misc_feature (32)..(124): Homolog of NCBI NO: 38346335 NR Description: OSJNBa0073L04.6 [Oryza sativa (japonica
  misc_feature (1)..(140): Homolog of NCBI NO: 18409685 NR Description: expressed protein
MMNIDDTTSPMAHPIGPSQPPSDQTKQDPPSLPQEAASSVSADKKDLALLEEKPKQSQEEDRVDTGRERLKKHRREIAGRVWIPEIWGQEELLKDWIDCSTFDTCLVPAGISSARTALVEEARRAASASGGLHNRCLILR

SEQ ID NO: 26460 - protein, 139 aa, Arabidopsis thaliana
  peptide (1)..(139): Ceres Seq. ID no. 12420538
  misc_feature (30)..(134): Homolog of NCBI NO: 15229972 NR Description: putative protein; protein id: At3g44450.1
  misc_feature (31)..(123): Homolog of NCBI NO: 38346335 NR Description: OSJNBa0073L04.6 [Oryza sativa (japonica
  misc_feature (1)..(139): Homolog of NCBI NO: 18409685 NR Description: expressed protein
MNIDDTTSPMAHPIGPSQPPSDQTKQDPPSLPQEAASSVSADKKDLALLEEKPKQSQEEDRVDTGRERLKKHRREIAGRVWIPEIWGQEELLKDWIDCSTFDTCLVPAGISSARTALVEEARRAASASGGLHNRCLILR

SEQ ID NO: 26461 - DNA, 786 bp, Arabidopsis thaliana
  misc_feature (1)..(786): Ceres Seq. ID no. 12338746
  misc_feature: MA Experiment ID: 108434 Result: Down-regulated in Transcription
  misc_feature: MA Experiment 108434 PARAMETER Experiment Name: At_Root_Tips_cDNA_P Parameter: Tissue Value: Root Tips
  misc_feature: MA Experiment ID: 108488 Result: Down-regulated in Transcription
  misc_feature: MA Experiment ID: 108573 Result: Up-regulated in Transcription
  misc_feature: MA Experiment 108573 PARAMETER Experiment Name: At_Drought_cDNA_P Parameter: Timepoint (hr) Value: 6
  misc_feature: MA Experiment 108573 PARAMETER Experiment Name: At_Drought_cDNA_P Parameter: Tissue Value: Aerial
  misc_feature: MA Experiment 108573 PARAMETER Experiment Name: At_Drought_cDNA_P Parameter: Treatment Value: Drought vs. No Drought
  misc_feature: MA Experiment ID: 108668 Result: Up-regulated in Transcription
  misc_feature: MA Experiment 108668 PARAMETER Experiment Name: At_2mM_SA_cDNA_P Parameter: Plant Line Value: WS
  misc_feature: MA Experiment 108668 PARAMETER Experiment Name: At_2mM_SA_cDNA_P Parameter: Timepoint (hr) Value: 6
  misc_feature: MA Experiment 108668 PARAMETER Experiment Name: At_2mM_SA_cDNA_P Parameter: Treatment Value: 2mM SA vs. No Treatment
  misc_feature: MA Experiment ID: 20000113 Result: Up-regulated in Transcription
  misc_feature: MA Experiment 20000113 PARAMETER Experiment Name: At_42deg_Heat_cDNA_P Parameter: Temperature (deg C) Value: 42 vs. 22
  misc_feature: MA Experiment 20000113 PARAMETER Experiment Name: At_42deg_Heat_cDNA_P Parameter: Timepoint (hr) Value: 8
  misc_feature: MA Experiment 20000113 PARAMETER Experiment Name: At_42deg_Heat_cDNA_P Parameter: Tissue Value: Aerial
  misc_feature: MA Experiment ID: 20000173 Result: Up-regulated in Transcription
  misc_feature: MA Experiment 20000173 PARAMETER Experiment Name: At_42deg_Heat_P Parameter: Age (day) Value: 14
  misc_feature: MA Experiment 20000173 PARAMETER Experiment Name: At_42deg_Heat_P Parameter: Organism Value: A. thaliana
  misc_feature: MA Experiment 20000173 PARAMETER Experiment Name: At_42deg_Heat_P Parameter: Plant Line Value: WS
  misc_feature: MA Experiment 20000173 PARAMETER Experiment Name: At_42deg_Heat_P Parameter: Temperature (deg C) Value: 42 vs. 22
  misc_feature: MA Experiment 20000173 PARAMETER Experiment Name: At_42deg_Heat_P Parameter: Timepoint (hr) Value: 6
  misc_feature: MA Experiment 20000173 PARAMETER Experiment Name: At_42deg_Heat_P Parameter: Tissue Value: Aerial
  misc_feature: MA Experiment ID: 20000180 Result: Up-regulated in Transcription
  misc_feature: MA Experiment 20000180 PARAMETER Experiment Name: At_Germinating_Seeds_P Parameter: Age (hr) Value: 24 vs. 0
  misc_feature: MA Experiment 20000180 PARAMETER Experiment Name: At_Germinating_Seeds_P Parameter: Tissue Value: Germinating Seeds
  misc_feature: MA Experiment ID: 20000185 Result: Down-regulated in Transcription
  misc_feature: MA Experiment 20000185 PARAMETER Experiment Name: At_Roots__P Parameter: Age (day) Value: 7 vs. 21
  misc_feature: MA Experiment 20000185 PARAMETER Experiment Name: At_Roots__P Parameter: Organism Value: A. thaliana
  misc_feature: MA Experiment 20000185 PARAMETER Experiment Name: At_Roots__P Parameter: Tissue Value: Roots vs. Whole Plant
  misc_feature: MA Experiment ID: 20000234 Result: Down-regulated in Transcription
  misc_feature: MA Experiment 20000234 PARAMETER Experiment Name: At_Siliques_P Parameter: Age (day) Value: 21
  misc_feature: MA Experiment 20000234 PARAMETER Experiment Name: At_Siliques_P Parameter: Organism Value: A. thaliana
  misc_feature: MA Experiment 20000234 PARAMETER Experiment Name: At_Siliques_P Parameter: Plant Line Value: WS
  misc_feature: MA Experiment 20000234 PARAMETER Experiment Name: At_Siliques_P Parameter: Tissue Value: Less Than 5mm Siliques vs. Whole Plant
  misc_feature: MA Experiment ID: 20000437 Result: Up-regulated in Transcription
  misc_feature: MA Experiment 20000437 PARAMETER Experiment Name: At_Drought_P Parameter: Age (day) Value: 8
  misc_feature: MA Experiment 20000437 PARAMETER Experiment Name: At_Drought_P Parameter: Organism Value: A. thaliana
  misc_feature: MA Experiment 20000437 PARAMETER Experiment Name: At_Drought_P Parameter: Plant Line Value: WS
  misc_feature: MA Experiment 20000437 PARAMETER Experiment Name: At_Drought_P Parameter: Timepoint (hr) Value: 24
  misc_feature: MA Experiment 20000437 PARAMETER Experiment Name: At_Drought_P Parameter: Tissue Value: Whole Plant
  misc_feature: MA Experiment 20000437 PARAMETER Experiment Name: At_Drought_P Parameter: Treatment Value: Drought vs. No Drought
  misc_feature: MA Experiment ID: 20000438 Result: Down-regulated in Transcription
  misc_feature: MA Experiment 20000438 PARAMETER Experiment Name: At_Shoots__P Parameter: Age (day) Value: 14
  misc_feature: MA Experiment 20000438 PARAMETER Experiment Name: At_Shoots__P Parameter: Tissue Value: Shoots vs. Whole Plant
  misc_feature: MA Experiment ID: 20000439 Result: Down-regulated in Transcription
  misc_feature: MA Experiment 20000439 PARAMETER Experiment Name: At_Roots__P Parameter: Age (day) Value: 14 vs. 21
  misc_feature: MA Experiment 20000439 PARAMETER Experiment Name: At_Roots__P Parameter: Organism Value: A. thaliana
  misc_feature: MA Experiment 20000439 PARAMETER Experiment Name: At_Roots__P Parameter: Tissue Value: Roots vs. Whole Plant
  misc_feature: MA Experiment ID: 20000794 Result: Up-regulated in Transcription
  misc_feature: MA Experiment 20000794 PARAMETER Experiment Name: At_Petals_P Parameter: Age (day) Value: 23-25 days
  misc_feature: MA Experiment 20000794 PARAMETER Experiment Name: At_Petals_P Parameter: Plant Line Value: WS
  misc_feature: MA Experiment 20000794 PARAMETER Experiment Name: At_Petals_P Parameter: Tissue Value: Petals vs. Whole plant
  misc_feature: MA Experiment ID: 20001558 Result: Down-regulated in Transcription
  misc_feature: MA Experiment 20001558 PARAMETER Experiment Name: At_Drought_Soil_Dry_P Parameter: Age (day) Value: 27
  misc_feature: MA Experiment 20001558 PARAMETER Experiment Name: At_Drought_Soil_Dry_P Parameter: Organism Value: A. thaliana
  misc_feature: MA Experiment 20001558 PARAMETER Experiment Name: At_Drought_Soil_Dry_P Parameter: Plant Line Value: WS
  misc_feature: MA Experiment 20001558 PARAMETER Experiment Name: At_Drought_Soil_Dry_P Parameter: Post Timepoint (hr) Value: 6
  misc_feature: MA Experiment 20001558 PARAMETER Experiment Name: At_Drought_Soil_Dry_P Parameter: Post-Treatment Value: Re-Water vs. No Drought
  misc_feature: MA Experiment 20001558 PARAMETER Experiment Name: At_Drought_Soil_Dry_P Parameter: Timepoint (day) Value: 13
  misc_feature: MA Experiment 20001558 PARAMETER Experiment Name: At_Drought_Soil_Dry_P Parameter: Treatment Value: Drought vs. No Drought
accaaaactctctttttctgtgcaaacactttggaggattcttctaggcttctttctaccacaaacacaagagcgcgttttcttcacgccggcgaacaacgtcagagtcatggccaccggagatgggaaatcggtgatggtcgtcggagttgacgacagcgagcagagcacttacgccttggagtggacgctcgatcgtttcttcgctccttacgctcccaattatccttttaagctcttcatcgtccacgccaaacctaacgccgtctccgccgttggtctcgctggtcccggaactgcggaggttgtaccttatgttgatgctgatctgaagcataccgctgctaaggttgtcgagaaagccaaagcaatttgtcagagcagatcggttcatggcgcggtgatcgaagttttcgaaggtgatgcaaggaatatcctatgtgaagttgtagataagcatcatgcttctattcttgttgtgggaagccatggatatggagctatcaagagggcggttctcgggagtacgagtgactactgcgctcatcatgctcattgctcggtgatgatcgtgaagaagcctaagatcaaggtctgaaacctaagggaaggctactcggtcaaagcaaagtctctgcatagtcttctaattcagaagaataaagtgaaataatattagcttgatgtgaaacaacgattcaagacaatatacatttgcatctatatgtgtaattgtttactacatacaatgttttggtatccttagacaatcaatattcgtgtgtt

SEQ ID NO: 26462 - protein, 198 aa, Arabidopsis thaliana
  peptide (1)..(198): Ceres Seq. ID no. 12338747
  misc_feature (170)..(195): Homolog of NCBI NO: 30681959 NR Description: ethylene-responsive protein -related [Arabidopsis
  misc_feature (46)..(170): Homolog of NCBI NO: 30681959 NR Description: ethylene-responsive protein -related [Arabidopsis
  misc_feature (46)..(195): Homolog of NCBI NO: 30681955 NR Description: ethylene-responsive protein -related [Arabidopsis
  misc_feature (46)..(195): Homolog of NCBI NO: 18399413 NR Description: ethylene-responsive protein, putative
  misc_feature (37)..(155): Homolog of NCBI NO: 15239780 NR Description: unknown protein; protein id: At5g49050.1
  misc_feature (37)..(197): Homolog of NCBI NO: 20067187 NR Description: putative universal stress protein USP1
  misc_feature (38)..(197): Homolog of NCBI NO: 22831145 NR Description: contains ESTs
  misc_feature (48)..(197): Homolog of NCBI NO: 38016525 NR Description: fiber protein Fb19 [Gossypium barbadense]
  misc_feature (37)..(198): Homolog of NCBI NO: 21555580 NR Description: unknown [Arabidopsis thaliana]
  misc_feature (37)..(198): Homolog of NCBI NO: 18407428 NR Description: expressed protein
PKLSFSVQTLWRILLGFFLPQTQERVFFTPANNVRVMATGDGKSVMVVGVDDSEQSTYALEWTLDRFFAPYAPNYPFKLFIVHAKPNAVSAVGLAGPGTAEVVPYVDADLKHTAAKVVEKAKAICQSRSVHGAVIEVFEGDARNILCEVVDKHHASILVVGSHGYGAIKRAVLGSTSDYCAHHAHCSVMIVKKPKIKV

SEQ ID NO: 26463 - protein, 162 aa, Arabidopsis thaliana
  peptide (1)..(162): Ceres Seq. ID no. 12338748
  misc_feature (134)..(159): Homolog of NCBI NO: 30681959 NR Description: ethylene-responsive protein -related [Arabidopsis
  misc_feature (10)..(134): Homolog of NCBI NO: 30681959 NR Description: ethylene-responsive protein -related [Arabidopsis
  misc_feature (10)..(159): Homolog of NCBI NO: 30681955 NR Description: ethylene-responsive protein -related [Arabidopsis
  misc_feature (10)..(159): Homolog of NCBI NO: 18399413 NR Description: ethylene-responsive protein, putative
  misc_feature (1)..(119): Homolog of NCBI NO: 15239780 NR Description: unknown protein; protein id: At5g49050.1
  misc_feature (1)..(161): Homolog of NCBI NO: 20067187 NR Description: putative universal stress protein USP1
  misc_feature (2)..(161): Homolog of NCBI NO: 22831145 NR Description: contains ESTs
  misc_feature (12)..(161): Homolog of NCBI NO: 38016525 NR Description: fiber protein Fb19 [Gossypium barbadense]
  misc_feature (1)..(162): Homolog of NCBI NO: 21555580 NR Description: unknown [Arabidopsis thaliana]
  misc_feature (1)..(162): Homolog of NCBI NO: 18407428 NR Description: expressed protein
MATGDGKSVMVVGVDDSEQSTYALEWTLDRFFAPYAPNYPFKLFIVHAKPNAVSAVGLAGPGTAEVVPYVDADLKHTAAKVVEKAKAICQSRSVHGAVIEVFEGDARNILCEVVDKHHASILVVGSHGYGAIKRAVLGSTSDYCAHHAHCSVMIVKKPKIKV

SEQ ID NO: 26464 - protein, 153 aa, Arabidopsis thaliana
  peptide (1)..(153): Ceres Seq. ID no. 12338749
  misc_feature (125)..(150): Homolog of NCBI NO: 30681959 NR Description: ethylene-responsive protein -related [Arabidopsis
  misc_feature (1)..(125): Homolog of NCBI NO: 30681959 NR Description: ethylene-responsive protein -related [Arabidopsis
  misc_feature (1)..(150): Homolog of NCBI NO: 30681955 NR Description: ethylene-responsive protein -related [Arabidopsis
  misc_feature (1)..(150): Homolog of NCBI NO: 18399413 NR Description: ethylene-responsive protein, putative
  misc_feature (1)..(110): Homolog of NCBI NO: 15239780 NR Description: unknown protein; protein id: At5g49050.1
  misc_feature (1)..(152): Homolog of NCBI NO: 20067187 NR Description: putative universal stress protein USP1
  misc_feature (1)..(152): Homolog of NCBI NO: 22831145 NR Description: contains ESTs
  misc_feature (3)..(152): Homolog of NCBI NO: 38016525 NR Description: fiber protein Fb19 [Gossypium barbadense]
  misc_feature (1)..(153): Homolog of NCBI NO: 21555580 NR Description: unknown [Arabidopsis thaliana]
  misc_feature (1)..(153): Homolog of NCBI NO: 18407428 NR Description: expressed protein
MVVGVDDSEQSTYALEWTLDRFFAPYAPNYPFKLFIVHAKPNAVSAVGLAGPGTAEVVPYVDADLKHTAAKVVEKAKAICQSRSVHGAVIEVFEGDARNILCEVVDKHHASILVVGSHGYGAIKRAVLGSTSDYCAHHAHCSVMIVKKPKIKV

SEQ ID NO: 26465 - DNA, 967 bp, Arabidopsis thaliana
  misc_feature (1)..(967): Ceres Seq. ID no. 13490298
  misc_feature: MA Experiment ID: 20000184 Result: Up-regulated in Transcription
  misc_feature: MA Experiment 20000184 PARAMETER Experiment Name: At_Shoots__P Parameter: Age (day) Value: 7
  misc_feature: MA Experiment 20000184 PARAMETER Experiment Name: At_Shoots__P Parameter: Tissue Value: Shoots vs. Whole Plant
  misc_feature: MA Experiment ID: 20001451 Result: Down-regulated in Transcription
  misc_feature: MA Experiment 20001451 PARAMETER Experiment Name: At_Far-red-induction_P Parameter: Age (day) Value: 7
  misc_feature: MA Experiment 20001451 PARAMETER Experiment Name: At_Far-red-induction_P Parameter: Light Value: Far-red vs. White
  misc_feature: MA Experiment 20001451 PARAMETER Experiment Name: At_Far-red-induction_P Parameter: Organism Value: A. thaliana
  misc_feature: MA Experiment 20001451 PARAMETER Experiment Name: At_Far-red-induction_P Parameter: Plant Line Value: Columbia
  misc_feature: MA Experiment 20001451 PARAMETER Experiment Name: At_Far-red-induction_P Parameter: Timepoint (hr) Value: 24
  misc_feature: MA Experiment 20001451 PARAMETER Experiment Name: At_Far-red-induction_P Parameter: Tissue Value: Whole Plant
atcttcaatttcgaatcgataaccctaatttctcacagacgagcaagagaaagagccaaagccgtttcttcaggtaacttgaggatgtcgcgtgtgtatgttggtaatttggatccgcgagttactgaacgtgaactcgaggatgagtttcgttcctttggtgtgatcaggagtgtctgggttgctagaagacctcctggttacgcttttcttgattttgaagattcaagagatgcccgtgacgccatccgtgaagtagatggcaagaatggatggagggtagagcagtctcataaccgtggtggtggtggaggtcgtggtggtggtcgtggaggaggtgatggtggtcgtggacgtggtggttctgatttgaagtgctatgagtgtggtgagtctggtcactttgcacgtgaatgtcgttctcgtggtggttctggtggtaggcgtcgtagccgcagccgtagtcgcagtcctcctagatacagaaagagtcctacctatggaggacgaagaagttacagccctcgtgctagatctcctcctcctccaagacgtcgtagtccttctcctcgtggtcgcaactacagtaggtcaccaccaccttatagagcacgtgacgaggtgccatatgctaatggaaatggtctgaaagatgtgcgcagaagccggagctgagtgttacttgtctagatagcaaattatgggatcaggagacaactatttgcttgtgacgtcaagaggagaggaaattagtatctgtgaatttcactaagagaatatgttttagctgtgtggtggattggatatgcttgctgcttttgaattgctggaaagcttcttattgcgtttggattatgaagccatagttgtatctgccgttaggtaaagtacttttaaatatctacccatgttcttaaaagacataaacaaaagctctgctaaaaacctatgcattttctttgttttt

SEQ ID NO: 26466 - protein, 224 aa, Arabidopsis thaliana
  peptide (1)..(224): Ceres Seq. ID no. 13490299
  misc_feature (32)..(89): Pfam Name: RNA recognition motif. (a.k.a. RRM, RBD, or RNP domain) Pfam Description: RNA recognition motif. (a.k.a. RRM, RBD, or RNP
  misc_feature (30)..(179): Homolog of NCBI NO: 29841408 NR Description: similar to NM_006276 splicing factor,
  misc_feature (30)..(210): Homolog of NCBI NO: 25144919 NR Description: pre-mRNA splicing SR Protein RSP-6 (20.5 kD)
  misc_feature (31)..(218): Homolog of NCBI NO: 24582360 NR Description: CG10203-PA [Drosophila melanogaster]
  misc_feature (6)..(224): Homolog of NCBI NO: 31222328 NR Description: ENSANGP00000018287 [Anopheles gambiae]
  misc_feature (29)..(209): Homolog of NCBI NO: 25294319 NR Description: splicing factor RSZp21 [imported] - Arabidopsis
  misc_feature (29)..(209): Homolog of NCBI NO: 25294317 NR Description: protein T23E23.2 [imported] - Arabidopsis
  misc_feature (29)..(209): Homolog of NCBI NO: 18395314 NR Description: splicing factor SRZ_21 [Arabidopsis thaliana]
  misc_feature (29)..(224): Homolog of NCBI NO: 25294318 NR Description: splicing factor RSZp22 [validated] - Arabidopsis
  misc_feature (29)..(224): Homolog of NCBI NO: 15236000 NR Description: splicing factor SRZ_22 [Arabidopsis thaliana]
  misc_feature (29)..(224): Homolog of NCBI NO: 15224171 NR Description: RSZp22 splicing factor -related [Arabidopsis
IFNFESITLISHRRARERAKAVSSGNLRMSRVYVGNLDPRVTERELEDEFRSFGVIRSVWVARRPPGYAFLDFEDSRDARDAIREVDGKNGWRVEQSHNRGGGGGRGGGRGGGDGGRGRGGSDLKCYECGESGHFARECRSRGGSGGRRRSRSRSRSPPRYRKSPTYGGRRSYSPRARSPPPPRRRSPSPRGRNYSRSPPPYRARDEVPYANGNGLKDVRRSRS

SEQ ID NO: 26467 - protein, 196 aa, Arabidopsis thaliana
  peptide (1)..(196): Ceres Seq. ID no. 13490300
  misc_feature (4)..(61): Pfam Name: RNA recognition motif. (a.k.a. RRM, RBD, or RNP domain) Pfam Description: RNA recognition motif. (a.k.a. RRM, RBD, or RNP
  misc_feature (2)..(151): Homolog of NCBI NO: 29841408 NR Description: similar to NM_006276 splicing factor,
  misc_feature (2)..(182): Homolog of NCBI NO: 25144919 NR Description: pre-mRNA splicing SR Protein RSP-6 (20.5 kD)
  misc_feature (3)..(190): Homolog of NCBI NO: 24582360 NR Description: CG10203-PA [Drosophila melanogaster]
  misc_feature (1)..(196): Homolog of NCBI NO: 31222328 NR Description: ENSANGP00000018287 [Anopheles gambiae]
  misc_feature (1)..(181): Homolog of NCBI NO: 25294319 NR Description: splicing factor RSZp21 [imported] - Arabidopsis
  misc_feature (1)..(181): Homolog of NCBI NO: 25294317 NR Description: protein T23E23.2 [imported] - Arabidopsis
  misc_feature (1)..(181): Homolog of NCBI NO: 18395314 NR Description: splicing factor SRZ_21 [Arabidopsis thaliana]
  misc_feature (1)..(196): Homolog of NCBI NO: 25294318 NR Description: splicing factor RSZp22 [validated] - Arabidopsis
  misc_feature (1)..(196): Homolog of NCBI NO: 15236000 NR Description: splicing factor SRZ_22 [Arabidopsis thaliana]
  misc_feature (1)..(196): Homolog of NCBI NO: 15224171 NR Description: RSZp22 splicing factor -related [Arabidopsis
MSRVYVGNLDPRVTERELEDEFRSFGVIRSVWVARRPPGYAFLDFEDSRDARDAIREVDGKNGWRVEQSHNRGGGGGRGGGRGGGDGGRGRGGSDLKCYECGESGHFARECRSRGGSGGRRRSRSRSRSPPRYRKSPTYGGRRSYSPRARSPPPPRRRSPSPRGRNYSRSPPPYRARDEVPYANGNGLKDVRRSRS

SEQ ID NO: 26468 - DNA, 1999 bp, Arabidopsis thaliana
  misc_feature (1)..(1999): Ceres Seq. ID no. 12327028
  misc_feature: MA Experiment ID: 108434 Result: Up-regulated in Transcription
  misc_feature: MA Experiment 108434 PARAMETER Experiment Name: At_Root_Tips_cDNA_P Parameter: Tissue Value: Root Tips
  misc_feature: MA Experiment ID: 108463 Result: Down-regulated in Transcription
  misc_feature: MA Experiment 108463 PARAMETER Experiment Name: At_Germinating_Seeds_cDNA_P Parameter: Age (day) Value: 3 vs. 0
  misc_feature: MA Experiment 108463 PARAMETER Experiment Name: At_Germinating_Seeds_cDNA_P Parameter: Tissue Value: Germinating Seeds
  misc_feature: MA Experiment ID: 108572 Result: Down-regulated in Transcription
  misc_feature: MA Experiment 108572 PARAMETER Experiment Name: At_Drought_cDNA_P Parameter: Timepoint (hr) Value: 1
  misc_feature: MA Experiment 108572 PARAMETER Experiment Name: At_Drought_cDNA_P Parameter: Tissue Value: Aerial
  misc_feature: MA Experiment 108572 PARAMETER Experiment Name: At_Drought_cDNA_P Parameter: Treatment Value: Drought vs. No Drought
  misc_feature: MA Experiment ID: 108573 Result: Down-regulated in Transcription
  misc_feature: MA Experiment 108573 PARAMETER Experiment Name: At_Drought_cDNA_P Parameter: Timepoint (hr) Value: 6
  misc_feature: MA Experiment 108573 PARAMETER Experiment Name: At_Drought_cDNA_P Parameter: Tissue Value: Aerial
  misc_feature: MA Experiment 108573 PARAMETER Experiment Name: At_Drought_cDNA_P Parameter: Treatment Value: Drought vs. No Drought
  misc_feature: MA Experiment ID: 20000087 Result: Up-regulated in Transcription
  misc_feature: MA Experiment 20000087 PARAMETER Experiment Name: At_100uM_ABA_Mutants_cDNA_P Parameter: Plant Line Value: WS
  misc_feature: MA Experiment 20000087 PARAMETER Experiment Name: At_100uM_ABA_Mutants_cDNA_P Parameter: Timepoint (hr) Value: 6
  misc_feature: MA Experiment 20000087 PARAMETER Experiment Name: At_100uM_ABA_Mutants_cDNA_P Parameter: Tissue Value: Aerial
  misc_feature: MA Experiment 20000087 PARAMETER Experiment Name: At_100uM_ABA_Mutants_cDNA_P Parameter: Treatment Value: 100uM ABA vs. No Treatment
  misc_feature: MA Experiment ID: 20000089 Result: Up-regulated in Transcription
  misc_feature: MA Experiment ID: 20000090 Result: Up-regulated in Transcription
  misc_feature: MA Experiment ID: 20000093 Result: Up-regulated in Transcription
  misc_feature: MA Experiment 20000093 PARAMETER Experiment Name: At_42deg_Heat_cDNA_P Parameter: Temperature (deg C) Value: 42 vs. 22
  misc_feature: MA Experiment 20000093 PARAMETER Experiment Name: At_42deg_Heat_cDNA_P Parameter: Timepoint (hr) Value: 0.5
  misc_feature: MA Experiment 20000093 PARAMETER Experiment Name: At_42deg_Heat_cDNA_P Parameter: Tissue Value: Aerial
  misc_feature: MA Experiment ID: 20000111 Result: Up-regulated in Transcription
  misc_feature: MA Experiment 20000111 PARAMETER Experiment Name: At_42deg_Heat_cDNA_P Parameter: Temperature (deg C) Value: 42 vs. 22
  misc_feature: MA Experiment 20000111 PARAMETER Experiment Name: At_42deg_Heat_cDNA_P Parameter: Timepoint (hr) Value: 6
  misc_feature: MA Experiment 20000111 PARAMETER Experiment Name: At_42deg_Heat_cDNA_P Parameter: Tissue Value: Aerial
  misc_feature: MA Experiment ID: 20000112 Result: Up-regulated in Transcription
  misc_feature: MA Experiment 20000112 PARAMETER Experiment Name: At_42deg_Heat_cDNA_P Parameter: Temperature (deg C) Value: 42 vs. 22
  misc_feature: MA Experiment 20000112 PARAMETER Experiment Name: At_42deg_Heat_cDNA_P Parameter: Timepoint (hr) Value: 2
  misc_feature: MA Experiment 20000112 PARAMETER Experiment Name: At_42deg_Heat_cDNA_P Parameter: Tissue Value: Aerial
  misc_feature: MA Experiment ID: 20000113 Result: Up-regulated in Transcription
  misc_feature: MA Experiment 20000113 PARAMETER Experiment Name: At_42deg_Heat_cDNA_P Parameter: Temperature (deg C) Value: 42 vs. 22
  misc_feature: MA Experiment 20000113 PARAMETER Experiment Name: At_42deg_Heat_cDNA_P Parameter: Timepoint (hr) Value: 8
  misc_feature: MA Experiment 20000113 PARAMETER Experiment Name: At_42deg_Heat_cDNA_P Parameter: Tissue Value: Aerial
  misc_feature: MA Experiment ID: 20000144 Result: Up-regulated in Transcription
  misc_feature: MA Experiment 20000144 PARAMETER Experiment Name: At_42deg_Heat_cDNA_P Parameter: Temperature (deg C) Value: 42 vs. 22
  misc_feature: MA Experiment 20000144 PARAMETER Experiment Name: At_42deg_Heat_cDNA_P Parameter: Timepoint (hr) Value: 1
  misc_feature: MA Experiment 20000144 PARAMETER Experiment Name: At_42deg_Heat_cDNA_P Parameter: Tissue Value: Aerial
  misc_feature: MA Experiment ID: 20000171 Result: Up-regulated in Transcription
  misc_feature: MA Experiment 20000171 PARAMETER Experiment Name: At_42deg_Heat_P Parameter: Age (day) Value: 14
  misc_feature: MA Experiment 20000171 PARAMETER Experiment Name: At_42deg_Heat_P Parameter: Organism Value: A. thaliana
  misc_feature: MA Experiment 20000171 PARAMETER Experiment Name: At_42deg_Heat_P Parameter: Plant Line Value: WS
  misc_feature: MA Experiment 20000171 PARAMETER Experiment Name: At_42deg_Heat_P Parameter: Temperature (deg C) Value: 42 vs. 22
  misc_feature: MA Experiment 20000171 PARAMETER Experiment Name: At_42deg_Heat_P Parameter: Timepoint (hr) Value: 1
  misc_feature: MA Experiment 20000171 PARAMETER Experiment Name: At_42deg_Heat_P Parameter: Tissue Value: Aerial
  misc_feature: MA Experiment ID: 20000173 Result: Up-regulated in Transcription
  misc_feature: MA Experiment 20000173 PARAMETER Experiment Name: At_42deg_Heat_P Parameter: Age (day) Value: 14
  misc_feature: MA Experiment 20000173 PARAMETER Experiment Name: At_42deg_Heat_P Parameter: Organism Value: A. thaliana
  misc_feature: MA Experiment 20000173 PARAMETER Experiment Name: At_42deg_Heat_P Parameter: Plant Line Value: WS
  misc_feature: MA Experiment 20000173 PARAMETER Experiment Name: At_42deg_Heat_P Parameter: Temperature (deg C) Value: 42 vs. 22
  misc_feature: MA Experiment 20000173 PARAMETER Experiment Name: At_42deg_Heat_P Parameter: Timepoint (hr) Value: 6
  misc_feature: MA Experiment 20000173 PARAMETER Experiment Name: At_42deg_Heat_P Parameter: Tissue Value: Aerial
  misc_feature: MA Experiment ID: 20000179 Result: Up-regulated in Transcription
  misc_feature: MA Experiment 20000179 PARAMETER Experiment Name: At_Germinating_Seeds_P Parameter: Age (hr) Value: 6 vs. 0
  misc_feature: MA Experiment 20000179 PARAMETER Experiment Name: At_Germinating_Seeds_P Parameter: Tissue Value: Germinating Seeds
  misc_feature: MA Experiment ID: 20000224 Result: Up-regulated in Transcription
  misc_feature: MA Experiment ID: 20000227 Result: Up-regulated in Transcription
  misc_feature: MA Experiment 20000227 PARAMETER Experiment Name: At_Root-Tips-vs-Tops_P Parameter: Tissue Value: Root Tips vs. Root Tops
  misc_feature: MA Experiment ID: 20000437 Result: Down-regulated in Transcription
  misc_feature: MA Experiment 20000437 PARAMETER Experiment Name: At_Drought_P Parameter: Age (day) Value: 8
  misc_feature: MA Experiment 20000437 PARAMETER Experiment Name: At_Drought_P Parameter: Organism Value: A. thaliana
  misc_feature: MA Experiment 20000437 PARAMETER Experiment Name: At_Drought_P Parameter: Plant Line Value: WS
  misc_feature: MA Experiment 20000437 PARAMETER Experiment Name: At_Drought_P Parameter: Timepoint (hr) Value: 24
  misc_feature: MA Experiment 20000437 PARAMETER Experiment Name: At_Drought_P Parameter: Tissue Value: Whole Plant
  misc_feature: MA Experiment 20000437 PARAMETER Experiment Name: At_Drought_P Parameter: Treatment Value: Drought vs. No Drought
  misc_feature: MA Experiment ID: 20000495 Result: Up-regulated in Transcription
  misc_feature: MA Experiment 20000495 PARAMETER Experiment Name: At_Guard_Cells_P Parameter: Harvest Date Value: 8/2/2002
  misc_feature: MA Experiment 20000495 PARAMETER Experiment Name: At_Guard_Cells_P Parameter: Organism Value: A. thaliana
  misc_feature: MA Experiment 20000495 PARAMETER Experiment Name: At_Guard_Cells_P Parameter: Tissue Value: Guard Cells vs. Leaves
  misc_feature: MA Experiment ID: 20001450 Result: Down-regulated in Transcription
  misc_feature: MA Experiment 20001450 PARAMETER Experiment Name: At_Far-red-induction_P Parameter: Age (day) Value: 7
  misc_feature: MA Experiment 20001450 PARAMETER Experiment Name: At_Far-red-induction_P Parameter: Light Value: Far-red vs. White
  misc_feature: MA Experiment 20001450 PARAMETER Experiment Name: At_Far-red-induction_P Parameter: Organism Value: A. thaliana
  misc_feature: MA Experiment 20001450 PARAMETER Experiment Name: At_Far-red-induction_P Parameter: Plant Line Value: Columbia
  misc_feature: MA Experiment 20001450 PARAMETER Experiment Name: At_Far-red-induction_P Parameter: Timepoint (hr) Value: 8
  misc_feature: MA Experiment 20001450 PARAMETER Experiment Name: At_Far-red-induction_P Parameter: Tissue Value: Whole Plant
  misc_feature: MA Experiment ID: 20001558 Result: Up-regulated in Transcription
  misc_feature: MA Experiment 20001558 PARAMETER Experiment Name: At_Drought_Soil_Dry_P Parameter: Age (day) Value: 27
  misc_feature: MA Experiment 20001558 PARAMETER Experiment Name: At_Drought_Soil_Dry_P Parameter: Organism Value: A. thaliana
  misc_feature: MA Experiment 20001558 PARAMETER Experiment Name: At_Drought_Soil_Dry_P Parameter: Plant Line Value: WS
  misc_feature: MA Experiment 20001558 PARAMETER Experiment Name: At_Drought_Soil_Dry_P Parameter: Post Timepoint (hr) Value: 6
  misc_feature: MA Experiment 20001558 PARAMETER Experiment Name: At_Drought_Soil_Dry_P Parameter: Post-Treatment Value: Re-Water vs. No Drought
  misc_feature: MA Experiment 20001558 PARAMETER Experiment Name: At_Drought_Soil_Dry_P Parameter: Timepoint (day) Value: 13
  misc_feature: MA Experiment 20001558 PARAMETER Experiment Name: At_Drought_Soil_Dry_P Parameter: Treatment Value: Drought vs. No Drought
  misc_feature: MA Experiment ID: 20001560 Result: Up-regulated in Transcription
  misc_feature: MA Experiment 20001560 PARAMETER Experiment Name: At_Drought_Soil_Dry_P Parameter: Age (day) Value: 28
  misc_feature: MA Experiment 20001560 PARAMETER Experiment Name: At_Drought_Soil_Dry_P Parameter: Organism Value: A. thaliana
  misc_feature: MA Experiment 20001560 PARAMETER Experiment Name: At_Drought_Soil_Dry_P Parameter: Plant Line Value: WS
  misc_feature: MA Experiment 20001560 PARAMETER Experiment Name: At_Drought_Soil_Dry_P Parameter: Post Timepoint (hr) Value: None
  misc_feature: MA Experiment 20001560 PARAMETER Experiment Name: At_Drought_Soil_Dry_P Parameter: Post-Treatment Value: None
  misc_feature: MA Experiment 20001560 PARAMETER Experiment Name: At_Drought_Soil_Dry_P Parameter: Timepoint (day) Value: 14
  misc_feature: MA Experiment 20001560 PARAMETER Experiment Name: At_Drought_Soil_Dry_P Parameter: Treatment Value: Drought vs. No Drought
acatatcactctttctccttcacgagggatttttgttccgatctacttctccggcttatcaccgatttagatctaagcctgaggtttccttttgcattttagagattccgagaatgagacaacggcaactattttccgtgtttttgcttctcttagctttcgtttcgttccagaagctttgctactgtgacgatcaaacggttctgtatgaatcgttcgatgagccttttgatggccgctggatcgtttcgaagaatagtgattacgaaggtgtatggaagcatgcaaagagtgaaggacatgaggattatggacttctcgtgagtgagaaggctaggaagtatggaattgtgaaagagcttgacgagcctctaaacctcaaggaaggaactgttgttcttcagtacgaggttcgtttccaggaaggacttgagtgtggtggtgcttacttgaagtacctccgtcctcaggaagctggatggacacctcagggattcgatagtgaatccccttactctatcatgtttgggcctgacaagtgtggaggtacgaacaaagtgcatttcatcttgaagcacaagaatcccaagagtggcgagtacgttgaacaccatctgaagttccctccctctgttccttatgacaagctttcccatgtctacaccgccatcttgaaacccgacaacgaggttagaattttggttgatggagaggagaagaaaaaggccaatttactctctggtgaagactttgagcctgcattgatccctgccaagaccatccctgaccctgaagacaagaaaccagaggattgggacgaaagagccaagattcctgatccaaatgccgtgaagcctgaggactgggatgaggatgcacctatggagattgaagatgaggaagctgagaaacccgaaggatggttagatgatgagcctgaggaggtcgacgaccccgaagcgaccaagcctgaagattgggatgatgaggaagatggtatgtgggaggctcctaaaattgacaaccccaagtgtgaagcagcacctggttgtggtgaatggaagagaccaatgaagaggaatcctgcttacaagggcaaatggagctcacctcttattgataacccggcttacaagggaatctggaaacccagagatatccctaaccctgactactttgagctagacagacccgattacgaacccattgcagccatcggtattgagatctggacaatgcaagatggtatcttgtttgacaacatcttgatagcgaaagacgagaaggtcgctgagacttacagacagaccacttggaagcccaaattcgatgttgagaaagagaaacaaaaggcagaagaggaagctgctggctctgcagatggtctcaagagctaccagaaggttgtattcgacctcttgaacaaggttgcagatttatctttcctaagtgcctacaagtctaagatcacggaactgattgagaaagccgagcaacaaccaaacttaaccattggtgtcctcgtcgccattgtggttgtattcttctcgctcttcctcaagcttatctttggtggcaaaaaggcggcggcacctgtggaaaagaagaaaccagaagtagcggagagttcaaagagtggggatgaggcggagaagaaggaagaaaccgcggcaccacgcaaaaggcaaccgagacgtgataattagaacaagattttaaagtagttttcgaagatgtgaaagaaaagttcagatttatttttctgtttttggttttgggttgaatgttgttttctgctgtagcctataatggtgtaacaccaagtttgagaaatttttgtctttgggcgaagaaaagaaaggaggaatatgtatgtgaagacggtttgttgacagccaaattgtagcttctatttctttttcatccccttcagtagtaacaactggttgcttgaaacattagagttttcttatttgaatcaaaagagtttttataacca

SEQ ID NO: 26469 - protein, 567 aa, Arabidopsis thaliana
  peptide (1)..(567): Ceres Seq. ID no. 12327029
  misc_feature (66)..(423): Pfam Name: Calreticulin family Pfam Description: Calreticulin family
  misc_feature (66)..(423): Pfam Name: Calreticulin family Pfam Description: Calreticulin family
  misc_feature (73)..(556): Homolog of NCBI NO: 40740610 NR Description: hypothetical protein AN3592.2 [Aspergillus
  misc_feature (149)..(564): Homolog of NCBI NO: 7441503 NR Description: calnexin - maize (fragment)
  misc_feature (44)..(566): Homolog of NCBI NO: 11131766 NR Description: Calnexin homolog precursor
  misc_feature (43)..(567): Homolog of NCBI NO: 11131469 NR Description: Calnexin homolog precursor
  misc_feature (67)..(564): Homolog of NCBI NO: 21740628 NR Description: OSJNBb0012E08.10 [Oryza sativa (japonica
  misc_feature (73)..(556): Homolog of NCBI NO: 40740610 NR Description: hypothetical protein AN3592.2 [Aspergillus
  misc_feature (44)..(566): Homolog of NCBI NO: 11131766 NR Description: Calnexin homolog precursor
  misc_feature (67)..(564): Homolog of NCBI NO: 21740628 NR Description: OSJNBb0012E08.10 [Oryza sativa (japonica
  misc_feature (38)..(567): Homolog of NCBI NO: 15240353 NR Description: calnexin - like protein
  misc_feature (38)..(567): Homolog of NCBI NO: 31321896 NR Description: putative papillar cell-specific calnexin
  misc_feature (38)..(567): Homolog of NCBI NO: 15240773 NR Description: calnexin homolog; protein id: At5g07340.1
  misc_feature (38)..(567): Homolog of NCBI NO: 473878 NR Description: calnexin homolog
  misc_feature (43)..(566): Homolog of NCBI NO: 3334138 NR Description: CALNEXIN HOMOLOG PRECURSOR
  misc_feature (43)..(567): Homolog of NCBI NO: 11131469 NR Description: Calnexin homolog precursor
  misc_feature (149)..(564): Homolog of NCBI NO: 7441503 NR Description: calnexin - maize (fragment)
  misc_feature (43)..(566): Homolog of NCBI NO: 3334138 NR Description: CALNEXIN HOMOLOG PRECURSOR
  misc_feature (38)..(567): Homolog of NCBI NO: 473878 NR Description: calnexin homolog
  misc_feature (38)..(567): Homolog of NCBI NO: 15240773 NR Description: calnexin homolog; protein id: At5g07340.1
  misc_feature (38)..(567): Homolog of NCBI NO: 31321896 NR Description: putative papillar cell-specific calnexin
  misc_feature (38)..(567): Homolog of NCBI NO: 15240353 NR Description: calnexin - like protein
ISLFLLHEGFLFRSTSPAYHRFRSKPEVSFCILEIPRMRQRQLFSVFLLLLAFVSFQKLCYCDDQTVLYESFDEPFDGRWIVSKNSDYEGVWKHAKSEGHEDYGLLVSEKARKYGIVKELDEPLNLKEGTVVLQYEVRFQEGLECGGAYLKYLRPQEAGWTPQGFDSESPYSIMFGPDKCGGTNKVHFILKHKNPKSGEYVEHHLKFPPSVPYDKLSHVYTAILKPDNEVRILVDGEEKKKANLLSGEDFEPALIPAKTIPDPEDKKPEDWDERAKIPDPNAVKPEDWDEDAPMEIEDEEAEKPEGWLDDEPEEVDDPEATKPEDWDDEEDGMWEAPKIDNPKCEAAPGCGEWKRPMKRNPAYKGKWSSPLIDNPAYKGIWKPRDIPNPDYFELDRPDYEPIAAIGIEIWTMQDGILFDNILIAKDEKVAETYRQTTWKPKFDVEKEKQKAEEEAAGSADGLKSYQKVVFDLLNKVADLSFLSAYKSKITELIEKAEQQPNLTIGVLVAIVVVFFSLFLKLIFGGKKAAAPVEKKKPEVAESSKSGDEAEKKEETAAPRKRQPRRDN

SEQ ID NO: 26470 - protein, 530 aa, Arabidopsis thaliana
  peptide (1)..(530): Ceres Seq. ID no. 12327030
  misc_feature (29)..(386): Pfam Name: Calreticulin family Pfam Description: Calreticulin family
  misc_feature (29)..(386): Pfam Name: Calreticulin family Pfam Description: Calreticulin family
  misc_feature (36)..(519): Homolog of NCBI NO: 40740610 NR Description: hypothetical protein AN3592.2 [Aspergillus
  misc_feature (112)..(527): Homolog of NCBI NO: 7441503 NR Description: calnexin - maize (fragment)
  misc_feature (7)..(529): Homolog of NCBI NO: 11131766 NR Description: Calnexin homolog precursor
  misc_feature (6)..(530): Homolog of NCBI NO: 11131469 NR Description: Calnexin homolog precursor
  misc_feature (30)..(527): Homolog of NCBI NO: 21740628 NR Description: OSJNBb0012E08.10 [Oryza sativa (japonica
  misc_feature (6)..(530): Homolog of NCBI NO: 11131469 NR Description: Calnexin homolog precursor
  misc_feature (6)..(529): Homolog of NCBI NO: 3334138 NR Description: CALNEXIN HOMOLOG PRECURSOR
  misc_feature (1)..(530): Homolog of NCBI NO: 15240773 NR Description: calnexin homolog; protein id: At5g07340.1
  misc_feature (36)..(519): Homolog of NCBI NO: 40740610 NR Description: hypothetical protein AN3592.2 [Aspergillus
  misc_feature (7)..(529): Homolog of NCBI NO: 11131766 NR Description: Calnexin homolog precursor
  misc_feature (112)..(527): Homolog of NCBI NO: 7441503 NR Description: calnexin - maize (fragment)
  misc_feature (1)..(530): Homolog of NCBI NO: 15240353 NR Description: calnexin - like protein
  misc_feature (1)..(530): Homolog of NCBI NO: 31321896 NR Description: putative papillar cell-specific calnexin
  misc_feature (1)..(530): Homolog of NCBI NO: 473878 NR Description: calnexin homolog
  misc_feature (30)..(527): Homolog of NCBI NO: 21740628 NR Description: OSJNBb0012E08.10 [Oryza sativa (japonica
  misc_feature (6)..(529): Homolog of NCBI NO: 3334138 NR Description: CALNEXIN HOMOLOG PRECURSOR
  misc_feature (1)..(530): Homolog of NCBI NO: 473878 NR Description: calnexin homolog
  misc_feature (1)..(530): Homolog of NCBI NO: 15240773 NR Description: calnexin homolog; protein id: At5g07340.1
  misc_feature (1)..(530): Homolog of NCBI NO: 31321896 NR Description: putative papillar cell-specific calnexin
  misc_feature (1)..(530): Homolog of NCBI NO: 15240353 NR Description: calnexin - like protein
MRQRQLFSVFLLLLAFVSFQKLCYCDDQTVLYESFDEPFDGRWIVSKNSDYEGVWKHAKSEGHEDYGLLVSEKARKYGIVKELDEPLNLKEGTVVLQYEVRFQEGLECGGAYLKYLRPQEAGWTPQGFDSESPYSIMFGPDKCGGTNKVHFILKHKNPKSGEYVEHHLKFPPSVPYDKLSHVYTAILKPDNEVRILVDGEEKKKANLLSGEDFEPALIPAKTIPDPEDKKPEDWDERAKIPDPNAVKPEDWDEDAPMEIEDEEAEKPEGWLDDEPEEVDDPEATKPEDWDDEEDGMWEAPKIDNPKCEAAPGCGEWKRPMKRNPAYKGKWSSPLIDNPAYKGIWKPRDIPNPDYFELDRPDYEPIAAIGIEIWTMQDGILFDNILIAKDEKVAETYRQTTWKPKFDVEKEKQKAEEEAAGSADGLKSYQKVVFDLLNKVADLSFLSAYKSKITELIEKAEQQPNLTIGVLVAIVVVFFSLFLKLIFGGKKAAAPVEKKKPEVAESSKSGDEAEKKEETAAPRKRQPRRDN

SEQ ID NO: 26471 - protein, 394 aa, Arabidopsis thaliana
  peptide (1)..(394): Ceres Seq. ID no. 12327031
  misc_feature (1)..(250): Pfam Name: Calreticulin family Pfam Description: Calreticulin family
  misc_feature (1)..(250): Pfam Name: Calreticulin family Pfam Description: Calreticulin family
  misc_feature (1)..(383): Homolog of NCBI NO: 40740610 NR Description: hypothetical protein AN3592.2 [Aspergillus
  misc_feature (1)..(391): Homolog of NCBI NO: 7441503 NR Description: calnexin - maize (fragment)
  misc_feature (1)..(393): Homolog of NCBI NO: 11131766 NR Description: Calnexin homolog precursor
  misc_feature (1)..(394): Homolog of NCBI NO: 11131469 NR Description: Calnexin homolog precursor
  misc_feature (1)..(391): Homolog of NCBI NO: 21740628 NR Description: OSJNBb0012E08.10 [Oryza sativa (japonica
  misc_feature (1)..(383): Homolog of NCBI NO: 40740610 NR Description: hypothetical protein AN3592.2 [Aspergillus
  misc_feature (1)..(393): Homolog of NCBI NO: 11131766 NR Description: Calnexin homolog precursor
  misc_feature (1)..(391): Homolog of NCBI NO: 21740628 NR Description: OSJNBb0012E08.10 [Oryza sativa (japonica
  misc_feature (1)..(394): Homolog of NCBI NO: 15240353 NR Description: calnexin - like protein
  misc_feature (1)..(394): Homolog of NCBI NO: 31321896 NR Description: putative papillar cell-specific calnexin
  misc_feature (1)..(394): Homolog of NCBI NO: 15240773 NR Description: calnexin homolog; protein id: At5g07340.1
  misc_feature (1)..(394): Homolog of NCBI NO: 473878 NR Description: calnexin homolog
  misc_feature (1)..(393): Homolog of NCBI NO: 3334138 NR Description: CALNEXIN HOMOLOG PRECURSOR
  misc_feature (1)..(394): Homolog of NCBI NO: 11131469 NR Description: Calnexin homolog precursor
  misc_feature (1)..(391): Homolog of NCBI NO: 7441503 NR Description: calnexin - maize (fragment)
  misc_feature (1)..(393): Homolog of NCBI NO: 3334138 NR Description: CALNEXIN HOMOLOG PRECURSOR
  misc_feature (1)..(394): Homolog of NCBI NO: 473878 NR Description: calnexin homolog
  misc_feature (1)..(394): Homolog of NCBI NO: 15240773 NR Description: calnexin homolog; protein id: At5g07340.1
  misc_feature (1)..(394): Homolog of NCBI NO: 31321896 NR Description: putative papillar cell-specific calnexin
  misc_feature (1)..(394): Homolog of NCBI NO: 15240353 NR Description: calnexin - like protein
MFGPDKCGGTNKVHFILKHKNPKSGEYVEHHLKFPPSVPYDKLSHVYTAILKPDNEVRILVDGEEKKKANLLSGEDFEPALIPAKTIPDPEDKKPEDWDERAKIPDPNAVKPEDWDEDAPMEIEDEEAEKPEGWLDDEPEEVDDPEATKPEDWDDEEDGMWEAPKIDNPKCEAAPGCGEWKRPMKRNPAYKGKWSSPLIDNPAYKGIWKPRDIPNPDYFELDRPDYEPIAAIGIEIWTMQDGILFDNILIAKDEKVAETYRQTTWKPKFDVEKEKQKAEEEAAGSADGLKSYQKVVFDLLNKVADLSFLSAYKSKITELIEKAEQQPNLTIGVLVAIVVVFFSLFLKLIFGGKKAAAPVEKKKPEVAESSKSGDEAEKKEETAAPRKRQPRRDN

SEQ ID NO: 26472 - DNA, 1246 bp, Arabidopsis thaliana
  misc_feature (1)..(1246): Ceres Seq. ID no. 13591822
  misc_feature: MA Experiment ID: 108433 Result: Down-regulated in Transcription
  misc_feature: MA Experiment 108433 PARAMETER Experiment Name: At_rhl_Mutant2_cDNA_P Parameter: Age (day) Value: 7
  misc_feature: MA Experiment 108433 PARAMETER Experiment Name: At_rhl_Mutant2_cDNA_P Parameter: Organism Value: A. thaliana
  misc_feature: MA Experiment 108433 PARAMETER Experiment Name: At_rhl_Mutant2_cDNA_P Parameter: Plant Line Value: rhl Mutant vs. wt landsburg
  misc_feature: MA Experiment 108433 PARAMETER Experiment Name: At_rhl_Mutant2_cDNA_P Parameter: Tissue Value: Roots
  misc_feature: MA Experiment ID: 108434 Result: Down-regulated in Transcription
  misc_feature: MA Experiment 108434 PARAMETER Experiment Name: At_Root_Tips_cDNA_P Parameter: Tissue Value: Root Tips
  misc_feature: MA Experiment ID: 108461 Result: Up-regulated in Transcription
  misc_feature: MA Experiment 108461 PARAMETER Experiment Name: At_Germinating_Seeds_cDNA_P Parameter: Age (day) Value: 1 vs. 0
  misc_feature: MA Experiment 108461 PARAMETER Experiment Name: At_Germinating_Seeds_cDNA_P Parameter: Tissue Value: Germinating Seeds
  misc_feature: MA Experiment ID: 108462 Result: Up-regulated in Transcription
  misc_feature: MA Experiment 108462 PARAMETER Experiment Name: At_Germinating_Seeds_cDNA_P Parameter: Age (day) Value: 2 vs. 0
  misc_feature: MA Experiment 108462 PARAMETER Experiment Name: At_Germinating_Seeds_cDNA_P Parameter: Tissue Value: Germinating Seeds
  misc_feature: MA Experiment ID: 108464 Result: Up-regulated in Transcription
  misc_feature: MA Experiment 108464 PARAMETER Experiment Name: At_Germinating_Seeds_cDNA_P Parameter: Age (day) Value: 4 vs. 0
  misc_feature: MA Experiment 108464 PARAMETER Experiment Name: At_Germinating_Seeds_cDNA_P Parameter: Tissue Value: Germinating Seeds
  misc_feature: MA Experiment ID: 108488 Result: Up-regulated in Transcription
  misc_feature: MA Experiment ID: 108594 Result: Down-regulated in Transcription
  misc_feature: MA Experiment 108594 PARAMETER Experiment Name: At_Ler-rhl_Root_cDNA_P Parameter: Plant Line Value: null
acttcaccatcagcatcactaaactcgaaccctaaagaaaaacaaaaatggctgccatagcttctactctctctctttcttcaaccaaacctcagagacttttcgattcttccttccatggctcagccatctccgcagctcctatctccatcggtctcaaaccacgatctttctccgttcgcgccacaaccgctggttacgacttgaacgctttcacgttcgacccgatcaaggaatcgatcgtgtcacgtgagatgacgagaaggtacatgacggatatgatcacttacgctgagactgatgttgtcgtcgttggtgctggatctgctggtttatctgctgcttatgagatcagtaagaaccctgatgttcaagttgccattattgagcaatctgttagtcctggtggtggtgcttggctcggtggtcagcttttctccgccatgattgttcgcaaaccagctcacttgttccttgacgagattggtgtggcttacgatgagcaagacacctacgttgtcgttaagcacgctgtctgttcacatcaaccatcatgagcaagcttttgggctcgtcctaatgtgaactcttcaacgcttgttgcagcttaaggatttgattgtgaaaggaaacagagttggtggtgtggggactaactgggctcttgtggctcagaaccatgacacacaatcgtgtatggaccctaatgttatgnaggcgaagattgtggttagctcttgtggtcatgatggtccttttggagcgactggtgttaagaggttgaagagcattgggatgattgatcatgttcctgggatgaaagctttggacatgaacacttgctgaagatgctattgtgaggttgaccagagaggttgttcctggtatgattgttaccggtatggaagttgctgagatcgatggtgcaccgagaatgggaccaacgtttggagctatgatgatatcgggacaaaaggcgggacaacttgctcttaaggctttggggctaccgaatgctattgatggaactctcgtcggaaacctaagcccggagctggtcttagctgcagcagattcagctgaaaccgtagatgcttaaaatcaaaaggttttaacttttaagaaaatgtcccttcatccttcggatgttgaaggagtgcaataaaaggagtttaggtgttttatatgtcttgaacttttctggtgtctttgtttctctcttctcaatgaaatgtttcttctgtgg

SEQ ID NO: 26473 - protein, 169 aa, Arabidopsis thaliana
  peptide (1)..(169): Ceres Seq. ID no. 13591823
  misc_feature (57)..(169): Pfam Name: Thi4 family Pfam Description: Thi4 family
  misc_feature (57)..(169): Pfam Name: Thi4 family Pfam Description: Thi4 family
  misc_feature (57)..(169): Pfam Name: Thi4 family Pfam Description: Thi4 family
  misc_feature (1)..(169): Homolog of NCBI NO: 30013665 NR Description: putative chloroplast thiazole biosynthetic
  misc_feature (1)..(169): Homolog of NCBI NO: 6094476 NR Description: Thiazole biosynthetic enzyme, chloroplast
  misc_feature (1)..(169): Homolog of NCBI NO: 6094476 NR Description: Thiazole biosynthetic enzyme, chloroplast
  misc_feature (1)..(169): Homolog of NCBI NO: 6094476 NR Description: Thiazole biosynthetic enzyme, chloroplast
  misc_feature (1)..(169): Homolog of NCBI NO: 15239735 NR Description: thiazole biosynthetic enzyme precursor (ARA6) (sp
  misc_feature (1)..(169): Homolog of NCBI NO: 30013665 NR Description: putative chloroplast thiazole biosynthetic
  misc_feature (1)..(169): Homolog of NCBI NO: 15239735 NR Description: thiazole biosynthetic enzyme precursor (ARA6) (sp
  misc_feature (1)..(169): Homolog of NCBI NO: 30013665 NR Description: putative chloroplast thiazole biosynthetic
  misc_feature (1)..(169): Homolog of NCBI NO: 15239735 NR Description: thiazole biosynthetic enzyme precursor (ARA6) (sp
MAAIASTLSLSSTKPQRLFDSSFHGSAISAAPISIGLKPRSFSVRATTAGYDLNAFTFDPIKESIVSREMTRRYMTDMITYAETDVVVVGAGSAGLSAAYEISKNPDVQVAIIEQSVSPGGGAWLGGQLFSAMIVRKPAHLFLDEIGVAYDEQDTYVVVKHAVCSHQPS

SEQ ID NO: 26474 - protein, 100 aa, Arabidopsis thaliana
  peptide (1)..(100): Ceres Seq. ID no. 13591824
  misc_feature (1)..(100): Pfam Name: Thi4 family Pfam Description: Thi4 family
  misc_feature (1)..(100): Pfam Name: Thi4 family Pfam Description: Thi4 family
  misc_feature (1)..(100): Pfam Name: Thi4 family Pfam Description: Thi4 family
  misc_feature (1)..(100): Homolog of NCBI NO: 30013665 NR Description: putative chloroplast thiazole biosynthetic
  misc_feature (1)..(100): Homolog of NCBI NO: 6094476 NR Description: Thiazole biosynthetic enzyme, chloroplast
  misc_feature (1)..(100): Homolog of NCBI NO: 6094476 NR Description: Thiazole biosynthetic enzyme, chloroplast
  misc_feature (1)..(100): Homolog of NCBI NO: 6094476 NR Description: Thiazole biosynthetic enzyme, chloroplast
  misc_feature (1)..(100): Homolog of NCBI NO: 15239735 NR Description: thiazole biosynthetic enzyme precursor (ARA6) (sp
  misc_feature (1)..(100): Homolog of NCBI NO: 30013665 NR Description: putative chloroplast thiazole biosynthetic
  misc_feature (1)..(100): Homolog of NCBI NO: 15239735 NR Description: thiazole biosynthetic enzyme precursor (ARA6) (sp
  misc_feature (1)..(100): Homolog of NCBI NO: 30013665 NR Description: putative chloroplast thiazole biosynthetic
  misc_feature (1)..(100): Homolog of NCBI NO: 15239735 NR Description: thiazole biosynthetic enzyme precursor (ARA6) (sp
MTRRYMTDMITYAETDVVVVGAGSAGLSAAYEISKNPDVQVAIIEQSVSPGGGAWLGGQLFSAMIVRKPAHLFLDEIGVAYDEQDTYVVVKHAVCSHQPS

SEQ ID NO: 26475 - protein, 95 aa, Arabidopsis thaliana
  peptide (1)..(95): Ceres Seq. ID no. 13591825
  misc_feature (1)..(95): Pfam Name: Thi4 family Pfam Description: Thi4 family
  misc_feature (1)..(95): Pfam Name: Thi4 family Pfam Description: Thi4 family
  misc_feature (1)..(95): Pfam Name: Thi4 family Pfam Description: Thi4 family
  misc_feature (1)..(95): Homolog of NCBI NO: 30013665 NR Description: putative chloroplast thiazole biosynthetic
  misc_feature (1)..(95): Homolog of NCBI NO: 6094476 NR Description: Thiazole biosynthetic enzyme, chloroplast
  misc_feature (1)..(95): Homolog of NCBI NO: 6094476 NR Description: Thiazole biosynthetic enzyme, chloroplast
  misc_feature (1)..(95): Homolog of NCBI NO: 6094476 NR Description: Thiazole biosynthetic enzyme, chloroplast
  misc_feature (1)..(95): Homolog of NCBI NO: 15239735 NR Description: thiazole biosynthetic enzyme precursor (ARA6) (sp
  misc_feature (1)..(95): Homolog of NCBI NO: 30013665 NR Description: putative chloroplast thiazole biosynthetic
  misc_feature (1)..(95): Homolog of NCBI NO: 15239735 NR Description: thiazole biosynthetic enzyme precursor (ARA6) (sp
  misc_feature (1)..(95): Homolog of NCBI NO: 30013665 NR Description: putative chloroplast thiazole biosynthetic
  misc_feature (1)..(95): Homolog of NCBI NO: 15239735 NR Description: thiazole biosynthetic enzyme precursor (ARA6) (sp
MTDMITYAETDVVVVGAGSAGLSAAYEISKNPDVQVAIIEQSVSPGGGAWLGGQLFSAMIVRKPAHLFLDEIGVAYDEQDTYVVVKHAVCSHQPS

SEQ ID NO: 26476 - DNA, 1759 bp, Arabidopsis thaliana
  misc_feature (1)..(1759): Ceres Seq. ID no. 12329065
  misc_feature: MA Experiment ID: 108434 Result: Down-regulated in Transcription
  misc_feature: MA Experiment 108434 PARAMETER Experiment Name: At_Root_Tips_cDNA_P Parameter: Tissue Value: Root Tips
  misc_feature: MA Experiment ID: 108462 Result: Up-regulated in Transcription
  misc_feature: MA Experiment 108462 PARAMETER Experiment Name: At_Germinating_Seeds_cDNA_P Parameter: Age (day) Value: 2 vs. 0
  misc_feature: MA Experiment 108462 PARAMETER Experiment Name: At_Germinating_Seeds_cDNA_P Parameter: Tissue Value: Germinating Seeds
  misc_feature: MA Experiment ID: 108463 Result: Up-regulated in Transcription
  misc_feature: MA Experiment 108463 PARAMETER Experiment Name: At_Germinating_Seeds_cDNA_P Parameter: Age (day) Value: 3 vs. 0
  misc_feature: MA Experiment 108463 PARAMETER Experiment Name: At_Germinating_Seeds_cDNA_P Parameter: Tissue Value: Germinating Seeds
  misc_feature: MA Experiment ID: 108464 Result: Up-regulated in Transcription
  misc_feature: MA Experiment 108464 PARAMETER Experiment Name: At_Germinating_Seeds_cDNA_P Parameter: Age (day) Value: 4 vs. 0
  misc_feature: MA Experiment 108464 PARAMETER Experiment Name: At_Germinating_Seeds_cDNA_P Parameter: Tissue Value: Germinating Seeds
  misc_feature: MA Experiment ID: 108488 Result: Down-regulated in Transcription
  misc_feature: MA Experiment ID: 108572 Result: Up-regulated in Transcription
  misc_feature: MA Experiment 108572 PARAMETER Experiment Name: At_Drought_cDNA_P Parameter: Timepoint (hr) Value: 1
  misc_feature: MA Experiment 108572 PARAMETER Experiment Name: At_Drought_cDNA_P Parameter: Tissue Value: Aerial
  misc_feature: MA Experiment 108572 PARAMETER Experiment Name: At_Drought_cDNA_P Parameter: Treatment Value: Drought vs. No Drought
  misc_feature: MA Experiment ID: 108573 Result: Up-regulated in Transcription
  misc_feature: MA Experiment 108573 PARAMETER Experiment Name: At_Drought_cDNA_P Parameter: Timepoint (hr) Value: 6
  misc_feature: MA Experiment 108573 PARAMETER Experiment Name: At_Drought_cDNA_P Parameter: Tissue Value: Aerial
  misc_feature: MA Experiment 108573 PARAMETER Experiment Name: At_Drought_cDNA_P Parameter: Treatment Value: Drought vs. No Drought
  misc_feature: MA Experiment ID: 108605 Result: Up-regulated in Transcription
  misc_feature: MA Experiment 108605 PARAMETER Experiment Name: At_100uM_ABA_cDNA_P Parameter: Timepoint (hr) Value: 6
  misc_feature: MA Experiment 108605 PARAMETER Experiment Name: At_100uM_ABA_cDNA_P Parameter: Tissue Value: Aerial
  misc_feature: MA Experiment 108605 PARAMETER Experiment Name: At_100uM_ABA_cDNA_P Parameter: Treatment Value: 100uM ABA vs. No Treatment
  misc_feature: MA Experiment ID: 108607 Result: Up-regulated in Transcription
  misc_feature: MA Experiment 108607 PARAMETER Experiment Name: At_100uM_ABA_cDNA_P Parameter: Timepoint (hr) Value: 4
  misc_feature: MA Experiment 108607 PARAMETER Experiment Name: At_100uM_ABA_cDNA_P Parameter: Tissue Value: Aerial
  misc_feature: MA Experiment 108607 PARAMETER Experiment Name: At_100uM_ABA_cDNA_P Parameter: Treatment Value: 100uM ABA vs. No Treatment
  misc_feature: MA Experiment ID: 108609 Result: Up-regulated in Transcription
  misc_feature: MA Experiment 108609 PARAMETER Experiment Name: At_100uM_ABA_cDNA_P Parameter: Timepoint (hr) Value: 24
  misc_feature: MA Experiment 108609 PARAMETER Experiment Name: At_100uM_ABA_cDNA_P Parameter: Tissue Value: Aerial
  misc_feature: MA Experiment 108609 PARAMETER Experiment Name: At_100uM_ABA_cDNA_P Parameter: Treatment Value: 100uM ABA vs. No Treatment
  misc_feature: MA Experiment ID: 20000069 Result: Up-regulated in Transcription
  misc_feature: MA Experiment 20000069 PARAMETER Experiment Name: At_100uM_ABA_Mutants_cDNA_P Parameter: Plant Line Value: CS23
  misc_feature: MA Experiment 20000069 PARAMETER Experiment Name: At_100uM_ABA_Mutants_cDNA_P Parameter: Timepoint (hr) Value: 6
  misc_feature: MA Experiment 20000069 PARAMETER Experiment Name: At_100uM_ABA_Mutants_cDNA_P Parameter: Tissue Value: Aerial
  misc_feature: MA Experiment 20000069 PARAMETER Experiment Name: At_100uM_ABA_Mutants_cDNA_P Parameter: Treatment Value: 100uM ABA vs. No Treatment
  misc_feature: MA Experiment ID: 20000070 Result: Up-regulated in Transcription
  misc_feature: MA Experiment 20000070 PARAMETER Experiment Name: At_100uM_ABA_Mutants_cDNA_P Parameter: Plant Line Value: CS24
  misc_feature: MA Experiment 20000070 PARAMETER Experiment Name: At_100uM_ABA_Mutants_cDNA_P Parameter: Timepoint (hr) Value: 6
  misc_feature: MA Experiment 20000070 PARAMETER Experiment Name: At_100uM_ABA_Mutants_cDNA_P Parameter: Tissue Value: Aerial
  misc_feature: MA Experiment 20000070 PARAMETER Experiment Name: At_100uM_ABA_Mutants_cDNA_P Parameter: Treatment Value: 100uM ABA vs. No Treatment
  misc_feature: MA Experiment ID: 20000071 Result: Up-regulated in Transcription
  misc_feature: MA Experiment 20000071 PARAMETER Experiment Name: At_100uM_ABA_Mutants_cDNA_P Parameter: Plant Line Value: CS8104
  misc_feature: MA Experiment 20000071 PARAMETER Experiment Name: At_100uM_ABA_Mutants_cDNA_P Parameter: Timepoint (hr) Value: 6
  misc_feature: MA Experiment 20000071 PARAMETER Experiment Name: At_100uM_ABA_Mutants_cDNA_P Parameter: Tissue Value: Aerial
  misc_feature: MA Experiment 20000071 PARAMETER Experiment Name: At_100uM_ABA_Mutants_cDNA_P Parameter: Treatment Value: 100uM ABA vs. No Treatment
  misc_feature: MA Experiment ID: 20000072 Result: Up-regulated in Transcription
  misc_feature: MA Experiment 20000072 PARAMETER Experiment Name: At_100uM_ABA_Mutants_cDNA_P Parameter: Plant Line Value: CS8105
  misc_feature: MA Experiment 20000072 PARAMETER Experiment Name: At_100uM_ABA_Mutants_cDNA_P Parameter: Timepoint (hr) Value: 6
  misc_feature: MA Experiment 20000072 PARAMETER Experiment Name: At_100uM_ABA_Mutants_cDNA_P Parameter: Tissue Value: Aerial
  misc_feature: MA Experiment 20000072 PARAMETER Experiment Name: At_100uM_ABA_Mutants_cDNA_P Parameter: Treatment Value: 100uM ABA vs. No Treatment
  misc_feature: MA Experiment ID: 20000086 Result: Up-regulated in Transcription
  misc_feature: MA Experiment 20000086 PARAMETER Experiment Name: At_100uM_ABA_Mutants_cDNA_P Parameter: Plant Line Value: CS22
  misc_feature: MA Experiment 20000086 PARAMETER Experiment Name: At_100uM_ABA_Mutants_cDNA_P Parameter: Timepoint (hr) Value: 6
  misc_feature: MA Experiment 20000086 PARAMETER Experiment Name: At_100uM_ABA_Mutants_cDNA_P Parameter: Tissue Value: Aerial
  misc_feature: MA Experiment 20000086 PARAMETER Experiment Name: At_100uM_ABA_Mutants_cDNA_P Parameter: Treatment Value: 100uM ABA vs. No Treatment
  misc_feature: MA Experiment ID: 20000087 Result: Up-regulated in Transcription
  misc_feature: MA Experiment 20000087 PARAMETER Experiment Name: At_100uM_ABA_Mutants_cDNA_P Parameter: Plant Line Value: WS
  misc_feature: MA Experiment 20000087 PARAMETER Experiment Name: At_100uM_ABA_Mutants_cDNA_P Parameter: Timepoint (hr) Value: 6
  misc_feature: MA Experiment 20000087 PARAMETER Experiment Name: At_100uM_ABA_Mutants_cDNA_P Parameter: Tissue Value: Aerial
  misc_feature: MA Experiment 20000087 PARAMETER Experiment Name: At_100uM_ABA_Mutants_cDNA_P Parameter: Treatment Value: 100uM ABA vs. No Treatment
  misc_feature: MA Experiment ID: 20000088 Result: Up-regulated in Transcription
  misc_feature: MA Experiment 20000088 PARAMETER Experiment Name: At_100uM_ABA_Mutants_cDNA_P Parameter: Plant Line Value: Landsberg
  misc_feature: MA Experiment 20000088 PARAMETER Experiment Name: At_100uM_ABA_Mutants_cDNA_P Parameter: Timepoint (hr) Value: 6
  misc_feature: MA Experiment 20000088 PARAMETER Experiment Name: At_100uM_ABA_Mutants_cDNA_P Parameter: Tissue Value: Aerial
  misc_feature: MA Experiment 20000088 PARAMETER Experiment Name: At_100uM_ABA_Mutants_cDNA_P Parameter: Treatment Value: 100uM ABA vs. No Treatment
  misc_feature: MA Experiment ID: 20000089 Result: Up-regulated in Transcription
  misc_feature: MA Experiment ID: 20000111 Result: Down-regulated in Transcription
  misc_feature: MA Experiment 20000111 PARAMETER Experiment Name: At_42deg_Heat_cDNA_P Parameter: Temperature (deg C) Value: 42 vs. 22
  misc_feature: MA Experiment 20000111 PARAMETER Experiment Name: At_42deg_Heat_cDNA_P Parameter: Timepoint (hr) Value: 6
  misc_feature: MA Experiment 20000111 PARAMETER Experiment Name: At_42deg_Heat_cDNA_P Parameter: Tissue Value: Aerial
  misc_feature: MA Experiment ID: 20000113 Result: Down-regulated in Transcription
  misc_feature: MA Experiment 20000113 PARAMETER Experiment Name: At_42deg_Heat_cDNA_P Parameter: Temperature (deg C) Value: 42 vs. 22
  misc_feature: MA Experiment 20000113 PARAMETER Experiment Name: At_42deg_Heat_cDNA_P Parameter: Timepoint (hr) Value: 8
  misc_feature: MA Experiment 20000113 PARAMETER Experiment Name: At_42deg_Heat_cDNA_P Parameter: Tissue Value: Aerial
  misc_feature: MA Experiment ID: 20000117 Result: Up-regulated in Transcription
  misc_feature: MA Experiment 20000117 PARAMETER Experiment Name: At_100uM_ABA_Mutants_cDNA_P Parameter: Plant Line Value: Columbia
  misc_feature: MA Experiment 20000117 PARAMETER Experiment Name: At_100uM_ABA_Mutants_cDNA_P Parameter: Timepoint (hr) Value: 6
  misc_feature: MA Experiment 20000117 PARAMETER Experiment Name: At_100uM_ABA_Mutants_cDNA_P Parameter: Tissue Value: Aerial
  misc_feature: MA Experiment 20000117 PARAMETER Experiment Name: At_100uM_ABA_Mutants_cDNA_P Parameter: Treatment Value: 100uM ABA vs. No Treatment
  misc_feature: MA Experiment ID: 20000169 Result: Up-regulated in Transcription
  misc_feature: MA Experiment 20000169 PARAMETER Experiment Name: At_100uM_ABA_P Parameter: Age (day) Value: 14
  misc_feature: MA Experiment 20000169 PARAMETER Experiment Name: At_100uM_ABA_P Parameter: Organism Value: A. thaliana
  misc_feature: MA Experiment 20000169 PARAMETER Experiment Name: At_100uM_ABA_P Parameter: Plant Line Value: WS
  misc_feature: MA Experiment 20000169 PARAMETER Experiment Name: At_100uM_ABA_P Parameter: Timepoint (hr) Value: 6
  misc_feature: MA Experiment 20000169 PARAMETER Experiment Name: At_100uM_ABA_P Parameter: Tissue Value: Aerial
  misc_feature: MA Experiment 20000169 PARAMETER Experiment Name: At_100uM_ABA_P Parameter: Treatment Value: 100uM ABA vs. No Treatment
  misc_feature: MA Experiment ID: 20000173 Result: Down-regulated in Transcription
  misc_feature: MA Experiment 20000173 PARAMETER Experiment Name: At_42deg_Heat_P Parameter: Age (day) Value: 14
  misc_feature: MA Experiment 20000173 PARAMETER Experiment Name: At_42deg_Heat_P Parameter: Organism Value: A. thaliana
  misc_feature: MA Experiment 20000173 PARAMETER Experiment Name: At_42deg_Heat_P Parameter: Plant Line Value: WS
  misc_feature: MA Experiment 20000173 PARAMETER Experiment Name: At_42deg_Heat_P Parameter: Temperature (deg C) Value: 42 vs. 22
  misc_feature: MA Experiment 20000173 PARAMETER Experiment Name: At_42deg_Heat_P Parameter: Timepoint (hr) Value: 6
  misc_feature: MA Experiment 20000173 PARAMETER Experiment Name: At_42deg_Heat_P Parameter: Tissue Value: Aerial
  misc_feature: MA Experiment ID: 20000179 Result: Up-regulated in Transcription
  misc_feature: MA Experiment 20000179 PARAMETER Experiment Name: At_Germinating_Seeds_P Parameter: Age (hr) Value: 6 vs. 0
  misc_feature: MA Experiment 20000179 PARAMETER Experiment Name: At_Germinating_Seeds_P Parameter: Tissue Value: Germinating Seeds
  misc_feature: MA Experiment ID: 20000180 Result: Up-regulated in Transcription
  misc_feature: MA Experiment 20000180 PARAMETER Experiment Name: At_Germinating_Seeds_P Parameter: Age (hr) Value: 24 vs. 0
  misc_feature: MA Experiment 20000180 PARAMETER Experiment Name: At_Germinating_Seeds_P Parameter: Tissue Value: Germinating Seeds
  misc_feature: MA Experiment ID: 20000184 Result: Down-regulated in Transcription
  misc_feature: MA Experiment 20000184 PARAMETER Experiment Name: At_Shoots__P Parameter: Age (day) Value: 7
  misc_feature: MA Experiment 20000184 PARAMETER Experiment Name: At_Shoots__P Parameter: Tissue Value: Shoots vs. Whole Plant
  misc_feature: MA Experiment ID: 20000224 Result: Up-regulated in Transcription
  misc_feature: MA Experiment ID: 20000436 Result: Up-regulated in Transcription
  misc_feature: MA Experiment 20000436 PARAMETER Experiment Name: At_Drought_P Parameter: Age (day) Value: 7
  misc_feature: MA Experiment 20000436 PARAMETER Experiment Name: At_Drought_P Parameter: Organism Value: A. thaliana
  misc_feature: MA Experiment 20000436 PARAMETER Experiment Name: At_Drought_P Parameter: Plant Line Value: WS
  misc_feature: MA Experiment 20000436 PARAMETER Experiment Name: At_Drought_P Parameter: Timepoint (hr) Value: 12
  misc_feature: MA Experiment 20000436 PARAMETER Experiment Name: At_Drought_P Parameter: Tissue Value: Whole Plant
  misc_feature: MA Experiment 20000436 PARAMETER Experiment Name: At_Drought_P Parameter: Treatment Value: Drought vs. No Drought
  misc_feature: MA Experiment ID: 20000437 Result: Up-regulated in Transcription
  misc_feature: MA Experiment 20000437 PARAMETER Experiment Name: At_Drought_P Parameter: Age (day) Value: 8
  misc_feature: MA Experiment 20000437 PARAMETER Experiment Name: At_Drought_P Parameter: Organism Value: A. thaliana
  misc_feature: MA Experiment 20000437 PARAMETER Experiment Name: At_Drought_P Parameter: Plant Line Value: WS
  misc_feature: MA Experiment 20000437 PARAMETER Experiment Name: At_Drought_P Parameter: Timepoint (hr) Value: 24
  misc_feature: MA Experiment 20000437 PARAMETER Experiment Name: At_Drought_P Parameter: Tissue Value: Whole Plant
  misc_feature: MA Experiment 20000437 PARAMETER Experiment Name: At_Drought_P Parameter: Treatment Value: Drought vs. No Drought
  misc_feature: MA Experiment ID: 20000453 Result: Up-regulated in Transcription
  misc_feature: MA Experiment 20000453 PARAMETER Experiment Name: At_100uM_ABA_P Parameter: Age (day) Value: 15
  misc_feature: MA Experiment 20000453 PARAMETER Experiment Name: At_100uM_ABA_P Parameter: Organism Value: A. thaliana
  misc_feature: MA Experiment 20000453 PARAMETER Experiment Name: At_100uM_ABA_P Parameter: Plant Line Value: WS
  misc_feature: MA Experiment 20000453 PARAMETER Experiment Name: At_100uM_ABA_P Parameter: Timepoint (hr) Value: 24
  misc_feature: MA Experiment 20000453 PARAMETER Experiment Name: At_100uM_ABA_P Parameter: Tissue Value: Aerial
  misc_feature: MA Experiment 20000453 PARAMETER Experiment Name: At_100uM_ABA_P Parameter: Treatment Value: 100uM ABA vs. No Treatment
  misc_feature: MA Experiment ID: 20000794 Result: Up-regulated in Transcription
  misc_feature: MA Experiment 20000794 PARAMETER Experiment Name: At_Petals_P Parameter: Age (day) Value: 23-25 days
  misc_feature: MA Experiment 20000794 PARAMETER Experiment Name: At_Petals_P Parameter: Plant Line Value: WS
  misc_feature: MA Experiment 20000794 PARAMETER Experiment Name: At_Petals_P Parameter: Tissue Value: Petals vs. Whole plant
  misc_feature: MA Experiment ID: 20001905 Result: Up-regulated in Transcription
  misc_feature: MA Experiment 20001905 PARAMETER Experiment Name: At_Drought_Reproduction_P Parameter: Age (day) Value: 40
  misc_feature: MA Experiment 20001905 PARAMETER Experiment Name: At_Drought_Reproduction_P Parameter: Organism Value: A. thaliana
  misc_feature: MA Experiment 20001905 PARAMETER Experiment Name: At_Drought_Reproduction_P Parameter: Plant Line Value: WS
  misc_feature: MA Experiment 20001905 PARAMETER Experiment Name: At_Drought_Reproduction_P Parameter: Timepoint (day) Value: 10
  misc_feature: MA Experiment 20001905 PARAMETER Experiment Name: At_Drought_Reproduction_P Parameter: Tissue Value: Rosettes
  misc_feature: MA Experiment 20001905 PARAMETER Experiment Name: At_Drought_Reproduction_P Parameter: Treatment Value: Drought vs. No Drought
  misc_feature: MA Experiment ID: 20001911 Result: Up-regulated in Transcription
  misc_feature: MA Experiment 20001911 PARAMETER Experiment Name: At_Drought_Reproduction_P Parameter: Age (day) Value: 40
  misc_feature: MA Experiment 20001911 PARAMETER Experiment Name: At_Drought_Reproduction_P Parameter: Organism Value: A. thaliana
  misc_feature: MA Experiment 20001911 PARAMETER Experiment Name: At_Drought_Reproduction_P Parameter: Plant Line Value: WS
  misc_feature: MA Experiment 20001911 PARAMETER Experiment Name: At_Drought_Reproduction_P Parameter: Timepoint (day) Value: 10
  misc_feature: MA Experiment 20001911 PARAMETER Experiment Name: At_Drought_Reproduction_P Parameter: Tissue Value: Flowers
  misc_feature: MA Experiment 20001911 PARAMETER Experiment Name: At_Drought_Reproduction_P Parameter: Treatment Value: Drought vs. No Drought
atcctctgttttgtaaccaatctcagctctccctctcaaacaatccaggattcttcagattcctctcctttgatcctctctttaacaatctctctctctctgttttcttcgatccgttgtaggagaaaatggtcgttatcaacagtctccgacgcttggcgcgtaccactcaggttcatttgcacagtaagtatgccacttgcatgtctgggaactccacttccaggaggattttcactactgaggcagcacctgagaagaaaaacactgttgggtctaaagggcatgatatgcttgcaccttttactgctggatggcagagtgctgatttagatcccttggtcattgcaaagtctgagggaagttatgtgtatgatgatactgggaaaaaatatcttgactctctcgctggtttatggtgtactgccttaggaggaaatgagccaaggcttgtttctgccgctgttgaacagttgaacaccttgccgttttatcactccttttggaaccgtactactaaaccttctctggatcttgctaaggttcttttagagatgttcacggccaacaaaatggccaaagcattttttacaagcggtggatcagatgccaacgatacccaggtcaagctggtttggtattacaataacgcacttggaaggcccgagaagaaaaagtttatcgcgagaaagaaatcgtaccatggctccactctaatatcagcaagtttgtccggccttcccccgctacaccaaaattttgatttacctgcaccatttgtgttgcacacagattgccctcattattggcgttttcatcttccaggcgaaacggaagaggagttctcaaccagattagccaagaatttagaggatctaatcatcaaagaaggaccagaaactattggtgcttttatagctgaaccagtcatgggtgctgggggtgtgatacctccacctgctacctactttgaaaaggttcaagctgttgttaagaaatatgatatcttgttcattgctgatgaggtgatatgtgcatttggaaggctcgggacaatgtttggctgtgacaaatacaacattaagccagatcttgtgaccttagctaaggcactgtcttcagcatatatgccgattggagccattcttatgagccaagaagtggcagatgtcataaattctcatagcagcaagctaggcgttttctcccatggatttacttattctggtcatccagtttcgtgtgctgtagcaattgaagcgttaaagatatacaaggagaggaacataccagagtatgtcgcaaaagttgccccaaggtttcaagatggagttaaagcgtttgcctctggtagtcctattattggagagacaagaggaacaggtttgattcttgggactgagtttgtagacaataaatctccgaacgaaccatttccaccagaatggggtgttggcgcattctttggagccgagtgccagaagcacgggatgttagtccgtgttgcaggtgatggcattttgatgtctccaccgctcattatctcacctgaagagattgatgagttgatttctatctatgggaaagcattgaaggcaacggaagagaaggtaaaagaactcaaggctcagcacaagaagtgaaaagcagagtcaaaatgatgttgatgaaaaatgttttttagattctcaaagtttggatcctttgttttttttttttaacacacaacaagtctttaaataagtacattttaatgagg

SEQ ID NO: 26477 - protein, 504 aa, Arabidopsis thaliana
  peptide (1)..(504): Ceres Seq. ID no. 12329066
  misc_feature (60)..(492): Pfam Name: Aminotransferase class-III Pfam Description: Aminotransferase class-III
  misc_feature (52)..(501): Homolog of NCBI NO: 3599491 NR Description: putative aminotransferase [Capsicum chinense]
  misc_feature (47)..(504): Homolog of NCBI NO: 19171207 NR Description: viroid RNA-binding protein [Lycopersicon
  misc_feature (25)..(503): Homolog of NCBI NO: 38344250 NR Description: OSJNBa0008M17.3 [Oryza sativa (japonica
  misc_feature (11)..(501): Homolog of NCBI NO: 40253407 NR Description: putative gamma-aminobutyrate transaminase subunit
  misc_feature (49)..(503): Homolog of NCBI NO: 29837286 NR Description: gamma-aminobutyrate transaminase subunit
  misc_feature (4)..(501): Homolog of NCBI NO: 33340007 NR Description: putative aminotransferase [Oryza sativa]
  misc_feature (3)..(501): Homolog of NCBI NO: 29837282 NR Description: gamma-aminobutyrate transaminase subunit
  misc_feature (50)..(504): Homolog of NCBI NO: 11994739 NR Description: aminotransferase-like protein [Arabidopsis
  misc_feature (1)..(504): Homolog of NCBI NO: 14030435 NR Description: gamma-aminobutyrate transaminase subunit
  misc_feature (1)..(504): Homolog of NCBI NO: 18403295 NR Description: aminotransferase, putative
MVVINSLRRLARTTQVHLHSKYATCMSGNSTSRRIFTTEAAPEKKNTVGSKGHDMLAPFTAGWQSADLDPLVIAKSEGSYVYDDTGKKYLDSLAGLWCTALGGNEPRLVSAAVEQLNTLPFYHSFWNRTTKPSLDLAKVLLEMFTANKMAKAFFTSGGSDANDTQVKLVWYYNNALGRPEKKKFIARKKSYHGSTLISASLSGLPPLHQNFDLPAPFVLHTDCPHYWRFHLPGETEEEFSTRLAKNLEDLIIKEGPETIGAFIAEPVMGAGGVIPPPATYFEKVQAVVKKYDILFIADEVICAFGRLGTMFGCDKYNIKPDLVTLAKALSSAYMPIGAILMSQEVADVINSHSSKLGVFSHGFTYSGHPVSCAVAIEALKIYKERNIPEYVAKVAPRFQDGVKAFASGSPIIGETRGTGLILGTEFVDNKSPNEPFPPEWGVGAFFGAECQKHGMLVRVAGDGILMSPPLIISPEEIDELISIYGKALKATEEKVKELKAQHKK

SEQ ID NO: 26478 - protein, 479 aa, Arabidopsis thaliana
  peptide (1)..(479): Ceres Seq. ID no. 12329067
  misc_feature (35)..(467): Pfam Name: Aminotransferase class-III Pfam Description: Aminotransferase class-III
  misc_feature (27)..(476): Homolog of NCBI NO: 3599491 NR Description: putative aminotransferase [Capsicum chinense]
  misc_feature (22)..(479): Homolog of NCBI NO: 19171207 NR Description: viroid RNA-binding protein [Lycopersicon
  misc_feature (1)..(478): Homolog of NCBI NO: 38344250 NR Description: OSJNBa0008M17.3 [Oryza sativa (japonica
  misc_feature (1)..(476): Homolog of NCBI NO: 40253407 NR Description: putative gamma-aminobutyrate transaminase subunit
  misc_feature (24)..(478): Homolog of NCBI NO: 29837286 NR Description: gamma-aminobutyrate transaminase subunit
  misc_feature (1)..(476): Homolog of NCBI NO: 33340007 NR Description: putative aminotransferase [Oryza sativa]
  misc_feature (1)..(476): Homolog of NCBI NO: 29837282 NR Description: gamma-aminobutyrate transaminase subunit
  misc_feature (25)..(479): Homolog of NCBI NO: 11994739 NR Description: aminotransferase-like protein [Arabidopsis
  misc_feature (1)..(479): Homolog of NCBI NO: 14030435 NR Description: gamma-aminobutyrate transaminase subunit
  misc_feature (1)..(479): Homolog of NCBI NO: 18403295 NR Description: aminotransferase, putative
MSGNSTSRRIFTTEAAPEKKNTVGSKGHDMLAPFTAGWQSADLDPLVIAKSEGSYVYDDTGKKYLDSLAGLWCTALGGNEPRLVSAAVEQLNTLPFYHSFWNRTTKPSLDLAKVLLEMFTANKMAKAFFTSGGSDANDTQVKLVWYYNNALGRPEKKKFIARKKSYHGSTLISASLSGLPPLHQNFDLPAPFVLHTDCPHYWRFHLPGETEEEFSTRLAKNLEDLIIKEGPETIGAFIAEPVMGAGGVIPPPATYFEKVQAVVKKYDILFIADEVICAFGRLGTMFGCDKYNIKPDLVTLAKALSSAYMPIGAILMSQEVADVINSHSSKLGVFSHGFTYSGHPVSCAVAIEALKIYKERNIPEYVAKVAPRFQDGVKAFASGSPIIGETRGTGLILGTEFVDNKSPNEPFPPEWGVGAFFGAECQKHGMLVRVAGDGILMSPPLIISPEEIDELISIYGKALKATEEKVKELKAQHKK

SEQ ID NO: 26479 - protein, 450 aa, Arabidopsis thaliana
  peptide (1)..(450): Ceres Seq. ID no. 12329068
  misc_feature (6)..(438): Pfam Name: Aminotransferase class-III Pfam Description: Aminotransferase class-III
  misc_feature (1)..(447): Homolog of NCBI NO: 3599491 NR Description: putative aminotransferase [Capsicum chinense]
  misc_feature (1)..(450): Homolog of NCBI NO: 19171207 NR Description: viroid RNA-binding protein [Lycopersicon
  misc_feature (1)..(449): Homolog of NCBI NO: 38344250 NR Description: OSJNBa0008M17.3 [Oryza sativa (japonica
  misc_feature (1)..(447): Homolog of NCBI NO: 40253407 NR Description: putative gamma-aminobutyrate transaminase subunit
  misc_feature (1)..(449): Homolog of NCBI NO: 29837286 NR Description: gamma-aminobutyrate transaminase subunit
  misc_feature (1)..(447): Homolog of NCBI NO: 33340007 NR Description: putative aminotransferase [Oryza sativa]
  misc_feature (1)..(447): Homolog of NCBI NO: 29837282 NR Description: gamma-aminobutyrate transaminase subunit
  misc_feature (1)..(450): Homolog of NCBI NO: 11994739 NR Description: aminotransferase-like protein [Arabidopsis
  misc_feature (1)..(450): Homolog of NCBI NO: 14030435 NR Description: gamma-aminobutyrate transaminase subunit
  misc_feature (1)..(450): Homolog of NCBI NO: 18403295 NR Description: aminotransferase, putative
MLAPFTAGWQSADLDPLVIAKSEGSYVYDDTGKKYLDSLAGLWCTALGGNEPRLVSAAVEQLNTLPFYHSFWNRTTKPSLDLAKVLLEMFTANKMAKAFFTSGGSDANDTQVKLVWYYNNALGRPEKKKFIARKKSYHGSTLISASLSGLPPLHQNFDLPAPFVLHTDCPHYWRFHLPGETEEEFSTRLAKNLEDLIIKEGPETIGAFIAEPVMGAGGVIPPPATYFEKVQAVVKKYDILFIADEVICAFGRLGTMFGCDKYNIKPDLVTLAKALSSAYMPIGAILMSQEVADVINSHSSKLGVFSHGFTYSGHPVSCAVAIEALKIYKERNIPEYVAKVAPRFQDGVKAFASGSPIIGETRGTGLILGTEFVDNKSPNEPFPPEWGVGAFFGAECQKHGMLVRVAGDGILMSPPLIISPEEIDELISIYGKALKATEEKVKELKAQHKK

SEQ ID NO: 26480 - DNA, 1355 bp, Arabidopsis thaliana
  misc_feature (1)..(1355): Ceres Seq. ID no. 13490365
  misc_feature: MA Experiment ID: 20000180 Result: Down-regulated in Transcription
  misc_feature: MA Experiment 20000180 PARAMETER Experiment Name: At_Germinating_Seeds_P Parameter: Age (hr) Value: 24 vs. 0
  misc_feature: MA Experiment 20000180 PARAMETER Experiment Name: At_Germinating_Seeds_P Parameter: Tissue Value: Germinating Seeds
  misc_feature: MA Experiment ID: 20000227 Result: Down-regulated in Transcription
  misc_feature: MA Experiment 20000227 PARAMETER Experiment Name: At_Root-Tips-vs-Tops_P Parameter: Tissue Value: Root Tips vs. Root Tops
  misc_feature: MA Experiment ID: 20000264 Result: Up-regulated in Transcription
  misc_feature: MA Experiment 20000264 PARAMETER Experiment Name: At_Open_Flower_P Parameter: Age (day) Value: 21
  misc_feature: MA Experiment 20000264 PARAMETER Experiment Name: At_Open_Flower_P Parameter: Plant Line Value: WS
  misc_feature: MA Experiment 20000264 PARAMETER Experiment Name: At_Open_Flower_P Parameter: Tissue Value: Open Flower vs. Whole Plant
  misc_feature: MA Experiment ID: 20000265 Result: Up-regulated in Transcription
  misc_feature: MA Experiment 20000265 PARAMETER Experiment Name: At_Open_Flower_P Parameter: Age (day) Value: 21
  misc_feature: MA Experiment 20000265 PARAMETER Experiment Name: At_Open_Flower_P Parameter: Plant Line Value: WS
  misc_feature: MA Experiment 20000265 PARAMETER Experiment Name: At_Open_Flower_P Parameter: Tissue Value: Closed Flower vs. Whole Plant
  misc_feature: MA Experiment ID: 20000439 Result: Up-regulated in Transcription
  misc_feature: MA Experiment 20000439 PARAMETER Experiment Name: At_Roots__P Parameter: Age (day) Value: 14 vs. 21
  misc_feature: MA Experiment 20000439 PARAMETER Experiment Name: At_Roots__P Parameter: Organism Value: A. thaliana
  misc_feature: MA Experiment 20000439 PARAMETER Experiment Name: At_Roots__P Parameter: Tissue Value: Roots vs. Whole Plant
  misc_feature: MA Experiment ID: 20000441 Result: Down-regulated in Transcription
  misc_feature: MA Experiment 20000441 PARAMETER Experiment Name: At_1uM_BR-BRZ__P Parameter: Tissue Value: Shoot Apices
  misc_feature: MA Experiment 20000441 PARAMETER Experiment Name: At_1uM_BR-BRZ__P Parameter: Treatment Value: 1uM BR vs. No Treatment
  misc_feature: MA Experiment ID: 20000443 Result: Down-regulated in Transcription
  misc_feature: MA Experiment 20000443 PARAMETER Experiment Name: At_1uM_BR-BRZ__P Parameter: Tissue Value: Shoot Apices
  misc_feature: MA Experiment 20000443 PARAMETER Experiment Name: At_1uM_BR-BRZ__P Parameter: Treatment Value: 1uM BRZ vs. No Treatment
  misc_feature: MA Experiment ID: 20000456 Result: Up-regulated in Transcription
  misc_feature: MA Experiment 20000456 PARAMETER Experiment Name: At_100uM_BA_P Parameter: Age (day) Value: 14
  misc_feature: MA Experiment 20000456 PARAMETER Experiment Name: At_100uM_BA_P Parameter: Organism Value: A. thaliana
  misc_feature: MA Experiment 20000456 PARAMETER Experiment Name: At_100uM_BA_P Parameter: Plant Line Value: WS
  misc_feature: MA Experiment 20000456 PARAMETER Experiment Name: At_100uM_BA_P Parameter: Timepoint (hr) Value: 6
  misc_feature: MA Experiment 20000456 PARAMETER Experiment Name: At_100uM_BA_P Parameter: Tissue Value: Aerial
  misc_feature: MA Experiment 20000456 PARAMETER Experiment Name: At_100uM_BA_P Parameter: Treatment Value: 100uM BA vs. No Treatment
  misc_feature: MA Experiment ID: 20000495 Result: Up-regulated in Transcription
  misc_feature: MA Experiment 20000495 PARAMETER Experiment Name: At_Guard_Cells_P Parameter: Harvest Date Value: 8/2/2002
  misc_feature: MA Experiment 20000495 PARAMETER Experiment Name: At_Guard_Cells_P Parameter: Organism Value: A. thaliana
  misc_feature: MA Experiment 20000495 PARAMETER Experiment Name: At_Guard_Cells_P Parameter: Tissue Value: Guard Cells vs. Leaves
  misc_feature: MA Experiment ID: 20001247 Result: Down-regulated in Transcription
  misc_feature: MA Experiment 20001247 PARAMETER Experiment Name: At_Far-red-induction_P Parameter: Age (day) Value: 7
  misc_feature: MA Experiment 20001247 PARAMETER Experiment Name: At_Far-red-induction_P Parameter: Light Value: Far-red vs. White
  misc_feature: MA Experiment 20001247 PARAMETER Experiment Name: At_Far-red-induction_P Parameter: Organism Value: A. thaliana
  misc_feature: MA Experiment 20001247 PARAMETER Experiment Name: At_Far-red-induction_P Parameter: Plant Line Value: Columbia
  misc_feature: MA Experiment 20001247 PARAMETER Experiment Name: At_Far-red-induction_P Parameter: Timepoint (hr) Value: 1
  misc_feature: MA Experiment 20001247 PARAMETER Experiment Name: At_Far-red-induction_P Parameter: Tissue Value: Whole Plant
  misc_feature: MA Experiment ID: 20001450 Result: Down-regulated in Transcription
  misc_feature: MA Experiment 20001450 PARAMETER Experiment Name: At_Far-red-induction_P Parameter: Age (day) Value: 7
  misc_feature: MA Experiment 20001450 PARAMETER Experiment Name: At_Far-red-induction_P Parameter: Light Value: Far-red vs. White
  misc_feature: MA Experiment 20001450 PARAMETER Experiment Name: At_Far-red-induction_P Parameter: Organism Value: A. thaliana
  misc_feature: MA Experiment 20001450 PARAMETER Experiment Name: At_Far-red-induction_P Parameter: Plant Line Value: Columbia
  misc_feature: MA Experiment 20001450 PARAMETER Experiment Name: At_Far-red-induction_P Parameter: Timepoint (hr) Value: 8
  misc_feature: MA Experiment 20001450 PARAMETER Experiment Name: At_Far-red-induction_P Parameter: Tissue Value: Whole Plant
  misc_feature: MA Experiment ID: 20001557 Result: Up-regulated in Transcription
  misc_feature: MA Experiment 20001557 PARAMETER Experiment Name: At_Drought_Soil_Dry_P Parameter: Age (day) Value: 27
  misc_feature: MA Experiment 20001557 PARAMETER Experiment Name: At_Drought_Soil_Dry_P Parameter: Organism Value: A. thaliana
  misc_feature: MA Experiment 20001557 PARAMETER Experiment Name: At_Drought_Soil_Dry_P Parameter: Plant Line Value: WS
  misc_feature: MA Experiment 20001557 PARAMETER Experiment Name: At_Drought_Soil_Dry_P Parameter: Post Timepoint (hr) Value: 3
  misc_feature: MA Experiment 20001557 PARAMETER Experiment Name: At_Drought_Soil_Dry_P Parameter: Post-Treatment Value: Re-Water vs. No Drought
  misc_feature: MA Experiment 20001557 PARAMETER Experiment Name: At_Drought_Soil_Dry_P Parameter: Timepoint (day) Value: 13
  misc_feature: MA Experiment 20001557 PARAMETER Experiment Name: At_Drought_Soil_Dry_P Parameter: Treatment Value: Drought vs. No Drought
  misc_feature: MA Experiment ID: 20001558 Result: Up-regulated in Transcription
  misc_feature: MA Experiment 20001558 PARAMETER Experiment Name: At_Drought_Soil_Dry_P Parameter: Age (day) Value: 27
  misc_feature: MA Experiment 20001558 PARAMETER Experiment Name: At_Drought_Soil_Dry_P Parameter: Organism Value: A. thaliana
  misc_feature: MA Experiment 20001558 PARAMETER Experiment Name: At_Drought_Soil_Dry_P Parameter: Plant Line Value: WS
  misc_feature: MA Experiment 20001558 PARAMETER Experiment Name: At_Drought_Soil_Dry_P Parameter: Post Timepoint (hr) Value: 6
  misc_feature: MA Experiment 20001558 PARAMETER Experiment Name: At_Drought_Soil_Dry_P Parameter: Post-Treatment Value: Re-Water vs. No Drought
  misc_feature: MA Experiment 20001558 PARAMETER Experiment Name: At_Drought_Soil_Dry_P Parameter: Timepoint (day) Value: 13
  misc_feature: MA Experiment 20001558 PARAMETER Experiment Name: At_Drought_Soil_Dry_P Parameter: Treatment Value: Drought vs. No Drought
  misc_feature: MA Experiment ID: 20001757 Result: Up-regulated in Transcription
  misc_feature: MA Experiment 20001757 PARAMETER Experiment Name: At_50mM_NH4NO3_L-to-H_P Parameter: Timepoint (hr) Value: 6
  misc_feature: MA Experiment 20001757 PARAMETER Experiment Name: At_50mM_NH4NO3_L-to-H_P Parameter: Tissue Value: Leaf
  misc_feature: MA Experiment 20001757 PARAMETER Experiment Name: At_50mM_NH4NO3_L-to-H_P Parameter: Treatment Value: 50mM NH4NO3 vs 100mM Mannitol
  misc_feature: MA Experiment ID: 20001774 Result: Down-regulated in Transcription
  misc_feature: MA Experiment 20001774 PARAMETER Experiment Name: At_Far-red-enriched-adult_P Parameter: Age (day) Value: 31
  misc_feature: MA Experiment 20001774 PARAMETER Experiment Name: At_Far-red-enriched-adult_P Parameter: Light Value: Far-red enriched vs. White
  misc_feature: MA Experiment 20001774 PARAMETER Experiment Name: At_Far-red-enriched-adult_P Parameter: Organism Value: A. thaliana
  misc_feature: MA Experiment 20001774 PARAMETER Experiment Name: At_Far-red-enriched-adult_P Parameter: Plant Line Value: Columbia
  misc_feature: MA Experiment 20001774 PARAMETER Experiment Name: At_Far-red-enriched-adult_P Parameter: Timepoint (hr) Value: 72
  misc_feature: MA Experiment 20001774 PARAMETER Experiment Name: At_Far-red-enriched-adult_P Parameter: Tissue Value: Aerial
cactcccatcaaagcaaaactatctttctccttctcattcctttttctctcactctcctccattaaagctctgcactttctcaaagagaatgttcatgggtaagatgggtcttttgggaattgctctgttttgttttgctgcaatggtgtgctctgttcatggctatgacgctggatgggtcaatgctcatgctaccttctatggtggaagtgatgcttcaggaacaatgggtggagcttgtggctacgggaacctctacagtcaaggttacgggaccaacacggcggcgttgagcactgctctgttcaacaacggtcttagctgcggggcttgttttgagatcaagtgtcagagcgacggcgcgtggtgtttacctggtgctatcattgtcacagccaccaatttctgtcctcctaacaacgctcttcccaataacgctggtggttggtgtaaccctccgcttcatcatttcgatctctctcagcctgtttttcaacgcattgctcagtacaaagctggtgttgtccctgtttcctacagaagggttccgtgtatgagaagaggaggtataagattcacaatcaacggtcactcttacttcaaccttgtcttggtgaccaatgttggtggtgctggagatgttcattcggttgcggttaaaggttctagaacaaggtggcaacaaatgtcaagaaactggggacagaactggcaaagcaacaatctcttaaacggtcaagcattgtcatttaaggtgactgctagtgatggtcgtaccgtcgtctctaacaacattgctccagctagttggtcctttggacaaaccttcaccggccgtcaattccgttaaaattgagtcaagttcggttttatatagttttagggtttgtgtagtagttggttgaggaaagagtagagaaagagagagggtttaaggctttttagggtttttaagtggagagccttgaaacttcttctttgactcttgagggttaaaatggagaaaagagcttgttttataagggctcttttagtcatgttaaggattagggttttagtaagtgggtgttgagtagtagagtggtgtgtcttaagggacctctatgtttcaccaatgggttcctttgttttatcacttttttattttgttttatcttcttttttcaagcttctgtcttgtggtttaaaaagcagaagtgggtaggggcagaggaggaatttcaccacccgcctatgtgtttttctttttgggtcgttttggtttatgttatgaagttgtaattgtaatgtagatcaaccaatgggtttgataagtgttttgttaccatactatgaattttatctgttttgtgtg

SEQ ID NO: 26481 - protein, 282 aa, Arabidopsis thaliana
  peptide (1)..(282): Ceres Seq. ID no. 13490366
  misc_feature (190)..(267): Pfam Name: Pollen allergen Pfam Description: Pollen allergen
  misc_feature (35)..(282): Homolog of NCBI NO: 20502788 NR Description: expansin 13 precursor [Rumex palustris]
  misc_feature (47)..(282): Homolog of NCBI NO: 15222356 NR Description: expansin, putative (EXP1) [Arabidopsis thaliana]
  misc_feature (35)..(282): Homolog of NCBI NO: 20502790 NR Description: expansin 14 precursor [Rumex palustris]
  misc_feature (35)..(282): Homolog of NCBI NO: 15223347 NR Description: expansin, putative (EXP10) [Arabidopsis thaliana]
  misc_feature (35)..(282): Homolog of NCBI NO: 29421118 NR Description: expansin [Vitis labrusca x Vitis vinifera]
  misc_feature (35)..(282): Homolog of NCBI NO: 21314553 NR Description: alpha-expansin precursor [Gossypium hirsutum]
  misc_feature (35)..(282): Homolog of NCBI NO: 38046730 NR Description: alpha-expansin 3 [Populus tremula x Populus
  misc_feature (35)..(282): Homolog of NCBI NO: 21615407 NR Description: alpha-expansin 3 [Cicer arietinum]
  misc_feature (35)..(282): Homolog of NCBI NO: 20137710 NR Description: Alpha-expansin 15 precursor (At-EXP15) (AtEx15)
  misc_feature (30)..(282): Homolog of NCBI NO: 22325441 NR Description: expansin, putative (EXP15) [Arabidopsis thaliana]
LPSKQNYLSPSHSFFSHSPPLKLCTFSKRMFMGKMGLLGIALFCFAAMVCSVHGYDAGWVNAHATFYGGSDASGTMGGACGYGNLYSQGYGTNTAALSTALFNNGLSCGACFEIKCQSDGAWCLPGAIIVTATNFCPPNNALPNNAGGWCNPPLHHFDLSQPVFQRIAQYKAGVVPVSYRRVPCMRRGGIRFTINGHSYFNLVLVTNVGGAGDVHSVAVKGSRTRWQQMSRNWGQNWQSNNLLNGQALSFKVTASDGRTVVSNNIAPASWSFGQTFTGRQFR

SEQ ID NO: 26482 - protein, 253 aa, Arabidopsis thaliana
  peptide (1)..(253): Ceres Seq. ID no. 13490367
  misc_feature (161)..(238): Pfam Name: Pollen allergen Pfam Description: Pollen allergen
  misc_feature (6)..(253): Homolog of NCBI NO: 20502788 NR Description: expansin 13 precursor [Rumex palustris]
  misc_feature (18)..(253): Homolog of NCBI NO: 15222356 NR Description: expansin, putative (EXP1) [Arabidopsis thaliana]
  misc_feature (6)..(253): Homolog of NCBI NO: 20502790 NR Description: expansin 14 precursor [Rumex palustris]
  misc_feature (6)..(253): Homolog of NCBI NO: 15223347 NR Description: expansin, putative (EXP10) [Arabidopsis thaliana]
  misc_feature (6)..(253): Homolog of NCBI NO: 29421118 NR Description: expansin [Vitis labrusca x Vitis vinifera]
  misc_feature (6)..(253): Homolog of NCBI NO: 21314553 NR Description: alpha-expansin precursor [Gossypium hirsutum]
  misc_feature (6)..(253): Homolog of NCBI NO: 38046730 NR Description: alpha-expansin 3 [Populus tremula x Populus
  misc_feature (6)..(253): Homolog of NCBI NO: 21615407 NR Description: alpha-expansin 3 [Cicer arietinum]
  misc_feature (6)..(253): Homolog of NCBI NO: 20137710 NR Description: Alpha-expansin 15 precursor (At-EXP15) (AtEx15)
  misc_feature (1)..(253): Homolog of NCBI NO: 22325441 NR Description: expansin, putative (EXP15) [Arabidopsis thaliana]
MFMGKMGLLGIALFCFAAMVCSVHGYDAGWVNAHATFYGGSDASGTMGGACGYGNLYSQGYGTNTAALSTALFNNGLSCGACFEIKCQSDGAWCLPGAIIVTATNFCPPNNALPNNAGGWCNPPLHHFDLSQPVFQRIAQYKAGVVPVSYRRVPCMRRGGIRFTINGHSYFNLVLVTNVGGAGDVHSVAVKGSRTRWQQMSRNWGQNWQSNNLLNGQALSFKVTASDGRTVVSNNIAPASWSFGQTFTGRQFR

SEQ ID NO: 26483 - protein, 251 aa, Arabidopsis thaliana
  peptide (1)..(251): Ceres Seq. ID no. 13490368
  misc_feature (159)..(236): Pfam Name: Pollen allergen Pfam Description: Pollen allergen
  misc_feature (4)..(251): Homolog of NCBI NO: 20502788 NR Description: expansin 13 precursor [Rumex palustris]
  misc_feature (16)..(251): Homolog of NCBI NO: 15222356 NR Description: expansin, putative (EXP1) [Arabidopsis thaliana]
  misc_feature (4)..(251): Homolog of NCBI NO: 20502790 NR Description: expansin 14 precursor [Rumex palustris]
  misc_feature (4)..(251): Homolog of NCBI NO: 15223347 NR Description: expansin, putative (EXP10) [Arabidopsis thaliana]
  misc_feature (4)..(251): Homolog of NCBI NO: 29421118 NR Description: expansin [Vitis labrusca x Vitis vinifera]
  misc_feature (4)..(251): Homolog of NCBI NO: 21314553 NR Description: alpha-expansin precursor [Gossypium hirsutum]
  misc_feature (4)..(251): Homolog of NCBI NO: 38046730 NR Description: alpha-expansin 3 [Populus tremula x Populus
  misc_feature (4)..(251): Homolog of NCBI NO: 21615407 NR Description: alpha-expansin 3 [Cicer arietinum]
  misc_feature (4)..(251): Homolog of NCBI NO: 20137710 NR Description: Alpha-expansin 15 precursor (At-EXP15) (AtEx15)
  misc_feature (1)..(251): Homolog of NCBI NO: 22325441 NR Description: expansin, putative (EXP15) [Arabidopsis thaliana]
MGKMGLLGIALFCFAAMVCSVHGYDAGWVNAHATFYGGSDASGTMGGACGYGNLYSQGYGTNTAALSTALFNNGLSCGACFEIKCQSDGAWCLPGAIIVTATNFCPPNNALPNNAGGWCNPPLHHFDLSQPVFQRIAQYKAGVVPVSYRRVPCMRRGGIRFTINGHSYFNLVLVTNVGGAGDVHSVAVKGSRTRWQQMSRNWGQNWQSNNLLNGQALSFKVTASDGRTVVSNNIAPASWSFGQTFTGRQFR

SEQ ID NO: 26484 - DNA, 1270 bp, Arabidopsis thaliana
  misc_feature (1)..(1270): Ceres Seq. ID no. 12334188
  misc_feature: MA Experiment ID: 20000306 Result: Up-regulated in Transcription
  misc_feature: MA Experiment 20000306 PARAMETER Experiment Name: At_Germinating_Seeds_Sub_P Parameter: Age (hr) Value: 6 vs. 0
  misc_feature: MA Experiment 20000306 PARAMETER Experiment Name: At_Germinating_Seeds_Sub_P Parameter: Organism Value: A. thaliana
  misc_feature: MA Experiment 20000306 PARAMETER Experiment Name: At_Germinating_Seeds_Sub_P Parameter: Plant Line Value: WS
  misc_feature: MA Experiment 20000306 PARAMETER Experiment Name: At_Germinating_Seeds_Sub_P Parameter: Tissue Value: Germinating Seeds
  misc_feature: MA Experiment ID: 20000307 Result: Up-regulated in Transcription
  misc_feature: MA Experiment 20000307 PARAMETER Experiment Name: At_Germinating_Seeds_Sub_P Parameter: Age (hr) Value: 24 vs. 0
  misc_feature: MA Experiment 20000307 PARAMETER Experiment Name: At_Germinating_Seeds_Sub_P Parameter: Organism Value: A. thaliana
  misc_feature: MA Experiment 20000307 PARAMETER Experiment Name: At_Germinating_Seeds_Sub_P Parameter: Plant Line Value: WS
  misc_feature: MA Experiment 20000307 PARAMETER Experiment Name: At_Germinating_Seeds_Sub_P Parameter: Tissue Value: Germinating Seeds
  misc_feature: MA Experiment ID: 20000327 Result: Up-regulated in Transcription
  misc_feature: MA Experiment 20000327 PARAMETER Experiment Name: At_42deg_Heat_Sub_P Parameter: Age (day) Value: 14
  misc_feature: MA Experiment 20000327 PARAMETER Experiment Name: At_42deg_Heat_Sub_P Parameter: Organism Value: A. thaliana
  misc_feature: MA Experiment 20000327 PARAMETER Experiment Name: At_42deg_Heat_Sub_P Parameter: Plant Line Value: WS
  misc_feature: MA Experiment 20000327 PARAMETER Experiment Name: At_42deg_Heat_Sub_P Parameter: Temperature (deg C) Value: 42 vs. 22
  misc_feature: MA Experiment 20000327 PARAMETER Experiment Name: At_42deg_Heat_Sub_P Parameter: Timepoint (hr) Value: 1
  misc_feature: MA Experiment 20000327 PARAMETER Experiment Name: At_42deg_Heat_Sub_P Parameter: Tissue Value: Aerial
  misc_feature: MA Experiment ID: 20000328 Result: Up-regulated in Transcription
  misc_feature: MA Experiment 20000328 PARAMETER Experiment Name: At_42deg_Heat_Sub_P Parameter: Age (day) Value: 14
  misc_feature: MA Experiment 20000328 PARAMETER Experiment Name: At_42deg_Heat_Sub_P Parameter: Organism Value: A. thaliana
  misc_feature: MA Experiment 20000328 PARAMETER Experiment Name: At_42deg_Heat_Sub_P Parameter: Plant Line Value: WS
  misc_feature: MA Experiment 20000328 PARAMETER Experiment Name: At_42deg_Heat_Sub_P Parameter: Temperature (deg C) Value: 42 vs. 22
  misc_feature: MA Experiment 20000328 PARAMETER Experiment Name: At_42deg_Heat_Sub_P Parameter: Timepoint (hr) Value: 6
  misc_feature: MA Experiment 20000328 PARAMETER Experiment Name: At_42deg_Heat_Sub_P Parameter: Tissue Value: Aerial
  misc_feature: MA Experiment ID: 20000347 Result: Up-regulated in Transcription
  misc_feature: MA Experiment 20000347 PARAMETER Experiment Name: At_2mM_SA_Sub_P Parameter: Age (day) Value: 14
  misc_feature: MA Experiment 20000347 PARAMETER Experiment Name: At_2mM_SA_Sub_P Parameter: Organism Value: A. thaliana
  misc_feature: MA Experiment 20000347 PARAMETER Experiment Name: At_2mM_SA_Sub_P Parameter: Plant Line Value: WS
  misc_feature: MA Experiment 20000347 PARAMETER Experiment Name: At_2mM_SA_Sub_P Parameter: Timepoint (hr) Value: 6
  misc_feature: MA Experiment 20000347 PARAMETER Experiment Name: At_2mM_SA_Sub_P Parameter: Tissue Value: Aerial
  misc_feature: MA Experiment 20000347 PARAMETER Experiment Name: At_2mM_SA_Sub_P Parameter: Treatment Value: 2mM SA vs. No Treatment
  misc_feature: MA Experiment ID: 20000348 Result: Up-regulated in Transcription
  misc_feature: MA Experiment 20000348 PARAMETER Experiment Name: At_100uM_ABA_Sub_P Parameter: Age (day) Value: 14
  misc_feature: MA Experiment 20000348 PARAMETER Experiment Name: At_100uM_ABA_Sub_P Parameter: Organism Value: A. thaliana
  misc_feature: MA Experiment 20000348 PARAMETER Experiment Name: At_100uM_ABA_Sub_P Parameter: Plant Line Value: WS
  misc_feature: MA Experiment 20000348 PARAMETER Experiment Name: At_100uM_ABA_Sub_P Parameter: Timepoint (hr) Value: 1
  misc_feature: MA Experiment 20000348 PARAMETER Experiment Name: At_100uM_ABA_Sub_P Parameter: Tissue Value: Aerial
  misc_feature: MA Experiment 20000348 PARAMETER Experiment Name: At_100uM_ABA_Sub_P Parameter: Treatment Value: 100uM ABA vs. No Treatment
  misc_feature: MA Experiment ID: 20000352 Result: Up-regulated in Transcription
  misc_feature: MA Experiment 20000352 PARAMETER Experiment Name: At_Drought_Sub_P Parameter: Age (day) Value: 7
  misc_feature: MA Experiment 20000352 PARAMETER Experiment Name: At_Drought_Sub_P Parameter: Organism Value: A. thaliana
  misc_feature: MA Experiment 20000352 PARAMETER Experiment Name: At_Drought_Sub_P Parameter: Plant Line Value: WS
  misc_feature: MA Experiment 20000352 PARAMETER Experiment Name: At_Drought_Sub_P Parameter: Timepoint (hr) Value: 6
  misc_feature: MA Experiment 20000352 PARAMETER Experiment Name: At_Drought_Sub_P Parameter: Tissue Value: Whole Plant
  misc_feature: MA Experiment 20000352 PARAMETER Experiment Name: At_Drought_Sub_P Parameter: Treatment Value: Drought vs. No Drought
  misc_feature: MA Experiment ID: 20000440 Result: Up-regulated in Transcription
  misc_feature: MA Experiment 20000440 PARAMETER Experiment Name: At_Closed-Flower__Sub_P Parameter: Tissue Value: Closed Flower vs. Whole Plant
aaaaaacgaaaaaaaaactcacctttctcaaaatcacacaaatcttctttatttgttattctcaatccttccttcatctccaggtttctttcgattcgttgagtcattcaatttttccatcactgggttttcctctctgaatccgatcggagaatccagtcgattagtaatctagcgctctctctttttctattcgatgacttatcacgaagaagacgatacagtttctgaatttcgagttagagttgaagaagatggagttgataaattaggtcattatgttaaacttagtgaagatttcgaagaacatcgacaagaaacagaacaagatgatgaagaatcatcatcatcaccgtcctcttcttcttcttcttcttcatgtggacagaaacgatctgtttggttttggatcaagcttggtcttttcttcacttttctaactgctttgggtctcgctggttacaaatggctatatcctttaatcatggataaggagctaatcccactcataaaatgggagatggagacatttacacaccctgtgtgcggtattcttgtgtttgcatcagtctctttattccctttgatacttattccaactacgccgtcaatgtgggtggctgggattacatttggttatttctatggccttctccttactcttccagctgtagctattggtgtttcacttccttacttcatcagctatctcttcctcaaccaaattcaaggttggttagaaagatatccagatcaagctgcaatgttgagagctgctggtggaggcagttggtttcatcagtttcgtgcagttaccttaatccggatttctccatttccttttgctgtatataactactgcgctgttgcaactcgtgtgaagttcggtccttacatggctggttctctcgtaggcatggcgccagagatttttgtcgcaatttatacagggattcttataaggacattggcagatgcatccactgcggaacaaaagggtctctcgattcttcaaattgttctcaacatttttggttttgtagcaactgttgtgacaactgttctcatcactaagtatgcgaaaagacagcttgaagttatgaagaaggagaaggaagctttgttgttacagtaatggagacaacaaccttagaagttatgtctctgcttattcccaaattaagtacagggtttcgtccatgatgtgaaaaaaaaactcttgatttttggtctctgttttggtttgtttatagccgagaaatgaaagggt

SEQ ID NO: 26485 - protein, 312 aa, Arabidopsis thaliana
  peptide (1)..(312): Ceres Seq. ID no. 12334189
  misc_feature (146)..(251): Homolog of NCBI NO: 8778630 NR Description: F5O11.19 [Arabidopsis thaliana]
  misc_feature (245)..(305): Homolog of NCBI NO: 8778630 NR Description: F5O11.19 [Arabidopsis thaliana]
  misc_feature (1)..(178): Homolog of NCBI NO: 8778630 NR Description: F5O11.19 [Arabidopsis thaliana]
  misc_feature (66)..(306): Homolog of NCBI NO: 34913316 NR Description: P0519E12.36 [Oryza sativa (japonica
  misc_feature (47)..(303): Homolog of NCBI NO: 18395356 NR Description: expressed protein
  misc_feature (1)..(99): Homolog of NCBI NO: 7486891 NR Description: hypothetical protein T12H17.240 - Arabidopsis
  misc_feature (169)..(310): Homolog of NCBI NO: 7486891 NR Description: hypothetical protein T12H17.240 - Arabidopsis
  misc_feature (1)..(305): Homolog of NCBI NO: 15221330 NR Description: hypothetical protein; protein id: At1g12450.1
  misc_feature (1)..(310): Homolog of NCBI NO: 30685958 NR Description: expressed protein [Arabidopsis thaliana]
  misc_feature (1)..(312): Homolog of NCBI NO: 15234386 NR Description: putative protein
MTYHEEDDTVSEFRVRVEEDGVDKLGHYVKLSEDFEEHRQETEQDDEESSSSPSSSSSSSSCGQKRSVWFWIKLGLFFTFLTALGLAGYKWLYPLIMDKELIPLIKWEMETFTHPVCGILVFASVSLFPLILIPTTPSMWVAGITFGYFYGLLLTLPAVAIGVSLPYFISYLFLNQIQGWLERYPDQAAMLRAAGGGSWFHQFRAVTLIRISPFPFAVYNYCAVATRVKFGPYMAGSLVGMAPEIFVAIYTGILIRTLADASTAEQKGLSILQIVLNIFGFVATVVTTVLITKYAKRQLEVMKKEKEALLLQ

SEQ ID NO: 26486 - protein, 216 aa, Arabidopsis thaliana
  peptide (1)..(216): Ceres Seq. ID no. 12334190
  misc_feature (1)..(216): Homolog of NCBI NO: 15234386 NR Description: putative protein
  misc_feature (81)..(207): Homolog of NCBI NO: 25410981 NR Description: hypothetical protein At2g02370 [imported] -
  misc_feature (50)..(155): Homolog of NCBI NO: 8778630 NR Description: F5O11.19 [Arabidopsis thaliana]
  misc_feature (149)..(209): Homolog of NCBI NO: 8778630 NR Description: F5O11.19 [Arabidopsis thaliana]
  misc_feature (1)..(82): Homolog of NCBI NO: 8778630 NR Description: F5O11.19 [Arabidopsis thaliana]
  misc_feature (1)..(210): Homolog of NCBI NO: 34913316 NR Description: P0519E12.36 [Oryza sativa (japonica
  misc_feature (1)..(207): Homolog of NCBI NO: 18395356 NR Description: expressed protein
  misc_feature (73)..(214): Homolog of NCBI NO: 7486891 NR Description: hypothetical protein T12H17.240 - Arabidopsis
  misc_feature (1)..(209): Homolog of NCBI NO: 15221330 NR Description: hypothetical protein; protein id: At1g12450.1
  misc_feature (1)..(214): Homolog of NCBI NO: 30685958 NR Description: expressed protein [Arabidopsis thaliana]
MDKELIPLIKWEMETFTHPVCGILVFASVSLFPLILIPTTPSMWVAGITFGYFYGLLLTLPAVAIGVSLPYFISYLFLNQIQGWLERYPDQAAMLRAAGGGSWFHQFRAVTLIRISPFPFAVYNYCAVATRVKFGPYMAGSLVGMAPEIFVAIYTGILIRTLADASTAEQKGLSILQIVLNIFGFVATVVTTVLITKYAKRQLEVMKKEKEALLLQ

SEQ ID NO: 26487 - protein, 204 aa, Arabidopsis thaliana
  peptide (1)..(204): Ceres Seq. ID no. 12334191
  misc_feature (69)..(195): Homolog of NCBI NO: 25410981 NR Description: hypothetical protein At2g02370 [imported] -
  misc_feature (38)..(143): Homolog of NCBI NO: 8778630 NR Description: F5O11.19 [Arabidopsis thaliana]
  misc_feature (137)..(197): Homolog of NCBI NO: 8778630 NR Description: F5O11.19 [Arabidopsis thaliana]
  misc_feature (1)..(70): Homolog of NCBI NO: 8778630 NR Description: F5O11.19 [Arabidopsis thaliana]
  misc_feature (1)..(198): Homolog of NCBI NO: 34913316 NR Description: P0519E12.36 [Oryza sativa (japonica
  misc_feature (1)..(195): Homolog of NCBI NO: 18395356 NR Description: expressed protein
  misc_feature (61)..(202): Homolog of NCBI NO: 7486891 NR Description: hypothetical protein T12H17.240 - Arabidopsis
  misc_feature (1)..(197): Homolog of NCBI NO: 15221330 NR Description: hypothetical protein; protein id: At1g12450.1
  misc_feature (1)..(202): Homolog of NCBI NO: 30685958 NR Description: expressed protein [Arabidopsis thaliana]
  misc_feature (1)..(204): Homolog of NCBI NO: 15234386 NR Description: putative protein
METFTHPVCGILVFASVSLFPLILIPTTPSMWVAGITFGYFYGLLLTLPAVAIGVSLPYFISYLFLNQIQGWLERYPDQAAMLRAAGGGSWFHQFRAVTLIRISPFPFAVYNYCAVATRVKFGPYMAGSLVGMAPEIFVAIYTGILIRTLADASTAEQKGLSILQIVLNIFGFVATVVTTVLITKYAKRQLEVMKKEKEALLLQ

SEQ ID NO: 26488 - DNA, 834 bp, Arabidopsis thaliana
  misc_feature (1)..(834): Ceres Seq. ID no. 13504835
  misc_feature: MA Experiment ID: 108434 Result: Down-regulated in Transcription
  misc_feature: MA Experiment 108434 PARAMETER Experiment Name: At_Root_Tips_cDNA_P Parameter: Tissue Value: Root Tips
  misc_feature: MA Experiment ID: 108462 Result: Up-regulated in Transcription
  misc_feature: MA Experiment 108462 PARAMETER Experiment Name: At_Germinating_Seeds_cDNA_P Parameter: Age (day) Value: 2 vs. 0
  misc_feature: MA Experiment 108462 PARAMETER Experiment Name: At_Germinating_Seeds_cDNA_P Parameter: Tissue Value: Germinating Seeds
  misc_feature: MA Experiment ID: 108463 Result: Up-regulated in Transcription
  misc_feature: MA Experiment 108463 PARAMETER Experiment Name: At_Germinating_Seeds_cDNA_P Parameter: Age (day) Value: 3 vs. 0
  misc_feature: MA Experiment 108463 PARAMETER Experiment Name: At_Germinating_Seeds_cDNA_P Parameter: Tissue Value: Germinating Seeds
  misc_feature: MA Experiment ID: 108464 Result: Up-regulated in Transcription
  misc_feature: MA Experiment 108464 PARAMETER Experiment Name: At_Germinating_Seeds_cDNA_P Parameter: Age (day) Value: 4 vs. 0
  misc_feature: MA Experiment 108464 PARAMETER Experiment Name: At_Germinating_Seeds_cDNA_P Parameter: Tissue Value: Germinating Seeds
  misc_feature: MA Experiment ID: 108573 Result: Up-regulated in Transcription
  misc_feature: MA Experiment 108573 PARAMETER Experiment Name: At_Drought_cDNA_P Parameter: Timepoint (hr) Value: 6
  misc_feature: MA Experiment 108573 PARAMETER Experiment Name: At_Drought_cDNA_P Parameter: Tissue Value: Aerial
  misc_feature: MA Experiment 108573 PARAMETER Experiment Name: At_Drought_cDNA_P Parameter: Treatment Value: Drought vs. No Drought
  misc_feature: MA Experiment ID: 108577 Result: Down-regulated in Transcription
  misc_feature: MA Experiment 108577 PARAMETER Experiment Name: At_42deg_Heat_cDNA_P Parameter: Temperature (deg C) Value: 42 vs. 22
  misc_feature: MA Experiment 108577 PARAMETER Experiment Name: At_42deg_Heat_cDNA_P Parameter: Timepoint (hr) Value: 6
  misc_feature: MA Experiment 108577 PARAMETER Experiment Name: At_42deg_Heat_cDNA_P Parameter: Tissue Value: Aerial
  misc_feature: MA Experiment ID: 108605 Result: Up-regulated in Transcription
  misc_feature: MA Experiment 108605 PARAMETER Experiment Name: At_100uM_ABA_cDNA_P Parameter: Timepoint (hr) Value: 6
  misc_feature: MA Experiment 108605 PARAMETER Experiment Name: At_100uM_ABA_cDNA_P Parameter: Tissue Value: Aerial
  misc_feature: MA Experiment 108605 PARAMETER Experiment Name: At_100uM_ABA_cDNA_P Parameter: Treatment Value: 100uM ABA vs. No Treatment
  misc_feature: MA Experiment ID: 108607 Result: Up-regulated in Transcription
  misc_feature: MA Experiment 108607 PARAMETER Experiment Name: At_100uM_ABA_cDNA_P Parameter: Timepoint (hr) Value: 4
  misc_feature: MA Experiment 108607 PARAMETER Experiment Name: At_100uM_ABA_cDNA_P Parameter: Tissue Value: Aerial
  misc_feature: MA Experiment 108607 PARAMETER Experiment Name: At_100uM_ABA_cDNA_P Parameter: Treatment Value: 100uM ABA vs. No Treatment
  misc_feature: MA Experiment ID: 108609 Result: Up-regulated in Transcription
  misc_feature: MA Experiment 108609 PARAMETER Experiment Name: At_100uM_ABA_cDNA_P Parameter: Timepoint (hr) Value: 24
  misc_feature: MA Experiment 108609 PARAMETER Experiment Name: At_100uM_ABA_cDNA_P Parameter: Tissue Value: Aerial
  misc_feature: MA Experiment 108609 PARAMETER Experiment Name: At_100uM_ABA_cDNA_P Parameter: Treatment Value: 100uM ABA vs. No Treatment
  misc_feature: MA Experiment ID: 108668 Result: Up-regulated in Transcription
  misc_feature: MA Experiment 108668 PARAMETER Experiment Name: At_2mM_SA_cDNA_P Parameter: Plant Line Value: WS
  misc_feature: MA Experiment 108668 PARAMETER Experiment Name: At_2mM_SA_cDNA_P Parameter: Timepoint (hr) Value: 6
  misc_feature: MA Experiment 108668 PARAMETER Experiment Name: At_2mM_SA_cDNA_P Parameter: Treatment Value: 2mM SA vs. No Treatment
  misc_feature: MA Experiment ID: 20000068 Result: Up-regulated in Transcription
  misc_feature: MA Experiment ID: 20000069 Result: Up-regulated in Transcription
  misc_feature: MA Experiment 20000069 PARAMETER Experiment Name: At_100uM_ABA_Mutants_cDNA_P Parameter: Plant Line Value: CS23
  misc_feature: MA Experiment 20000069 PARAMETER Experiment Name: At_100uM_ABA_Mutants_cDNA_P Parameter: Timepoint (hr) Value: 6
  misc_feature: MA Experiment 20000069 PARAMETER Experiment Name: At_100uM_ABA_Mutants_cDNA_P Parameter: Tissue Value: Aerial
  misc_feature: MA Experiment 20000069 PARAMETER Experiment Name: At_100uM_ABA_Mutants_cDNA_P Parameter: Treatment Value: 100uM ABA vs. No Treatment
  misc_feature: MA Experiment ID: 20000072 Result: Up-regulated in Transcription
  misc_feature: MA Experiment 20000072 PARAMETER Experiment Name: At_100uM_ABA_Mutants_cDNA_P Parameter: Plant Line Value: CS8105
  misc_feature: MA Experiment 20000072 PARAMETER Experiment Name: At_100uM_ABA_Mutants_cDNA_P Parameter: Timepoint (hr) Value: 6
  misc_feature: MA Experiment 20000072 PARAMETER Experiment Name: At_100uM_ABA_Mutants_cDNA_P Parameter: Tissue Value: Aerial
  misc_feature: MA Experiment 20000072 PARAMETER Experiment Name: At_100uM_ABA_Mutants_cDNA_P Parameter: Treatment Value: 100uM ABA vs. No Treatment
  misc_feature: MA Experiment ID: 20000087 Result: Up-regulated in Transcription
  misc_feature: MA Experiment 20000087 PARAMETER Experiment Name: At_100uM_ABA_Mutants_cDNA_P Parameter: Plant Line Value: WS
  misc_feature: MA Experiment 20000087 PARAMETER Experiment Name: At_100uM_ABA_Mutants_cDNA_P Parameter: Timepoint (hr) Value: 6
  misc_feature: MA Experiment 20000087 PARAMETER Experiment Name: At_100uM_ABA_Mutants_cDNA_P Parameter: Tissue Value: Aerial
  misc_feature: MA Experiment 20000087 PARAMETER Experiment Name: At_100uM_ABA_Mutants_cDNA_P Parameter: Treatment Value: 100uM ABA vs. No Treatment
  misc_feature: MA Experiment ID: 20000111 Result: Down-regulated in Transcription
  misc_feature: MA Experiment 20000111 PARAMETER Experiment Name: At_42deg_Heat_cDNA_P Parameter: Temperature (deg C) Value: 42 vs. 22
  misc_feature: MA Experiment 20000111 PARAMETER Experiment Name: At_42deg_Heat_cDNA_P Parameter: Timepoint (hr) Value: 6
  misc_feature: MA Experiment 20000111 PARAMETER Experiment Name: At_42deg_Heat_cDNA_P Parameter: Tissue Value: Aerial
  misc_feature: MA Experiment ID: 20000144 Result: Down-regulated in Transcription
  misc_feature: MA Experiment 20000144 PARAMETER Experiment Name: At_42deg_Heat_cDNA_P Parameter: Temperature (deg C) Value: 42 vs. 22
  misc_feature: MA Experiment 20000144 PARAMETER Experiment Name: At_42deg_Heat_cDNA_P Parameter: Timepoint (hr) Value: 1
  misc_feature: MA Experiment 20000144 PARAMETER Experiment Name: At_42deg_Heat_cDNA_P Parameter: Tissue Value: Aerial
  misc_feature: MA Experiment ID: 20000173 Result: Down-regulated in Transcription
  misc_feature: MA Experiment 20000173 PARAMETER Experiment Name: At_42deg_Heat_P Parameter: Age (day) Value: 14
  misc_feature: MA Experiment 20000173 PARAMETER Experiment Name: At_42deg_Heat_P Parameter: Organism Value: A. thaliana
  misc_feature: MA Experiment 20000173 PARAMETER Experiment Name: At_42deg_Heat_P Parameter: Plant Line Value: WS
  misc_feature: MA Experiment 20000173 PARAMETER Experiment Name: At_42deg_Heat_P Parameter: Temperature (deg C) Value: 42 vs. 22
  misc_feature: MA Experiment 20000173 PARAMETER Experiment Name: At_42deg_Heat_P Parameter: Timepoint (hr) Value: 6
  misc_feature: MA Experiment 20000173 PARAMETER Experiment Name: At_42deg_Heat_P Parameter: Tissue Value: Aerial
  misc_feature: MA Experiment ID: 20000180 Result: Up-regulated in Transcription
  misc_feature: MA Experiment 20000180 PARAMETER Experiment Name: At_Germinating_Seeds_P Parameter: Age (hr) Value: 24 vs. 0
  misc_feature: MA Experiment 20000180 PARAMETER Experiment Name: At_Germinating_Seeds_P Parameter: Tissue Value: Germinating Seeds
  misc_feature: MA Experiment ID: 20000182 Result: Up-regulated in Transcription
  misc_feature: MA Experiment 20000182 PARAMETER Experiment Name: At_2mM_SA_P Parameter: Age (day) Value: 14
  misc_feature: MA Experiment 20000182 PARAMETER Experiment Name: At_2mM_SA_P Parameter: Organism Value: A. thaliana
  misc_feature: MA Experiment 20000182 PARAMETER Experiment Name: At_2mM_SA_P Parameter: Plant Line Value: WS
  misc_feature: MA Experiment 20000182 PARAMETER Experiment Name: At_2mM_SA_P Parameter: Timepoint (hr) Value: 6
  misc_feature: MA Experiment 20000182 PARAMETER Experiment Name: At_2mM_SA_P Parameter: Tissue Value: Aerial
  misc_feature: MA Experiment 20000182 PARAMETER Experiment Name: At_2mM_SA_P Parameter: Treatment Value: 2mM SA vs. No Treatment
  misc_feature: MA Experiment ID: 20000185 Result: Down-regulated in Transcription
  misc_feature: MA Experiment 20000185 PARAMETER Experiment Name: At_Roots__P Parameter: Age (day) Value: 7 vs. 21
  misc_feature: MA Experiment 20000185 PARAMETER Experiment Name: At_Roots__P Parameter: Organism Value: A. thaliana
  misc_feature: MA Experiment 20000185 PARAMETER Experiment Name: At_Roots__P Parameter: Tissue Value: Roots vs. Whole Plant
  misc_feature: MA Experiment ID: 20000264 Result: Down-regulated in Transcription
  misc_feature: MA Experiment 20000264 PARAMETER Experiment Name: At_Open_Flower_P Parameter: Age (day) Value: 21
  misc_feature: MA Experiment 20000264 PARAMETER Experiment Name: At_Open_Flower_P Parameter: Plant Line Value: WS
  misc_feature: MA Experiment 20000264 PARAMETER Experiment Name: At_Open_Flower_P Parameter: Tissue Value: Open Flower vs. Whole Plant
  misc_feature: MA Experiment ID: 20000265 Result: Down-regulated in Transcription
  misc_feature: MA Experiment 20000265 PARAMETER Experiment Name: At_Open_Flower_P Parameter: Age (day) Value: 21
  misc_feature: MA Experiment 20000265 PARAMETER Experiment Name: At_Open_Flower_P Parameter: Plant Line Value: WS
  misc_feature: MA Experiment 20000265 PARAMETER Experiment Name: At_Open_Flower_P Parameter: Tissue Value: Closed Flower vs. Whole Plant
  misc_feature: MA Experiment ID: 20000286 Result: Down-regulated in Transcription
  misc_feature: MA Experiment 20000286 PARAMETER Experiment Name: At_Open_Flower_P Parameter: Age (day) Value: 21
  misc_feature: MA Experiment 20000286 PARAMETER Experiment Name: At_Open_Flower_P Parameter: Plant Line Value: WS
  misc_feature: MA Experiment 20000286 PARAMETER Experiment Name: At_Open_Flower_P Parameter: Tissue Value: Half Open vs. Whole Plant
  misc_feature: MA Experiment ID: 20000439 Result: Down-regulated in Transcription
  misc_feature: MA Experiment 20000439 PARAMETER Experiment Name: At_Roots__P Parameter: Age (day) Value: 14 vs. 21
  misc_feature: MA Experiment 20000439 PARAMETER Experiment Name: At_Roots__P Parameter: Organism Value: A. thaliana
  misc_feature: MA Experiment 20000439 PARAMETER Experiment Name: At_Roots__P Parameter: Tissue Value: Roots vs. Whole Plant
  misc_feature: MA Experiment ID: 20000451 Result: Down-regulated in Transcription
  misc_feature: MA Experiment 20000451 PARAMETER Experiment Name: At_CS6879_Shoots-Roots_P Parameter: Age (day) Value: 14
  misc_feature: MA Experiment 20000451 PARAMETER Experiment Name: At_CS6879_Shoots-Roots_P Parameter: Organism Value: A. thaliana
  misc_feature: MA Experiment 20000451 PARAMETER Experiment Name: At_CS6879_Shoots-Roots_P Parameter: Plant Line Value: CS6879 vs. WS
  misc_feature: MA Experiment 20000451 PARAMETER Experiment Name: At_CS6879_Shoots-Roots_P Parameter: Tissue Value: Roots
  misc_feature: MA Experiment ID: 20000452 Result: Down-regulated in Transcription
  misc_feature: MA Experiment 20000452 PARAMETER Experiment Name: At_CS6879_Shoots-Roots_P Parameter: Age (day) Value: 14
  misc_feature: MA Experiment 20000452 PARAMETER Experiment Name: At_CS6879_Shoots-Roots_P Parameter: Organism Value: A. thaliana
  misc_feature: MA Experiment 20000452 PARAMETER Experiment Name: At_CS6879_Shoots-Roots_P Parameter: Plant Line Value: CS6879 vs. WS
  misc_feature: MA Experiment 20000452 PARAMETER Experiment Name: At_CS6879_Shoots-Roots_P Parameter: Tissue Value: Shoots
  misc_feature: MA Experiment ID: 20000453 Result: Up-regulated in Transcription
  misc_feature: MA Experiment 20000453 PARAMETER Experiment Name: At_100uM_ABA_P Parameter: Age (day) Value: 15
  misc_feature: MA Experiment 20000453 PARAMETER Experiment Name: At_100uM_ABA_P Parameter: Organism Value: A. thaliana
  misc_feature: MA Experiment 20000453 PARAMETER Experiment Name: At_100uM_ABA_P Parameter: Plant Line Value: WS
  misc_feature: MA Experiment 20000453 PARAMETER Experiment Name: At_100uM_ABA_P Parameter: Timepoint (hr) Value: 24
  misc_feature: MA Experiment 20000453 PARAMETER Experiment Name: At_100uM_ABA_P Parameter: Tissue Value: Aerial
  misc_feature: MA Experiment 20000453 PARAMETER Experiment Name: At_100uM_ABA_P Parameter: Treatment Value: 100uM ABA vs. No Treatment
  misc_feature: MA Experiment ID: 20000573 Result: Down-regulated in Transcription
  misc_feature: MA Experiment 20000573 PARAMETER Experiment Name: At_100uM_ABA_Mutants__P Parameter: Organism Value: A. thaliana
  misc_feature: MA Experiment 20000573 PARAMETER Experiment Name: At_100uM_ABA_Mutants__P Parameter: Plant Line Value: CS22 vs. Ler wt
  misc_feature: MA Experiment 20000573 PARAMETER Experiment Name: At_100uM_ABA_Mutants__P Parameter: Timepoint (hr) Value: N/A
  misc_feature: MA Experiment 20000573 PARAMETER Experiment Name: At_100uM_ABA_Mutants__P Parameter: Tissue Value: Whole Plant
  misc_feature: MA Experiment 20000573 PARAMETER Experiment Name: At_100uM_ABA_Mutants__P Parameter: Treatment Value: None
  misc_feature: MA Experiment ID: 20000574 Result: Down-regulated in Transcription
  misc_feature: MA Experiment 20000574 PARAMETER Experiment Name: At_100uM_ABA_Mutants__P Parameter: Organism Value: A. thaliana
  misc_feature: MA Experiment 20000574 PARAMETER Experiment Name: At_100uM_ABA_Mutants__P Parameter: Plant Line Value: CS23 vs. Ler wt
  misc_feature: MA Experiment 20000574 PARAMETER Experiment Name: At_100uM_ABA_Mutants__P Parameter: Timepoint (hr) Value: N/A
  misc_feature: MA Experiment 20000574 PARAMETER Experiment Name: At_100uM_ABA_Mutants__P Parameter: Tissue Value: Whole Plant
  misc_feature: MA Experiment 20000574 PARAMETER Experiment Name: At_100uM_ABA_Mutants__P Parameter: Treatment Value: None
  misc_feature: MA Experiment ID: 20000794 Result: Down-regulated in Transcription
  misc_feature: MA Experiment 20000794 PARAMETER Experiment Name: At_Petals_P Parameter: Age (day) Value: 23-25 days
  misc_feature: MA Experiment 20000794 PARAMETER Experiment Name: At_Petals_P Parameter: Plant Line Value: WS
  misc_feature: MA Experiment 20000794 PARAMETER Experiment Name: At_Petals_P Parameter: Tissue Value: Petals vs. Whole plant
  misc_feature: MA Experiment ID: 20001248 Result: Down-regulated in Transcription
  misc_feature: MA Experiment 20001248 PARAMETER Experiment Name: At_Far-red-induction_P Parameter: Age (day) Value: 7
  misc_feature: MA Experiment 20001248 PARAMETER Experiment Name: At_Far-red-induction_P Parameter: Light Value: Far-red vs. White
  misc_feature: MA Experiment 20001248 PARAMETER Experiment Name: At_Far-red-induction_P Parameter: Organism Value: A. thaliana
  misc_feature: MA Experiment 20001248 PARAMETER Experiment Name: At_Far-red-induction_P Parameter: Plant Line Value: Columbia
  misc_feature: MA Experiment 20001248 PARAMETER Experiment Name: At_Far-red-induction_P Parameter: Timepoint (hr) Value: 4
  misc_feature: MA Experiment 20001248 PARAMETER Experiment Name: At_Far-red-induction_P Parameter: Tissue Value: Whole Plant
  misc_feature: MA Experiment ID: 20001450 Result: Down-regulated in Transcription
  misc_feature: MA Experiment 20001450 PARAMETER Experiment Name: At_Far-red-induction_P Parameter: Age (day) Value: 7
  misc_feature: MA Experiment 20001450 PARAMETER Experiment Name: At_Far-red-induction_P Parameter: Light Value: Far-red vs. White
  misc_feature: MA Experiment 20001450 PARAMETER Experiment Name: At_Far-red-induction_P Parameter: Organism Value: A. thaliana
  misc_feature: MA Experiment 20001450 PARAMETER Experiment Name: At_Far-red-induction_P Parameter: Plant Line Value: Columbia
  misc_feature: MA Experiment 20001450 PARAMETER Experiment Name: At_Far-red-induction_P Parameter: Timepoint (hr) Value: 8
  misc_feature: MA Experiment 20001450 PARAMETER Experiment Name: At_Far-red-induction_P Parameter: Tissue Value: Whole Plant
  misc_feature: MA Experiment ID: 20001560 Result: Down-regulated in Transcription
  misc_feature: MA Experiment 20001560 PARAMETER Experiment Name: At_Drought_Soil_Dry_P Parameter: Age (day) Value: 28
  misc_feature: MA Experiment 20001560 PARAMETER Experiment Name: At_Drought_Soil_Dry_P Parameter: Organism Value: A. thaliana
  misc_feature: MA Experiment 20001560 PARAMETER Experiment Name: At_Drought_Soil_Dry_P Parameter: Plant Line Value: WS
  misc_feature: MA Experiment 20001560 PARAMETER Experiment Name: At_Drought_Soil_Dry_P Parameter: Post Timepoint (hr) Value: None
  misc_feature: MA Experiment 20001560 PARAMETER Experiment Name: At_Drought_Soil_Dry_P Parameter: Post-Treatment Value: None
  misc_feature: MA Experiment 20001560 PARAMETER Experiment Name: At_Drought_Soil_Dry_P Parameter: Timepoint (day) Value: 14
  misc_feature: MA Experiment 20001560 PARAMETER Experiment Name: At_Drought_Soil_Dry_P Parameter: Treatment Value: Drought vs. No Drought
agtgaaaacttaaatcagaacaaacaaaatggagtcacggaagattaaagtaatggcgacagcaatagctttaataatggtggctatggtggtggatgccgccggagctgataaagggaaagacaaggaagagtgtacggcgcagctggtcggtatggccacatgtcttccttacgtgcaaggaaaggcaaaatctccgacgccagactgttgctccggcctcaaacaagttattaattccgacatgaagtgtctttgtatgatcatccaagagaggaatgatcctgatttgggtctccaggtcaacgtctctctcgctctcgctcttccttctgtttgccacgccactgctgacatcactaagtgccctgctttgcttcatttggacccaaattctccggatgcccaagtgttctatcagctagctaaaggtctgaacgaaacagtctcagcctctgctcccactggctcggcctctgagcccactagtatgtcttcgaccccaggatccagtgctggtaacaacagtggtcggacgacctctgtgccaggcacgaaccacgctcaaagcttctccaaacaatggctagggctcgaagttgttgcccatttcttcgtaattttttatattttcatcctcgtttagataagtgaaaaggatgtgacgttggttttgtgcaactgtggacatttgcggtgacgttgattttgagttttgagtcttttgactgatgaatgtagtttcacttcgtgacaactcttctcagctttttattttttgtatggcgcaacataagacacgagcaatagttattctatggctcgtttgctttt

SEQ ID NO: 26489 - protein, 205 aa, Arabidopsis thaliana
  peptide (1)..(205): Ceres Seq. ID no. 13504836
  misc_feature (36)..(113): Pfam Name: Protease inhibitor/seed storage/LTP family Pfam Description: Protease inhibitor/seed storage/LTP family
  misc_feature (13)..(168): Homolog of NCBI NO: 15217777 NR Description: lipid transfer protein - related [Arabidopsis
  misc_feature (13)..(168): Homolog of NCBI NO: 21553541 NR Description: lipid transfer protein, putative [Arabidopsis
  misc_feature (13)..(150): Homolog of NCBI NO: 21555220 NR Description: unknown [Arabidopsis thaliana]
  misc_feature (13)..(150): Homolog of NCBI NO: 15231070 NR Description: protease inhibitor/seed storage/lipid transfer
  misc_feature (20)..(202): Homolog of NCBI NO: 21537387 NR Description: unknown [Arabidopsis thaliana]
  misc_feature (13)..(202): Homolog of NCBI NO: 18405294 NR Description: protease inhibitor/seed storage/lipid transfer
  misc_feature (1)..(162): Homolog of NCBI NO: 34394084 NR Description: lipid transfer protein-like
  misc_feature (112)..(205): Homolog of NCBI NO: 13122284 NR Description: non-specific lipid transfer protein (nLTP) like
  misc_feature (1)..(205): Homolog of NCBI NO: 15224863 NR Description: lipid transfer protein - related [Arabidopsis
  misc_feature (1)..(205): Homolog of NCBI NO: 15224862 NR Description: lipid transfer protein family [Arabidopsis
MESRKIKVMATAIALIMVAMVVDAAGADKGKDKEECTAQLVGMATCLPYVQGKAKSPTPDCCSGLKQVINSDMKCLCMIIQERNDPDLGLQVNVSLALALPSVCHATADITKCPALLHLDPNSPDAQVFYQLAKGLNETVSASAPTGSASEPTSMSSTPGSSAGNNSGRTTSVPGTNHAQSFSKQWLGLEVVAHFFVIFYIFILV

SEQ ID NO: 26490 - protein, 197 aa, Arabidopsis thaliana
  peptide (1)..(197): Ceres Seq. ID no. 13504837
  misc_feature (28)..(105): Pfam Name: Protease inhibitor/seed storage/LTP family Pfam Description: Protease inhibitor/seed storage/LTP family
  misc_feature (5)..(160): Homolog of NCBI NO: 15217777 NR Description: lipid transfer protein - related [Arabidopsis
  misc_feature (5)..(160): Homolog of NCBI NO: 21553541 NR Description: lipid transfer protein, putative [Arabidopsis
  misc_feature (5)..(142): Homolog of NCBI NO: 21555220 NR Description: unknown [Arabidopsis thaliana]
  misc_feature (5)..(142): Homolog of NCBI NO: 15231070 NR Description: protease inhibitor/seed storage/lipid transfer
  misc_feature (12)..(194): Homolog of NCBI NO: 21537387 NR Description: unknown [Arabidopsis thaliana]
  misc_feature (5)..(194): Homolog of NCBI NO: 18405294 NR Description: protease inhibitor/seed storage/lipid transfer
  misc_feature (1)..(154): Homolog of NCBI NO: 34394084 NR Description: lipid transfer protein-like
  misc_feature (104)..(197): Homolog of NCBI NO: 13122284 NR Description: non-specific lipid transfer protein (nLTP) like
  misc_feature (1)..(197): Homolog of NCBI NO: 15224863 NR Description: lipid transfer protein - related [Arabidopsis
  misc_feature (1)..(197): Homolog of NCBI NO: 15224862 NR Description: lipid transfer protein family [Arabidopsis
MATAIALIMVAMVVDAAGADKGKDKEECTAQLVGMATCLPYVQGKAKSPTPDCCSGLKQVINSDMKCLCMIIQERNDPDLGLQVNVSLALALPSVCHATADITKCPALLHLDPNSPDAQVFYQLAKGLNETVSASAPTGSASEPTSMSSTPGSSAGNNSGRTTSVPGTNHAQSFSKQWLGLEVVAHFFVIFYIFILV

SEQ ID NO: 26491 - protein, 189 aa, Arabidopsis thaliana
  peptide (1)..(189): Ceres Seq. ID no. 13504838
  misc_feature (20)..(97): Pfam Name: Protease inhibitor/seed storage/LTP family Pfam Description: Protease inhibitor/seed storage/LTP family
  misc_feature (1)..(152): Homolog of NCBI NO: 15217777 NR Description: lipid transfer protein - related [Arabidopsis
  misc_feature (1)..(152): Homolog of NCBI NO: 21553541 NR Description: lipid transfer protein, putative [Arabidopsis
  misc_feature (1)..(134): Homolog of NCBI NO: 21555220 NR Description: unknown [Arabidopsis thaliana]
  misc_feature (1)..(134): Homolog of NCBI NO: 15231070 NR Description: protease inhibitor/seed storage/lipid transfer
  misc_feature (4)..(186): Homolog of NCBI NO: 21537387 NR Description: unknown [Arabidopsis thaliana]
  misc_feature (1)..(186): Homolog of NCBI NO: 18405294 NR Description: protease inhibitor/seed storage/lipid transfer
  misc_feature (1)..(146): Homolog of NCBI NO: 34394084 NR Description: lipid transfer protein-like
  misc_feature (96)..(189): Homolog of NCBI NO: 13122284 NR Description: non-specific lipid transfer protein (nLTP) like
  misc_feature (1)..(189): Homolog of NCBI NO: 15224863 NR Description: lipid transfer protein - related [Arabidopsis
  misc_feature (1)..(189): Homolog of NCBI NO: 15224862 NR Description: lipid transfer protein family [Arabidopsis
MVAMVVDAAGADKGKDKEECTAQLVGMATCLPYVQGKAKSPTPDCCSGLKQVINSDMKCLCMIIQERNDPDLGLQVNVSLALALPSVCHATADITKCPALLHLDPNSPDAQVFYQLAKGLNETVSASAPTGSASEPTSMSSTPGSSAGNNSGRTTSVPGTNHAQSFSKQWLGLEVVAHFFVIFYIFILV

SEQ ID NO: 26492 - DNA, 884 bp, Arabidopsis thaliana
  misc_feature (1)..(884): Ceres Seq. ID no. 12738885
  misc_feature: MA Experiment ID: 108488 Result: Down-regulated in Transcription
  misc_feature: MA Experiment ID: 20000224 Result: Down-regulated in Transcription
  misc_feature: MA Experiment ID: 20000437 Result: Up-regulated in Transcription
  misc_feature: MA Experiment 20000437 PARAMETER Experiment Name: At_Drought_P Parameter: Age (day) Value: 8
  misc_feature: MA Experiment 20000437 PARAMETER Experiment Name: At_Drought_P Parameter: Organism Value: A. thaliana
  misc_feature: MA Experiment 20000437 PARAMETER Experiment Name: At_Drought_P Parameter: Plant Line Value: WS
  misc_feature: MA Experiment 20000437 PARAMETER Experiment Name: At_Drought_P Parameter: Timepoint (hr) Value: 24
  misc_feature: MA Experiment 20000437 PARAMETER Experiment Name: At_Drought_P Parameter: Tissue Value: Whole Plant
  misc_feature: MA Experiment 20000437 PARAMETER Experiment Name: At_Drought_P Parameter: Treatment Value: Drought vs. No Drought
  misc_feature: MA Experiment ID: 20001905 Result: Up-regulated in Transcription
  misc_feature: MA Experiment 20001905 PARAMETER Experiment Name: At_Drought_Reproduction_P Parameter: Age (day) Value: 40
  misc_feature: MA Experiment 20001905 PARAMETER Experiment Name: At_Drought_Reproduction_P Parameter: Organism Value: A. thaliana
  misc_feature: MA Experiment 20001905 PARAMETER Experiment Name: At_Drought_Reproduction_P Parameter: Plant Line Value: WS
  misc_feature: MA Experiment 20001905 PARAMETER Experiment Name: At_Drought_Reproduction_P Parameter: Timepoint (day) Value: 10
  misc_feature: MA Experiment 20001905 PARAMETER Experiment Name: At_Drought_Reproduction_P Parameter: Tissue Value: Rosettes
  misc_feature: MA Experiment 20001905 PARAMETER Experiment Name: At_Drought_Reproduction_P Parameter: Treatment Value: Drought vs. No Drought
aaaaacgagttttttcttcggctttccactttttcctctgttcgtgtcattcttctcgtagatctcgagagagagccttaaggaaattaaaaaaggttggattttgatcgatgggttcttcgtcaggacaacccgaatttgattacttgtttaaggttttattgatcggagattctggtgttggaaagagctctcttttgttgagtttcacatctaatacctttgatgatctttctccaacgattggtgtggattttaaggttaagtatctgacaattggagaaaagaaactcaagcttgcgatttgggatacagctgggcaagagagatttaggacgctaacaagttcgtattacagaggagctcagggtataattatggtatatgatgtgacacgaagagacacgttcacaaacctatcagacatatgggctaaggaaatcgacctctattcgactaatcaggattgcattaagatgcttgtcgggaataaagttgataaggagagtgaaagagctgtttctaaaaaagaaggcatagactttgctcgggagtacggatgtttgtttctggagtgtagtgcaaagactcgagtcaacgttgagcaatgttttgaagagcttgttcttaagatattggaaacgccgagtcttactgctgaaggttcgtctggcggaaagaagaacatcttcaaacaaaaccccgcacagaccaccagtacctcgtcgagctactgctgctcgtcttagacatggttttacagtttatgacaaattacactcttgctcatcatcttgttcttgattgtctctttgttttcctaaaccgcagcatcttggatgtaaatctcaaccctgatttaaaagttgtgttcactagtttcg

SEQ ID NO: 26493 - protein, 212 aa, Arabidopsis thaliana [sequence omitted]

SEQ ID NO: 26494 - protein, 123 aa, Arabidopsis thaliana
  peptide (1)..(123): Ceres Seq. ID no. 12738887
  misc_feature (1)..(88): Pfam Name: Ras family Pfam Description: Ras family
  misc_feature (1)..(120): Homolog of NCBI NO: 33416686 NR Description: Unknown (protein for MGC:69017) [Xenopus laevis]
  misc_feature (1)..(102): Homolog of NCBI NO: 549810 NR Description: GTP-BINDING PROTEIN YPTV3
  misc_feature (1)..(121): Homolog of NCBI NO: 37534998 NR Description: putative GTP-binding protein
  misc_feature (1)..(121): Homolog of NCBI NO: 15451614 NR Description: Putative GTP-binding protein [Oryza sativa]
  misc_feature (1)..(102): Homolog of NCBI NO: 15232785 NR Description: GTP-binding protein, putative; protein id:
  misc_feature (1)..(122): Homolog of NCBI NO: 1370172 NR Description: RAB1X [Lotus japonicus]
  misc_feature (1)..(122): Homolog of NCBI NO: 18414255 NR Description: putative protein
  misc_feature (1)..(121): Homolog of NCBI NO: 1370174 NR Description: RAB1Y [Lotus japonicus]
  misc_feature (1)..(123): Homolog of NCBI NO: 25294118 NR Description: protein F9C16.3 [imported] - Arabidopsis thaliana
  misc_feature (1)..(123): Homolog of NCBI NO: 15218575 NR Description: GTP-binding protein(RAB1Y), putative
MVYDVTRRDTFTNLSDIWAKEIDLYSTNQDCIKMLVGNKVDKESERAVSKKEGIDFAREYGCLFLECSAKTRVNVEQCFEELVLKILETPSLTAEGSSGGKKNIFKQNPAQTTSTSSSYCCSS

SEQ ID NO: 26495 - DNA, 884 bp, Arabidopsis thaliana
  misc_feature (1)..(884): Ceres Seq. ID no. 12422963
  misc_feature: MA Experiment ID: 108434 Result: Down-regulated in Transcription
  misc_feature: MA Experiment 108434 PARAMETER Experiment Name: At_Root_Tips_cDNA_P Parameter: Tissue Value: Root Tips
  misc_feature: MA Experiment ID: 108488 Result: Down-regulated in Transcription
  misc_feature: MA Experiment ID: 108585 Result: Up-regulated in Transcription
  misc_feature: MA Experiment 108585 PARAMETER Experiment Name: At_5mM_NaNP_cDNA_P Parameter: Timepoint (hr) Value: 6
  misc_feature: MA Experiment 108585 PARAMETER Experiment Name: At_5mM_NaNP_cDNA_P Parameter: Tissue Value: Aerial
  misc_feature: MA Experiment 108585 PARAMETER Experiment Name: At_5mM_NaNP_cDNA_P Parameter: Treatment Value: null
  misc_feature: MA Experiment ID: 108595 Result: Up-regulated in Transcription
  misc_feature: MA Experiment 108595 PARAMETER Experiment Name: At_Ler-pi_Ovule_cDNA_P Parameter: Plant Line Value: null
  misc_feature: MA Experiment ID: 20000179 Result: Up-regulated in Transcription
  misc_feature: MA Experiment 20000179 PARAMETER Experiment Name: At_Germinating_Seeds_P Parameter: Age (hr) Value: 6 vs. 0
  misc_feature: MA Experiment 20000179 PARAMETER Experiment Name: At_Germinating_Seeds_P Parameter: Tissue Value: Germinating Seeds
  misc_feature: MA Experiment ID: 20000180 Result: Up-regulated in Transcription
  misc_feature: MA Experiment 20000180 PARAMETER Experiment Name: At_Germinating_Seeds_P Parameter: Age (hr) Value: 24 vs. 0
  misc_feature: MA Experiment 20000180 PARAMETER Experiment Name: At_Germinating_Seeds_P Parameter: Tissue Value: Germinating Seeds
  misc_feature: MA Experiment ID: 20000227 Result: Down-regulated in Transcription
  misc_feature: MA Experiment 20000227 PARAMETER Experiment Name: At_Root-Tips-vs-Tops_P Parameter: Tissue Value: Root Tips vs. Root Tops
  misc_feature: MA Experiment ID: 20000437 Result: Up-regulated in Transcription
  misc_feature: MA Experiment 20000437 PARAMETER Experiment Name: At_Drought_P Parameter: Age (day) Value: 8
  misc_feature: MA Experiment 20000437 PARAMETER Experiment Name: At_Drought_P Parameter: Organism Value: A. thaliana
  misc_feature: MA Experiment 20000437 PARAMETER Experiment Name: At_Drought_P Parameter: Plant Line Value: WS
  misc_feature: MA Experiment 20000437 PARAMETER Experiment Name: At_Drought_P Parameter: Timepoint (hr) Value: 24
  misc_feature: MA Experiment 20000437 PARAMETER Experiment Name: At_Drought_P Parameter: Tissue Value: Whole Plant
  misc_feature: MA Experiment 20000437 PARAMETER Experiment Name: At_Drought_P Parameter: Treatment Value: Drought vs. No Drought
  misc_feature: MA Experiment ID: 20001905 Result: Up-regulated in Transcription
  misc_feature: MA Experiment 20001905 PARAMETER Experiment Name: At_Drought_Reproduction_P Parameter: Age (day) Value: 40
  misc_feature: MA Experiment 20001905 PARAMETER Experiment Name: At_Drought_Reproduction_P Parameter: Organism Value: A. thaliana
  misc_feature: MA Experiment 20001905 PARAMETER Experiment Name: At_Drought_Reproduction_P Parameter: Plant Line Value: WS
  misc_feature: MA Experiment 20001905 PARAMETER Experiment Name: At_Drought_Reproduction_P Parameter: Timepoint (day) Value: 10
  misc_feature: MA Experiment 20001905 PARAMETER Experiment Name: At_Drought_Reproduction_P Parameter: Tissue Value: Rosettes
  misc_feature: MA Experiment 20001905 PARAMETER Experiment Name: At_Drought_Reproduction_P Parameter: Treatment Value: Drought vs. No Drought
aggttgcttcaaaagaaatcaattcattcgtacgggcctttaatccacgcgccttcttcgcatccccacgcgcagtcgtgtgtgatgatggctaatcctccaacgttaccgatctcagaccattccggtggtggttcccaatctcagcaacccgtatcaacaccggcgtttcgcacgttcctctctcgcctctcgtcgtcaatccgccaaagcctatcgcagcggcgtccatggttagaactcgtagatcgaagcgcaatttcacgtccagagtctctcaccgatgcgtattctcggatccggaggaatctcccttacttcaaggtaaactacgtgacgatcgtctccttggtgctcgcgctctcgctcctctcccatcctttctctcttctcgttctcctatgcctcttctgcgcttggatcttcctctaccttttccgtccgtcagatcaacctctggtcgtcctcggccgtacgttttcagatcgtgagacgcttggtgttttggtaattttgacaatcgtcgtcgtctttttaaccagcgttgggtctttattgacctctgctttgatgattggtttcggaatcgtatgcttacacggcgcgtttagagtcccggaggatcttttcttggatgatcaagaacctgctaacaccggcttattgtctttccttagcggagccgccacttccgccgcagttgccgccgcatcaactcctgcgtcaggtcgtgtttgaaggactctcttctctgtagacaacaaactcaattactatgattcttttattgtatttctgaatgcgattatgtaaggggaaatgtagaattgatcttcttggttttaagctgagaaattcttatgattcaaacattaaatggattc

SEQ ID NO: 26496 - protein, 245 aa, Arabidopsis thaliana
  peptide (1)..(245): Ceres Seq. ID no. 12422964
  misc_feature (29)..(227): Homolog of NCBI NO: 18390939 NR Description: expressed protein
  misc_feature (8)..(229): Homolog of NCBI NO: 40539036 NR Description: putative prenylated rab acceptor protein
  misc_feature (30)..(245): Homolog of NCBI NO: 15240698 NR Description: putative protein
  misc_feature (28)..(242): Homolog of NCBI NO: 15241022 NR Description: putative protein; protein id: At5g01640.1
  misc_feature (30)..(235): Homolog of NCBI NO: 15224494 NR Description: unknown protein; protein id: At2g38360.1
  misc_feature (29)..(245): Homolog of NCBI NO: 15226664 NR Description: unknown protein; protein id: At2g40380.1
  misc_feature (30)..(245): Homolog of NCBI NO: 15450978 NR Description: putative protein [Arabidopsis thaliana]
  misc_feature (30)..(245): Homolog of NCBI NO: 15228824 NR Description: putative protein
  misc_feature (30)..(245): Homolog of NCBI NO: 18072825 NR Description: prenylated Rab receptor 2 [Arabidopsis thaliana]
  misc_feature (29)..(245): Homolog of NCBI NO: 15239101 NR Description: putative protein; protein id: At5g05380.1
  misc_feature (29)..(227): Homolog of NCBI NO: 18390939 NR Description: expressed protein
  misc_feature (8)..(229): Homolog of NCBI NO: 40539036 NR Description: putative prenylated rab acceptor protein
  misc_feature (30)..(245): Homolog of NCBI NO: 15240698 NR Description: putative protein
  misc_feature (28)..(242): Homolog of NCBI NO: 15241022 NR Description: putative protein; protein id: At5g01640.1
  misc_feature (30)..(235): Homolog of NCBI NO: 15224494 NR Description: unknown protein; protein id: At2g38360.1
  misc_feature (29)..(245): Homolog of NCBI NO: 15226664 NR Description: unknown protein; protein id: At2g40380.1
  misc_feature (30)..(245): Homolog of NCBI NO: 15450978 NR Description: putative protein [Arabidopsis thaliana]
  misc_feature (30)..(245): Homolog of NCBI NO: 15228824 NR Description: putative protein
  misc_feature (30)..(245): Homolog of NCBI NO: 18072825 NR Description: prenylated Rab receptor 2 [Arabidopsis thaliana]
  misc_feature (29)..(245): Homolog of NCBI NO: 15239101 NR Description: putative protein; protein id: At5g05380.1
RLLQKKSIHSYGPLIHAPSSHPHAQSCVMMANPPTLPISDHSGGGSQSQQPVSTPAFRTFLSRLSSSIRQSLSQRRPWLELVDRSAISRPESLTDAYSRIRRNLPYFKVNYVTIVSLVLALSLLSHPFSLLVLLCLFCAWIFLYLFRPSDQPLVVLGRTFSDRETLGVLVILTIVVVFLTSVGSLLTSALMIGFGIVCLHGAFRVPEDLFLDDQEPANTGLLSFLSGAATSAAVAAASTPASGRV

SEQ ID NO: 26497 - protein, 217 aa, Arabidopsis thaliana
  peptide (1)..(217): Ceres Seq. ID no. 12422965
  misc_feature (1)..(199): Homolog of NCBI NO: 18390939 NR Description: expressed protein
  misc_feature (1)..(201): Homolog of NCBI NO: 40539036 NR Description: putative prenylated rab acceptor protein
  misc_feature (2)..(217): Homolog of NCBI NO: 15240698 NR Description: putative protein
  misc_feature (1)..(214): Homolog of NCBI NO: 15241022 NR Description: putative protein; protein id: At5g01640.1
  misc_feature (2)..(207): Homolog of NCBI NO: 15224494 NR Description: unknown protein; protein id: At2g38360.1
  misc_feature (1)..(217): Homolog of NCBI NO: 15226664 NR Description: unknown protein; protein id: At2g40380.1
  misc_feature (2)..(217): Homolog of NCBI NO: 15450978 NR Description: putative protein [Arabidopsis thaliana]
  misc_feature (2)..(217): Homolog of NCBI NO: 15228824 NR Description: putative protein
  misc_feature (2)..(217): Homolog of NCBI NO: 18072825 NR Description: prenylated Rab receptor 2 [Arabidopsis thaliana]
  misc_feature (1)..(217): Homolog of NCBI NO: 15239101 NR Description: putative protein; protein id: At5g05380.1
  misc_feature (2)..(217): Homolog of NCBI NO: 18072825 NR Description: prenylated Rab receptor 2 [Arabidopsis thaliana]
  misc_feature (1)..(217): Homolog of NCBI NO: 15239101 NR Description: putative protein; protein id: At5g05380.1
  misc_feature (1)..(199): Homolog of NCBI NO: 18390939 NR Description: expressed protein
  misc_feature (1)..(201): Homolog of NCBI NO: 40539036 NR Description: putative prenylated rab acceptor protein
  misc_feature (2)..(217): Homolog of NCBI NO: 15240698 NR Description: putative protein
  misc_feature (1)..(214): Homolog of NCBI NO: 15241022 NR Description: putative protein; protein id: At5g01640.1
  misc_feature (2)..(207): Homolog of NCBI NO: 15224494 NR Description: unknown protein; protein id: At2g38360.1
  misc_feature (1)..(217): Homolog of NCBI NO: 15226664 NR Description: unknown protein; protein id: At2g40380.1
  misc_feature (2)..(217): Homolog of NCBI NO: 15450978 NR Description: putative protein [Arabidopsis thaliana]
  misc_feature (2)..(217): Homolog of NCBI NO: 15228824 NR Description: putative protein
MMANPPTLPISDHSGGGSQSQQPVSTPAFRTFLSRLSSSIRQSLSQRRPWLELVDRSAISRPESLTDAYSRIRRNLPYFKVNYVTIVSLVLALSLLSHPFSLLVLLCLFCAWIFLYLFRPSDQPLVVLGRTFSDRETLGVLVILTIVVVFLTSVGSLLTSALMIGFGIVCLHGAFRVPEDLFLDDQEPANTGLLSFLSGAATSAAVAAASTPASGRV

SEQ ID NO: 26498 - protein, 216 aa, Arabidopsis thaliana
  peptide (1)..(216): Ceres Seq. ID no. 12422966
  misc_feature (1)..(198): Homolog of NCBI NO: 18390939 NR Description: expressed protein
  misc_feature (1)..(200): Homolog of NCBI NO: 40539036 NR Description: putative prenylated rab acceptor protein
  misc_feature (1)..(216): Homolog of NCBI NO: 15240698 NR Description: putative protein
  misc_feature (1)..(213): Homolog of NCBI NO: 15241022 NR Description: putative protein; protein id: At5g01640.1
  misc_feature (1)..(206): Homolog of NCBI NO: 15224494 NR Description: unknown protein; protein id: At2g38360.1
  misc_feature (1)..(216): Homolog of NCBI NO: 15226664 NR Description: unknown protein; protein id: At2g40380.1
  misc_feature (1)..(216): Homolog of NCBI NO: 15450978 NR Description: putative protein [Arabidopsis thaliana]
  misc_feature (1)..(216): Homolog of NCBI NO: 15228824 NR Description: putative protein
  misc_feature (1)..(216): Homolog of NCBI NO: 18072825 NR Description: prenylated Rab receptor 2 [Arabidopsis thaliana]
  misc_feature (1)..(216): Homolog of NCBI NO: 15239101 NR Description: putative protein; protein id: At5g05380.1
  misc_feature (1)..(198): Homolog of NCBI NO: 18390939 NR Description: expressed protein
  misc_feature (1)..(200): Homolog of NCBI NO: 40539036 NR Description: putative prenylated rab acceptor protein
  misc_feature (1)..(216): Homolog of NCBI NO: 15240698 NR Description: putative protein
  misc_feature (1)..(213): Homolog of NCBI NO: 15241022 NR Description: putative protein; protein id: At5g01640.1
  misc_feature (1)..(206): Homolog of NCBI NO: 15224494 NR Description: unknown protein; protein id: At2g38360.1
  misc_feature (1)..(216): Homolog of NCBI NO: 15226664 NR Description: unknown protein; protein id: At2g40380.1
  misc_feature (1)..(216): Homolog of NCBI NO: 15450978 NR Description: putative protein [Arabidopsis thaliana]
  misc_feature (1)..(216): Homolog of NCBI NO: 15228824 NR Description: putative protein
  misc_feature (1)..(216): Homolog of NCBI NO: 18072825 NR Description: prenylated Rab receptor 2 [Arabidopsis thaliana]
  misc_feature (1)..(216): Homolog of NCBI NO: 15239101 NR Description: putative protein; protein id: At5g05380.1
MANPPTLPISDHSGGGSQSQQPVSTPAFRTFLSRLSSSIRQSLSQRRPWLELVDRSAISRPESLTDAYSRIRRNLPYFKVNYVTIVSLVLALSLLSHPFSLLVLLCLFCAWIFLYLFRPSDQPLVVLGRTFSDRETLGVLVILTIVVVFLTSVGSLLTSALMIGFGIVCLHGAFRVPEDLFLDDQEPANTGLLSFLSGAATSAAVAAASTPASGRV

SEQ ID NO: 26499 - DNA, 895 bp, Arabidopsis thaliana
  misc_feature (1)..(895): Ceres Seq. ID no. 12371905
  misc_feature: MA Experiment ID: 108434 Result: Up-regulated in Transcription
  misc_feature: MA Experiment 108434 PARAMETER Experiment Name: At_Root_Tips_cDNA_P Parameter: Tissue Value: Root Tips
  misc_feature: MA Experiment ID: 108561 Result: Down-regulated in Transcription
  misc_feature: MA Experiment 108561 PARAMETER Experiment Name: At_100uM_ABA_cDNA_P Parameter: Timepoint (hr) Value: 6
  misc_feature: MA Experiment 108561 PARAMETER Experiment Name: At_100uM_ABA_cDNA_P Parameter: Tissue Value: Aerial
  misc_feature: MA Experiment 108561 PARAMETER Experiment Name: At_100uM_ABA_cDNA_P Parameter: Treatment Value: 100uM ABA vs. No Treatment
  misc_feature: MA Experiment ID: 20000180 Result: Up-regulated in Transcription
  misc_feature: MA Experiment 20000180 PARAMETER Experiment Name: At_Germinating_Seeds_P Parameter: Age (hr) Value: 24 vs. 0
  misc_feature: MA Experiment 20000180 PARAMETER Experiment Name: At_Germinating_Seeds_P Parameter: Tissue Value: Germinating Seeds
  misc_feature: MA Experiment ID: 20000496 Result: Up-regulated in Transcription
  misc_feature: MA Experiment 20000496 PARAMETER Experiment Name: At_Guard_Cells_P Parameter: Harvest Date Value: 7/19/2002
  misc_feature: MA Experiment 20000496 PARAMETER Experiment Name: At_Guard_Cells_P Parameter: Organism Value: Canola
  misc_feature: MA Experiment 20000496 PARAMETER Experiment Name: At_Guard_Cells_P Parameter: Tissue Value: Guard Cells vs. Leaves
  misc_feature: MA Experiment ID: 20000794 Result: Down-regulated in Transcription
  misc_feature: MA Experiment 20000794 PARAMETER Experiment Name: At_Petals_P Parameter: Age (day) Value: 23-25 days
  misc_feature: MA Experiment 20000794 PARAMETER Experiment Name: At_Petals_P Parameter: Plant Line Value: WS
  misc_feature: MA Experiment 20000794 PARAMETER Experiment Name: At_Petals_P Parameter: Tissue Value: Petals vs. Whole plant
  misc_feature: MA Experiment ID: 20001558 Result: Up-regulated in Transcription
  misc_feature: MA Experiment 20001558 PARAMETER Experiment Name: At_Drought_Soil_Dry_P Parameter: Age (day) Value: 27
  misc_feature: MA Experiment 20001558 PARAMETER Experiment Name: At_Drought_Soil_Dry_P Parameter: Organism Value: A. thaliana
  misc_feature: MA Experiment 20001558 PARAMETER Experiment Name: At_Drought_Soil_Dry_P Parameter: Plant Line Value: WS
  misc_feature: MA Experiment 20001558 PARAMETER Experiment Name: At_Drought_Soil_Dry_P Parameter: Post Timepoint (hr) Value: 6
  misc_feature: MA Experiment 20001558 PARAMETER Experiment Name: At_Drought_Soil_Dry_P Parameter: Post-Treatment Value: Re-Water vs. No Drought
  misc_feature: MA Experiment 20001558 PARAMETER Experiment Name: At_Drought_Soil_Dry_P Parameter: Timepoint (day) Value: 13
  misc_feature: MA Experiment 20001558 PARAMETER Experiment Name: At_Drought_Soil_Dry_P Parameter: Treatment Value: Drought vs. No Drought
  misc_feature: MA Experiment ID: 20001560 Result: Up-regulated in Transcription
  misc_feature: MA Experiment 20001560 PARAMETER Experiment Name: At_Drought_Soil_Dry_P Parameter: Age (day) Value: 28
  misc_feature: MA Experiment 20001560 PARAMETER Experiment Name: At_Drought_Soil_Dry_P Parameter: Organism Value: A. thaliana
  misc_feature: MA Experiment 20001560 PARAMETER Experiment Name: At_Drought_Soil_Dry_P Parameter: Plant Line Value: WS
  misc_feature: MA Experiment 20001560 PARAMETER Experiment Name: At_Drought_Soil_Dry_P Parameter: Post Timepoint (hr) Value: None
  misc_feature: MA Experiment 20001560 PARAMETER Experiment Name: At_Drought_Soil_Dry_P Parameter: Post-Treatment Value: None
  misc_feature: MA Experiment 20001560 PARAMETER Experiment Name: At_Drought_Soil_Dry_P Parameter: Timepoint (day) Value: 14
  misc_feature: MA Experiment 20001560 PARAMETER Experiment Name: At_Drought_Soil_Dry_P Parameter: Treatment Value: Drought vs. No Drought
  misc_feature: MA Experiment ID: 20001911 Result: Down-regulated in Transcription
  misc_feature: MA Experiment 20001911 PARAMETER Experiment Name: At_Drought_Reproduction_P Parameter: Age (day) Value: 40
  misc_feature: MA Experiment 20001911 PARAMETER Experiment Name: At_Drought_Reproduction_P Parameter: Organism Value: A. thaliana
  misc_feature: MA Experiment 20001911 PARAMETER Experiment Name: At_Drought_Reproduction_P Parameter: Plant Line Value: WS
  misc_feature: MA Experiment 20001911 PARAMETER Experiment Name: At_Drought_Reproduction_P Parameter: Timepoint (day) Value: 10
  misc_feature: MA Experiment 20001911 PARAMETER Experiment Name: At_Drought_Reproduction_P Parameter: Tissue Value: Flowers
  misc_feature: MA Experiment 20001911 PARAMETER Experiment Name: At_Drought_Reproduction_P Parameter: Treatment Value: Drought vs. No Drought
aaaatctcagtttacaccttcacactgctgcgtctctctctctctctctctttctttctcagattaatcgctgagaagaagcaaccacctggagacggcggagatggcagggtacagagtggaagatgactacgattacctcttcaaagttgttcttataggcgattctggagttggcaaatccaatctcctttccagattcactaaaaacgagttcaatctagagtctaaatccaccattggcgtcgaattcgccactcgtaccttaaaagtcgatggcaaagtcgttaaagctcagatttgggacactgctggtcaggagaggtaccgtgccatcactagtgcatattaccgtggagccgtgggtgcactcctagtatatgatgtaactcgccgtgcaacatttgagaacgtagatcggtggttaaaggagctcaagaaccacacagatccaaacattgtagtgatgctggttggtaacaaatctgatctccgccacttgctagctgttcctacagaagacgggaagtcctatgcggaacaagaatcgctctgcttcatggaaacatctgcccttgaagctaccaatgtggaggacgcatttgcagaggtgttgacacaaatttatcgcatcacaagcaagaagcaagtggaagctggtgaagatgggaacgcctctgtcccgaaaggtgagaaaatcgaagttaaaaacgatgtctctgcgctgaagaaactcgggtgctgctcaaattgaagcctttttttgttttcactgttgagagagaattataacccccatggtccattgtttgattatgtccttgttttgtaacactatcgacatttgtatgagttttagaccatacactacataatgtttatttaactttatttc

SEQ ID NO: 26500 - protein, 216 aa, Arabidopsis thaliana
  peptide (1)..(216): Ceres Seq. ID no. 12371906
  misc_feature (15)..(176): Pfam Name: Ras family Pfam Description: Ras family
  misc_feature (1)..(216): Homolog of NCBI NO: 541979 NR Description: GTP-binding protein, ras-like - fava bean
  misc_feature (1)..(216): Homolog of NCBI NO: 21555752 NR Description: guanine nucleotide regulatory protein, putative
  misc_feature (1)..(216): Homolog of NCBI NO: 15219955 NR Description: GTP binding protein, putative
MAGYRVEDDYDYLFKVVLIGDSGVGKSNLLSRFTKNEFNLESKSTIGVEFATRTLKVDGKVVKAQIWDTAGQERYRAITSAYYRGAVGALLVYDVTRRATFENVDRWLKELKNHTDPNIVVMLVGNKSDLRHLLAVPTEDGKSYAEQESLCFMETSALEATNVEDAFAEVLTQIYRITSKKQVEAGEDGNASVPKGEKIEVKNDVSALKKLGCCSN

SEQ ID NO: 26501 - DNA, 897 bp, Arabidopsis thaliana
  misc_feature (1)..(897): Ceres Seq. ID no. 12603175
  misc_feature: MA Experiment ID: 108434 Result: Up-regulated in Transcription
  misc_feature: MA Experiment 108434 PARAMETER Experiment Name: At_Root_Tips_cDNA_P Parameter: Tissue Value: Root Tips
  misc_feature: MA Experiment ID: 108462 Result: Down-regulated in Transcription
  misc_feature: MA Experiment 108462 PARAMETER Experiment Name: At_Germinating_Seeds_cDNA_P Parameter: Age (day) Value: 2 vs. 0
  misc_feature: MA Experiment 108462 PARAMETER Experiment Name: At_Germinating_Seeds_cDNA_P Parameter: Tissue Value: Germinating Seeds
  misc_feature: MA Experiment ID: 108463 Result: Down-regulated in Transcription
  misc_feature: MA Experiment 108463 PARAMETER Experiment Name: At_Germinating_Seeds_cDNA_P Parameter: Age (day) Value: 3 vs. 0
  misc_feature: MA Experiment 108463 PARAMETER Experiment Name: At_Germinating_Seeds_cDNA_P Parameter: Tissue Value: Germinating Seeds
  misc_feature: MA Experiment ID: 108573 Result: Down-regulated in Transcription
  misc_feature: MA Experiment 108573 PARAMETER Experiment Name: At_Drought_cDNA_P Parameter: Timepoint (hr) Value: 6
  misc_feature: MA Experiment 108573 PARAMETER Experiment Name: At_Drought_cDNA_P Parameter: Tissue Value: Aerial
  misc_feature: MA Experiment 108573 PARAMETER Experiment Name: At_Drought_cDNA_P Parameter: Treatment Value: Drought vs. No Drought
  misc_feature: MA Experiment ID: 20000224 Result: Down-regulated in Transcription
  misc_feature: MA Experiment ID: 20000227 Result: Up-regulated in Transcription
  misc_feature: MA Experiment 20000227 PARAMETER Experiment Name: At_Root-Tips-vs-Tops_P Parameter: Tissue Value: Root Tips vs. Root Tops
  misc_feature: MA Experiment ID: 20000328 Result: Up-regulated in Transcription
  misc_feature: MA Experiment 20000328 PARAMETER Experiment Name: At_42deg_Heat_Sub_P Parameter: Age (day) Value: 14
  misc_feature: MA Experiment 20000328 PARAMETER Experiment Name: At_42deg_Heat_Sub_P Parameter: Organism Value: A. thaliana
  misc_feature: MA Experiment 20000328 PARAMETER Experiment Name: At_42deg_Heat_Sub_P Parameter: Plant Line Value: WS
  misc_feature: MA Experiment 20000328 PARAMETER Experiment Name: At_42deg_Heat_Sub_P Parameter: Temperature (deg C) Value: 42 vs. 22
  misc_feature: MA Experiment 20000328 PARAMETER Experiment Name: At_42deg_Heat_Sub_P Parameter: Timepoint (hr) Value: 6
  misc_feature: MA Experiment 20000328 PARAMETER Experiment Name: At_42deg_Heat_Sub_P Parameter: Tissue Value: Aerial
  misc_feature: MA Experiment ID: 20001557 Result: Up-regulated in Transcription
  misc_feature: MA Experiment 20001557 PARAMETER Experiment Name: At_Drought_Soil_Dry_P Parameter: Age (day) Value: 27
  misc_feature: MA Experiment 20001557 PARAMETER Experiment Name: At_Drought_Soil_Dry_P Parameter: Organism Value: A. thaliana
  misc_feature: MA Experiment 20001557 PARAMETER Experiment Name: At_Drought_Soil_Dry_P Parameter: Plant Line Value: WS
  misc_feature: MA Experiment 20001557 PARAMETER Experiment Name: At_Drought_Soil_Dry_P Parameter: Post Timepoint (hr) Value: 3
  misc_feature: MA Experiment 20001557 PARAMETER Experiment Name: At_Drought_Soil_Dry_P Parameter: Post-Treatment Value: Re-Water vs. No Drought
  misc_feature: MA Experiment 20001557 PARAMETER Experiment Name: At_Drought_Soil_Dry_P Parameter: Timepoint (day) Value: 13
  misc_feature: MA Experiment 20001557 PARAMETER Experiment Name: At_Drought_Soil_Dry_P Parameter: Treatment Value: Drought vs. No Drought
  misc_feature: MA Experiment ID: 20001558 Result: Up-regulated in Transcription
  misc_feature: MA Experiment 20001558 PARAMETER Experiment Name: At_Drought_Soil_Dry_P Parameter: Age (day) Value: 27
  misc_feature: MA Experiment 20001558 PARAMETER Experiment Name: At_Drought_Soil_Dry_P Parameter: Organism Value: A. thaliana
  misc_feature: MA Experiment 20001558 PARAMETER Experiment Name: At_Drought_Soil_Dry_P Parameter: Plant Line Value: WS
  misc_feature: MA Experiment 20001558 PARAMETER Experiment Name: At_Drought_Soil_Dry_P Parameter: Post Timepoint (hr) Value: 6
  misc_feature: MA Experiment 20001558 PARAMETER Experiment Name: At_Drought_Soil_Dry_P Parameter: Post-Treatment Value: Re-Water vs. No Drought
  misc_feature: MA Experiment 20001558 PARAMETER Experiment Name: At_Drought_Soil_Dry_P Parameter: Timepoint (day) Value: 13
  misc_feature: MA Experiment 20001558 PARAMETER Experiment Name: At_Drought_Soil_Dry_P Parameter: Treatment Value: Drought vs. No Drought
  misc_feature: MA Experiment ID: 20001560 Result: Up-regulated in Transcription
  misc_feature: MA Experiment 20001560 PARAMETER Experiment Name: At_Drought_Soil_Dry_P Parameter: Age (day) Value: 28
  misc_feature: MA Experiment 20001560 PARAMETER Experiment Name: At_Drought_Soil_Dry_P Parameter: Organism Value: A. thaliana
  misc_feature: MA Experiment 20001560 PARAMETER Experiment Name: At_Drought_Soil_Dry_P Parameter: Plant Line Value: WS
  misc_feature: MA Experiment 20001560 PARAMETER Experiment Name: At_Drought_Soil_Dry_P Parameter: Post Timepoint (hr) Value: None
  misc_feature: MA Experiment 20001560 PARAMETER Experiment Name: At_Drought_Soil_Dry_P Parameter: Post-Treatment Value: None
  misc_feature: MA Experiment 20001560 PARAMETER Experiment Name: At_Drought_Soil_Dry_P Parameter: Timepoint (day) Value: 14
  misc_feature: MA Experiment 20001560 PARAMETER Experiment Name: At_Drought_Soil_Dry_P Parameter: Treatment Value: Drought vs. No Drought
agttctccgccacaccaatctccagaaaaggggagaagcaaaaatggtttctctgaagctccagaagcggctcgccgcatcagtgatgaagtgcgggaagggcaaagtttggctcgatcccaacgaaagctccgacatctccatggccaattcccgccaaaacatcaggaagcttgtgaaggatggtttcatcatcaggaagccaaccaagattcactctcgttccagagctcgcaaaatgaagattgccaagatgaagggtcgtcactctggatacggtaagaggaagggtacccgtgaagctaggttgccaacaaaggtactgtggatgcgtaggatgcgtgttcttaggcgtctgttgaagaaatacagagagacgaagaagattgacaagcacatgtaccatgacatgtacatgcgtgttaagggtaatgtgttcaagaacaagcgtgtcttgatggagagtatccacaagtcaaaggctgagaaggctagggagaagactctgtctgatcagtttgaggctaagagggcgaagaacaaggctagccgagaaaggaagcatgctaggagagaggagcgtttagctaagggtcccggtggagatgttgcgcctgtagctgctccagcacctgctgctacacctgctccaactgcagctgtaccgaagaagaagtctaagaagtgaagaggatatatagtgtgaagctatatcgatcatcagttcacggattagactctgaagaaggttttgaatgttttatcgaatgcgtttgtggaataacttttattttcgcaaagaacataacttatgtcagttaatctttatgctttcagatttttagcttacagtgtttcaacagacctactttgcaagttgttctttttttggtttcg

SEQ ID NO: 26502 - protein, 228 aa, Arabidopsis thaliana
  peptide (1)..(228): Ceres Seq. ID no. 12603176
  misc_feature (16)..(163): Pfam Name: Ribosomal protein L19e Pfam Description: Ribosomal protein L19e
  misc_feature (16)..(163): Pfam Name: Ribosomal protein L19e Pfam Description: Ribosomal protein L19e
  misc_feature (15)..(196): Homolog of NCBI NO: 28630352 NR Description: ribosomal protein L19 [Branchiostoma lanceolatum]
  misc_feature (15)..(196): Homolog of NCBI NO: 28200276 NR Description: ribosomal protein L19 [Branchiostoma belcheri
  misc_feature (15)..(199): Homolog of NCBI NO: 32401377 NR Description: ribosomal protein L19 [Triticum aestivum]
  misc_feature (15)..(227): Homolog of NCBI NO: 29837764 NR Description: putative ribosomal protein L19
  misc_feature (15)..(228): Homolog of NCBI NO: 15228314 NR Description: putative ribosomal protein
  misc_feature (15)..(196): Homolog of NCBI NO: 28630352 NR Description: ribosomal protein L19 [Branchiostoma lanceolatum]
  misc_feature (15)..(199): Homolog of NCBI NO: 32401377 NR Description: ribosomal protein L19 [Triticum aestivum]
  misc_feature (15)..(228): Homolog of NCBI NO: 15228314 NR Description: putative ribosomal protein
  misc_feature (15)..(228): Homolog of NCBI NO: 15218602 NR Description: ribosomal protein L19, putative
  misc_feature (15)..(228): Homolog of NCBI NO: 18087585 NR Description: At1g02780/T14P4_3 [Arabidopsis thaliana]
  misc_feature (15)..(228): Homolog of NCBI NO: 15235290 NR Description: putative ribosomal protein L19
  misc_feature (15)..(214): Homolog of NCBI NO: 7440943 NR Description: ribosomal protein L19.T2H3.3 - Arabidopsis
  misc_feature (15)..(225): Homolog of NCBI NO: 40287526 NR Description: 60S ribosomal protein L19 [Capsicum annuum]
  misc_feature (15)..(227): Homolog of NCBI NO: 29837764 NR Description: putative ribosomal protein L19
  misc_feature (15)..(196): Homolog of NCBI NO: 28200276 NR Description: ribosomal protein L19 [Branchiostoma belcheri
  misc_feature (15)..(225): Homolog of NCBI NO: 40287526 NR Description: 60S ribosomal protein L19 [Capsicum annuum]
  misc_feature (15)..(214): Homolog of NCBI NO: 7440943 NR Description: ribosomal protein L19.T2H3.3 - Arabidopsis
  misc_feature (15)..(228): Homolog of NCBI NO: 15235290 NR Description: putative ribosomal protein L19
  misc_feature (15)..(228): Homolog of NCBI NO: 18087585 NR Description: At1g02780/T14P4_3 [Arabidopsis thaliana]
  misc_feature (15)..(228): Homolog of NCBI NO: 15218602 NR Description: ribosomal protein L19, putative
VLRHTNLQKRGEAKMVSLKLQKRLAASVMKCGKGKVWLDPNESSDISMANSRQNIRKLVKDGFIIRKPTKIHSRSRARKMKIAKMKGRHSGYGKRKGTREARLPTKVLWMRRMRVLRRLLKKYRETKKIDKHMYHDMYMRVKGNVFKNKRVLMESIHKSKAEKAREKTLSDQFEAKRAKNKASRERKHARREERLAKGPGGDVAPVAAPAPAATPAPTAAVPKKKSKK

SEQ ID NO: 26503 - protein, 214 aa, Arabidopsis thaliana [sequence omitted]

SEQ ID NO: 26504 - protein, 200 aa, Arabidopsis thaliana
  peptide (1)..(200): Ceres Seq. ID no. 12603178
  misc_feature (1)..(135): Pfam Name: Ribosomal protein L19e Pfam Description: Ribosomal protein L19e
  misc_feature (1)..(135): Pfam Name: Ribosomal protein L19e Pfam Description: Ribosomal protein L19e
  misc_feature (1)..(168): Homolog of NCBI NO: 28630352 NR Description: ribosomal protein L19 [Branchiostoma lanceolatum]
  misc_feature (1)..(168): Homolog of NCBI NO: 28200276 NR Description: ribosomal protein L19 [Branchiostoma belcheri
  misc_feature (1)..(171): Homolog of NCBI NO: 32401377 NR Description: ribosomal protein L19 [Triticum aestivum]
  misc_feature (1)..(199): Homolog of NCBI NO: 29837764 NR Description: putative ribosomal protein L19
  misc_feature (1)..(200): Homolog of NCBI NO: 15228314 NR Description: putative ribosomal protein
  misc_feature (1)..(168): Homolog of NCBI NO: 28630352 NR Description: ribosomal protein L19 [Branchiostoma lanceolatum]
  misc_feature (1)..(171): Homolog of NCBI NO: 32401377 NR Description: ribosomal protein L19 [Triticum aestivum]
  misc_feature (1)..(200): Homolog of NCBI NO: 15228314 NR Description: putative ribosomal protein
  misc_feature (1)..(200): Homolog of NCBI NO: 15218602 NR Description: ribosomal protein L19, putative
  misc_feature (1)..(200): Homolog of NCBI NO: 18087585 NR Description: At1g02780/T14P4_3 [Arabidopsis thaliana]
  misc_feature (1)..(200): Homolog of NCBI NO: 15235290 NR Description: putative ribosomal protein L19
  misc_feature (1)..(186): Homolog of NCBI NO: 7440943 NR Description: ribosomal protein L19.T2H3.3 - Arabidopsis
  misc_feature (1)..(197): Homolog of NCBI NO: 40287526 NR Description: 60S ribosomal protein L19 [Capsicum annuum]
  misc_feature (1)..(199): Homolog of NCBI NO: 29837764 NR Description: putative ribosomal protein L19
  misc_feature (1)..(168): Homolog of NCBI NO: 28200276 NR Description: ribosomal protein L19 [Branchiostoma belcheri
  misc_feature (1)..(197): Homolog of NCBI NO: 40287526 NR Description: 60S ribosomal protein L19 [Capsicum annuum]
  misc_feature (1)..(186): Homolog of NCBI NO: 7440943 NR Description: ribosomal protein L19.T2H3.3 - Arabidopsis
  misc_feature (1)..(200): Homolog of NCBI NO: 15235290 NR Description: putative ribosomal protein L19
  misc_feature (1)..(200): Homolog of NCBI NO: 18087585 NR Description: At1g02780/T14P4_3 [Arabidopsis thaliana]
  misc_feature (1)..(200): Homolog of NCBI NO: 15218602 NR Description: ribosomal protein L19, putative
MKCGKGKVWLDPNESSDISMANSRQNIRKLVKDGFIIRKPTKIHSRSRARKMKIAKMKGRHSGYGKRKGTREARLPTKVLWMRRMRVLRRLLKKYRETKKIDKHMYHDMYMRVKGNVFKNKRVLMESIHKSKAEKAREKTLSDQFEAKRAKNKASRERKHARREERLAKGPGGDVAPVAAPAPAATPAPTAAVPKKKSKK

SEQ ID NO: 26505 - DNA, 1396 bp, Arabidopsis thaliana
  misc_feature (1)..(1396): Ceres Seq. ID no. 12332543
  misc_feature: MA Experiment ID: 108435 Result: Up-regulated in Transcription
  misc_feature: MA Experiment 108435 PARAMETER Experiment Name: At_stm_Mutants_cDNA_P Parameter: Plant Line Value: wt Landsburg vs stm
  misc_feature: MA Experiment 108435 PARAMETER Experiment Name: At_stm_Mutants_cDNA_P Parameter: Tissue Value: Shoot Apical Meristem Region
  misc_feature: MA Experiment ID: 108461 Result: Up-regulated in Transcription
  misc_feature: MA Experiment 108461 PARAMETER Experiment Name: At_Germinating_Seeds_cDNA_P Parameter: Age (day) Value: 1 vs. 0
  misc_feature: MA Experiment 108461 PARAMETER Experiment Name: At_Germinating_Seeds_cDNA_P Parameter: Tissue Value: Germinating Seeds
  misc_feature: MA Experiment ID: 108462 Result: Up-regulated in Transcription
  misc_feature: MA Experiment 108462 PARAMETER Experiment Name: At_Germinating_Seeds_cDNA_P Parameter: Age (day) Value: 2 vs. 0
  misc_feature: MA Experiment 108462 PARAMETER Experiment Name: At_Germinating_Seeds_cDNA_P Parameter: Tissue Value: Germinating Seeds
  misc_feature: MA Experiment ID: 108463 Result: Up-regulated in Transcription
  misc_feature: MA Experiment 108463 PARAMETER Experiment Name: At_Germinating_Seeds_cDNA_P Parameter: Age (day) Value: 3 vs. 0
  misc_feature: MA Experiment 108463 PARAMETER Experiment Name: At_Germinating_Seeds_cDNA_P Parameter: Tissue Value: Germinating Seeds
  misc_feature: MA Experiment ID: 108464 Result: Up-regulated in Transcription
  misc_feature: MA Experiment 108464 PARAMETER Experiment Name: At_Germinating_Seeds_cDNA_P Parameter: Age (day) Value: 4 vs. 0
  misc_feature: MA Experiment 108464 PARAMETER Experiment Name: At_Germinating_Seeds_cDNA_P Parameter: Tissue Value: Germinating Seeds
  misc_feature: MA Experiment ID: 108501 Result: Up-regulated in Transcription
  misc_feature: MA Experiment 108501 PARAMETER Experiment Name: At_ap2_floral_buds_cDNA_P Parameter: Plant Line Value: ap2 (Ler.)
  misc_feature: MA Experiment 108501 PARAMETER Experiment Name: At_ap2_floral_buds_cDNA_P Parameter: Tissue Value: Closed Flower
  misc_feature: MA Experiment ID: 108577 Result: Down-regulated in Transcription
  misc_feature: MA Experiment 108577 PARAMETER Experiment Name: At_42deg_Heat_cDNA_P Parameter: Temperature (deg C) Value: 42 vs. 22
  misc_feature: MA Experiment 108577 PARAMETER Experiment Name: At_42deg_Heat_cDNA_P Parameter: Timepoint (hr) Value: 6
  misc_feature: MA Experiment 108577 PARAMETER Experiment Name: At_42deg_Heat_cDNA_P Parameter: Tissue Value: Aerial
  misc_feature: MA Experiment ID: 108594 Result: Down-regulated in Transcription
  misc_feature: MA Experiment 108594 PARAMETER Experiment Name: At_Ler-rhl_Root_cDNA_P Parameter: Plant Line Value: null
  misc_feature: MA Experiment ID: 20000069 Result: Down-regulated in Transcription
  misc_feature: MA Experiment 20000069 PARAMETER Experiment Name: At_100uM_ABA_Mutants_cDNA_P Parameter: Plant Line Value: CS23
  misc_feature: MA Experiment 20000069 PARAMETER Experiment Name: At_100uM_ABA_Mutants_cDNA_P Parameter: Timepoint (hr) Value: 6
  misc_feature: MA Experiment 20000069 PARAMETER Experiment Name: At_100uM_ABA_Mutants_cDNA_P Parameter: Tissue Value: Aerial
  misc_feature: MA Experiment 20000069 PARAMETER Experiment Name: At_100uM_ABA_Mutants_cDNA_P Parameter: Treatment Value: 100uM ABA vs. No Treatment
  misc_feature: MA Experiment ID: 20000071 Result: Down-regulated in Transcription
  misc_feature: MA Experiment 20000071 PARAMETER Experiment Name: At_100uM_ABA_Mutants_cDNA_P Parameter: Plant Line Value: CS8104
  misc_feature: MA Experiment 20000071 PARAMETER Experiment Name: At_100uM_ABA_Mutants_cDNA_P Parameter: Timepoint (hr) Value: 6
  misc_feature: MA Experiment 20000071 PARAMETER Experiment Name: At_100uM_ABA_Mutants_cDNA_P Parameter: Tissue Value: Aerial
  misc_feature: MA Experiment 20000071 PARAMETER Experiment Name: At_100uM_ABA_Mutants_cDNA_P Parameter: Treatment Value: 100uM ABA vs. No Treatment
  misc_feature: MA Experiment ID: 20000072 Result: Down-regulated in Transcription
  misc_feature: MA Experiment 20000072 PARAMETER Experiment Name: At_100uM_ABA_Mutants_cDNA_P Parameter: Plant Line Value: CS8105
  misc_feature: MA Experiment 20000072 PARAMETER Experiment Name: At_100uM_ABA_Mutants_cDNA_P Parameter: Timepoint (hr) Value: 6
  misc_feature: MA Experiment 20000072 PARAMETER Experiment Name: At_100uM_ABA_Mutants_cDNA_P Parameter: Tissue Value: Aerial
  misc_feature: MA Experiment 20000072 PARAMETER Experiment Name: At_100uM_ABA_Mutants_cDNA_P Parameter: Treatment Value: 100uM ABA vs. No Treatment
  misc_feature: MA Experiment ID: 20000173 Result: Down-regulated in Transcription
  misc_feature: MA Experiment 20000173 PARAMETER Experiment Name: At_42deg_Heat_P Parameter: Age (day) Value: 14
  misc_feature: MA Experiment 20000173 PARAMETER Experiment Name: At_42deg_Heat_P Parameter: Organism Value: A. thaliana
  misc_feature: MA Experiment 20000173 PARAMETER Experiment Name: At_42deg_Heat_P Parameter: Plant Line Value: WS
  misc_feature: MA Experiment 20000173 PARAMETER Experiment Name: At_42deg_Heat_P Parameter: Temperature (deg C) Value: 42 vs. 22
  misc_feature: MA Experiment 20000173 PARAMETER Experiment Name: At_42deg_Heat_P Parameter: Timepoint (hr) Value: 6
  misc_feature: MA Experiment 20000173 PARAMETER Experiment Name: At_42deg_Heat_P Parameter: Tissue Value: Aerial
  misc_feature: MA Experiment ID: 20000235 Result: Up-regulated in Transcription
  misc_feature: MA Experiment 20000235 PARAMETER Experiment Name: At_Siliques_P Parameter: Age (day) Value: 21
  misc_feature: MA Experiment 20000235 PARAMETER Experiment Name: At_Siliques_P Parameter: Organism Value: A. thaliana
  misc_feature: MA Experiment 20000235 PARAMETER Experiment Name: At_Siliques_P Parameter: Plant Line Value: WS
  misc_feature: MA Experiment 20000235 PARAMETER Experiment Name: At_Siliques_P Parameter: Tissue Value: 5-10mm Siliques vs. Whole Plant
accagaagtggtatagtctaggccgatacatttcactatctctctctcttttgtttttcctcttcttctttttttccatttgatttcaaactctcacacaaagagcttcagatttataagaccatgataatggctttaagacaaagattggcaagaagaaaaaactaaagagaaacgaccaaaatctcaagcaaacagtactaacttctgttgcaaaacagaagaagatgtcttgtaataatggaatgtcttttttcccttcaaatttcatgatccaaacctcttacgaagatgatcatcctcatcaatctccatctcttgctcctcttcttccttcttgctctctacctcaagatctccatggatttgcttcgtttctaggtaagagatctccaatggaagggtgttgtgatttagaaacagggaacaatatgaatggagaagaggattattcagatgatgggtcacaaatgggagagaagaagaggagattgaacatggaacaagtgaagacactagagaagaactttgagcttggaaacaaacttgaaccagagaggaaaatgcagctagctcgtgccttaggtttgcaaccaagacagatcgcgatttggtttcaaaatcgaagagctcgttggaaaacaaagcagctagagaaagattatgatactcttaaacgacagtttgatacacttaaagctgaaaatgatcttcttcaaactcataatcagaaactccaagctgagataatgggattaaaaaacagagaacaaacagaatcaataaatctaaacaaagaaactgaaggatcttgcagtaacagaagtgataacagttcagataatctcagactagatatctcaactgcgccgccatcaaacgacagtacattaaccggtggccacccaccgccaccacagacagttggtcgacacttcttcccaccgtcgccagccaccgcaacgacaactactacaacaatgcagttctttcaaaactcatcttcaggacagagtatggttaaagaagagaatagtatcagtaacatgttctgtgcaatggatgaccattctggtttttggccatggcttgatcagcaacagtacaattgaaattggtctacctgttttttttgtttttgtttttaaaaaaatttatatttttttttttttgtatttggaattttgatcagaagaacccatgcatgttttcaaaaactggaatctatatcattagctcactttgaaatctgcaaccaaacaccactgaggttttttgtttactttttgagtaaatgagatgtaaaaaaatgggtaatatccattatattatataaaaaataatatcattatggcccaacatttttctgtatggagaaaaataaaataaattgtat

SEQ ID NO: 26506 - protein, 294 aa, Arabidopsis thaliana
  peptide (1)..(294): Ceres Seq. ID no. 12332544
  misc_feature (85)..(139): Pfam Name: Homeobox domain Pfam Description: Homeobox domain
  misc_feature (7)..(213): Homolog of NCBI NO: 15232066 NR Description: HD-Zip transcription factor
  misc_feature (85)..(282): Homolog of NCBI NO: 6175248 NR Description: jasmonic acid 1 [Lycopersicon esculentum]
  misc_feature (24)..(222): Homolog of NCBI NO: 19071644 NR Description: putative DNA-binding protein
  misc_feature (41)..(294): Homolog of NCBI NO: 1435022 NR Description: DNA-binding protein [Daucus carota]
  misc_feature (2)..(292): Homolog of NCBI NO: 7446243 NR Description: homeotic protein - carrot
  misc_feature (1)..(241): Homolog of NCBI NO: 25386233 NR Description: hypothetical protein T2P11.15 - Arabidopsis
  misc_feature (1)..(241): Homolog of NCBI NO: 18396130 NR Description: HD-Zip transcription factor
  misc_feature (1)..(294): Homolog of NCBI NO: 7446247 NR Description: homeotic protein - common sunflower
  misc_feature (7)..(294): Homolog of NCBI NO: 21555784 NR Description: homeobox gene 13 protein [Arabidopsis thaliana]
  misc_feature (1)..(294): Homolog of NCBI NO: 15222452 NR Description: HD-Zip transcription factor, Athb-13
MSCNNGMSFFPSNFMIQTSYEDDHPHQSPSLAPLLPSCSLPQDLHGFASFLGKRSPMEGCCDLETGNNMNGEEDYSDDGSQMGEKKRRLNMEQVKTLEKNFELGNKLEPERKMQLARALGLQPRQIAIWFQNRRARWKTKQLEKDYDTLKRQFDTLKAENDLLQTHNQKLQAEIMGLKNREQTESINLNKETEGSCSNRSDNSSDNLRLDISTAPPSNDSTLTGGHPPPPQTVGRHFFPPSPATATTTTTTMQFFQNSSSGQSMVKEENSISNMFCAMDDHSGFWPWLDQQQYN

SEQ ID NO: 26507 - protein, 288 aa, Arabidopsis thaliana
  peptide (1)..(288): Ceres Seq. ID no. 12332545
  misc_feature (79)..(133): Pfam Name: Homeobox domain Pfam Description: Homeobox domain
  misc_feature (1)..(207): Homolog of NCBI NO: 15232066 NR Description: HD-Zip transcription factor
  misc_feature (79)..(276): Homolog of NCBI NO: 6175248 NR Description: jasmonic acid 1 [Lycopersicon esculentum]
  misc_feature (18)..(216): Homolog of NCBI NO: 19071644 NR Description: putative DNA-binding protein
  misc_feature (35)..(288): Homolog of NCBI NO: 1435022 NR Description: DNA-binding protein [Daucus carota]
  misc_feature (1)..(286): Homolog of NCBI NO: 7446243 NR Description: homeotic protein - carrot
  misc_feature (1)..(235): Homolog of NCBI NO: 25386233 NR Description: hypothetical protein T2P11.15 - Arabidopsis
  misc_feature (1)..(235): Homolog of NCBI NO: 18396130 NR Description: HD-Zip transcription factor
  misc_feature (1)..(288): Homolog of NCBI NO: 7446247 NR Description: homeotic protein - common sunflower
  misc_feature (1)..(288): Homolog of NCBI NO: 21555784 NR Description: homeobox gene 13 protein [Arabidopsis thaliana]
  misc_feature (1)..(288): Homolog of NCBI NO: 15222452 NR Description: HD-Zip transcription factor, Athb-13
MSFFPSNFMIQTSYEDDHPHQSPSLAPLLPSCSLPQDLHGFASFLGKRSPMEGCCDLETGNNMNGEEDYSDDGSQMGEKKRRLNMEQVKTLEKNFELGNKLEPERKMQLARALGLQPRQIAIWFQNRRARWKTKQLEKDYDTLKRQFDTLKAENDLLQTHNQKLQAEIMGLKNREQTESINLNKETEGSCSNRSDNSSDNLRLDISTAPPSNDSTLTGGHPPPPQTVGRHFFPPSPATATTTTTTMQFFQNSSSGQSMVKEENSISNMFCAMDDHSGFWPWLDQQQYN

SEQ ID NO: 26508 - protein, 280 aa, Arabidopsis thaliana
  peptide (1)..(280): Ceres Seq. ID no. 12332546
  misc_feature (71)..(125): Pfam Name: Homeobox domain Pfam Description: Homeobox domain
  misc_feature (1)..(199): Homolog of NCBI NO: 15232066 NR Description: HD-Zip transcription factor
  misc_feature (71)..(268): Homolog of NCBI NO: 6175248 NR Description: jasmonic acid 1 [Lycopersicon esculentum]
  misc_feature (10)..(208): Homolog of NCBI NO: 19071644 NR Description: putative DNA-binding protein
  misc_feature (27)..(280): Homolog of NCBI NO: 1435022 NR Description: DNA-binding protein [Daucus carota]
  misc_feature (1)..(278): Homolog of NCBI NO: 7446243 NR Description: homeotic protein - carrot
  misc_feature (1)..(227): Homolog of NCBI NO: 25386233 NR Description: hypothetical protein T2P11.15 - Arabidopsis
  misc_feature (1)..(227): Homolog of NCBI NO: 18396130 NR Description: HD-Zip transcription factor
  misc_feature (1)..(280): Homolog of NCBI NO: 7446247 NR Description: homeotic protein - common sunflower
  misc_feature (1)..(280): Homolog of NCBI NO: 21555784 NR Description: homeobox gene 13 protein [Arabidopsis thaliana]
  misc_feature (1)..(280): Homolog of NCBI NO: 15222452 NR Description: HD-Zip transcription factor, Athb-13
MIQTSYEDDHPHQSPSLAPLLPSCSLPQDLHGFASFLGKRSPMEGCCDLETGNNMNGEEDYSDDGSQMGEKKRRLNMEQVKTLEKNFELGNKLEPERKMQLARALGLQPRQIAIWFQNRRARWKTKQLEKDYDTLKRQFDTLKAENDLLQTHNQKLQAEIMGLKNREQTESINLNKETEGSCSNRSDNSSDNLRLDISTAPPSNDSTLTGGHPPPPQTVGRHFFPPSPATATTTTTTMQFFQNSSSGQSMVKEENSISNMFCAMDDHSGFWPWLDQQQYN

SEQ ID NO: 26509 - DNA, 1110 bp, Arabidopsis thaliana
  misc_feature (1)..(1110): Ceres Seq. ID no. 12338399
  misc_feature: MA Experiment ID: 108488 Result: Down-regulated in Transcription
  misc_feature: MA Experiment ID: 108561 Result: Up-regulated in Transcription
  misc_feature: MA Experiment 108561 PARAMETER Experiment Name: At_100uM_ABA_cDNA_P Parameter: Timepoint (hr) Value: 6
  misc_feature: MA Experiment 108561 PARAMETER Experiment Name: At_100uM_ABA_cDNA_P Parameter: Tissue Value: Aerial
  misc_feature: MA Experiment 108561 PARAMETER Experiment Name: At_100uM_ABA_cDNA_P Parameter: Treatment Value: 100uM ABA vs. No Treatment
  misc_feature: MA Experiment ID: 108573 Result: Up-regulated in Transcription
  misc_feature: MA Experiment 108573 PARAMETER Experiment Name: At_Drought_cDNA_P Parameter: Timepoint (hr) Value: 6
  misc_feature: MA Experiment 108573 PARAMETER Experiment Name: At_Drought_cDNA_P Parameter: Tissue Value: Aerial
  misc_feature: MA Experiment 108573 PARAMETER Experiment Name: At_Drought_cDNA_P Parameter: Treatment Value: Drought vs. No Drought
  misc_feature: MA Experiment ID: 108585 Result: Up-regulated in Transcription
  misc_feature: MA Experiment 108585 PARAMETER Experiment Name: At_5mM_NaNP_cDNA_P Parameter: Timepoint (hr) Value: 6
  misc_feature: MA Experiment 108585 PARAMETER Experiment Name: At_5mM_NaNP_cDNA_P Parameter: Tissue Value: Aerial
  misc_feature: MA Experiment 108585 PARAMETER Experiment Name: At_5mM_NaNP_cDNA_P Parameter: Treatment Value: null
  misc_feature: MA Experiment ID: 108609 Result: Up-regulated in Transcription
  misc_feature: MA Experiment 108609 PARAMETER Experiment Name: At_100uM_ABA_cDNA_P Parameter: Timepoint (hr) Value: 24
  misc_feature: MA Experiment 108609 PARAMETER Experiment Name: At_100uM_ABA_cDNA_P Parameter: Tissue Value: Aerial
  misc_feature: MA Experiment 108609 PARAMETER Experiment Name: At_100uM_ABA_cDNA_P Parameter: Treatment Value: 100uM ABA vs. No Treatment
  misc_feature: MA Experiment ID: 20000069 Result: Up-regulated in Transcription
  misc_feature: MA Experiment 20000069 PARAMETER Experiment Name: At_100uM_ABA_Mutants_cDNA_P Parameter: Plant Line Value: CS23
  misc_feature: MA Experiment 20000069 PARAMETER Experiment Name: At_100uM_ABA_Mutants_cDNA_P Parameter: Timepoint (hr) Value: 6
  misc_feature: MA Experiment 20000069 PARAMETER Experiment Name: At_100uM_ABA_Mutants_cDNA_P Parameter: Tissue Value: Aerial
  misc_feature: MA Experiment 20000069 PARAMETER Experiment Name: At_100uM_ABA_Mutants_cDNA_P Parameter: Treatment Value: 100uM ABA vs. No Treatment
  misc_feature: MA Experiment ID: 20000087 Result: Up-regulated in Transcription
  misc_feature: MA Experiment 20000087 PARAMETER Experiment Name: At_100uM_ABA_Mutants_cDNA_P Parameter: Plant Line Value: WS
  misc_feature: MA Experiment 20000087 PARAMETER Experiment Name: At_100uM_ABA_Mutants_cDNA_P Parameter: Timepoint (hr) Value: 6
  misc_feature: MA Experiment 20000087 PARAMETER Experiment Name: At_100uM_ABA_Mutants_cDNA_P Parameter: Tissue Value: Aerial
  misc_feature: MA Experiment 20000087 PARAMETER Experiment Name: At_100uM_ABA_Mutants_cDNA_P Parameter: Treatment Value: 100uM ABA vs. No Treatment
  misc_feature: MA Experiment ID: 20000112 Result: Up-regulated in Transcription
  misc_feature: MA Experiment 20000112 PARAMETER Experiment Name: At_42deg_Heat_cDNA_P Parameter: Temperature (deg C) Value: 42 vs. 22
  misc_feature: MA Experiment 20000112 PARAMETER Experiment Name: At_42deg_Heat_cDNA_P Parameter: Timepoint (hr) Value: 2
  misc_feature: MA Experiment 20000112 PARAMETER Experiment Name: At_42deg_Heat_cDNA_P Parameter: Tissue Value: Aerial
  misc_feature: MA Experiment ID: 20000113 Result: Up-regulated in Transcription
  misc_feature: MA Experiment 20000113 PARAMETER Experiment Name: At_42deg_Heat_cDNA_P Parameter: Temperature (deg C) Value: 42 vs. 22
  misc_feature: MA Experiment 20000113 PARAMETER Experiment Name: At_42deg_Heat_cDNA_P Parameter: Timepoint (hr) Value: 8
  misc_feature: MA Experiment 20000113 PARAMETER Experiment Name: At_42deg_Heat_cDNA_P Parameter: Tissue Value: Aerial
  misc_feature: MA Experiment ID: 20000117 Result: Up-regulated in Transcription
  misc_feature: MA Experiment 20000117 PARAMETER Experiment Name: At_100uM_ABA_Mutants_cDNA_P Parameter: Plant Line Value: Columbia
  misc_feature: MA Experiment 20000117 PARAMETER Experiment Name: At_100uM_ABA_Mutants_cDNA_P Parameter: Timepoint (hr) Value: 6
  misc_feature: MA Experiment 20000117 PARAMETER Experiment Name: At_100uM_ABA_Mutants_cDNA_P Parameter: Tissue Value: Aerial
  misc_feature: MA Experiment 20000117 PARAMETER Experiment Name: At_100uM_ABA_Mutants_cDNA_P Parameter: Treatment Value: 100uM ABA vs. No Treatment
  misc_feature: MA Experiment ID: 20000173 Result: Up-regulated in Transcription
  misc_feature: MA Experiment 20000173 PARAMETER Experiment Name: At_42deg_Heat_P Parameter: Age (day) Value: 14
  misc_feature: MA Experiment 20000173 PARAMETER Experiment Name: At_42deg_Heat_P Parameter: Organism Value: A. thaliana
  misc_feature: MA Experiment 20000173 PARAMETER Experiment Name: At_42deg_Heat_P Parameter: Plant Line Value: WS
  misc_feature: MA Experiment 20000173 PARAMETER Experiment Name: At_42deg_Heat_P Parameter: Temperature (deg C) Value: 42 vs. 22
  misc_feature: MA Experiment 20000173 PARAMETER Experiment Name: At_42deg_Heat_P Parameter: Timepoint (hr) Value: 6
  misc_feature: MA Experiment 20000173 PARAMETER Experiment Name: At_42deg_Heat_P Parameter: Tissue Value: Aerial
  misc_feature: MA Experiment ID: 20000185 Result: Up-regulated in Transcription
  misc_feature: MA Experiment 20000185 PARAMETER Experiment Name: At_Roots__P Parameter: Age (day) Value: 7 vs. 21
  misc_feature: MA Experiment 20000185 PARAMETER Experiment Name: At_Roots__P Parameter: Organism Value: A. thaliana
  misc_feature: MA Experiment 20000185 PARAMETER Experiment Name: At_Roots__P Parameter: Tissue Value: Roots vs. Whole Plant
  misc_feature: MA Experiment ID: 20000264 Result: Up-regulated in Transcription
  misc_feature: MA Experiment 20000264 PARAMETER Experiment Name: At_Open_Flower_P Parameter: Age (day) Value: 21
  misc_feature: MA Experiment 20000264 PARAMETER Experiment Name: At_Open_Flower_P Parameter: Plant Line Value: WS
  misc_feature: MA Experiment 20000264 PARAMETER Experiment Name: At_Open_Flower_P Parameter: Tissue Value: Open Flower vs. Whole Plant
  misc_feature: MA Experiment ID: 20000286 Result: Up-regulated in Transcription
  misc_feature: MA Experiment 20000286 PARAMETER Experiment Name: At_Open_Flower_P Parameter: Age (day) Value: 21
  misc_feature: MA Experiment 20000286 PARAMETER Experiment Name: At_Open_Flower_P Parameter: Plant Line Value: WS
  misc_feature: MA Experiment 20000286 PARAMETER Experiment Name: At_Open_Flower_P Parameter: Tissue Value: Half Open vs. Whole Plant
  misc_feature: MA Experiment ID: 20000437 Result: Up-regulated in Transcription
  misc_feature: MA Experiment 20000437 PARAMETER Experiment Name: At_Drought_P Parameter: Age (day) Value: 8
  misc_feature: MA Experiment 20000437 PARAMETER Experiment Name: At_Drought_P Parameter: Organism Value: A. thaliana
  misc_feature: MA Experiment 20000437 PARAMETER Experiment Name: At_Drought_P Parameter: Plant Line Value: WS
  misc_feature: MA Experiment 20000437 PARAMETER Experiment Name: At_Drought_P Parameter: Timepoint (hr) Value: 24
  misc_feature: MA Experiment 20000437 PARAMETER Experiment Name: At_Drought_P Parameter: Tissue Value: Whole Plant
  misc_feature: MA Experiment 20000437 PARAMETER Experiment Name: At_Drought_P Parameter: Treatment Value: Drought vs. No Drought
  misc_feature: MA Experiment ID: 20000439 Result: Up-regulated in Transcription
  misc_feature: MA Experiment 20000439 PARAMETER Experiment Name: At_Roots__P Parameter: Age (day) Value: 14 vs. 21
  misc_feature: MA Experiment 20000439 PARAMETER Experiment Name: At_Roots__P Parameter: Organism Value: A. thaliana
  misc_feature: MA Experiment 20000439 PARAMETER Experiment Name: At_Roots__P Parameter: Tissue Value: Roots vs. Whole Plant
  misc_feature: MA Experiment ID: 20000453 Result: Up-regulated in Transcription
  misc_feature: MA Experiment 20000453 PARAMETER Experiment Name: At_100uM_ABA_P Parameter: Age (day) Value: 15
  misc_feature: MA Experiment 20000453 PARAMETER Experiment Name: At_100uM_ABA_P Parameter: Organism Value: A. thaliana
  misc_feature: MA Experiment 20000453 PARAMETER Experiment Name: At_100uM_ABA_P Parameter: Plant Line Value: WS
  misc_feature: MA Experiment 20000453 PARAMETER Experiment Name: At_100uM_ABA_P Parameter: Timepoint (hr) Value: 24
  misc_feature: MA Experiment 20000453 PARAMETER Experiment Name: At_100uM_ABA_P Parameter: Tissue Value: Aerial
  misc_feature: MA Experiment 20000453 PARAMETER Experiment Name: At_100uM_ABA_P Parameter: Treatment Value: 100uM ABA vs. No Treatment
  misc_feature: MA Experiment ID: 20000527 Result: Down-regulated in Transcription
  misc_feature: MA Experiment 20000527 PARAMETER Experiment Name: At_10percent_PEG_P Parameter: Age (day) Value: 20
  misc_feature: MA Experiment 20000527 PARAMETER Experiment Name: At_10percent_PEG_P Parameter: Organism Value: A. thaliana
  misc_feature: MA Experiment 20000527 PARAMETER Experiment Name: At_10percent_PEG_P Parameter: Plant Line Value: WS
  misc_feature: MA Experiment 20000527 PARAMETER Experiment Name: At_10percent_PEG_P Parameter: Timepoint (day) Value: 20
  misc_feature: MA Experiment 20000527 PARAMETER Experiment Name: At_10percent_PEG_P Parameter: Tissue Value: Whole Plant
  misc_feature: MA Experiment 20000527 PARAMETER Experiment Name: At_10percent_PEG_P Parameter: Treatment Value: 10percent PEG vs. No Treatment
  misc_feature: MA Experiment ID: 20000794 Result: Up-regulated in Transcription
  misc_feature: MA Experiment 20000794 PARAMETER Experiment Name: At_Petals_P Parameter: Age (day) Value: 23-25 days
  misc_feature: MA Experiment 20000794 PARAMETER Experiment Name: At_Petals_P Parameter: Plant Line Value: WS
  misc_feature: MA Experiment 20000794 PARAMETER Experiment Name: At_Petals_P Parameter: Tissue Value: Petals vs. Whole plant
  misc_feature: MA Experiment ID: 20001905 Result: Up-regulated in Transcription
  misc_feature: MA Experiment 20001905 PARAMETER Experiment Name: At_Drought_Reproduction_P Parameter: Age (day) Value: 40
  misc_feature: MA Experiment 20001905 PARAMETER Experiment Name: At_Drought_Reproduction_P Parameter: Organism Value: A. thaliana
  misc_feature: MA Experiment 20001905 PARAMETER Experiment Name: At_Drought_Reproduction_P Parameter: Plant Line Value: WS
  misc_feature: MA Experiment 20001905 PARAMETER Experiment Name: At_Drought_Reproduction_P Parameter: Timepoint (day) Value: 10
  misc_feature: MA Experiment 20001905 PARAMETER Experiment Name: At_Drought_Reproduction_P Parameter: Tissue Value: Rosettes
  misc_feature: MA Experiment 20001905 PARAMETER Experiment Name: At_Drought_Reproduction_P Parameter: Treatment Value: Drought vs. No Drought
  misc_feature: MA Experiment ID: 20001908 Result: Up-regulated in Transcription
  misc_feature: MA Experiment 20001908 PARAMETER Experiment Name: At_Drought_Reproduction_P Parameter: Age (day) Value: 40
  misc_feature: MA Experiment 20001908 PARAMETER Experiment Name: At_Drought_Reproduction_P Parameter: Organism Value: A. thaliana
  misc_feature: MA Experiment 20001908 PARAMETER Experiment Name: At_Drought_Reproduction_P Parameter: Plant Line Value: WS
  misc_feature: MA Experiment 20001908 PARAMETER Experiment Name: At_Drought_Reproduction_P Parameter: Timepoint (day) Value: 10
  misc_feature: MA Experiment 20001908 PARAMETER Experiment Name: At_Drought_Reproduction_P Parameter: Tissue Value: Siliques
  misc_feature: MA Experiment 20001908 PARAMETER Experiment Name: At_Drought_Reproduction_P Parameter: Treatment Value: Drought vs. No Drought
aagttattataaattaattatcttctgaaaaatataaatacttgaattaactttttagccattttcagatttctccgaggaaaaaaatggcgtctggtttgatcggaagattggttggaacgaaaccgtcgaaattagccacggtggcgaggttaattccggtgagatggacctctacaggagcggaggcggaaacaaaagcttcctctggcggcggaagaggatcgaacttgaagacttttcagatctatcgatggaatccagataatccagggaagccagagcttcaaaattaccagatcgatctcaaagattgtggtccaatggtattagatgctttgattaagatcaaaaacgaaatggatccatctcttactttccgtagatcatgccgtgaagggatctgtggttcatgtgctatgaacattgatggatgtaacggacttgcttgtttgacaaagattcaagatgaagcatcggagacgacgattacaccgttgcctcatatgtttgtgattaaggatttggttgttgatatgactaatttttataatcagtataagagtattgagccgtggttgaagaggaagactccagcgtctgttcctgctaaggagattttgcagagtaagaaggatagagctaagcttgatgggatgtatgaatgtattctttgtgcttgttttagcacatcttgtcctagttactggtggaatcctgagtcttaccttggtccagctgctttgctacacgctaataggtggataagcgacagtcgtgatgagtacactaaggaaagacttgaggctattgacgacgagttcaagctttaccgttgccatacaatcttgaattgtgctcgtgcctgtccaaagggtttgaacccaggaaaacagatcactcacatcaagcaacttcagcgttgaaacagctaagtttgtgtgcgggatccgttgggaaactcatcagtcttaacgtttgaagctaataatcttcacaaaacctcttcggattttcaattcattcttgtattgttgttgccaaatattagcgccttaaaaaaactcgtttgcaagtcttcccaagtagatgagctttgtggttgtatcc

SEQ ID NO: 26510 - protein, 279 aa, Arabidopsis thaliana
  peptide (1)..(279): Ceres Seq. ID no. 12338400
  misc_feature (63)..(127): Pfam Name: 2Fe-2S iron-sulfur cluster binding domain Pfam Description: 2Fe-2S iron-sulfur cluster binding domain
  misc_feature (1)..(279): Homolog of NCBI NO: 12049598 NR Description: mitochondrial succinate dehydrogenase
  misc_feature (1)..(277): Homolog of NCBI NO: 3851612 NR Description: succinate dehydrogenase Ip subunit [Gallus gallus]
  misc_feature (46)..(278): Homolog of NCBI NO: 5688947 NR Description: succinate dehydrogenase iron-protein subunit
  misc_feature (1)..(279): Homolog of NCBI NO: 12049600 NR Description: mitochondrial succinate dehydrogenase
  misc_feature (1)..(279): Homolog of NCBI NO: 21593098 NR Description: succinate dehydrogenase iron-protein subunit-like
  misc_feature (1)..(279): Homolog of NCBI NO: 15232149 NR Description: succinate dehydrogenase iron-protein subunit,
  misc_feature (1)..(279): Homolog of NCBI NO: 15237464 NR Description: succinate dehydrogenase iron-protein subunit -like
  misc_feature (9)..(278): Homolog of NCBI NO: 28611029 NR Description: succinate dehydrogenase [Triticum aestivum]
  misc_feature (1)..(278): Homolog of NCBI NO: 4803711 NR Description: iron sulfur subunit of succinate dehydrogenase
  misc_feature (1)..(279): Homolog of NCBI NO: 21555840 NR Description: succinate dehydrogenase iron-protein subunit,
MASGLIGRLVGTKPSKLATVARLIPVRWTSTGAEAETKASSGGGRGSNLKTFQIYRWNPDNPGKPELQNYQIDLKDCGPMVLDALIKIKNEMDPSLTFRRSCREGICGSCAMNIDGCNGLACLTKIQDEASETTITPLPHMFVIKDLVVDMTNFYNQYKSIEPWLKRKTPASVPAKEILQSKKDRAKLDGMYECILCACFSTSCPSYWWNPESYLGPAALLHANRWISDSRDEYTKERLEAIDDEFKLYRCHTILNCARACPKGLNPGKQITHIKQLQR

SEQ ID NO: 26511 - protein, 200 aa, Arabidopsis thaliana
  peptide (1)..(200): Ceres Seq. ID no. 12338401
  misc_feature (1)..(48): Pfam Name: 2Fe-2S iron-sulfur cluster binding domain Pfam Description: 2Fe-2S iron-sulfur cluster binding domain
  misc_feature (1)..(198): Homolog of NCBI NO: 3851612 NR Description: succinate dehydrogenase Ip subunit [Gallus gallus]
  misc_feature (1)..(199): Homolog of NCBI NO: 4803711 NR Description: iron sulfur subunit of succinate dehydrogenase
  misc_feature (1)..(199): Homolog of NCBI NO: 5688947 NR Description: succinate dehydrogenase iron-protein subunit
  misc_feature (1)..(199): Homolog of NCBI NO: 28611029 NR Description: succinate dehydrogenase [Triticum aestivum]
  misc_feature (1)..(200): Homolog of NCBI NO: 12049600 NR Description: mitochondrial succinate dehydrogenase
  misc_feature (1)..(200): Homolog of NCBI NO: 15237464 NR Description: succinate dehydrogenase iron-protein subunit -like
  misc_feature (1)..(200): Homolog of NCBI NO: 21593098 NR Description: succinate dehydrogenase iron-protein subunit-like
  misc_feature (1)..(200): Homolog of NCBI NO: 15232149 NR Description: succinate dehydrogenase iron-protein subunit,
  misc_feature (1)..(200): Homolog of NCBI NO: 12049598 NR Description: mitochondrial succinate dehydrogenase
  misc_feature (1)..(200): Homolog of NCBI NO: 21555840 NR Description: succinate dehydrogenase iron-protein subunit,
MVLDALIKIKNEMDPSLTFRRSCREGICGSCAMNIDGCNGLACLTKIQDEASETTITPLPHMFVIKDLVVDMTNFYNQYKSIEPWLKRKTPASVPAKEILQSKKDRAKLDGMYECILCACFSTSCPSYWWNPESYLGPAALLHANRWISDSRDEYTKERLEAIDDEFKLYRCHTILNCARACPKGLNPGKQITHIKQLQR

SEQ ID NO: 26512 - protein, 188 aa, Arabidopsis thaliana
  peptide (1)..(188): Ceres Seq. ID no. 12338403
  misc_feature (1)..(186): Homolog of NCBI NO: 3851612 NR Description: succinate dehydrogenase Ip subunit [Gallus gallus]
  misc_feature (1)..(187): Homolog of NCBI NO: 4803711 NR Description: iron sulfur subunit of succinate dehydrogenase
  misc_feature (1)..(187): Homolog of NCBI NO: 5688947 NR Description: succinate dehydrogenase iron-protein subunit
  misc_feature (1)..(187): Homolog of NCBI NO: 28611029 NR Description: succinate dehydrogenase [Triticum aestivum]
  misc_feature (1)..(188): Homolog of NCBI NO: 12049600 NR Description: mitochondrial succinate dehydrogenase
  misc_feature (1)..(188): Homolog of NCBI NO: 15237464 NR Description: succinate dehydrogenase iron-protein subunit -like
  misc_feature (1)..(188): Homolog of NCBI NO: 21593098 NR Description: succinate dehydrogenase iron-protein subunit-like
  misc_feature (1)..(188): Homolog of NCBI NO: 15232149 NR Description: succinate dehydrogenase iron-protein subunit,
  misc_feature (1)..(188): Homolog of NCBI NO: 12049598 NR Description: mitochondrial succinate dehydrogenase
  misc_feature (1)..(188): Homolog of NCBI NO: 21555840 NR Description: succinate dehydrogenase iron-protein subunit,
MDPSLTFRRSCREGICGSCAMNIDGCNGLACLTKIQDEASETTITPLPHMFVIKDLVVDMTNFYNQYKSIEPWLKRKTPASVPAKEILQSKKDRAKLDGMYECILCACFSTSCPSYWWNPESYLGPAALLHANRWISDSRDEYTKERLEAIDDEFKLYRCHTILNCARACPKGLNPGKQITHIKQLQR

SEQ ID NO: 26513 - DNA, 1179 bp, Arabidopsis thaliana
  misc_feature (1)..(1179): Ceres Seq. ID no. 12325357
  misc_feature: MA Experiment ID: 108434 Result: Up-regulated in Transcription
  misc_feature: MA Experiment 108434 PARAMETER Experiment Name: At_Root_Tips_cDNA_P Parameter: Tissue Value: Root Tips
  misc_feature: MA Experiment ID: 108579 Result: Down-regulated in Transcription
  misc_feature: MA Experiment 108579 PARAMETER Experiment Name: At_4deg_Cold_cDNA_P Parameter: Temperature (deg C) Value: 4 vs. 22
  misc_feature: MA Experiment 108579 PARAMETER Experiment Name: At_4deg_Cold_cDNA_P Parameter: Timepoint (hr) Value: 6
  misc_feature: MA Experiment 108579 PARAMETER Experiment Name: At_4deg_Cold_cDNA_P Parameter: Tissue Value: Aerial
  misc_feature: MA Experiment ID: 20000184 Result: Down-regulated in Transcription
  misc_feature: MA Experiment 20000184 PARAMETER Experiment Name: At_Shoots__P Parameter: Age (day) Value: 7
  misc_feature: MA Experiment 20000184 PARAMETER Experiment Name: At_Shoots__P Parameter: Tissue Value: Shoots vs. Whole Plant
  misc_feature: MA Experiment ID: 20000213 Result: Down-regulated in Transcription
  misc_feature: MA Experiment 20000213 PARAMETER Experiment Name: At_4deg_Cold_P Parameter: Timepoint (hr) Value: 2
  misc_feature: MA Experiment ID: 20001248 Result: Up-regulated in Transcription
  misc_feature: MA Experiment 20001248 PARAMETER Experiment Name: At_Far-red-induction_P Parameter: Age (day) Value: 7
  misc_feature: MA Experiment 20001248 PARAMETER Experiment Name: At_Far-red-induction_P Parameter: Light Value: Far-red vs. White
  misc_feature: MA Experiment 20001248 PARAMETER Experiment Name: At_Far-red-induction_P Parameter: Organism Value: A. thaliana
  misc_feature: MA Experiment 20001248 PARAMETER Experiment Name: At_Far-red-induction_P Parameter: Plant Line Value: Columbia
  misc_feature: MA Experiment 20001248 PARAMETER Experiment Name: At_Far-red-induction_P Parameter: Timepoint (hr) Value: 4
  misc_feature: MA Experiment 20001248 PARAMETER Experiment Name: At_Far-red-induction_P Parameter: Tissue Value: Whole Plant
  misc_feature: MA Experiment ID: 20001450 Result: Up-regulated in Transcription
  misc_feature: MA Experiment 20001450 PARAMETER Experiment Name: At_Far-red-induction_P Parameter: Age (day) Value: 7
  misc_feature: MA Experiment 20001450 PARAMETER Experiment Name: At_Far-red-induction_P Parameter: Light Value: Far-red vs. White
  misc_feature: MA Experiment 20001450 PARAMETER Experiment Name: At_Far-red-induction_P Parameter: Organism Value: A. thaliana
  misc_feature: MA Experiment 20001450 PARAMETER Experiment Name: At_Far-red-induction_P Parameter: Plant Line Value: Columbia
  misc_feature: MA Experiment 20001450 PARAMETER Experiment Name: At_Far-red-induction_P Parameter: Timepoint (hr) Value: 8
  misc_feature: MA Experiment 20001450 PARAMETER Experiment Name: At_Far-red-induction_P Parameter: Tissue Value: Whole Plant
aacacacctacacaaaaatcaatcacagtctctgtctcactcgccggagtttcggtcactgcgccatctccggggtcgagttcgtcgtacttcatcgaactatgaactctcatgatatcgatgatcagttagaagcagatgtatacagtaacttgccttctcgaaatgattcttcaacagggaggagaaatcgaaactcgtgtagatcgaaacactcagagactgagcaacgaagaagaagcaaaatcaatgaaagatttcagagtttaatggatattatacctcagaatcagaatgatcagaaacgagataaagcttctttcttgttggaggttatagagtatattcactttcttcaagaaaaagttcacatgtatgaagattctcaccaaatgtggtatcaatccccaaccaaattgattccttggagaaatagtcatgggtctgttgcggaggaaaatgaccatcctcaaatcgttaaaagcttttcaagtaatgataaagttgctgcttcttcgggttttctcttggatacgtacaattcagtaaatcctgatattgactcagcagttagcaccaagattcctgaacacagtcctgtttcagcagtttcatcgtatctacgtaccgagccttcgctgcagtttgttcagcatgacttttggcaaccaaaaacaagttgtggaacaattaactgttttacaaatgaattgttaacatctgacgaaaaaacatcagccagcttgtccactgtctgctcacaaagggtacttaacactctaactgaagcacttaagtcatcgggtgttaacatgtcagagaccatgatatctgtgcagttaagcccttcggaaaagagaagatcgcgagtattctgttgctgcgtttgcttctgaggataatggtaatagcatcgctgatgaagaaggggactctcctactgaaactagaagcttctgcaatgatattgatcattcccagaagagaataagacgataagatctggttttctattttctatgttatgacaactgtttgataattttgttactttcggtgagtcaggatcagtaggtgtagatactacttttatcgtgctgcaactatttttcatgatatagtaaaaactaagtagaatgatgtaacaagtttcgcaaatctataacaagagtttgcttc

SEQ ID NO: 26514 - protein, 297 aa, Arabidopsis thaliana
  peptide (1)..(297): Ceres Seq. ID no. 12325358
  misc_feature (67)..(119): Pfam Name: Helix-loop-helix DNA-binding domain Pfam Description: Helix-loop-helix DNA-binding domain
  misc_feature (117)..(280): Homolog of NCBI NO: 19310568 NR Description: putative DNA-binding protein [Arabidopsis
  misc_feature (33)..(291): Homolog of NCBI NO: 11358566 NR Description: myc-like protein - Arabidopsis thaliana
  misc_feature (33)..(291): Homolog of NCBI NO: 30682248 NR Description: bHLH protein family [Arabidopsis thaliana]
  misc_feature (47)..(280): Homolog of NCBI NO: 21555388 NR Description: putative DNA-binding protein [Arabidopsis
  misc_feature (47)..(280): Homolog of NCBI NO: 15221582 NR Description: putative DNA-binding protein
  misc_feature (256)..(291): Homolog of NCBI NO: 15241563 NR Description: putative protein; protein id: At5g38860.1
  misc_feature (34)..(255): Homolog of NCBI NO: 15241563 NR Description: putative protein; protein id: At5g38860.1
  misc_feature (34)..(291): Homolog of NCBI NO: 9758063 NR Description: DNA-binding protein-like [Arabidopsis thaliana]
HTYTKINHSLCLTRRSFGHCAISGVEFVVLHRTMNSHDIDDQLEADVYSNLPSRNDSSTGRRNRNSCRSKHSETEQRRRSKINERFQSLMDIIPQNQNDQKRDKASFLLEVIEYIHFLQEKVHMYEDSHQMWYQSPTKLIPWRNSHGSVAEENDHPQIVKSFSSNDKVAASSGFLLDTYNSVNPDIDSAVSTKIPEHSPVSAVSSYLRTEPSLQFVQHDFWQPKTSCGTINCFTNELLTSDEKTSASLSTVCSQRVLNTLTEALKSSGVNMSETMISVQLSPSEKRRSRVFCCCVCF

SEQ ID NO: 26515 - protein, 264 aa, Arabidopsis thaliana
  peptide (1)..(264): Ceres Seq. ID no. 12325359
  misc_feature (34)..(86): Pfam Name: Helix-loop-helix DNA-binding domain Pfam Description: Helix-loop-helix DNA-binding domain
  misc_feature (84)..(247): Homolog of NCBI NO: 19310568 NR Description: putative DNA-binding protein [Arabidopsis
  misc_feature (1)..(258): Homolog of NCBI NO: 11358566 NR Description: myc-like protein - Arabidopsis thaliana
  misc_feature (1)..(258): Homolog of NCBI NO: 30682248 NR Description: bHLH protein family [Arabidopsis thaliana]
  misc_feature (14)..(247): Homolog of NCBI NO: 21555388 NR Description: putative DNA-binding protein [Arabidopsis
  misc_feature (14)..(247): Homolog of NCBI NO: 15221582 NR Description: putative DNA-binding protein
  misc_feature (223)..(258): Homolog of NCBI NO: 15241563 NR Description: putative protein; protein id: At5g38860.1
  misc_feature (1)..(222): Homolog of NCBI NO: 15241563 NR Description: putative protein; protein id: At5g38860.1
  misc_feature (1)..(258): Homolog of NCBI NO: 9758063 NR Description: DNA-binding protein-like [Arabidopsis thaliana]
MNSHDIDDQLEADVYSNLPSRNDSSTGRRNRNSCRSKHSETEQRRRSKINERFQSLMDIIPQNQNDQKRDKASFLLEVIEYIHFLQEKVHMYEDSHQMWYQSPTKLIPWRNSHGSVAEENDHPQIVKSFSSNDKVAASSGFLLDTYNSVNPDIDSAVSTKIPEHSPVSAVSSYLRTEPSLQFVQHDFWQPKTSCGTINCFTNELLTSDEKTSASLSTVCSQRVLNTLTEALKSSGVNMSETMISVQLSPSEKRRSRVFCCCVCF

SEQ ID NO: 26516 - protein, 208 aa, Arabidopsis thaliana
  peptide (1)..(208): Ceres Seq. ID no. 12325360
  misc_feature (28)..(191): Homolog of NCBI NO: 19310568 NR Description: putative DNA-binding protein [Arabidopsis
  misc_feature (1)..(202): Homolog of NCBI NO: 11358566 NR Description: myc-like protein - Arabidopsis thaliana
  misc_feature (1)..(202): Homolog of NCBI NO: 30682248 NR Description: bHLH protein family [Arabidopsis thaliana]
  misc_feature (1)..(191): Homolog of NCBI NO: 21555388 NR Description: putative DNA-binding protein [Arabidopsis
  misc_feature (1)..(191): Homolog of NCBI NO: 15221582 NR Description: putative DNA-binding protein
  misc_feature (167)..(202): Homolog of NCBI NO: 15241563 NR Description: putative protein; protein id: At5g38860.1
  misc_feature (1)..(166): Homolog of NCBI NO: 15241563 NR Description: putative protein; protein id: At5g38860.1
  misc_feature (1)..(202): Homolog of NCBI NO: 9758063 NR Description: DNA-binding protein-like [Arabidopsis thaliana]
MDIIPQNQNDQKRDKASFLLEVIEYIHFLQEKVHMYEDSHQMWYQSPTKLIPWRNSHGSVAEENDHPQIVKSFSSNDKVAASSGFLLDTYNSVNPDIDSAVSTKIPEHSPVSAVSSYLRTEPSLQFVQHDFWQPKTSCGTINCFTNELLTSDEKTSASLSTVCSQRVLNTLTEALKSSGVNMSETMISVQLSPSEKRRSRVFCCCVCF

SEQ ID NO: 26517 - DNA, 347 bp, Arabidopsis thaliana
  misc_feature (1)..(347): Ceres Seq. ID no. 12384965
  misc_feature: MA Experiment ID: 108461 Result: Down-regulated in Transcription
  misc_feature: MA Experiment 108461 PARAMETER Experiment Name: At_Germinating_Seeds_cDNA_P Parameter: Age (day) Value: 1 vs. 0
  misc_feature: MA Experiment 108461 PARAMETER Experiment Name: At_Germinating_Seeds_cDNA_P Parameter: Tissue Value: Germinating Seeds
  misc_feature: MA Experiment ID: 108462 Result: Down-regulated in Transcription
  misc_feature: MA Experiment 108462 PARAMETER Experiment Name: At_Germinating_Seeds_cDNA_P Parameter: Age (day) Value: 2 vs. 0
  misc_feature: MA Experiment 108462 PARAMETER Experiment Name: At_Germinating_Seeds_cDNA_P Parameter: Tissue Value: Germinating Seeds
  misc_feature: MA Experiment ID: 108464 Result: Down-regulated in Transcription
  misc_feature: MA Experiment 108464 PARAMETER Experiment Name: At_Germinating_Seeds_cDNA_P Parameter: Age (day) Value: 4 vs. 0
  misc_feature: MA Experiment 108464 PARAMETER Experiment Name: At_Germinating_Seeds_cDNA_P Parameter: Tissue Value: Germinating Seeds
  misc_feature: MA Experiment ID: 108607 Result: Down-regulated in Transcription
  misc_feature: MA Experiment 108607 PARAMETER Experiment Name: At_100uM_ABA_cDNA_P Parameter: Timepoint (hr) Value: 4
  misc_feature: MA Experiment 108607 PARAMETER Experiment Name: At_100uM_ABA_cDNA_P Parameter: Tissue Value: Aerial
  misc_feature: MA Experiment 108607 PARAMETER Experiment Name: At_100uM_ABA_cDNA_P Parameter: Treatment Value: 100uM ABA vs. No Treatment
  misc_feature: MA Experiment ID: 20000495 Result: Down-regulated in Transcription
  misc_feature: MA Experiment 20000495 PARAMETER Experiment Name: At_Guard_Cells_P Parameter: Harvest Date Value: 8/2/2002
  misc_feature: MA Experiment 20000495 PARAMETER Experiment Name: At_Guard_Cells_P Parameter: Organism Value: A. thaliana
  misc_feature: MA Experiment 20000495 PARAMETER Experiment Name: At_Guard_Cells_P Parameter: Tissue Value: Guard Cells vs. Leaves
  misc_feature: MA Experiment ID: 20001451 Result: Up-regulated in Transcription
  misc_feature: MA Experiment 20001451 PARAMETER Experiment Name: At_Far-red-induction_P Parameter: Age (day) Value: 7
  misc_feature: MA Experiment 20001451 PARAMETER Experiment Name: At_Far-red-induction_P Parameter: Light Value: Far-red vs. White
  misc_feature: MA Experiment 20001451 PARAMETER Experiment Name: At_Far-red-induction_P Parameter: Organism Value: A. thaliana
  misc_feature: MA Experiment 20001451 PARAMETER Experiment Name: At_Far-red-induction_P Parameter: Plant Line Value: Columbia
  misc_feature: MA Experiment 20001451 PARAMETER Experiment Name: At_Far-red-induction_P Parameter: Timepoint (hr) Value: 24
  misc_feature: MA Experiment 20001451 PARAMETER Experiment Name: At_Far-red-induction_P Parameter: Tissue Value: Whole Plant
aaaagaatttcttcgctctaccgccgccgtctctcttctctcagcaaggttgaatcatcagagaagaaagggttttacactgcggcgtaaaggatgaagcttgacgtgaatgtgttgagatatttatccaaagatgattttcgagttctcactgctgtcgagatgggaatgcgaaaccatgagattgttccttctgagcttgtggagcgcattgcttgtctaaaacatggaggcacctacaaagtcctaaagaacttgctcaagtataagcttttgcaccacgactcctctaaatatgatggattccgactcacctatctgggttatgactttcttgccattaaagc

SEQ ID NO: 26518 - protein, 84 aa, Arabidopsis thaliana
  peptide (1)..(84): Ceres Seq. ID no. 12384966
  misc_feature (2)..(83): Homolog of NCBI NO: 26354833 NR Description: unnamed protein product [Mus musculus]
  misc_feature (2)..(83): Homolog of NCBI NO: 27730419 NR Description: similar to RIKEN cDNA 2010110K24
  misc_feature (2)..(83): Homolog of NCBI NO: 33303909 NR Description: hypothetical protein FLJ11159 [synthetic
  misc_feature (2)..(83): Homolog of NCBI NO: 12654265 NR Description: hypothetical protein FLJ11159 [Homo sapiens]
  misc_feature (2)..(83): Homolog of NCBI NO: 8922905 NR Description: hypothetical protein FLJ11159 [Homo sapiens]
  misc_feature (2)..(83): Homolog of NCBI NO: 24649986 NR Description: CG11859-PA [Drosophila melanogaster]
  misc_feature (2)..(83): Homolog of NCBI NO: 37681925 NR Description: RIO kinase 2 [Danio rerio]
  misc_feature (2)..(83): Homolog of NCBI NO: 28502888 NR Description: Similar to hypothetical protein FLJ11159 [Danio
  misc_feature (1)..(83): Homolog of NCBI NO: 15230437 NR Description: putative protein; protein id: At3g51270.1
  misc_feature (1)..(83): Homolog of NCBI NO: 34907494 NR Description: B1099D03.17 [Oryza sativa (japonica
MKLDVNVLRYLSKDDFRVLTAVEMGMRNHEIVPSELVERIACLKHGGTYKVLKNLLKYKLLHHDSSKYDGFRLTYLGYDFLAIK

SEQ ID NO: 26519 - protein, 61 aa, Arabidopsis thaliana
  peptide (1)..(61): Ceres Seq. ID no. 12384967
  misc_feature (1)..(60): Homolog of NCBI NO: 26354833 NR Description: unnamed protein product [Mus musculus]
  misc_feature (1)..(60): Homolog of NCBI NO: 27730419 NR Description: similar to RIKEN cDNA 2010110K24
  misc_feature (1)..(60): Homolog of NCBI NO: 33303909 NR Description: hypothetical protein FLJ11159 [synthetic
  misc_feature (1)..(60): Homolog of NCBI NO: 12654265 NR Description: hypothetical protein FLJ11159 [Homo sapiens]
  misc_feature (1)..(60): Homolog of NCBI NO: 8922905 NR Description: hypothetical protein FLJ11159 [Homo sapiens]
  misc_feature (1)..(60): Homolog of NCBI NO: 24649986 NR Description: CG11859-PA [Drosophila melanogaster]
  misc_feature (1)..(60): Homolog of NCBI NO: 37681925 NR Description: RIO kinase 2 [Danio rerio]
  misc_feature (1)..(60): Homolog of NCBI NO: 28502888 NR Description: Similar to hypothetical protein FLJ11159 [Danio
  misc_feature (1)..(60): Homolog of NCBI NO: 15230437 NR Description: putative protein; protein id: At3g51270.1
  misc_feature (1)..(60): Homolog of NCBI NO: 34907494 NR Description: B1099D03.17 [Oryza sativa (japonica
MGMRNHEIVPSELVERIACLKHGGTYKVLKNLLKYKLLHHDSSKYDGFRLTYLGYDFLAIK

SEQ ID NO: 26520 - protein, 59 aa, Arabidopsis thaliana
  peptide (1)..(59): Ceres Seq. ID no. 12384968
  misc_feature (1)..(58): Homolog of NCBI NO: 26354833 NR Description: unnamed protein product [Mus musculus]
  misc_feature (1)..(58): Homolog of NCBI NO: 27730419 NR Description: similar to RIKEN cDNA 2010110K24
  misc_feature (1)..(58): Homolog of NCBI NO: 33303909 NR Description: hypothetical protein FLJ11159 [synthetic
  misc_feature (1)..(58): Homolog of NCBI NO: 12654265 NR Description: hypothetical protein FLJ11159 [Homo sapiens]
  misc_feature (1)..(58): Homolog of NCBI NO: 8922905 NR Description: hypothetical protein FLJ11159 [Homo sapiens]
  misc_feature (1)..(58): Homolog of NCBI NO: 24649986 NR Description: CG11859-PA [Drosophila melanogaster]
  misc_feature (1)..(58): Homolog of NCBI NO: 37681925 NR Description: RIO kinase 2 [Danio rerio]
  misc_feature (1)..(58): Homolog of NCBI NO: 28502888 NR Description: Similar to hypothetical protein FLJ11159 [Danio
  misc_feature (1)..(58): Homolog of NCBI NO: 15230437 NR Description: putative protein; protein id: At3g51270.1
  misc_feature (1)..(58): Homolog of NCBI NO: 34907494 NR Description: B1099D03.17 [Oryza sativa (japonica
MRNHEIVPSELVERIACLKHGGTYKVLKNLLKYKLLHHDSSKYDGFRLTYLGYDFLAIK

SEQ ID NO: 26521 - DNA, 1510 bp, Arabidopsis thaliana
  misc_feature (1)..(1510): Ceres Seq. ID no. 12371757
  misc_feature: MA Experiment ID: 20000070 Result: Down-regulated in Transcription
  misc_feature: MA Experiment 20000070 PARAMETER Experiment Name: At_100uM_ABA_Mutants_cDNA_P Parameter: Plant Line Value: CS24
  misc_feature: MA Experiment 20000070 PARAMETER Experiment Name: At_100uM_ABA_Mutants_cDNA_P Parameter: Timepoint (hr) Value: 6
  misc_feature: MA Experiment 20000070 PARAMETER Experiment Name: At_100uM_ABA_Mutants_cDNA_P Parameter: Tissue Value: Aerial
  misc_feature: MA Experiment 20000070 PARAMETER Experiment Name: At_100uM_ABA_Mutants_cDNA_P Parameter: Treatment Value: 100uM ABA vs. No Treatment
  misc_feature: MA Experiment ID: 20000173 Result: Down-regulated in Transcription
  misc_feature: MA Experiment 20000173 PARAMETER Experiment Name: At_42deg_Heat_P Parameter: Age (day) Value: 14
  misc_feature: MA Experiment 20000173 PARAMETER Experiment Name: At_42deg_Heat_P Parameter: Organism Value: A. thaliana
  misc_feature: MA Experiment 20000173 PARAMETER Experiment Name: At_42deg_Heat_P Parameter: Plant Line Value: WS
  misc_feature: MA Experiment 20000173 PARAMETER Experiment Name: At_42deg_Heat_P Parameter: Temperature (deg C) Value: 42 vs. 22
  misc_feature: MA Experiment 20000173 PARAMETER Experiment Name: At_42deg_Heat_P Parameter: Timepoint (hr) Value: 6
  misc_feature: MA Experiment 20000173 PARAMETER Experiment Name: At_42deg_Heat_P Parameter: Tissue Value: Aerial
  misc_feature: MA Experiment ID: 20000185 Result: Down-regulated in Transcription
  misc_feature: MA Experiment 20000185 PARAMETER Experiment Name: At_Roots__P Parameter: Age (day) Value: 7 vs. 21
  misc_feature: MA Experiment 20000185 PARAMETER Experiment Name: At_Roots__P Parameter: Organism Value: A. thaliana
  misc_feature: MA Experiment 20000185 PARAMETER Experiment Name: At_Roots__P Parameter: Tissue Value: Roots vs. Whole Plant
  misc_feature: MA Experiment ID: 20000224 Result: Up-regulated in Transcription
  misc_feature: MA Experiment ID: 20000439 Result: Down-regulated in Transcription
  misc_feature: MA Experiment 20000439 PARAMETER Experiment Name: At_Roots__P Parameter: Age (day) Value: 14 vs. 21
  misc_feature: MA Experiment 20000439 PARAMETER Experiment Name: At_Roots__P Parameter: Organism Value: A. thaliana
  misc_feature: MA Experiment 20000439 PARAMETER Experiment Name: At_Roots__P Parameter: Tissue Value: Roots vs. Whole Plant
  misc_feature: MA Experiment ID: 20001451 Result: Up-regulated in Transcription
  misc_feature: MA Experiment 20001451 PARAMETER Experiment Name: At_Far-red-induction_P Parameter: Age (day) Value: 7
  misc_feature: MA Experiment 20001451 PARAMETER Experiment Name: At_Far-red-induction_P Parameter: Light Value: Far-red vs. White
  misc_feature: MA Experiment 20001451 PARAMETER Experiment Name: At_Far-red-induction_P Parameter: Organism Value: A. thaliana
  misc_feature: MA Experiment 20001451 PARAMETER Experiment Name: At_Far-red-induction_P Parameter: Plant Line Value: Columbia
  misc_feature: MA Experiment 20001451 PARAMETER Experiment Name: At_Far-red-induction_P Parameter: Timepoint (hr) Value: 24
  misc_feature: MA Experiment 20001451 PARAMETER Experiment Name: At_Far-red-induction_P Parameter: Tissue Value: Whole Plant
aattatttttcccattctcttcactatctctctccctagaaaattgccagaagaagaaggttctccaattcaaaaaaatagaaactcgctaccattcatttcaaaaaatttcttgttaagttacgtttttttctttttttttgcttctttcgttcttattgtcttagaagacaaaagagactagagaggatagaaaaatggaagcttcaagcacaagaagcgagaagaagaagaagaagaagacgatacagagagaaaacaccgatactcaaaagaaaaaaaagctacccagtgtttggttttcacttaagaaatctctcccctgcaaatctgatgtctccgatgtccacattccgagatccaaaaaagagctagctcccatatccactaagagaacaacaacctcctccggcggcggggtcggcggcaggtccggttgttcaagatccatagccaatcttaaagacgtaatccatggaaaccaacggcatttagagaagccgctttgctctagccctcgttctataggaagcagcgagtttctcaatcccattactcacgatgtaatctttagcaactccacctgcgagctcaagatcaccgccgccggagcaacagaattcgtcgggaatcttagaccagggacgccggtcaattactcttcttcacgccgtagccaaacttcgagaaaggcttcttctttagatagagaaggattagggtttcaccagagcagaagagagaatgatagagaagccgccattaacggagacaattcctctgtttcttgccataaatgcggcgagaaatttagcaaactcgaagctgcagaagctcatcatctaaccaaacacgccgtgactgagctaatggaaggagactcgtcgaggagaatagtggagataatctgcagaacaagctggttaaagacagagaatcaaggagggagaatcgatcggattttgaaagtacacaacatgcaaaaaaccttagcgagattcgaagaatacagagatacagtgaagatcagagcaagcaagttacaaaagaaacatccgagatgtatcgccgacggaaacgagcttctcaggtttcacggcaccactgtggcttgcgctttggggataaacgggtcgacgagtctgtgttcgtcggaaaagtgttgcgtttgtcggattatacgaaatgggttctcggcgaaacgggagatgaataacggaattggggtttttactgcgtcgacgagtgagagggcgtttgagtctattgtgattggagatggtggtggtggtgatcggaaggcgttgattgtgtgtcgagtgattgccgggagggttcatcggccggtggagaatgtagaggagatgggtgggttgttgagtgggtttgattcattggctggtaaagttgggttgtacacaaatgttgaggagctctatttgctcaattctcgagctttgcttcctgttttgtgctaatctgcaaaccttaaatcaaacttttgaggtcg

SEQ ID NO: 26522 - protein, 426 aa, Arabidopsis thaliana
  peptide (1)..(426): Ceres Seq. ID no. 12371758
  misc_feature (196)..(219): Pfam Name: Zinc finger, C2H2 type Pfam Description: Zinc finger, C2H2 type
  misc_feature (175)..(423): Homolog of NCBI NO: 5777616 NR Description: CAA30374.1 protein [Oryza sativa]
  misc_feature (197)..(423): Homolog of NCBI NO: 9802582 NR Description: T2E6.3 [Arabidopsis thaliana]
  misc_feature (196)..(423): Homolog of NCBI NO: 15220394 NR Description: hypothetical protein; protein id: At1g11490.1
  misc_feature (384)..(423): Homolog of NCBI NO: 15222333 NR Description: unknown protein; protein id: At1g75710.1
  misc_feature (8)..(382): Homolog of NCBI NO: 15222333 NR Description: unknown protein; protein id: At1g75710.1
  misc_feature (31)..(138): Homolog of NCBI NO: 34910152 NR Description: B1070A12.19 [Oryza sativa (japonica
  misc_feature (137)..(426): Homolog of NCBI NO: 34910152 NR Description: B1070A12.19 [Oryza sativa (japonica
  misc_feature (1)..(138): Homolog of NCBI NO: 15239695 NR Description: putative protein
  misc_feature (139)..(426): Homolog of NCBI NO: 15239695 NR Description: putative protein
  misc_feature (1)..(423): Homolog of NCBI NO: 18416951 NR Description: expressed protein
MEASSTRSEKKKKKKTIQRENTDTQKKKKLPSVWFSLKKSLPCKSDVSDVHIPRSKKELAPISTKRTTTSSGGGVGGRSGCSRSIANLKDVIHGNQRHLEKPLCSSPRSIGSSEFLNPITHDVIFSNSTCELKITAAGATEFVGNLRPGTPVNYSSSRRSQTSRKASSLDREGLGFHQSRRENDREAAINGDNSSVSCHKCGEKFSKLEAAEAHHLTKHAVTELMEGDSSRRIVEIICRTSWLKTENQGGRIDRILKVHNMQKTLARFEEYRDTVKIRASKLQKKHPRCIADGNELLRFHGTTVACALGINGSTSLCSSEKCCVCRIIRNGFSAKREMNNGIGVFTASTSERAFESIVIGDGGGGDRKALIVCRVIAGRVHRPVENVEEMGGLLSGFDSLAGKVGLYTNVEELYLLNSRALLPVLC

SEQ ID NO: 26523 - DNA, 505 bp, Arabidopsis thaliana
  misc_feature (1)..(505): Ceres Seq. ID no. 12384714
  misc_feature: MA Experiment ID: 108434 Result: Up-regulated in Transcription
  misc_feature: MA Experiment 108434 PARAMETER Experiment Name: At_Root_Tips_cDNA_P Parameter: Tissue Value: Root Tips
  misc_feature: MA Experiment ID: 108463 Result: Down-regulated in Transcription
  misc_feature: MA Experiment 108463 PARAMETER Experiment Name: At_Germinating_Seeds_cDNA_P Parameter: Age (day) Value: 3 vs. 0
  misc_feature: MA Experiment 108463 PARAMETER Experiment Name: At_Germinating_Seeds_cDNA_P Parameter: Tissue Value: Germinating Seeds
  misc_feature: MA Experiment ID: 108464 Result: Down-regulated in Transcription
  misc_feature: MA Experiment 108464 PARAMETER Experiment Name: At_Germinating_Seeds_cDNA_P Parameter: Age (day) Value: 4 vs. 0
  misc_feature: MA Experiment 108464 PARAMETER Experiment Name: At_Germinating_Seeds_cDNA_P Parameter: Tissue Value: Germinating Seeds
  misc_feature: MA Experiment ID: 20000227 Result: Up-regulated in Transcription
  misc_feature: MA Experiment 20000227 PARAMETER Experiment Name: At_Root-Tips-vs-Tops_P Parameter: Tissue Value: Root Tips vs. Root Tops
  misc_feature: MA Experiment ID: 20000234 Result: Up-regulated in Transcription
  misc_feature: MA Experiment 20000234 PARAMETER Experiment Name: At_Siliques_P Parameter: Age (day) Value: 21
  misc_feature: MA Experiment 20000234 PARAMETER Experiment Name: At_Siliques_P Parameter: Organism Value: A. thaliana
  misc_feature: MA Experiment 20000234 PARAMETER Experiment Name: At_Siliques_P Parameter: Plant Line Value: WS
  misc_feature: MA Experiment 20000234 PARAMETER Experiment Name: At_Siliques_P Parameter: Tissue Value: Less Than 5mm Siliques vs. Whole Plant
  misc_feature: MA Experiment ID: 20000437 Result: Down-regulated in Transcription
  misc_feature: MA Experiment 20000437 PARAMETER Experiment Name: At_Drought_P Parameter: Age (day) Value: 8
  misc_feature: MA Experiment 20000437 PARAMETER Experiment Name: At_Drought_P Parameter: Organism Value: A. thaliana
  misc_feature: MA Experiment 20000437 PARAMETER Experiment Name: At_Drought_P Parameter: Plant Line Value: WS
  misc_feature: MA Experiment 20000437 PARAMETER Experiment Name: At_Drought_P Parameter: Timepoint (hr) Value: 24
  misc_feature: MA Experiment 20000437 PARAMETER Experiment Name: At_Drought_P Parameter: Tissue Value: Whole Plant
  misc_feature: MA Experiment 20000437 PARAMETER Experiment Name: At_Drought_P Parameter: Treatment Value: Drought vs. No Drought
atcaatcggattatctgcacttgtttcaatggtgcatctaatatctctcaagctggtgctcttgcttgccttacacccgaaggacttgaggcaatgcataaggtgattggattctataaagaaaacacaaacataatcattgacacattcacatctctcgggtatgatgtatatggaggaaatgcgccttacgtatgggttcacttcccgaaccaaagctcatgggatgtgtttgctgagattctggagaagactcatgtggttacaactccaggaagtgggtttggaccagggggtgaagggttcgttcgtgtcagtgcctttggtcacagagagaacatcttagaggcatgtcgaagattcaagcagctttacaaatgaagaaccttgtttgtaatcgttcctcatcatcatcaccctctttaatgacatgatttgagttaaaataatgtcgtttccattgttttctggaatttgtagaagacacttttgacaccagtgtttc

SEQ ID NO: 26524 - protein, 126 aa, Arabidopsis thaliana
  peptide (1)..(126): Ceres Seq. ID no. 12384715
  misc_feature (2)..(125): Pfam Name: Aminotransferase class I and II Pfam Description: Aminotransferase class I and II
  misc_feature (7)..(126): Homolog of NCBI NO: 23055537 NR Description: hypothetical protein [Geobacter metallireducens]
  misc_feature (7)..(126): Homolog of NCBI NO: 39995273 NR Description: aromatic aminotransferase, putative
  misc_feature (2)..(126): Homolog of NCBI NO: 25315768 NR Description: probable aspartate aminotransferase
  misc_feature (2)..(126): Homolog of NCBI NO: 18397344 NR Description: putative aspartate aminotransferase
  misc_feature (2)..(122): Homolog of NCBI NO: 37703722 NR Description: putative aminotransferase ALD1
  misc_feature (2)..(126): Homolog of NCBI NO: 23124300 NR Description: hypothetical protein [Nostoc punctiforme]
  misc_feature (2)..(122): Homolog of NCBI NO: 24414269 NR Description: Putative transaminase [Oryza sativa (japonica
  misc_feature (2)..(126): Homolog of NCBI NO: 37703720 NR Description: putative aminotransferase AGD2
  misc_feature (2)..(126): Homolog of NCBI NO: 18418270 NR Description: putative protein
  misc_feature (2)..(126): Homolog of NCBI NO: 7447845 NR Description: probable transaminase (EC 2.6.1.-) T16L1.170
INRIICTCFNGASNISQAGALACLTPEGLEAMHKVIGFYKENTNIIIDTFTSLGYDVYGGNAPYVWVHFPNQSSWDVFAEILEKTHVVTTPGSGFGPGGEGFVRVSAFGHRENILEACRRFKQLYK

SEQ ID NO: 26525 - protein, 95 aa, Arabidopsis thaliana
  peptide (1)..(95): Ceres Seq. ID no. 12384716
  misc_feature (1)..(94): Pfam Name: Aminotransferase class I and II Pfam Description: Aminotransferase class I and II
  misc_feature (1)..(95): Homolog of NCBI NO: 23124300 NR Description: hypothetical protein [Nostoc punctiforme]
  misc_feature (1)..(95): Homolog of NCBI NO: 23055537 NR Description: hypothetical protein [Geobacter metallireducens]
  misc_feature (1)..(95): Homolog of NCBI NO: 39995273 NR Description: aromatic aminotransferase, putative
  misc_feature (1)..(95): Homolog of NCBI NO: 25315768 NR Description: probable aspartate aminotransferase
  misc_feature (1)..(95): Homolog of NCBI NO: 18397344 NR Description: putative aspartate aminotransferase
  misc_feature (1)..(91): Homolog of NCBI NO: 37703722 NR Description: putative aminotransferase ALD1
  misc_feature (1)..(91): Homolog of NCBI NO: 24414269 NR Description: Putative transaminase [Oryza sativa (japonica
  misc_feature (1)..(95): Homolog of NCBI NO: 37703720 NR Description: putative aminotransferase AGD2
  misc_feature (1)..(95): Homolog of NCBI NO: 18418270 NR Description: putative protein
  misc_feature (1)..(95): Homolog of NCBI NO: 7447845 NR Description: probable transaminase (EC 2.6.1.-) T16L1.170
MHKVIGFYKENTNIIIDTFTSLGYDVYGGNAPYVWVHFPNQSSWDVFAEILEKTHVVTTPGSGFGPGGEGFVRVSAFGHRENILEACRRFKQLYK

SEQ ID NO: 26526 - DNA, 861 bp, Arabidopsis thaliana
  misc_feature (1)..(861): Ceres Seq. ID no. 13496999
  misc_feature: MA Experiment ID: 108434 Result: Up-regulated in Transcription
  misc_feature: MA Experiment 108434 PARAMETER Experiment Name: At_Root_Tips_cDNA_P Parameter: Tissue Value: Root Tips
  misc_feature: MA Experiment ID: 108461 Result: Down-regulated in Transcription
  misc_feature: MA Experiment 108461 PARAMETER Experiment Name: At_Germinating_Seeds_cDNA_P Parameter: Age (day) Value: 1 vs. 0
  misc_feature: MA Experiment 108461 PARAMETER Experiment Name: At_Germinating_Seeds_cDNA_P Parameter: Tissue Value: Germinating Seeds
  misc_feature: MA Experiment ID: 108462 Result: Down-regulated in Transcription
  misc_feature: MA Experiment 108462 PARAMETER Experiment Name: At_Germinating_Seeds_cDNA_P Parameter: Age (day) Value: 2 vs. 0
  misc_feature: MA Experiment 108462 PARAMETER Experiment Name: At_Germinating_Seeds_cDNA_P Parameter: Tissue Value: Germinating Seeds
  misc_feature: MA Experiment ID: 108463 Result: Down-regulated in Transcription
  misc_feature: MA Experiment 108463 PARAMETER Experiment Name: At_Germinating_Seeds_cDNA_P Parameter: Age (day) Value: 3 vs. 0
  misc_feature: MA Experiment 108463 PARAMETER Experiment Name: At_Germinating_Seeds_cDNA_P Parameter: Tissue Value: Germinating Seeds
  misc_feature: MA Experiment ID: 108464 Result: Down-regulated in Transcription
  misc_feature: MA Experiment 108464 PARAMETER Experiment Name: At_Germinating_Seeds_cDNA_P Parameter: Age (day) Value: 4 vs. 0
  misc_feature: MA Experiment 108464 PARAMETER Experiment Name: At_Germinating_Seeds_cDNA_P Parameter: Tissue Value: Germinating Seeds
  misc_feature: MA Experiment ID: 108488 Result: Up-regulated in Transcription
  misc_feature: MA Experiment ID: 108573 Result: Down-regulated in Transcription
  misc_feature: MA Experiment 108573 PARAMETER Experiment Name: At_Drought_cDNA_P Parameter: Timepoint (hr) Value: 6
  misc_feature: MA Experiment 108573 PARAMETER Experiment Name: At_Drought_cDNA_P Parameter: Tissue Value: Aerial
  misc_feature: MA Experiment 108573 PARAMETER Experiment Name: At_Drought_cDNA_P Parameter: Treatment Value: Drought vs. No Drought
  misc_feature: MA Experiment ID: 108595 Result: Down-regulated in Transcription
  misc_feature: MA Experiment 108595 PARAMETER Experiment Name: At_Ler-pi_Ovule_cDNA_P Parameter: Plant Line Value: null
tgattctagggttttagagtttccgcacgaatcacgaatctctctctctttcacacacttcacactttcaatatacactctcattatgactaccgaagagaaagagatcctcgccgccaaattggaagaacagaagatcgatctcgataagcccgaagttgaggacgatgatgataacgaagacgatgactctgatgacgatgataaggatgatgacgaggctgatggactagatggagaggcaggaggtaagtcaaaacaaagcagaagtgagaagaagagtcgcaaagccatgctcaagcttggcatgaaacccatcactggtgttagccgagtcaccgtcaaaaagagcaagaatatcttgtttgtcatatcaaagcctgatgtgttcaagagtccagcatcagacacatatgtgatctttggagaggcgaagatcgaggatttgagctctcagatccagtcgcaagcagcagagcaattcaaggcaccagatctcagcaatgtgatctcaaagggtgagtcatcgagcgctgcagtggttcaggatgatgaggaggttgacgaggaaggtgttgagccaaaggacattgagttggtgatgactcaagcaggagtgtctaggccaaatgctgtgaaggctctcaaggctgcagatggagatattgtctctgccatcatggagcttaccacctaaaccaaagtcttttctacttagatgtggtttaacctgagttatgtgccagagattgtctaaagaattcggaaatttttggtttcaatgtttttcatgaagtgattttcgatgttgtatcagtataaacctcataagtttttgattttcagtttgattttatattg

SEQ ID NO: 26527 - protein, 231 aa, Arabidopsis thaliana
  peptide (1)..(231): Ceres Seq. ID no. 13497000
  misc_feature (89)..(148): Pfam Name: NAC domain Pfam Description: NAC domain
  misc_feature (32)..(231): Homolog of NCBI NO: 18398710 NR Description: expressed protein [Arabidopsis thaliana]
  misc_feature (40)..(231): Homolog of NCBI NO: 4115918 NR Description: similar to nascent polypeptide associated complex
  misc_feature (29)..(172): Homolog of NCBI NO: 15240731 NR Description: expressed protein [Arabidopsis thaliana]
  misc_feature (27)..(231): Homolog of NCBI NO: 15235122 NR Description: alpha NAC -related [Arabidopsis thaliana]
  misc_feature (32)..(231): Homolog of NCBI NO: 15229149 NR Description: alpha NAC-related protein [Arabidopsis thaliana]
  misc_feature (32)..(231): Homolog of NCBI NO: 13899101 NR Description: alpha NAC-like protein [Arabidopsis thaliana]
  misc_feature (38)..(230): Homolog of NCBI NO: 34902238 NR Description: Putative nascent polypeptide associated complex
  misc_feature (29)..(231): Homolog of NCBI NO: 6752882 NR Description: nascent polypeptide associated complex alpha
  misc_feature (29)..(230): Homolog of NCBI NO: 34907258 NR Description: putative nascent polypeptide associated complex
  misc_feature (29)..(231): Homolog of NCBI NO: 15230476 NR Description: nascent polypeptide associated complex alpha
DSRVLEFPHESRISLSFTHFTLSIYTLIMTTEEKEILAAKLEEQKIDLDKPEVEDDDDNEDDDSDDDDKDDDEADGLDGEAGGKSKQSRSEKKSRKAMLKLGMKPITGVSRVTVKKSKNILFVISKPDVFKSPASDTYVIFGEAKIEDLSSQIQSQAAEQFKAPDLSNVISKGESSSAAVVQDDEEVDEEGVEPKDIELVMTQAGVSRPNAVKALKAADGDIVSAIMELTT

SEQ ID NO: 26528 - protein, 203 aa, Arabidopsis thaliana
  peptide (1)..(203): Ceres Seq. ID no. 13497001
  misc_feature (61)..(120): Pfam Name: NAC domain Pfam Description: NAC domain
  misc_feature (4)..(203): Homolog of NCBI NO: 18398710 NR Description: expressed protein [Arabidopsis thaliana]
  misc_feature (12)..(203): Homolog of NCBI NO: 4115918 NR Description: similar to nascent polypeptide associated complex
  misc_feature (1)..(144): Homolog of NCBI NO: 15240731 NR Description: expressed protein [Arabidopsis thaliana]
  misc_feature (1)..(203): Homolog of NCBI NO: 15235122 NR Description: alpha NAC -related [Arabidopsis thaliana]
  misc_feature (4)..(203): Homolog of NCBI NO: 15229149 NR Description: alpha NAC-related protein [Arabidopsis thaliana]
  misc_feature (4)..(203): Homolog of NCBI NO: 13899101 NR Description: alpha NAC-like protein [Arabidopsis thaliana]
  misc_feature (10)..(202): Homolog of NCBI NO: 34902238 NR Description: Putative nascent polypeptide associated complex
  misc_feature (1)..(203): Homolog of NCBI NO: 6752882 NR Description: nascent polypeptide associated complex alpha
  misc_feature (1)..(202): Homolog of NCBI NO: 34907258 NR Description: putative nascent polypeptide associated complex
  misc_feature (1)..(203): Homolog of NCBI NO: 15230476 NR Description: nascent polypeptide associated complex alpha
MTTEEKEILAAKLEEQKIDLDKPEVEDDDDNEDDDSDDDDKDDDEADGLDGEAGGKSKQSRSEKKSRKAMLKLGMKPITGVSRVTVKKSKNILFVISKPDVFKSPASDTYVIFGEAKIEDLSSQIQSQAAEQFKAPDLSNVISKGESSSAAVVQDDEEVDEEGVEPKDIELVMTQAGVSRPNAVKALKAADGDIVSAIMELTT

SEQ ID NO: 26529 - protein, 134 aa, Arabidopsis thaliana
  peptide (1)..(134): Ceres Seq. ID no. 13497002
  misc_feature (1)..(51): Pfam Name: NAC domain Pfam Description: NAC domain
  misc_feature (1)..(134): Homolog of NCBI NO: 18398710 NR Description: expressed protein [Arabidopsis thaliana]
  misc_feature (1)..(134): Homolog of NCBI NO: 4115918 NR Description: similar to nascent polypeptide associated complex
  misc_feature (1)..(75): Homolog of NCBI NO: 15240731 NR Description: expressed protein [Arabidopsis thaliana]
  misc_feature (1)..(134): Homolog of NCBI NO: 15235122 NR Description: alpha NAC -related [Arabidopsis thaliana]
  misc_feature (1)..(134): Homolog of NCBI NO: 15229149 NR Description: alpha NAC-related protein [Arabidopsis thaliana]
  misc_feature (1)..(134): Homolog of NCBI NO: 13899101 NR Description: alpha NAC-like protein [Arabidopsis thaliana]
  misc_feature (1)..(133): Homolog of NCBI NO: 34902238 NR Description: Putative nascent polypeptide associated complex
  misc_feature (1)..(134): Homolog of NCBI NO: 6752882 NR Description: nascent polypeptide associated complex alpha
  misc_feature (1)..(133): Homolog of NCBI NO: 34907258 NR Description: putative nascent polypeptide associated complex
  misc_feature (1)..(134): Homolog of NCBI NO: 15230476 NR Description: nascent polypeptide associated complex alpha
MLKLGMKPITGVSRVTVKKSKNILFVISKPDVFKSPASDTYVIFGEAKIEDLSSQIQSQAAEQFKAPDLSNVISKGESSSAAVVQDDEEVDEEGVEPKDIELVMTQAGVSRPNAVKALKAADGDIVSAIMELTT

SEQ ID NO: 26530 - DNA, 1135 bp, Arabidopsis thaliana
  misc_feature (1)..(1135): Ceres Seq. ID no. 12385295
  misc_feature: MA Experiment ID: 108434 Result: Up-regulated in Transcription
  misc_feature: MA Experiment 108434 PARAMETER Experiment Name: At_Root_Tips_cDNA_P Parameter: Tissue Value: Root Tips
  misc_feature: MA Experiment ID: 108435 Result: Up-regulated in Transcription
  misc_feature: MA Experiment 108435 PARAMETER Experiment Name: At_stm_Mutants_cDNA_P Parameter: Plant Line Value: wt Landsburg vs stm
  misc_feature: MA Experiment 108435 PARAMETER Experiment Name: At_stm_Mutants_cDNA_P Parameter: Tissue Value: Shoot Apical Meristem Region
  misc_feature: MA Experiment ID: 108461 Result: Up-regulated in Transcription
  misc_feature: MA Experiment 108461 PARAMETER Experiment Name: At_Germinating_Seeds_cDNA_P Parameter: Age (day) Value: 1 vs. 0
  misc_feature: MA Experiment 108461 PARAMETER Experiment Name: At_Germinating_Seeds_cDNA_P Parameter: Tissue Value: Germinating Seeds
  misc_feature: MA Experiment ID: 108463 Result: Up-regulated in Transcription
  misc_feature: MA Experiment 108463 PARAMETER Experiment Name: At_Germinating_Seeds_cDNA_P Parameter: Age (day) Value: 3 vs. 0
  misc_feature: MA Experiment 108463 PARAMETER Experiment Name: At_Germinating_Seeds_cDNA_P Parameter: Tissue Value: Germinating Seeds
  misc_feature: MA Experiment ID: 108464 Result: Up-regulated in Transcription
  misc_feature: MA Experiment 108464 PARAMETER Experiment Name: At_Germinating_Seeds_cDNA_P Parameter: Age (day) Value: 4 vs. 0
  misc_feature: MA Experiment 108464 PARAMETER Experiment Name: At_Germinating_Seeds_cDNA_P Parameter: Tissue Value: Germinating Seeds
  misc_feature: MA Experiment ID: 108577 Result: Down-regulated in Transcription
  misc_feature: MA Experiment 108577 PARAMETER Experiment Name: At_42deg_Heat_cDNA_P Parameter: Temperature (deg C) Value: 42 vs. 22
  misc_feature: MA Experiment 108577 PARAMETER Experiment Name: At_42deg_Heat_cDNA_P Parameter: Timepoint (hr) Value: 6
  misc_feature: MA Experiment 108577 PARAMETER Experiment Name: At_42deg_Heat_cDNA_P Parameter: Tissue Value: Aerial
  misc_feature: MA Experiment ID: 20000113 Result: Down-regulated in Transcription
  misc_feature: MA Experiment 20000113 PARAMETER Experiment Name: At_42deg_Heat_cDNA_P Parameter: Temperature (deg C) Value: 42 vs. 22
  misc_feature: MA Experiment 20000113 PARAMETER Experiment Name: At_42deg_Heat_cDNA_P Parameter: Timepoint (hr) Value: 8
  misc_feature: MA Experiment 20000113 PARAMETER Experiment Name: At_42deg_Heat_cDNA_P Parameter: Tissue Value: Aerial
  misc_feature: MA Experiment ID: 20000180 Result: Up-regulated in Transcription
  misc_feature: MA Experiment 20000180 PARAMETER Experiment Name: At_Germinating_Seeds_P Parameter: Age (hr) Value: 24 vs. 0
  misc_feature: MA Experiment 20000180 PARAMETER Experiment Name: At_Germinating_Seeds_P Parameter: Tissue Value: Germinating Seeds
  misc_feature: MA Experiment ID: 20000185 Result: Up-regulated in Transcription
  misc_feature: MA Experiment 20000185 PARAMETER Experiment Name: At_Roots__P Parameter: Age (day) Value: 7 vs. 21
  misc_feature: MA Experiment 20000185 PARAMETER Experiment Name: At_Roots__P Parameter: Organism Value: A. thaliana
  misc_feature: MA Experiment 20000185 PARAMETER Experiment Name: At_Roots__P Parameter: Tissue Value: Roots vs. Whole Plant
  misc_feature: MA Experiment ID: 20000234 Result: Up-regulated in Transcription
  misc_feature: MA Experiment 20000234 PARAMETER Experiment Name: At_Siliques_P Parameter: Age (day) Value: 21
  misc_feature: MA Experiment 20000234 PARAMETER Experiment Name: At_Siliques_P Parameter: Organism Value: A. thaliana
  misc_feature: MA Experiment 20000234 PARAMETER Experiment Name: At_Siliques_P Parameter: Plant Line Value: WS
  misc_feature: MA Experiment 20000234 PARAMETER Experiment Name: At_Siliques_P Parameter: Tissue Value: Less Than 5mm Siliques vs. Whole Plant
  misc_feature: MA Experiment ID: 20000264 Result: Up-regulated in Transcription
  misc_feature: MA Experiment 20000264 PARAMETER Experiment Name: At_Open_Flower_P Parameter: Age (day) Value: 21
  misc_feature: MA Experiment 20000264 PARAMETER Experiment Name: At_Open_Flower_P Parameter: Plant Line Value: WS
  misc_feature: MA Experiment 20000264 PARAMETER Experiment Name: At_Open_Flower_P Parameter: Tissue Value: Open Flower vs. Whole Plant
  misc_feature: MA Experiment ID: 20000265 Result: Up-regulated in Transcription
  misc_feature: MA Experiment 20000265 PARAMETER Experiment Name: At_Open_Flower_P Parameter: Age (day) Value: 21
  misc_feature: MA Experiment 20000265 PARAMETER Experiment Name: At_Open_Flower_P Parameter: Plant Line Value: WS
  misc_feature: MA Experiment 20000265 PARAMETER Experiment Name: At_Open_Flower_P Parameter: Tissue Value: Closed Flower vs. Whole Plant
  misc_feature: MA Experiment ID: 20000286 Result: Up-regulated in Transcription
  misc_feature: MA Experiment 20000286 PARAMETER Experiment Name: At_Open_Flower_P Parameter: Age (day) Value: 21
  misc_feature: MA Experiment 20000286 PARAMETER Experiment Name: At_Open_Flower_P Parameter: Plant Line Value: WS
  misc_feature: MA Experiment 20000286 PARAMETER Experiment Name: At_Open_Flower_P Parameter: Tissue Value: Half Open vs. Whole Plant
  misc_feature: MA Experiment ID: 20000794 Result: Up-regulated in Transcription
  misc_feature: MA Experiment 20000794 PARAMETER Experiment Name: At_Petals_P Parameter: Age (day) Value: 23-25 days
  misc_feature: MA Experiment 20000794 PARAMETER Experiment Name: At_Petals_P Parameter: Plant Line Value: WS
  misc_feature: MA Experiment 20000794 PARAMETER Experiment Name: At_Petals_P Parameter: Tissue Value: Petals vs. Whole plant
acctttaattttttcaccaattggatttggatctgtcaaaaatattggcctctttctctctttctctcttgctctctttctttgttgggttgatctcttcttccatggcgatccctacggagacacaacaccaggagaaggaggcttcagatgcttctgcagcagctgcacaaaagagatggactttaagcgatttcgacatcggtaagcctcttggcagaggcaaattcggtcacgtctatctcgccagagaaaaacggagcaatcacgttgtcgctctaaaggttcttttcaagagccagcttcaacaatcccaagttgaacatcagctcagaagagaagttgagattcagtctcatcttcgtcaccccaacatactccggctttatggctatttctatgatcaaaaaagagtttatttgatacttgagtatgctgctagaggcgaactttacaaggatcttcagaaatgcaaatacttcagcgaaagacgagctgctacttatgttgcctcattggcgagggctctcatctattgccatggcaagcatgtgatacacagagatattaaaccagagaatctgctaattggtgctcagggtgagctcaagattgcagactttggttggtcggtacacacatttaaccgaagaaggaccatgtgtggcacactagattaccttcctcctgagatggtcgaaagcgtagaacatgatgctagtgtagatatctggagccttgggattctctgttacgagtttctttatggtgtacctccttttgaagccatggagcactcagacacatacagaaggattgtgcaagtggatctcaagttccctcccaaaccaataatctctgcatctgcaaaggatcttattagccagatgcttgtcaaggagtcttcgcaacgtctgccattgcacaagcttctggagcatccgtggatcgtgcaaaacgctgatccttctggaatctacagagtttaaaaacaaaacgcttactgttctcgccaatctcgaccaaaactgttatctagaaacccaaaactgtattctttcttactattatttttcgctaattcatgttccaaataatgtgtattatgtagtatgtactaatactatatggcatt

SEQ ID NO: 26531 - protein, 294 aa, Arabidopsis thaliana
  peptide (1)..(294): Ceres Seq. ID no. 12385296
  misc_feature (31)..(282): Pfam Name: Protein kinase domain Pfam Description: Protein kinase domain
  misc_feature (11)..(290): Homolog of NCBI NO: 20862949 NR Description: serine/threonine kinase 6 [Mus musculus]
  misc_feature (10)..(286): Homolog of NCBI NO: 27923860 NR Description: Serine/threonine protein kinase Eg2 (pEg2)
  misc_feature (23)..(286): Homolog of NCBI NO: 27923859 NR Description: Serine/threonine protein kinase Eg2-like
  misc_feature (23)..(286): Homolog of NCBI NO: 1079309 NR Description: protein kinase (EC 2.7.1.-) p46XlEg22 - African
  misc_feature (1)..(282): Homolog of NCBI NO: 33355450 NR Description: serine/threonine kinase 12 [Sus scrofa]
  misc_feature (12)..(291): Homolog of NCBI NO: 15225495 NR Description: putative protein kinase
  misc_feature (24)..(293): Homolog of NCBI NO: 34906424 NR Description: putative protein kinase [Oryza sativa (japonica
  misc_feature (17)..(293): Homolog of NCBI NO: 15225210 NR Description: putative protein kinase; protein id: At2g25880.1
  misc_feature (1)..(294): Homolog of NCBI NO: 21592557 NR Description: putative serine/threonine protein kinase
  misc_feature (1)..(294): Homolog of NCBI NO: 15233958 NR Description: putative serine/threonine protein kinase
MAIPTETQHQEKEASDASAAAAQKRWTLSDFDIGKPLGRGKFGHVYLAREKRSNHVVALKVLFKSQLQQSQVEHQLRREVEIQSHLRHPNILRLYGYFYDQKRVYLILEYAARGELYKDLQKCKYFSERRAATYVASLARALIYCHGKHVIHRDIKPENLLIGAQGELKIADFGWSVHTFNRRRTMCGTLDYLPPEMVESVEHDASVDIWSLGILCYEFLYGVPPFEAMEHSDTYRRIVQVDLKFPPKPIISASAKDLISQMLVKESSQRLPLHKLLEHPWIVQNADPSGIYRV

SEQ ID NO: 26532 - DNA, 903 bp, Arabidopsis thaliana
  misc_feature (1)..(903): Ceres Seq. ID no. 13489704
  misc_feature: MA Experiment ID: 108434 Result: Down-regulated in Transcription
  misc_feature: MA Experiment 108434 PARAMETER Experiment Name: At_Root_Tips_cDNA_P Parameter: Tissue Value: Root Tips
  misc_feature: MA Experiment ID: 108464 Result: Up-regulated in Transcription
  misc_feature: MA Experiment 108464 PARAMETER Experiment Name: At_Germinating_Seeds_cDNA_P Parameter: Age (day) Value: 4 vs. 0
  misc_feature: MA Experiment 108464 PARAMETER Experiment Name: At_Germinating_Seeds_cDNA_P Parameter: Tissue Value: Germinating Seeds
  misc_feature: MA Experiment ID: 108576 Result: Up-regulated in Transcription
  misc_feature: MA Experiment 108576 PARAMETER Experiment Name: At_42deg_Heat_cDNA_P Parameter: Temperature (deg C) Value: 42 vs. 22
  misc_feature: MA Experiment 108576 PARAMETER Experiment Name: At_42deg_Heat_cDNA_P Parameter: Timepoint (hr) Value: 1
  misc_feature: MA Experiment 108576 PARAMETER Experiment Name: At_42deg_Heat_cDNA_P Parameter: Tissue Value: Aerial
  misc_feature: MA Experiment ID: 108605 Result: Down-regulated in Transcription
  misc_feature: MA Experiment 108605 PARAMETER Experiment Name: At_100uM_ABA_cDNA_P Parameter: Timepoint (hr) Value: 6
  misc_feature: MA Experiment 108605 PARAMETER Experiment Name: At_100uM_ABA_cDNA_P Parameter: Tissue Value: Aerial
  misc_feature: MA Experiment 108605 PARAMETER Experiment Name: At_100uM_ABA_cDNA_P Parameter: Treatment Value: 100uM ABA vs. No Treatment
  misc_feature: MA Experiment ID: 108607 Result: Down-regulated in Transcription
  misc_feature: MA Experiment 108607 PARAMETER Experiment Name: At_100uM_ABA_cDNA_P Parameter: Timepoint (hr) Value: 4
  misc_feature: MA Experiment 108607 PARAMETER Experiment Name: At_100uM_ABA_cDNA_P Parameter: Tissue Value: Aerial
  misc_feature: MA Experiment 108607 PARAMETER Experiment Name: At_100uM_ABA_cDNA_P Parameter: Treatment Value: 100uM ABA vs. No Treatment
  misc_feature: MA Experiment ID: 20000093 Result: Up-regulated in Transcription
  misc_feature: MA Experiment 20000093 PARAMETER Experiment Name: At_42deg_Heat_cDNA_P Parameter: Temperature (deg C) Value: 42 vs. 22
  misc_feature: MA Experiment 20000093 PARAMETER Experiment Name: At_42deg_Heat_cDNA_P Parameter: Timepoint (hr) Value: 0.5
  misc_feature: MA Experiment 20000093 PARAMETER Experiment Name: At_42deg_Heat_cDNA_P Parameter: Tissue Value: Aerial
  misc_feature: MA Experiment ID: 20000111 Result: Up-regulated in Transcription
  misc_feature: MA Experiment 20000111 PARAMETER Experiment Name: At_42deg_Heat_cDNA_P Parameter: Temperature (deg C) Value: 42 vs. 22
  misc_feature: MA Experiment 20000111 PARAMETER Experiment Name: At_42deg_Heat_cDNA_P Parameter: Timepoint (hr) Value: 6
  misc_feature: MA Experiment 20000111 PARAMETER Experiment Name: At_42deg_Heat_cDNA_P Parameter: Tissue Value: Aerial
  misc_feature: MA Experiment ID: 20000112 Result: Up-regulated in Transcription
  misc_feature: MA Experiment 20000112 PARAMETER Experiment Name: At_42deg_Heat_cDNA_P Parameter: Temperature (deg C) Value: 42 vs. 22
  misc_feature: MA Experiment 20000112 PARAMETER Experiment Name: At_42deg_Heat_cDNA_P Parameter: Timepoint (hr) Value: 2
  misc_feature: MA Experiment 20000112 PARAMETER Experiment Name: At_42deg_Heat_cDNA_P Parameter: Tissue Value: Aerial
  misc_feature: MA Experiment ID: 20000144 Result: Up-regulated in Transcription
  misc_feature: MA Experiment 20000144 PARAMETER Experiment Name: At_42deg_Heat_cDNA_P Parameter: Temperature (deg C) Value: 42 vs. 22
  misc_feature: MA Experiment 20000144 PARAMETER Experiment Name: At_42deg_Heat_cDNA_P Parameter: Timepoint (hr) Value: 1
  misc_feature: MA Experiment 20000144 PARAMETER Experiment Name: At_42deg_Heat_cDNA_P Parameter: Tissue Value: Aerial
  misc_feature: MA Experiment ID: 20000171 Result: Up-regulated in Transcription
  misc_feature: MA Experiment 20000171 PARAMETER Experiment Name: At_42deg_Heat_P Parameter: Age (day) Value: 14
  misc_feature: MA Experiment 20000171 PARAMETER Experiment Name: At_42deg_Heat_P Parameter: Organism Value: A. thaliana
  misc_feature: MA Experiment 20000171 PARAMETER Experiment Name: At_42deg_Heat_P Parameter: Plant Line Value: WS
  misc_feature: MA Experiment 20000171 PARAMETER Experiment Name: At_42deg_Heat_P Parameter: Temperature (deg C) Value: 42 vs. 22
  misc_feature: MA Experiment 20000171 PARAMETER Experiment Name: At_42deg_Heat_P Parameter: Timepoint (hr) Value: 1
  misc_feature: MA Experiment 20000171 PARAMETER Experiment Name: At_42deg_Heat_P Parameter: Tissue Value: Aerial
  misc_feature: MA Experiment ID: 20000173 Result: Up-regulated in Transcription
  misc_feature: MA Experiment 20000173 PARAMETER Experiment Name: At_42deg_Heat_P Parameter: Age (day) Value: 14
  misc_feature: MA Experiment 20000173 PARAMETER Experiment Name: At_42deg_Heat_P Parameter: Organism Value: A. thaliana
  misc_feature: MA Experiment 20000173 PARAMETER Experiment Name: At_42deg_Heat_P Parameter: Plant Line Value: WS
  misc_feature: MA Experiment 20000173 PARAMETER Experiment Name: At_42deg_Heat_P Parameter: Temperature (deg C) Value: 42 vs. 22
  misc_feature: MA Experiment 20000173 PARAMETER Experiment Name: At_42deg_Heat_P Parameter: Timepoint (hr) Value: 6
  misc_feature: MA Experiment 20000173 PARAMETER Experiment Name: At_42deg_Heat_P Parameter: Tissue Value: Aerial
  misc_feature: MA Experiment ID: 20000227 Result: Down-regulated in Transcription
  misc_feature: MA Experiment 20000227 PARAMETER Experiment Name: At_Root-Tips-vs-Tops_P Parameter: Tissue Value: Root Tips vs. Root Tops
  misc_feature: MA Experiment ID: 20000234 Result: Down-regulated in Transcription
  misc_feature: MA Experiment 20000234 PARAMETER Experiment Name: At_Siliques_P Parameter: Age (day) Value: 21
  misc_feature: MA Experiment 20000234 PARAMETER Experiment Name: At_Siliques_P Parameter: Organism Value: A. thaliana
  misc_feature: MA Experiment 20000234 PARAMETER Experiment Name: At_Siliques_P Parameter: Plant Line Value: WS
  misc_feature: MA Experiment 20000234 PARAMETER Experiment Name: At_Siliques_P Parameter: Tissue Value: Less Than 5mm Siliques vs. Whole Plant
  misc_feature: MA Experiment ID: 20000235 Result: Down-regulated in Transcription
  misc_feature: MA Experiment 20000235 PARAMETER Experiment Name: At_Siliques_P Parameter: Age (day) Value: 21
  misc_feature: MA Experiment 20000235 PARAMETER Experiment Name: At_Siliques_P Parameter: Organism Value: A. thaliana
  misc_feature: MA Experiment 20000235 PARAMETER Experiment Name: At_Siliques_P Parameter: Plant Line Value: WS
  misc_feature: MA Experiment 20000235 PARAMETER Experiment Name: At_Siliques_P Parameter: Tissue Value: 5-10mm Siliques vs. Whole Plant
  misc_feature: MA Experiment ID: 20000264 Result: Down-regulated in Transcription
  misc_feature: MA Experiment 20000264 PARAMETER Experiment Name: At_Open_Flower_P Parameter: Age (day) Value: 21
  misc_feature: MA Experiment 20000264 PARAMETER Experiment Name: At_Open_Flower_P Parameter: Plant Line Value: WS
  misc_feature: MA Experiment 20000264 PARAMETER Experiment Name: At_Open_Flower_P Parameter: Tissue Value: Open Flower vs. Whole Plant
  misc_feature: MA Experiment ID: 20000265 Result: Down-regulated in Transcription
  misc_feature: MA Experiment 20000265 PARAMETER Experiment Name: At_Open_Flower_P Parameter: Age (day) Value: 21
  misc_feature: MA Experiment 20000265 PARAMETER Experiment Name: At_Open_Flower_P Parameter: Plant Line Value: WS
  misc_feature: MA Experiment 20000265 PARAMETER Experiment Name: At_Open_Flower_P Parameter: Tissue Value: Closed Flower vs. Whole Plant
  misc_feature: MA Experiment ID: 20000286 Result: Down-regulated in Transcription
  misc_feature: MA Experiment 20000286 PARAMETER Experiment Name: At_Open_Flower_P Parameter: Age (day) Value: 21
  misc_feature: MA Experiment 20000286 PARAMETER Experiment Name: At_Open_Flower_P Parameter: Plant Line Value: WS
  misc_feature: MA Experiment 20000286 PARAMETER Experiment Name: At_Open_Flower_P Parameter: Tissue Value: Half Open vs. Whole Plant
  misc_feature: MA Experiment ID: 20000438 Result: Down-regulated in Transcription
  misc_feature: MA Experiment 20000438 PARAMETER Experiment Name: At_Shoots__P Parameter: Age (day) Value: 14
  misc_feature: MA Experiment 20000438 PARAMETER Experiment Name: At_Shoots__P Parameter: Tissue Value: Shoots vs. Whole Plant
  misc_feature: MA Experiment ID: 20000573 Result: Down-regulated in Transcription
  misc_feature: MA Experiment 20000573 PARAMETER Experiment Name: At_100uM_ABA_Mutants__P Parameter: Organism Value: A. thaliana
  misc_feature: MA Experiment 20000573 PARAMETER Experiment Name: At_100uM_ABA_Mutants__P Parameter: Plant Line Value: CS22 vs. Ler wt
  misc_feature: MA Experiment 20000573 PARAMETER Experiment Name: At_100uM_ABA_Mutants__P Parameter: Timepoint (hr) Value: N/A
  misc_feature: MA Experiment 20000573 PARAMETER Experiment Name: At_100uM_ABA_Mutants__P Parameter: Tissue Value: Whole Plant
  misc_feature: MA Experiment 20000573 PARAMETER Experiment Name: At_100uM_ABA_Mutants__P Parameter: Treatment Value: None
  misc_feature: MA Experiment ID: 20000794 Result: Down-regulated in Transcription
  misc_feature: MA Experiment 20000794 PARAMETER Experiment Name: At_Petals_P Parameter: Age (day) Value: 23-25 days
  misc_feature: MA Experiment 20000794 PARAMETER Experiment Name: At_Petals_P Parameter: Plant Line Value: WS
  misc_feature: MA Experiment 20000794 PARAMETER Experiment Name: At_Petals_P Parameter: Tissue Value: Petals vs. Whole plant
aaaaaaacaaacaactctttaactatcatcagatcaataaaaaaccagaagaagacatggctcagaaagatacagtgaagctgataggttcttggtctagcccttattcccttagggcacgtgtggctctgcacttgaaatctgtcaagtacgagtacttagacgaacctgatgttcttaaagaaaagagtgaactccttctcaaatctaaccccatccacaagaaagtccctgtcctcctccatggtgacctctccatctgtgagtccctcaacgttgttcaatacgtcgacgaggcttggccatccgttccttcaatccttccttctgatgcctatgatcgcgcatctgctcggttctgggctcagtacatcgatgacaagtgttttgcggcggtggatgcggtggtcggagcaaaagacgacgaagggaaaatggcggcggcgggaaagctgatggagtgtttggcgatactagaagacacgtttcagaagaccagcaaaggattagggttcttcggaggagagaccatcggctaccttgacattgcatgttcggctcttttaggtccgatctctgtgatcgaggcgttttccggcgtcaagtttctccggctagagacaacacctgggttgatcaaatgggccgagagttttagggcccatgaagctgttaagccttacatgcctagcgtcgaagaggtcgttgcattcgcaaagcaaaagttcaatgttcagtgatgcgttttttgcttttaaaagcaaaagcaatgtgttgaaataaaatgatgtttgttgtctttgagaaactttaaatttgtctgtgttttgtgccaaaacttctgattaattagtttttggtctttgtgcgttactattatcaattttattcttattatttgct

SEQ ID NO: 26533 - protein, 245 aa, Arabidopsis thaliana
  peptide (1)..(245): Ceres Seq. ID no. 15220493
  misc_feature (107)..(222): Pfam Name: Glutathione S-transferase, C-terminal domain Pfam Description: Glutathione S-transferase, C-terminal domain
  misc_feature (19)..(239): Homolog of NCBI NO: 6856103 NR Description: glutathione S-transferase [Gossypium hirsutum]
  misc_feature (25)..(243): Homolog of NCBI NO: 15222499 NR Description: glutathione transferase, putative [Arabidopsis
  misc_feature (24)..(244): Homolog of NCBI NO: 15222497 NR Description: glutathione transferase, putative [Arabidopsis
  misc_feature (10)..(244): Homolog of NCBI NO: 38454100 NR Description: At1g69920 [Arabidopsis thaliana]
  misc_feature (35)..(133): Homolog of NCBI NO: 25403291 NR Description: protein T7N9.20 [imported] - Arabidopsis thaliana
  misc_feature (127)..(241): Homolog of NCBI NO: 25403291 NR Description: protein T7N9.20 [imported] - Arabidopsis thaliana
  misc_feature (19)..(241): Homolog of NCBI NO: 15223440 NR Description: glutathione transferase, putative [Arabidopsis
  misc_feature (19)..(245): Homolog of NCBI NO: 25403291 NR Description: protein T7N9.20 [imported] - Arabidopsis thaliana
  misc_feature (19)..(245): Homolog of NCBI NO: 15223432 NR Description: glutathione transferase, putative [Arabidopsis
  misc_feature (19)..(245): Homolog of NCBI NO: 21592561 NR Description: glutathione transferase, putative [Arabidopsis
KNKQLFNYHQINKKPEEDMAQKDTVKLIGSWSSPYSLRARVALHLKSVKYEYLDEPDVLKEKSELLLKSNPIHKKVPVLLHGDLSICESLNVVQYVDEAWPSVPSILPSDAYDRASARFWAQYIDDKCFAAVDAVVGAKDDEGKMAAAGKLMECLAILEDTFQKTSKGLGFFGGETIGYLDIACSALLGPISVIEAFSGVKFLRLETTPGLIKWAESFRAHEAVKPYMPSVEEVVAFAKQKFNVQ

SEQ ID NO: 26534 - protein, 227 aa, Arabidopsis thaliana
  peptide (1)..(227): Ceres Seq. ID no. 15220494
  misc_feature (89)..(204): Pfam Name: Glutathione S-transferase, C-terminal domain Pfam Description: Glutathione S-transferase, C-terminal domain
  misc_feature (1)..(221): Homolog of NCBI NO: 6856103 NR Description: glutathione S-transferase [Gossypium hirsutum]
  misc_feature (7)..(225): Homolog of NCBI NO: 15222499 NR Description: glutathione transferase, putative [Arabidopsis
  misc_feature (6)..(226): Homolog of NCBI NO: 15222497 NR Description: glutathione transferase, putative [Arabidopsis
  misc_feature (1)..(226): Homolog of NCBI NO: 38454100 NR Description: At1g69920 [Arabidopsis thaliana]
  misc_feature (17)..(115): Homolog of NCBI NO: 25403291 NR Description: protein T7N9.20 [imported] - Arabidopsis thaliana
  misc_feature (109)..(223): Homolog of NCBI NO: 25403291 NR Description: protein T7N9.20 [imported] - Arabidopsis thaliana
  misc_feature (1)..(223): Homolog of NCBI NO: 15223440 NR Description: glutathione transferase, putative [Arabidopsis
  misc_feature (1)..(227): Homolog of NCBI NO: 25403291 NR Description: protein T7N9.20 [imported] - Arabidopsis thaliana
  misc_feature (1)..(227): Homolog of NCBI NO: 15223432 NR Description: glutathione transferase, putative [Arabidopsis
  misc_feature (1)..(227): Homolog of NCBI NO: 21592561 NR Description: glutathione transferase, putative [Arabidopsis
MAQKDTVKLIGSWSSPYSLRARVALHLKSVKYEYLDEPDVLKEKSELLLKSNPIHKKVPVLLHGDLSICESLNVVQYVDEAWPSVPSILPSDAYDRASARFWAQYIDDKCFAAVDAVVGAKDDEGKMAAAGKLMECLAILEDTFQKTSKGLGFFGGETIGYLDIACSALLGPISVIEAFSGVKFLRLETTPGLIKWAESFRAHEAVKPYMPSVEEVVAFAKQKFNVQ

SEQ ID NO: 26535 - DNA, 1382 bp, Arabidopsis thaliana
  misc_feature (1)..(1382): Ceres Seq. ID no. 13499797
  misc_feature: MA Experiment ID: 108434 Result: Down-regulated in Transcription
  misc_feature: MA Experiment 108434 PARAMETER Experiment Name: At_Root_Tips_cDNA_P Parameter: Tissue Value: Root Tips
  misc_feature: MA Experiment ID: 108573 Result: Up-regulated in Transcription
  misc_feature: MA Experiment 108573 PARAMETER Experiment Name: At_Drought_cDNA_P Parameter: Timepoint (hr) Value: 6
  misc_feature: MA Experiment 108573 PARAMETER Experiment Name: At_Drought_cDNA_P Parameter: Tissue Value: Aerial
  misc_feature: MA Experiment 108573 PARAMETER Experiment Name: At_Drought_cDNA_P Parameter: Treatment Value: Drought vs. No Drought
  misc_feature: MA Experiment ID: 108577 Result: Up-regulated in Transcription
  misc_feature: MA Experiment 108577 PARAMETER Experiment Name: At_42deg_Heat_cDNA_P Parameter: Temperature (deg C) Value: 42 vs. 22
  misc_feature: MA Experiment 108577 PARAMETER Experiment Name: At_42deg_Heat_cDNA_P Parameter: Timepoint (hr) Value: 6
  misc_feature: MA Experiment 108577 PARAMETER Experiment Name: At_42deg_Heat_cDNA_P Parameter: Tissue Value: Aerial
  misc_feature: MA Experiment ID: 108579 Result: Up-regulated in Transcription
  misc_feature: MA Experiment 108579 PARAMETER Experiment Name: At_4deg_Cold_cDNA_P Parameter: Temperature (deg C) Value: 4 vs. 22
  misc_feature: MA Experiment 108579 PARAMETER Experiment Name: At_4deg_Cold_cDNA_P Parameter: Timepoint (hr) Value: 6
  misc_feature: MA Experiment 108579 PARAMETER Experiment Name: At_4deg_Cold_cDNA_P Parameter: Tissue Value: Aerial
  misc_feature: MA Experiment ID: 20000111 Result: Up-regulated in Transcription
  misc_feature: MA Experiment 20000111 PARAMETER Experiment Name: At_42deg_Heat_cDNA_P Parameter: Temperature (deg C) Value: 42 vs. 22
  misc_feature: MA Experiment 20000111 PARAMETER Experiment Name: At_42deg_Heat_cDNA_P Parameter: Timepoint (hr) Value: 6
  misc_feature: MA Experiment 20000111 PARAMETER Experiment Name: At_42deg_Heat_cDNA_P Parameter: Tissue Value: Aerial
  misc_feature: MA Experiment ID: 20000112 Result: Up-regulated in Transcription
  misc_feature: MA Experiment 20000112 PARAMETER Experiment Name: At_42deg_Heat_cDNA_P Parameter: Temperature (deg C) Value: 42 vs. 22
  misc_feature: MA Experiment 20000112 PARAMETER Experiment Name: At_42deg_Heat_cDNA_P Parameter: Timepoint (hr) Value: 2
  misc_feature: MA Experiment 20000112 PARAMETER Experiment Name: At_42deg_Heat_cDNA_P Parameter: Tissue Value: Aerial
  misc_feature: MA Experiment ID: 20000144 Result: Up-regulated in Transcription
  misc_feature: MA Experiment 20000144 PARAMETER Experiment Name: At_42deg_Heat_cDNA_P Parameter: Temperature (deg C) Value: 42 vs. 22
  misc_feature: MA Experiment 20000144 PARAMETER Experiment Name: At_42deg_Heat_cDNA_P Parameter: Timepoint (hr) Value: 1
  misc_feature: MA Experiment 20000144 PARAMETER Experiment Name: At_42deg_Heat_cDNA_P Parameter: Tissue Value: Aerial
  misc_feature: MA Experiment ID: 20000182 Result: Up-regulated in Transcription
  misc_feature: MA Experiment 20000182 PARAMETER Experiment Name: At_2mM_SA_P Parameter: Age (day) Value: 14
  misc_feature: MA Experiment 20000182 PARAMETER Experiment Name: At_2mM_SA_P Parameter: Organism Value: A. thaliana
  misc_feature: MA Experiment 20000182 PARAMETER Experiment Name: At_2mM_SA_P Parameter: Plant Line Value: WS
  misc_feature: MA Experiment 20000182 PARAMETER Experiment Name: At_2mM_SA_P Parameter: Timepoint (hr) Value: 6
  misc_feature: MA Experiment 20000182 PARAMETER Experiment Name: At_2mM_SA_P Parameter: Tissue Value: Aerial
  misc_feature: MA Experiment 20000182 PARAMETER Experiment Name: At_2mM_SA_P Parameter: Treatment Value: 2mM SA vs. No Treatment
  misc_feature: MA Experiment ID: 20000436 Result: Up-regulated in Transcription
  misc_feature: MA Experiment 20000436 PARAMETER Experiment Name: At_Drought_P Parameter: Age (day) Value: 7
  misc_feature: MA Experiment 20000436 PARAMETER Experiment Name: At_Drought_P Parameter: Organism Value: A. thaliana
  misc_feature: MA Experiment 20000436 PARAMETER Experiment Name: At_Drought_P Parameter: Plant Line Value: WS
  misc_feature: MA Experiment 20000436 PARAMETER Experiment Name: At_Drought_P Parameter: Timepoint (hr) Value: 12
  misc_feature: MA Experiment 20000436 PARAMETER Experiment Name: At_Drought_P Parameter: Tissue Value: Whole Plant
  misc_feature: MA Experiment 20000436 PARAMETER Experiment Name: At_Drought_P Parameter: Treatment Value: Drought vs. No Drought
  misc_feature: MA Experiment ID: 20000451 Result: Down-regulated in Transcription
  misc_feature: MA Experiment 20000451 PARAMETER Experiment Name: At_CS6879_Shoots-Roots_P Parameter: Age (day) Value: 14
  misc_feature: MA Experiment 20000451 PARAMETER Experiment Name: At_CS6879_Shoots-Roots_P Parameter: Organism Value: A. thaliana
  misc_feature: MA Experiment 20000451 PARAMETER Experiment Name: At_CS6879_Shoots-Roots_P Parameter: Plant Line Value: CS6879 vs. WS
  misc_feature: MA Experiment 20000451 PARAMETER Experiment Name: At_CS6879_Shoots-Roots_P Parameter: Tissue Value: Roots
acaattcagattccaattttctcgaactcttaaatcaatctctcaaatctctcaaccgtgatcaagatgcagatcttcgttaagactctcaccggaaagactatcaccctcgaggtggaaagctctgacaccatcgacaacgttaaggccaagatccaggataaggaaggcattcctccggatcagcagagattgatcttcgccggaaaacagctagaggatggccgtacgttggctgattacaatatccagaaggaatccaccctccatttggttctcaggctccgtggtggtatgcagattttcgttaaaaccctaacgggaaagacgattactcttgaggtggagagttctgacaccatcgacaacgtcaaggccaagatccaagataaggagggtattcctccggaccagcagaggttgatcttcgccggaaagcagttggaggatggcagaactcttgctgactacaacatccagaaagagtccacacttcacttggtcttgcgtctgcgtggaggtatgcagatcttcgtgaagactctcaccggaaagactatcactttggaggtagagagctctgacaccatcgacaacgttaaggccaagatccaggataaggaaggcattcctccggatcagcagaggttgatcttcgccggaaagcagttngaggatggcagnactnnngctgattacaacatccagaaagagtccaccctncanttggtnntgagnctgcgtggaggtatgcagatcttcgttaagactctcaccggaaagactatcactttggaggtagagagctctgacaccattgacaacgtcaaggccaagatccaggataaggaaggtatccctccggaccagcagaggttgatcttcgccggtaaacagttggaggatggtcgtaccttggctgattacaacattcagaaggagtcgacccttcacttggttttgcgtctgcgtggaggtatgcagatcttcgttaagactttgaccggcaagactatcactcttgaagtggagagctccgacaccattgacaacgtgaaggccaagatccaggacaaggaaggtatccctccggaccagcagcgtctcatcttcgctggaaagcagcttgaggatggacgtactttggccgactacaacatccagaaggagtctactcttcacttggtcctccgtctccgtggtggtttctaaaccttgtctctctcttatggttactgaaccaagttcatgtctcgtttcatctagtactttggtggtttatgttttggggccatgtaagcctctgataaataattgatcgactatgtttccgtttctttcatctctcttttctttcaaacaacaaatcgaacttattctct

SEQ ID NO: 26536 - protein, 381 aa, Arabidopsis thaliana
  peptide (1)..(381): Ceres Seq. ID no. 13499798
  misc_feature (1)..(74): Pfam Name: Ubiquitin family Pfam Description: Ubiquitin family
  misc_feature (1)..(381): Homolog of NCBI NO: 70645 NR Description: polyubiquitin 5 - garden pea
  misc_feature (1)..(381): Homolog of NCBI NO: 70644 NR Description: ubiquitin precursor - common sunflower (fragment)
  misc_feature (1)..(380): Homolog of NCBI NO: 418854 NR Description: polyubiquitin 6 - parsley
  misc_feature (1)..(380): Homolog of NCBI NO: 170352 NR Description: hexameric polyubiquitin
  misc_feature (1)..(381): Homolog of NCBI NO: 902586 NR Description: ubiquitin
  misc_feature (1)..(381): Homolog of NCBI NO: 170352 NR Description: hexameric polyubiquitin
  misc_feature (1)..(380): Homolog of NCBI NO: 100934 NR Description: polyubiquitin - maize
  misc_feature (1)..(380): Homolog of NCBI NO: 418854 NR Description: polyubiquitin 6 - parsley
  misc_feature (1)..(380): Homolog of NCBI NO: 100934 NR Description: polyubiquitin - maize
  misc_feature (1)..(380): Homolog of NCBI NO: 23397122 NR Description: putative polyubiquitin (UBQ10) [Arabidopsis
  misc_feature (202)..(202): Xaa is any aa, unknown or other
  misc_feature (206)..(206): Xaa is any aa, unknown or other
  misc_feature (208)..(208): Xaa is any aa, unknown or other
  misc_feature (219)..(219): Xaa is any aa, unknown or other
  misc_feature (220)..(220): Xaa is any aa, unknown or other
  misc_feature (222)..(222): Xaa is any aa, unknown or other
  misc_feature (223)..(223): Xaa is any aa, unknown or other
  misc_feature (224)..(224): Xaa is any aa, unknown or other
MQIFVKTLTGKTITLEVESSDTIDNVKAKIQDKEGIPPDQQRLIFAGKQLEDGRTLADYNIQKESTLHLVLRLRGGMQIFVKTLTGKTITLEVESSDTIDNVKAKIQDKEGIPPDQQRLIFAGKQLEDGRTLADYNIQKESTLHLVLRLRGGMQIFVKTLTGKTITLEVESSDTIDNVKAKIQDKEGIPPDQQRLIFAGKQXEDGXTXADYNIQKESTXXLXXXLRGGMQIFVKTLTGKTITLEVESSDTIDNVKAKIQDKEGIPPDQQRLIFAGKQLEDGRTLADYNIQKESTLHLVLRLRGGMQIFVKTLTGKTITLEVESSDTIDNVKAKIQDKEGIPPDQQRLIFAGKQLEDGRTLADYNIQKESTLHLVLRLRGGF

SEQ ID NO: 26537 - protein, 305 aa, Arabidopsis thaliana
  peptide (1)..(305): Ceres Seq. ID no. 13499799
  misc_feature (1)..(74): Pfam Name: Ubiquitin family Pfam Description: Ubiquitin family
  misc_feature (1)..(304): Homolog of NCBI NO: 4115337 NR Description: ubiquitin [Pisum sativum]
  misc_feature (1)..(304): Homolog of NCBI NO: 902584 NR Description: polyubiquitin containing 7 ubiquitin monomers
  misc_feature (1)..(304): Homolog of NCBI NO: 170352 NR Description: hexameric polyubiquitin
  misc_feature (1)..(304): Homolog of NCBI NO: 100934 NR Description: polyubiquitin - maize
  misc_feature (1)..(304): Homolog of NCBI NO: 100934 NR Description: polyubiquitin - maize
  misc_feature (1)..(305): Homolog of NCBI NO: 902586 NR Description: ubiquitin
  misc_feature (1)..(305): Homolog of NCBI NO: 170352 NR Description: hexameric polyubiquitin
  misc_feature (1)..(305): Homolog of NCBI NO: 70645 NR Description: polyubiquitin 5 - garden pea
  misc_feature (1)..(305): Homolog of NCBI NO: 70644 NR Description: ubiquitin precursor - common sunflower (fragment)
  misc_feature (1)..(304): Homolog of NCBI NO: 23397122 NR Description: putative polyubiquitin (UBQ10) [Arabidopsis
  misc_feature (126)..(126): Xaa is any aa, unknown or other
  misc_feature (130)..(130): Xaa is any aa, unknown or other
  misc_feature (132)..(132): Xaa is any aa, unknown or other
  misc_feature (143)..(143): Xaa is any aa, unknown or other
  misc_feature (144)..(144): Xaa is any aa, unknown or other
  misc_feature (146)..(146): Xaa is any aa, unknown or other
  misc_feature (147)..(147): Xaa is any aa, unknown or other
  misc_feature (148)..(148): Xaa is any aa, unknown or other
MQIFVKTLTGKTITLEVESSDTIDNVKAKIQDKEGIPPDQQRLIFAGKQLEDGRTLADYNIQKESTLHLVLRLRGGMQIFVKTLTGKTITLEVESSDTIDNVKAKIQDKEGIPPDQQRLIFAGKQXEDGXTXADYNIQKESTXXLXXXLRGGMQIFVKTLTGKTITLEVESSDTIDNVKAKIQDKEGIPPDQQRLIFAGKQLEDGRTLADYNIQKESTLHLVLRLRGGMQIFVKTLTGKTITLEVESSDTIDNVKAKIQDKEGIPPDQQRLIFAGKQLEDGRTLADYNIQKESTLHLVLRLRGGF

SEQ ID NO: 26538 - protein, 229 aa, Arabidopsis thaliana
  peptide (1)..(229): Ceres Seq. ID no. 13499800
  misc_feature (77)..(150): Pfam Name: Ubiquitin family Pfam Description: Ubiquitin family
  misc_feature (1)..(228): Homolog of NCBI NO: 418854 NR Description: polyubiquitin 6 - parsley
  misc_feature (1)..(228): Homolog of NCBI NO: 418854 NR Description: polyubiquitin 6 - parsley
  misc_feature (1)..(228): Homolog of NCBI NO: 100934 NR Description: polyubiquitin - maize
  misc_feature (1)..(228): Homolog of NCBI NO: 170352 NR Description: hexameric polyubiquitin
  misc_feature (1)..(228): Homolog of NCBI NO: 100934 NR Description: polyubiquitin - maize
  misc_feature (1)..(229): Homolog of NCBI NO: 902586 NR Description: ubiquitin
  misc_feature (1)..(229): Homolog of NCBI NO: 70645 NR Description: polyubiquitin 5 - garden pea
  misc_feature (1)..(229): Homolog of NCBI NO: 170352 NR Description: hexameric polyubiquitin
  misc_feature (1)..(229): Homolog of NCBI NO: 70644 NR Description: ubiquitin precursor - common sunflower (fragment)
  misc_feature (1)..(228): Homolog of NCBI NO: 23397122 NR Description: putative polyubiquitin (UBQ10) [Arabidopsis
  misc_feature (50)..(50): Xaa is any aa, unknown or other
  misc_feature (54)..(54): Xaa is any aa, unknown or other
  misc_feature (56)..(56): Xaa is any aa, unknown or other
  misc_feature (67)..(67): Xaa is any aa, unknown or other
  misc_feature (68)..(68): Xaa is any aa, unknown or other
  misc_feature (70)..(70): Xaa is any aa, unknown or other
  misc_feature (71)..(71): Xaa is any aa, unknown or other
  misc_feature (72)..(72): Xaa is any aa, unknown or other
MQIFVKTLTGKTITLEVESSDTIDNVKAKIQDKEGIPPDQQRLIFAGKQXEDGXTXADYNIQKESTXXLXXXLRGGMQIFVKTLTGKTITLEVESSDTIDNVKAKIQDKEGIPPDQQRLIFAGKQLEDGRTLADYNIQKESTLHLVLRLRGGMQIFVKTLTGKTITLEVESSDTIDNVKAKIQDKEGIPPDQQRLIFAGKQLEDGRTLADYNIQKESTLHLVLRLRGGF

SEQ ID NO: 26539 - DNA, 963 bp, Arabidopsis thaliana
  misc_feature (1)..(963): Ceres Seq. ID no. 12439674
  misc_feature: MA Experiment ID: 108434 Result: Down-regulated in Transcription
  misc_feature: MA Experiment 108434 PARAMETER Experiment Name: At_Root_Tips_cDNA_P Parameter: Tissue Value: Root Tips
  misc_feature: MA Experiment ID: 108435 Result: Up-regulated in Transcription
  misc_feature: MA Experiment 108435 PARAMETER Experiment Name: At_stm_Mutants_cDNA_P Parameter: Plant Line Value: wt Landsburg vs stm
  misc_feature: MA Experiment 108435 PARAMETER Experiment Name: At_stm_Mutants_cDNA_P Parameter: Tissue Value: Shoot Apical Meristem Region
  misc_feature: MA Experiment ID: 108464 Result: Up-regulated in Transcription
  misc_feature: MA Experiment 108464 PARAMETER Experiment Name: At_Germinating_Seeds_cDNA_P Parameter: Age (day) Value: 4 vs. 0
  misc_feature: MA Experiment 108464 PARAMETER Experiment Name: At_Germinating_Seeds_cDNA_P Parameter: Tissue Value: Germinating Seeds
  misc_feature: MA Experiment ID: 108561 Result: Down-regulated in Transcription
  misc_feature: MA Experiment 108561 PARAMETER Experiment Name: At_100uM_ABA_cDNA_P Parameter: Timepoint (hr) Value: 6
  misc_feature: MA Experiment 108561 PARAMETER Experiment Name: At_100uM_ABA_cDNA_P Parameter: Tissue Value: Aerial
  misc_feature: MA Experiment 108561 PARAMETER Experiment Name: At_100uM_ABA_cDNA_P Parameter: Treatment Value: 100uM ABA vs. No Treatment
  misc_feature: MA Experiment ID: 108574 Result: Up-regulated in Transcription
  misc_feature: MA Experiment 108574 PARAMETER Experiment Name: At_Wounding__cDNA_P Parameter: Timepoint (hr) Value: 1
  misc_feature: MA Experiment 108574 PARAMETER Experiment Name: At_Wounding__cDNA_P Parameter: Tissue Value: Aerial
  misc_feature: MA Experiment 108574 PARAMETER Experiment Name: At_Wounding__cDNA_P Parameter: Treatment Value: Wounding vs. No Wounding
  misc_feature: MA Experiment ID: 108577 Result: Down-regulated in Transcription
  misc_feature: MA Experiment 108577 PARAMETER Experiment Name: At_42deg_Heat_cDNA_P Parameter: Temperature (deg C) Value: 42 vs. 22
  misc_feature: MA Experiment 108577 PARAMETER Experiment Name: At_42deg_Heat_cDNA_P Parameter: Timepoint (hr) Value: 6
  misc_feature: MA Experiment 108577 PARAMETER Experiment Name: At_42deg_Heat_cDNA_P Parameter: Tissue Value: Aerial
  misc_feature: MA Experiment ID: 108579 Result: Up-regulated in Transcription
  misc_feature: MA Experiment 108579 PARAMETER Experiment Name: At_4deg_Cold_cDNA_P Parameter: Temperature (deg C) Value: 4 vs. 22
  misc_feature: MA Experiment 108579 PARAMETER Experiment Name: At_4deg_Cold_cDNA_P Parameter: Timepoint (hr) Value: 6
  misc_feature: MA Experiment 108579 PARAMETER Experiment Name: At_4deg_Cold_cDNA_P Parameter: Tissue Value: Aerial
  misc_feature: MA Experiment ID: 108585 Result: Up-regulated in Transcription
  misc_feature: MA Experiment 108585 PARAMETER Experiment Name: At_5mM_NaNP_cDNA_P Parameter: Timepoint (hr) Value: 6
  misc_feature: MA Experiment 108585 PARAMETER Experiment Name: At_5mM_NaNP_cDNA_P Parameter: Tissue Value: Aerial
  misc_feature: MA Experiment 108585 PARAMETER Experiment Name: At_5mM_NaNP_cDNA_P Parameter: Treatment Value: null
  misc_feature: MA Experiment ID: 108594 Result: Up-regulated in Transcription
  misc_feature: MA Experiment 108594 PARAMETER Experiment Name: At_Ler-rhl_Root_cDNA_P Parameter: Plant Line Value: null
  misc_feature: MA Experiment ID: 108595 Result: Up-regulated in Transcription
  misc_feature: MA Experiment 108595 PARAMETER Experiment Name: At_Ler-pi_Ovule_cDNA_P Parameter: Plant Line Value: null
  misc_feature: MA Experiment ID: 108605 Result: Down-regulated in Transcription
  misc_feature: MA Experiment 108605 PARAMETER Experiment Name: At_100uM_ABA_cDNA_P Parameter: Timepoint (hr) Value: 6
  misc_feature: MA Experiment 108605 PARAMETER Experiment Name: At_100uM_ABA_cDNA_P Parameter: Tissue Value: Aerial
  misc_feature: MA Experiment 108605 PARAMETER Experiment Name: At_100uM_ABA_cDNA_P Parameter: Treatment Value: 100uM ABA vs. No Treatment
  misc_feature: MA Experiment ID: 108667 Result: Up-regulated in Transcription
  misc_feature: MA Experiment 108667 PARAMETER Experiment Name: At_2mM_SA_cDNA_P Parameter: Plant Line Value: WS
  misc_feature: MA Experiment 108667 PARAMETER Experiment Name: At_2mM_SA_cDNA_P Parameter: Timepoint (hr) Value: 1
  misc_feature: MA Experiment 108667 PARAMETER Experiment Name: At_2mM_SA_cDNA_P Parameter: Treatment Value: 2mM SA vs. No Treatment
  misc_feature: MA Experiment ID: 20000069 Result: Up-regulated in Transcription
  misc_feature: MA Experiment 20000069 PARAMETER Experiment Name: At_100uM_ABA_Mutants_cDNA_P Parameter: Plant Line Value: CS23
  misc_feature: MA Experiment 20000069 PARAMETER Experiment Name: At_100uM_ABA_Mutants_cDNA_P Parameter: Timepoint (hr) Value: 6
  misc_feature: MA Experiment 20000069 PARAMETER Experiment Name: At_100uM_ABA_Mutants_cDNA_P Parameter: Tissue Value: Aerial
  misc_feature: MA Experiment 20000069 PARAMETER Experiment Name: At_100uM_ABA_Mutants_cDNA_P Parameter: Treatment Value: 100uM ABA vs. No Treatment
  misc_feature: MA Experiment ID: 20000072 Result: Up-regulated in Transcription
  misc_feature: MA Experiment 20000072 PARAMETER Experiment Name: At_100uM_ABA_Mutants_cDNA_P Parameter: Plant Line Value: CS8105
  misc_feature: MA Experiment 20000072 PARAMETER Experiment Name: At_100uM_ABA_Mutants_cDNA_P Parameter: Timepoint (hr) Value: 6
  misc_feature: MA Experiment 20000072 PARAMETER Experiment Name: At_100uM_ABA_Mutants_cDNA_P Parameter: Tissue Value: Aerial
  misc_feature: MA Experiment 20000072 PARAMETER Experiment Name: At_100uM_ABA_Mutants_cDNA_P Parameter: Treatment Value: 100uM ABA vs. No Treatment
  misc_feature: MA Experiment ID: 20000086 Result: Up-regulated in Transcription
  misc_feature: MA Experiment 20000086 PARAMETER Experiment Name: At_100uM_ABA_Mutants_cDNA_P Parameter: Plant Line Value: CS22
  misc_feature: MA Experiment 20000086 PARAMETER Experiment Name: At_100uM_ABA_Mutants_cDNA_P Parameter: Timepoint (hr) Value: 6
  misc_feature: MA Experiment 20000086 PARAMETER Experiment Name: At_100uM_ABA_Mutants_cDNA_P Parameter: Tissue Value: Aerial
  misc_feature: MA Experiment 20000086 PARAMETER Experiment Name: At_100uM_ABA_Mutants_cDNA_P Parameter: Treatment Value: 100uM ABA vs. No Treatment
  misc_feature: MA Experiment ID: 20000088 Result: Up-regulated in Transcription
  misc_feature: MA Experiment 20000088 PARAMETER Experiment Name: At_100uM_ABA_Mutants_cDNA_P Parameter: Plant Line Value: Landsberg
  misc_feature: MA Experiment 20000088 PARAMETER Experiment Name: At_100uM_ABA_Mutants_cDNA_P Parameter: Timepoint (hr) Value: 6
  misc_feature: MA Experiment 20000088 PARAMETER Experiment Name: At_100uM_ABA_Mutants_cDNA_P Parameter: Tissue Value: Aerial
  misc_feature: MA Experiment 20000088 PARAMETER Experiment Name: At_100uM_ABA_Mutants_cDNA_P Parameter: Treatment Value: 100uM ABA vs. No Treatment
  misc_feature: MA Experiment ID: 20000090 Result: Up-regulated in Transcription
  misc_feature: MA Experiment ID: 20000111 Result: Down-regulated in Transcription
  misc_feature: MA Experiment 20000111 PARAMETER Experiment Name: At_42deg_Heat_cDNA_P Parameter: Temperature (deg C) Value: 42 vs. 22
  misc_feature: MA Experiment 20000111 PARAMETER Experiment Name: At_42deg_Heat_cDNA_P Parameter: Timepoint (hr) Value: 6
  misc_feature: MA Experiment 20000111 PARAMETER Experiment Name: At_42deg_Heat_cDNA_P Parameter: Tissue Value: Aerial
  misc_feature: MA Experiment ID: 20000113 Result: Down-regulated in Transcription
  misc_feature: MA Experiment 20000113 PARAMETER Experiment Name: At_42deg_Heat_cDNA_P Parameter: Temperature (deg C) Value: 42 vs. 22
  misc_feature: MA Experiment 20000113 PARAMETER Experiment Name: At_42deg_Heat_cDNA_P Parameter: Timepoint (hr) Value: 8
  misc_feature: MA Experiment 20000113 PARAMETER Experiment Name: At_42deg_Heat_cDNA_P Parameter: Tissue Value: Aerial
  misc_feature: MA Experiment ID: 20000144 Result: Down-regulated in Transcription
  misc_feature: MA Experiment 20000144 PARAMETER Experiment Name: At_42deg_Heat_cDNA_P Parameter: Temperature (deg C) Value: 42 vs. 22
  misc_feature: MA Experiment 20000144 PARAMETER Experiment Name: At_42deg_Heat_cDNA_P Parameter: Timepoint (hr) Value: 1
  misc_feature: MA Experiment 20000144 PARAMETER Experiment Name: At_42deg_Heat_cDNA_P Parameter: Tissue Value: Aerial
  misc_feature: MA Experiment ID: 20000166 Result: Down-regulated in Transcription
  misc_feature: MA Experiment 20000166 PARAMETER Experiment Name: At_100uM_ABA_P Parameter: Age (day) Value: 14
  misc_feature: MA Experiment 20000166 PARAMETER Experiment Name: At_100uM_ABA_P Parameter: Organism Value: A. thaliana
  misc_feature: MA Experiment 20000166 PARAMETER Experiment Name: At_100uM_ABA_P Parameter: Plant Line Value: WS
  misc_feature: MA Experiment 20000166 PARAMETER Experiment Name: At_100uM_ABA_P Parameter: Timepoint (hr) Value: 1
  misc_feature: MA Experiment 20000166 PARAMETER Experiment Name: At_100uM_ABA_P Parameter: Tissue Value: Aerial
  misc_feature: MA Experiment 20000166 PARAMETER Experiment Name: At_100uM_ABA_P Parameter: Treatment Value: 100uM ABA vs. No Treatment
  misc_feature: MA Experiment ID: 20000169 Result: Down-regulated in Transcription
  misc_feature: MA Experiment 20000169 PARAMETER Experiment Name: At_100uM_ABA_P Parameter: Age (day) Value: 14
  misc_feature: MA Experiment 20000169 PARAMETER Experiment Name: At_100uM_ABA_P Parameter: Organism Value: A. thaliana
  misc_feature: MA Experiment 20000169 PARAMETER Experiment Name: At_100uM_ABA_P Parameter: Plant Line Value: WS
  misc_feature: MA Experiment 20000169 PARAMETER Experiment Name: At_100uM_ABA_P Parameter: Timepoint (hr) Value: 6
  misc_feature: MA Experiment 20000169 PARAMETER Experiment Name: At_100uM_ABA_P Parameter: Tissue Value: Aerial
  misc_feature: MA Experiment 20000169 PARAMETER Experiment Name: At_100uM_ABA_P Parameter: Treatment Value: 100uM ABA vs. No Treatment
  misc_feature: MA Experiment ID: 20000171 Result: Down-regulated in Transcription
  misc_feature: MA Experiment 20000171 PARAMETER Experiment Name: At_42deg_Heat_P Parameter: Age (day) Value: 14
  misc_feature: MA Experiment 20000171 PARAMETER Experiment Name: At_42deg_Heat_P Parameter: Organism Value: A. thaliana
  misc_feature: MA Experiment 20000171 PARAMETER Experiment Name: At_42deg_Heat_P Parameter: Plant Line Value: WS
  misc_feature: MA Experiment 20000171 PARAMETER Experiment Name: At_42deg_Heat_P Parameter: Temperature (deg C) Value: 42 vs. 22
  misc_feature: MA Experiment 20000171 PARAMETER Experiment Name: At_42deg_Heat_P Parameter: Timepoint (hr) Value: 1
  misc_feature: MA Experiment 20000171 PARAMETER Experiment Name: At_42deg_Heat_P Parameter: Tissue Value: Aerial
  misc_feature: MA Experiment ID: 20000173 Result: Down-regulated in Transcription
  misc_feature: MA Experiment 20000173 PARAMETER Experiment Name: At_42deg_Heat_P Parameter: Age (day) Value: 14
  misc_feature: MA Experiment 20000173 PARAMETER Experiment Name: At_42deg_Heat_P Parameter: Organism Value: A. thaliana
  misc_feature: MA Experiment 20000173 PARAMETER Experiment Name: At_42deg_Heat_P Parameter: Plant Line Value: WS
  misc_feature: MA Experiment 20000173 PARAMETER Experiment Name: At_42deg_Heat_P Parameter: Temperature (deg C) Value: 42 vs. 22
  misc_feature: MA Experiment 20000173 PARAMETER Experiment Name: At_42deg_Heat_P Parameter: Timepoint (hr) Value: 6
  misc_feature: MA Experiment 20000173 PARAMETER Experiment Name: At_42deg_Heat_P Parameter: Tissue Value: Aerial
  misc_feature: MA Experiment ID: 20000179 Result: Down-regulated in Transcription
  misc_feature: MA Experiment 20000179 PARAMETER Experiment Name: At_Germinating_Seeds_P Parameter: Age (hr) Value: 6 vs. 0
  misc_feature: MA Experiment 20000179 PARAMETER Experiment Name: At_Germinating_Seeds_P Parameter: Tissue Value: Germinating Seeds
  misc_feature: MA Experiment ID: 20000180 Result: Down-regulated in Transcription
  misc_feature: MA Experiment 20000180 PARAMETER Experiment Name: At_Germinating_Seeds_P Parameter: Age (hr) Value: 24 vs. 0
  misc_feature: MA Experiment 20000180 PARAMETER Experiment Name: At_Germinating_Seeds_P Parameter: Tissue Value: Germinating Seeds
  misc_feature: MA Experiment ID: 20000184 Result: Down-regulated in Transcription
  misc_feature: MA Experiment 20000184 PARAMETER Experiment Name: At_Shoots__P Parameter: Age (day) Value: 7
  misc_feature: MA Experiment 20000184 PARAMETER Experiment Name: At_Shoots__P Parameter: Tissue Value: Shoots vs. Whole Plant
  misc_feature: MA Experiment ID: 20000185 Result: Down-regulated in Transcription
  misc_feature: MA Experiment 20000185 PARAMETER Experiment Name: At_Roots__P Parameter: Age (day) Value: 7 vs. 21
  misc_feature: MA Experiment 20000185 PARAMETER Experiment Name: At_Roots__P Parameter: Organism Value: A. thaliana
  misc_feature: MA Experiment 20000185 PARAMETER Experiment Name: At_Roots__P Parameter: Tissue Value: Roots vs. Whole Plant
  misc_feature: MA Experiment ID: 20000213 Result: Up-regulated in Transcription
  misc_feature: MA Experiment 20000213 PARAMETER Experiment Name: At_4deg_Cold_P Parameter: Timepoint (hr) Value: 2
  misc_feature: MA Experiment ID: 20000234 Result: Down-regulated in Transcription
  misc_feature: MA Experiment 20000234 PARAMETER Experiment Name: At_Siliques_P Parameter: Age (day) Value: 21
  misc_feature: MA Experiment 20000234 PARAMETER Experiment Name: At_Siliques_P Parameter: Organism Value: A. thaliana
  misc_feature: MA Experiment 20000234 PARAMETER Experiment Name: At_Siliques_P Parameter: Plant Line Value: WS
  misc_feature: MA Experiment 20000234 PARAMETER Experiment Name: At_Siliques_P Parameter: Tissue Value: Less Than 5mm Siliques vs. Whole Plant
  misc_feature: MA Experiment ID: 20000264 Result: Down-regulated in Transcription
  misc_feature: MA Experiment 20000264 PARAMETER Experiment Name: At_Open_Flower_P Parameter: Age (day) Value: 21
  misc_feature: MA Experiment 20000264 PARAMETER Experiment Name: At_Open_Flower_P Parameter: Plant Line Value: WS
  misc_feature: MA Experiment 20000264 PARAMETER Experiment Name: At_Open_Flower_P Parameter: Tissue Value: Open Flower vs. Whole Plant
  misc_feature: MA Experiment ID: 20000265 Result: Down-regulated in Transcription
  misc_feature: MA Experiment 20000265 PARAMETER Experiment Name: At_Open_Flower_P Parameter: Age (day) Value: 21
  misc_feature: MA Experiment 20000265 PARAMETER Experiment Name: At_Open_Flower_P Parameter: Plant Line Value: WS
  misc_feature: MA Experiment 20000265 PARAMETER Experiment Name: At_Open_Flower_P Parameter: Tissue Value: Closed Flower vs. Whole Plant
  misc_feature: MA Experiment ID: 20000286 Result: Down-regulated in Transcription
  misc_feature: MA Experiment 20000286 PARAMETER Experiment Name: At_Open_Flower_P Parameter: Age (day) Value: 21
  misc_feature: MA Experiment 20000286 PARAMETER Experiment Name: At_Open_Flower_P Parameter: Plant Line Value: WS
  misc_feature: MA Experiment 20000286 PARAMETER Experiment Name: At_Open_Flower_P Parameter: Tissue Value: Half Open vs. Whole Plant
  misc_feature: MA Experiment ID: 20000436 Result: Down-regulated in Transcription
  misc_feature: MA Experiment 20000436 PARAMETER Experiment Name: At_Drought_P Parameter: Age (day) Value: 7
  misc_feature: MA Experiment 20000436 PARAMETER Experiment Name: At_Drought_P Parameter: Organism Value: A. thaliana
  misc_feature: MA Experiment 20000436 PARAMETER Experiment Name: At_Drought_P Parameter: Plant Line Value: WS
  misc_feature: MA Experiment 20000436 PARAMETER Experiment Name: At_Drought_P Parameter: Timepoint (hr) Value: 12
  misc_feature: MA Experiment 20000436 PARAMETER Experiment Name: At_Drought_P Parameter: Tissue Value: Whole Plant
  misc_feature: MA Experiment 20000436 PARAMETER Experiment Name: At_Drought_P Parameter: Treatment Value: Drought vs. No Drought
  misc_feature: MA Experiment ID: 20000437 Result: Down-regulated in Transcription
  misc_feature: MA Experiment 20000437 PARAMETER Experiment Name: At_Drought_P Parameter: Age (day) Value: 8
  misc_feature: MA Experiment 20000437 PARAMETER Experiment Name: At_Drought_P Parameter: Organism Value: A. thaliana
  misc_feature: MA Experiment 20000437 PARAMETER Experiment Name: At_Drought_P Parameter: Plant Line Value: WS
  misc_feature: MA Experiment 20000437 PARAMETER Experiment Name: At_Drought_P Parameter: Timepoint (hr) Value: 24
  misc_feature: MA Experiment 20000437 PARAMETER Experiment Name: At_Drought_P Parameter: Tissue Value: Whole Plant
  misc_feature: MA Experiment 20000437 PARAMETER Experiment Name: At_Drought_P Parameter: Treatment Value: Drought vs. No Drought
  misc_feature: MA Experiment ID: 20000438 Result: Down-regulated in Transcription
  misc_feature: MA Experiment 20000438 PARAMETER Experiment Name: At_Shoots__P Parameter: Age (day) Value: 14
  misc_feature: MA Experiment 20000438 PARAMETER Experiment Name: At_Shoots__P Parameter: Tissue Value: Shoots vs. Whole Plant
  misc_feature: MA Experiment ID: 20000439 Result: Down-regulated in Transcription
  misc_feature: MA Experiment 20000439 PARAMETER Experiment Name: At_Roots__P Parameter: Age (day) Value: 14 vs. 21
  misc_feature: MA Experiment 20000439 PARAMETER Experiment Name: At_Roots__P Parameter: Organism Value: A. thaliana
  misc_feature: MA Experiment 20000439 PARAMETER Experiment Name: At_Roots__P Parameter: Tissue Value: Roots vs. Whole Plant
  misc_feature: MA Experiment ID: 20000441 Result: Up-regulated in Transcription
  misc_feature: MA Experiment 20000441 PARAMETER Experiment Name: At_1uM_BR-BRZ__P Parameter: Tissue Value: Shoot Apices
  misc_feature: MA Experiment 20000441 PARAMETER Experiment Name: At_1uM_BR-BRZ__P Parameter: Treatment Value: 1uM BR vs. No Treatment
  misc_feature: MA Experiment ID: 20000443 Result: Up-regulated in Transcription
  misc_feature: MA Experiment 20000443 PARAMETER Experiment Name: At_1uM_BR-BRZ__P Parameter: Tissue Value: Shoot Apices
  misc_feature: MA Experiment 20000443 PARAMETER Experiment Name: At_1uM_BR-BRZ__P Parameter: Treatment Value: 1uM BRZ vs. No Treatment
  misc_feature: MA Experiment ID: 20000452 Result: Up-regulated in Transcription
  misc_feature: MA Experiment 20000452 PARAMETER Experiment Name: At_CS6879_Shoots-Roots_P Parameter: Age (day) Value: 14
  misc_feature: MA Experiment 20000452 PARAMETER Experiment Name: At_CS6879_Shoots-Roots_P Parameter: Organism Value: A. thaliana
  misc_feature: MA Experiment 20000452 PARAMETER Experiment Name: At_CS6879_Shoots-Roots_P Parameter: Plant Line Value: CS6879 vs. WS
  misc_feature: MA Experiment 20000452 PARAMETER Experiment Name: At_CS6879_Shoots-Roots_P Parameter: Tissue Value: Shoots
  misc_feature: MA Experiment ID: 20000460 Result: Up-regulated in Transcription
  misc_feature: MA Experiment 20000460 PARAMETER Experiment Name: At_10percent_PEG_P Parameter: Age (day) Value: 12
  misc_feature: MA Experiment 20000460 PARAMETER Experiment Name: At_10percent_PEG_P Parameter: Organism Value: A. thaliana
  misc_feature: MA Experiment 20000460 PARAMETER Experiment Name: At_10percent_PEG_P Parameter: Plant Line Value: WS
  misc_feature: MA Experiment 20000460 PARAMETER Experiment Name: At_10percent_PEG_P Parameter: Timepoint (day) Value: 12
  misc_feature: MA Experiment 20000460 PARAMETER Experiment Name: At_10percent_PEG_P Parameter: Tissue Value: Whole Plant
  misc_feature: MA Experiment 20000460 PARAMETER Experiment Name: At_10percent_PEG_P Parameter: Treatment Value: 10percent PEG vs. No Treatment
  misc_feature: MA Experiment ID: 20000495 Result: Down-regulated in Transcription
  misc_feature: MA Experiment 20000495 PARAMETER Experiment Name: At_Guard_Cells_P Parameter: Harvest Date Value: 8/2/2002
  misc_feature: MA Experiment 20000495 PARAMETER Experiment Name: At_Guard_Cells_P Parameter: Organism Value: A. thaliana
  misc_feature: MA Experiment 20000495 PARAMETER Experiment Name: At_Guard_Cells_P Parameter: Tissue Value: Guard Cells vs. Leaves
  misc_feature: MA Experiment ID: 20000573 Result: Down-regulated in Transcription
  misc_feature: MA Experiment 20000573 PARAMETER Experiment Name: At_100uM_ABA_Mutants__P Parameter: Organism Value: A. thaliana
  misc_feature: MA Experiment 20000573 PARAMETER Experiment Name: At_100uM_ABA_Mutants__P Parameter: Plant Line Value: CS22 vs. Ler wt
  misc_feature: MA Experiment 20000573 PARAMETER Experiment Name: At_100uM_ABA_Mutants__P Parameter: Timepoint (hr) Value: N/A
  misc_feature: MA Experiment 20000573 PARAMETER Experiment Name: At_100uM_ABA_Mutants__P Parameter: Tissue Value: Whole Plant
  misc_feature: MA Experiment 20000573 PARAMETER Experiment Name: At_100uM_ABA_Mutants__P Parameter: Treatment Value: None
  misc_feature: MA Experiment ID: 20000574 Result: Down-regulated in Transcription
  misc_feature: MA Experiment 20000574 PARAMETER Experiment Name: At_100uM_ABA_Mutants__P Parameter: Organism Value: A. thaliana
  misc_feature: MA Experiment 20000574 PARAMETER Experiment Name: At_100uM_ABA_Mutants__P Parameter: Plant Line Value: CS23 vs. Ler wt
  misc_feature: MA Experiment 20000574 PARAMETER Experiment Name: At_100uM_ABA_Mutants__P Parameter: Timepoint (hr) Value: N/A
  misc_feature: MA Experiment 20000574 PARAMETER Experiment Name: At_100uM_ABA_Mutants__P Parameter: Tissue Value: Whole Plant
  misc_feature: MA Experiment 20000574 PARAMETER Experiment Name: At_100uM_ABA_Mutants__P Parameter: Treatment Value: None
  misc_feature: MA Experiment ID: 20000794 Result: Down-regulated in Transcription
  misc_feature: MA Experiment 20000794 PARAMETER Experiment Name: At_Petals_P Parameter: Age (day) Value: 23-25 days
  misc_feature: MA Experiment 20000794 PARAMETER Experiment Name: At_Petals_P Parameter: Plant Line Value: WS
  misc_feature: MA Experiment 20000794 PARAMETER Experiment Name: At_Petals_P Parameter: Tissue Value: Petals vs. Whole plant
  misc_feature: MA Experiment ID: 20001248 Result: Up-regulated in Transcription
  misc_feature: MA Experiment 20001248 PARAMETER Experiment Name: At_Far-red-induction_P Parameter: Age (day) Value: 7
  misc_feature: MA Experiment 20001248 PARAMETER Experiment Name: At_Far-red-induction_P Parameter: Light Value: Far-red vs. White
  misc_feature: MA Experiment 20001248 PARAMETER Experiment Name: At_Far-red-induction_P Parameter: Organism Value: A. thaliana
  misc_feature: MA Experiment 20001248 PARAMETER Experiment Name: At_Far-red-induction_P Parameter: Plant Line Value: Columbia
  misc_feature: MA Experiment 20001248 PARAMETER Experiment Name: At_Far-red-induction_P Parameter: Timepoint (hr) Value: 4
  misc_feature: MA Experiment 20001248 PARAMETER Experiment Name: At_Far-red-induction_P Parameter: Tissue Value: Whole Plant
  misc_feature: MA Experiment ID: 20001451 Result: Down-regulated in Transcription
  misc_feature: MA Experiment 20001451 PARAMETER Experiment Name: At_Far-red-induction_P Parameter: Age (day) Value: 7
  misc_feature: MA Experiment 20001451 PARAMETER Experiment Name: At_Far-red-induction_P Parameter: Light Value: Far-red vs. White
  misc_feature: MA Experiment 20001451 PARAMETER Experiment Name: At_Far-red-induction_P Parameter: Organism Value: A. thaliana
  misc_feature: MA Experiment 20001451 PARAMETER Experiment Name: At_Far-red-induction_P Parameter: Plant Line Value: Columbia
  misc_feature: MA Experiment 20001451 PARAMETER Experiment Name: At_Far-red-induction_P Parameter: Timepoint (hr) Value: 24
  misc_feature: MA Experiment 20001451 PARAMETER Experiment Name: At_Far-red-induction_P Parameter: Tissue Value: Whole Plant
  misc_feature: MA Experiment ID: 20001554 Result: Down-regulated in Transcription
  misc_feature: MA Experiment 20001554 PARAMETER Experiment Name: At_Drought_Soil_Dry_P Parameter: Age (day) Value: 21
  misc_feature: MA Experiment 20001554 PARAMETER Experiment Name: At_Drought_Soil_Dry_P Parameter: Organism Value: A. thaliana
  misc_feature: MA Experiment 20001554 PARAMETER Experiment Name: At_Drought_Soil_Dry_P Parameter: Plant Line Value: WS
  misc_feature: MA Experiment 20001554 PARAMETER Experiment Name: At_Drought_Soil_Dry_P Parameter: Post Timepoint (hr) Value: None
  misc_feature: MA Experiment 20001554 PARAMETER Experiment Name: At_Drought_Soil_Dry_P Parameter: Post-Treatment Value: None
  misc_feature: MA Experiment 20001554 PARAMETER Experiment Name: At_Drought_Soil_Dry_P Parameter: Timepoint (day) Value: 7
  misc_feature: MA Experiment 20001554 PARAMETER Experiment Name: At_Drought_Soil_Dry_P Parameter: Treatment Value: Drought vs. No Drought
  misc_feature: MA Experiment ID: 20001555 Result: Down-regulated in Transcription
  misc_feature: MA Experiment 20001555 PARAMETER Experiment Name: At_Drought_Soil_Dry_P Parameter: Age (day) Value: 24
  misc_feature: MA Experiment 20001555 PARAMETER Experiment Name: At_Drought_Soil_Dry_P Parameter: Organism Value: A. thaliana
  misc_feature: MA Experiment 20001555 PARAMETER Experiment Name: At_Drought_Soil_Dry_P Parameter: Plant Line Value: WS
  misc_feature: MA Experiment 20001555 PARAMETER Experiment Name: At_Drought_Soil_Dry_P Parameter: Post Timepoint (hr) Value: None
  misc_feature: MA Experiment 20001555 PARAMETER Experiment Name: At_Drought_Soil_Dry_P Parameter: Post-Treatment Value: None
  misc_feature: MA Experiment 20001555 PARAMETER Experiment Name: At_Drought_Soil_Dry_P Parameter: Timepoint (day) Value: 10
  misc_feature: MA Experiment 20001555 PARAMETER Experiment Name: At_Drought_Soil_Dry_P Parameter: Treatment Value: Drought vs. No Drought
  misc_feature: MA Experiment ID: 20001556 Result: Down-regulated in Transcription
  misc_feature: MA Experiment 20001556 PARAMETER Experiment Name: At_Drought_Soil_Dry_P Parameter: Age (day) Value: 26
  misc_feature: MA Experiment 20001556 PARAMETER Experiment Name: At_Drought_Soil_Dry_P Parameter: Organism Value: A. thaliana
  misc_feature: MA Experiment 20001556 PARAMETER Experiment Name: At_Drought_Soil_Dry_P Parameter: Plant Line Value: WS
  misc_feature: MA Experiment 20001556 PARAMETER Experiment Name: At_Drought_Soil_Dry_P Parameter: Post Timepoint (hr) Value: None
  misc_feature: MA Experiment 20001556 PARAMETER Experiment Name: At_Drought_Soil_Dry_P Parameter: Post-Treatment Value: None
  misc_feature: MA Experiment 20001556 PARAMETER Experiment Name: At_Drought_Soil_Dry_P Parameter: Timepoint (day) Value: 12
  misc_feature: MA Experiment 20001556 PARAMETER Experiment Name: At_Drought_Soil_Dry_P Parameter: Treatment Value: Drought vs. No Drought
  misc_feature: MA Experiment ID: 20001558 Result: Down-regulated in Transcription
  misc_feature: MA Experiment 20001558 PARAMETER Experiment Name: At_Drought_Soil_Dry_P Parameter: Age (day) Value: 27
  misc_feature: MA Experiment 20001558 PARAMETER Experiment Name: At_Drought_Soil_Dry_P Parameter: Organism Value: A. thaliana
  misc_feature: MA Experiment 20001558 PARAMETER Experiment Name: At_Drought_Soil_Dry_P Parameter: Plant Line Value: WS
  misc_feature: MA Experiment 20001558 PARAMETER Experiment Name: At_Drought_Soil_Dry_P Parameter: Post Timepoint (hr) Value: 6
  misc_feature: MA Experiment 20001558 PARAMETER Experiment Name: At_Drought_Soil_Dry_P Parameter: Post-Treatment Value: Re-Water vs. No Drought
  misc_feature: MA Experiment 20001558 PARAMETER Experiment Name: At_Drought_Soil_Dry_P Parameter: Timepoint (day) Value: 13
  misc_feature: MA Experiment 20001558 PARAMETER Experiment Name: At_Drought_Soil_Dry_P Parameter: Treatment Value: Drought vs. No Drought
  misc_feature: MA Experiment ID: 20001904 Result: Down-regulated in Transcription
  misc_feature: MA Experiment 20001904 PARAMETER Experiment Name: At_Drought_Reproduction_P Parameter: Age (day) Value: 37
  misc_feature: MA Experiment 20001904 PARAMETER Experiment Name: At_Drought_Reproduction_P Parameter: Organism Value: A. thaliana
  misc_feature: MA Experiment 20001904 PARAMETER Experiment Name: At_Drought_Reproduction_P Parameter: Plant Line Value: WS
  misc_feature: MA Experiment 20001904 PARAMETER Experiment Name: At_Drought_Reproduction_P Parameter: Timepoint (day) Value: 7
  misc_feature: MA Experiment 20001904 PARAMETER Experiment Name: At_Drought_Reproduction_P Parameter: Tissue Value: Rosettes
  misc_feature: MA Experiment 20001904 PARAMETER Experiment Name: At_Drought_Reproduction_P Parameter: Treatment Value: Drought vs. No Drought
  misc_feature: MA Experiment ID: 20001905 Result: Down-regulated in Transcription
  misc_feature: MA Experiment 20001905 PARAMETER Experiment Name: At_Drought_Reproduction_P Parameter: Age (day) Value: 40
  misc_feature: MA Experiment 20001905 PARAMETER Experiment Name: At_Drought_Reproduction_P Parameter: Organism Value: A. thaliana
  misc_feature: MA Experiment 20001905 PARAMETER Experiment Name: At_Drought_Reproduction_P Parameter: Plant Line Value: WS
  misc_feature: MA Experiment 20001905 PARAMETER Experiment Name: At_Drought_Reproduction_P Parameter: Timepoint (day) Value: 10
  misc_feature: MA Experiment 20001905 PARAMETER Experiment Name: At_Drought_Reproduction_P Parameter: Tissue Value: Rosettes
  misc_feature: MA Experiment 20001905 PARAMETER Experiment Name: At_Drought_Reproduction_P Parameter: Treatment Value: Drought vs. No Drought
aaaaaagttcagatatttgataaatcaatcaacaaaacaaaaaaaactctatagttagtttctctgaaaatgtacggacagtgcaatatagaatccgactacgctttgttggagtcgataacacgtcacttgctaggaggaggaggagagaacgagctgcgactcaatgagtcaacaccgagttcgtgtttcacagagagttggggaggtttgccattgaaagagaatgattcagaggacatgttggtgtacggactcctcaaagatgccttccattttgacacgtcatcatcggacttgagctgtctttttgattttccggcggttaaagtcgagccaactgagaactttacggcgatggaggagaaaccaaagaaagcgataccggttacggagacggcagtgaaggcgaagcattacagaggagtgaggcagagaccgtgggggaaattcgcggcggagatacgtgatccggcgaagaatggagctagggtttggttagggacgtttgagacggcggaagatgcggctttagcttacgatatagctgcttttaggatgcgtggttcccgcgctttattgaattttccgttgagggttaattccggtgaacctgacccggttcggatcacgtctaagagatcttcttcgtcgtcgtcgtcgtcgtcctcttctacgtcgtcgtctgaaaacgggaagttgaaacgaaggagaaaagcagagaatctgacgtcggaggtggtgcaggtgaagtgtgaggttggtgatgagacacgtgttgatgagttattggtttcataagtttgatcttgtgtgttttgtagttgaatagttttgctataaatgttgaggcaccaagtaaaagtgttcccgtgatgtaaattagttactaaacagagccatatatcttcaatccataaacaaaatagacactttaataaagccgtgagtgttaatttttcc

SEQ ID NO: 26540 - protein, 243 aa, Arabidopsis thaliana
  peptide (1)..(243): Ceres Seq. ID no. 12439675
  misc_feature (114)..(179): Pfam Name: AP2 domain Pfam Description: AP2 domain
  misc_feature (40)..(243): Homolog of NCBI NO: 7489113 NR Description: DNA binding protein EREBP-2 - common tobacco
  misc_feature (40)..(216): Homolog of NCBI NO: 28274828 NR Description: ethylene response factor 1 [Lycopersicon
  misc_feature (40)..(242): Homolog of NCBI NO: 7489077 NR Description: transcription factor Pti4 - tomato (fragment)
  misc_feature (58)..(242): Homolog of NCBI NO: 18414897 NR Description: ethylene responsive element binding factor 1
  misc_feature (40)..(224): Homolog of NCBI NO: 7528276 NR Description: AP2-related transcription factor
  misc_feature (40)..(242): Homolog of NCBI NO: 25350257 NR Description: EREBP-2 protein [imported] - Arabidopsis thaliana
  misc_feature (40)..(242): Homolog of NCBI NO: 25350258 NR Description: ethylene responsive element binding factor 1
  misc_feature (40)..(242): Homolog of NCBI NO: 21264420 NR Description: Ethylene responsive element binding factor 1
  misc_feature (1)..(243): Homolog of NCBI NO: 21592595 NR Description: ethylene responsive element binding factor 2
  misc_feature (1)..(243): Homolog of NCBI NO: 15238041 NR Description: ethylene responsive element binding factor 2
MYGQCNIESDYALLESITRHLLGGGGENELRLNESTPSSCFTESWGGLPLKENDSEDMLVYGLLKDAFHFDTSSSDLSCLFDFPAVKVEPTENFTAMEEKPKKAIPVTETAVKAKHYRGVRQRPWGKFAAEIRDPAKNGARVWLGTFETAEDAALAYDIAAFRMRGSRALLNFPLRVNSGEPDPVRITSKRSSSSSSSSSSSTSSSENGKLKRRRKAENLTSEVVQVKCEVGDETRVDELLVS

SEQ ID NO: 26541 - protein, 186 aa, Arabidopsis thaliana
  peptide (1)..(186): Ceres Seq. ID no. 12439676
  misc_feature (57)..(122): Pfam Name: AP2 domain Pfam Description: AP2 domain
  misc_feature (1)..(186): Homolog of NCBI NO: 7489113 NR Description: DNA binding protein EREBP-2 - common tobacco
  misc_feature (1)..(159): Homolog of NCBI NO: 28274828 NR Description: ethylene response factor 1 [Lycopersicon
  misc_feature (1)..(185): Homolog of NCBI NO: 7489077 NR Description: transcription factor Pti4 - tomato (fragment)
  misc_feature (1)..(185): Homolog of NCBI NO: 18414897 NR Description: ethylene responsive element binding factor 1
  misc_feature (1)..(167): Homolog of NCBI NO: 7528276 NR Description: AP2-related transcription factor
  misc_feature (1)..(185): Homolog of NCBI NO: 25350257 NR Description: EREBP-2 protein [imported] - Arabidopsis thaliana
  misc_feature (1)..(185): Homolog of NCBI NO: 25350258 NR Description: ethylene responsive element binding factor 1
  misc_feature (1)..(185): Homolog of NCBI NO: 21264420 NR Description: Ethylene responsive element binding factor 1
  misc_feature (1)..(186): Homolog of NCBI NO: 21592595 NR Description: ethylene responsive element binding factor 2
  misc_feature (1)..(186): Homolog of NCBI NO: 15238041 NR Description: ethylene responsive element binding factor 2
MLVYGLLKDAFHFDTSSSDLSCLFDFPAVKVEPTENFTAMEEKPKKAIPVTETAVKAKHYRGVRQRPWGKFAAEIRDPAKNGARVWLGTFETAEDAALAYDIAAFRMRGSRALLNFPLRVNSGEPDPVRITSKRSSSSSSSSSSSTSSSENGKLKRRRKAENLTSEVVQVKCEVGDETRVDELLVS

SEQ ID NO: 26542 - protein, 147 aa, Arabidopsis thaliana
  peptide (1)..(147): Ceres Seq. ID no. 12439677
  misc_feature (18)..(83): Pfam Name: AP2 domain Pfam Description: AP2 domain
  misc_feature (1)..(147): Homolog of NCBI NO: 7489113 NR Description: DNA binding protein EREBP-2 - common tobacco
  misc_feature (1)..(120): Homolog of NCBI NO: 28274828 NR Description: ethylene response factor 1 [Lycopersicon
  misc_feature (1)..(146): Homolog of NCBI NO: 7489077 NR Description: transcription factor Pti4 - tomato (fragment)
  misc_feature (1)..(146): Homolog of NCBI NO: 18414897 NR Description: ethylene responsive element binding factor 1
  misc_feature (1)..(128): Homolog of NCBI NO: 7528276 NR Description: AP2-related transcription factor
  misc_feature (1)..(146): Homolog of NCBI NO: 25350258 NR Description: ethylene responsive element binding factor 1
  misc_feature (1)..(146): Homolog of NCBI NO: 25350257 NR Description: EREBP-2 protein [imported] - Arabidopsis thaliana
  misc_feature (1)..(146): Homolog of NCBI NO: 21264420 NR Description: Ethylene responsive element binding factor 1
  misc_feature (1)..(147): Homolog of NCBI NO: 21592595 NR Description: ethylene responsive element binding factor 2
  misc_feature (1)..(147): Homolog of NCBI NO: 15238041 NR Description: ethylene responsive element binding factor 2
MEEKPKKAIPVTETAVKAKHYRGVRQRPWGKFAAEIRDPAKNGARVWLGTFETAEDAALAYDIAAFRMRGSRALLNFPLRVNSGEPDPVRITSKRSSSSSSSSSSSTSSSENGKLKRRRKAENLTSEVVQVKCEVGDETRVDELLVS

SEQ ID NO: 26543 - DNA, 1561 bp, Arabidopsis thaliana
  misc_feature (1)..(1561): Ceres Seq. ID no. 13487736
  misc_feature: MA Experiment ID: 108595 Result: Down-regulated in Transcription
  misc_feature: MA Experiment 108595 PARAMETER Experiment Name: At_Ler-pi_Ovule_cDNA_P Parameter: Plant Line Value: null
tgtttgggctcaatttgggctctgtctgttatccacaaattaagagacgcaaacctaaaacgacgccgttccatagttttcctttgaagaagagagagacgtcacaaaggaaagcactcaatcgtcatttcctcggtatctcctcctcgaaagaagaatgcctggaattagaggtccttcggaatactcgcaggaaccacctcgtcacccttctctcaaggtcaacgccaaggaacctttcaacgccgagcctccccgctcggccttagtctcatcttatgtcactcccgtcgaccttttctacaagcgaaatcatggtcccatccccattgttgatcaccttcaaagctactccgtcacccttactggattgatccagaacccgagaaagctctttatcaaagacatcaggtccctcccaaagtacaatgttactgctactcttcagtgtgccggtaacagaaggactgccatgagcaaagttaggaatgttagaggtgttggatgggatgtttctgctattggcaacgctgtctggggtggggcgaaactggccgatgttcttgagcttgtggggataccaaagctgactgcttctaccaatttaggagccagacatgttgagttcgttagtgttgatcgctgtaaggaggaaaatgggggcccttataaggcgtcaatcactctaagtcaagccacaaatcctgaagcggatgttctactcgcttatgagatgaatggagagaccctgaacagggatcacggatttccgttaagggtggttgtccctggtgtgattggtgctcgttcggtcaaatggcttgattccatcaatgtcatcgctgaagaaagccagggattcttcatgcaaaaagattacaaaatgtttccaccctctgtcaattgggataatatcaactggtcctctaggagaccgcaaatggatttccctgttcagagtgcaatctgctctgtggaggatgtgcaaatggtgaagcctggaaaggtaagtatcaaaggatatgcggtttcaggaggtggacgcgggatagaaagagtggacatatccctggatggaggcaaaaactgggtggaagcttctagaacgcaggaaccaggaaagcagtacatctcagaacacagctccagtgacaaatgggcatgggtgttgtttgaagccaccattgatgtttcacagactacagaggtcatcgccaaagcggttgattcggcggcgaatgttcaaccggaaaatgtggagtcggtgtggaacctaagaggagttctcaacacttcgtggcaccgtgtccttctccggcttggccactctaacttgtagaccaagttaccactatgcgtctggtctctctttatcttttctttaagaactaaaacatccttgaatatgcttgtccttgtggatctgtgagagcaaaatactgtttatagttaaataaaatgggaaaacccatctgttgtcatgtggtggattataaattatttatttatatgatagaactgttattcactattatatattaatgaaatcatatggttgagc

SEQ ID NO: 26544 - protein, 393 aa, Arabidopsis thaliana
  peptide (1)..(393): Ceres Seq. ID no. 13487737
  misc_feature (3)..(237): Pfam Name: Oxidoreductase molybdopterin binding domain Pfam Description: Oxidoreductase molybdopterin binding domain
  misc_feature (2)..(384): Homolog of NCBI NO: 4557867 NR Description: SUOX gene product [Homo sapiens]
  misc_feature (1)..(384): Homolog of NCBI NO: 40254758 NR Description: sulfite oxidase [Rattus norvegicus]
  misc_feature (1)..(384): Homolog of NCBI NO: 586053 NR Description: Sulfite oxidase, mitochondrial precursor
  misc_feature (2)..(384): Homolog of NCBI NO: 30424565 NR Description: sulfite oxidase [Mus musculus]
  misc_feature (2)..(383): Homolog of NCBI NO: 86440 NR Description: sulfite oxidase (EC 1.8.3.1), hepatic - chicken
  misc_feature (2)..(383): Homolog of NCBI NO: 28558813 NR Description: Sulfite oxidase
  misc_feature (2)..(384): Homolog of NCBI NO: 3212610 NR Description: Chain A, Sulfite Oxidase From Chicken Liver
  misc_feature (1)..(387): Homolog of NCBI NO: 22759584 NR Description: Moco containing protein [Oryza sativa (japonica
  misc_feature (1)..(393): Homolog of NCBI NO: 6468008 NR Description: sulfite oxidase [Arabidopsis thaliana]
  misc_feature (1)..(393): Homolog of NCBI NO: 15232230 NR Description: sulfite oxidase, putative [Arabidopsis thaliana]
MPGIRGPSEYSQEPPRHPSLKVNAKEPFNAEPPRSALVSSYVTPVDLFYKRNHGPIPIVDHLQSYSVTLTGLIQNPRKLFIKDIRSLPKYNVTATLQCAGNRRTAMSKVRNVRGVGWDVSAIGNAVWGGAKLADVLELVGIPKLTASTNLGARHVEFVSVDRCKEENGGPYKASITLSQATNPEADVLLAYEMNGETLNRDHGFPLRVVVPGVIGARSVKWLDSINVIAEESQGFFMQKDYKMFPPSVNWDNINWSSRRPQMDFPVQSAICSVEDVQMVKPGKVSIKGYAVSGGGRGIERVDISLDGGKNWVEASRTQEPGKQYISEHSSSDKWAWVLFEATIDVSQTTEVIAKAVDSAANVQPENVESVWNLRGVLNTSWHRVLLRLGHSNL

SEQ ID NO: 26545 - protein, 288 aa, Arabidopsis thaliana
  peptide (1)..(288): Ceres Seq. ID no. 13487738
  misc_feature (1)..(132): Pfam Name: Oxidoreductase molybdopterin binding domain Pfam Description: Oxidoreductase molybdopterin binding domain
  misc_feature (1)..(279): Homolog of NCBI NO: 4557867 NR Description: SUOX gene product [Homo sapiens]
  misc_feature (1)..(279): Homolog of NCBI NO: 40254758 NR Description: sulfite oxidase [Rattus norvegicus]
  misc_feature (1)..(279): Homolog of NCBI NO: 586053 NR Description: Sulfite oxidase, mitochondrial precursor
  misc_feature (1)..(279): Homolog of NCBI NO: 30424565 NR Description: sulfite oxidase [Mus musculus]
  misc_feature (1)..(278): Homolog of NCBI NO: 86440 NR Description: sulfite oxidase (EC 1.8.3.1), hepatic - chicken
  misc_feature (1)..(278): Homolog of NCBI NO: 28558813 NR Description: Sulfite oxidase
  misc_feature (1)..(279): Homolog of NCBI NO: 3212610 NR Description: Chain A, Sulfite Oxidase From Chicken Liver
  misc_feature (1)..(282): Homolog of NCBI NO: 22759584 NR Description: Moco containing protein [Oryza sativa (japonica
  misc_feature (1)..(288): Homolog of NCBI NO: 6468008 NR Description: sulfite oxidase [Arabidopsis thaliana]
  misc_feature (1)..(288): Homolog of NCBI NO: 15232230 NR Description: sulfite oxidase, putative [Arabidopsis thaliana]
MSKVRNVRGVGWDVSAIGNAVWGGAKLADVLELVGIPKLTASTNLGARHVEFVSVDRCKEENGGPYKASITLSQATNPEADVLLAYEMNGETLNRDHGFPLRVVVPGVIGARSVKWLDSINVIAEESQGFFMQKDYKMFPPSVNWDNINWSSRRPQMDFPVQSAICSVEDVQMVKPGKVSIKGYAVSGGGRGIERVDISLDGGKNWVEASRTQEPGKQYISEHSSSDKWAWVLFEATIDVSQTTEVIAKAVDSAANVQPENVESVWNLRGVLNTSWHRVLLRLGHSNL

SEQ ID NO: 26546 - protein, 201 aa, Arabidopsis thaliana
  peptide (1)..(201): Ceres Seq. ID no. 13487739
  misc_feature (66)..(197): Pfam Name: Mo-co oxidoreductase dimerisation domain Pfam Description: Mo-co oxidoreductase dimerisation domain
  misc_feature (1)..(192): Homolog of NCBI NO: 30424565 NR Description: sulfite oxidase [Mus musculus]
  misc_feature (1)..(191): Homolog of NCBI NO: 86440 NR Description: sulfite oxidase (EC 1.8.3.1), hepatic - chicken
  misc_feature (1)..(191): Homolog of NCBI NO: 28558813 NR Description: Sulfite oxidase
  misc_feature (1)..(192): Homolog of NCBI NO: 3212610 NR Description: Chain A, Sulfite Oxidase From Chicken Liver
  misc_feature (1)..(192): Homolog of NCBI NO: 40254758 NR Description: sulfite oxidase [Rattus norvegicus]
  misc_feature (1)..(192): Homolog of NCBI NO: 586053 NR Description: Sulfite oxidase, mitochondrial precursor
  misc_feature (1)..(192): Homolog of NCBI NO: 4557867 NR Description: SUOX gene product [Homo sapiens]
  misc_feature (1)..(195): Homolog of NCBI NO: 22759584 NR Description: Moco containing protein [Oryza sativa (japonica
  misc_feature (1)..(201): Homolog of NCBI NO: 6468008 NR Description: sulfite oxidase [Arabidopsis thaliana]
  misc_feature (1)..(201): Homolog of NCBI NO: 15232230 NR Description: sulfite oxidase, putative [Arabidopsis thaliana]
MNGETLNRDHGFPLRVVVPGVIGARSVKWLDSINVIAEESQGFFMQKDYKMFPPSVNWDNINWSSRRPQMDFPVQSAICSVEDVQMVKPGKVSIKGYAVSGGGRGIERVDISLDGGKNWVEASRTQEPGKQYISEHSSSDKWAWVLFEATIDVSQTTEVIAKAVDSAANVQPENVESVWNLRGVLNTSWHRVLLRLGHSNL

SEQ ID NO: 26547 - DNA, 1224 bp, Arabidopsis thaliana
  misc_feature (1)..(1224): Ceres Seq. ID no. 12333229
  misc_feature: MA Experiment ID: 108434 Result: Down-regulated in Transcription
  misc_feature: MA Experiment 108434 PARAMETER Experiment Name: At_Root_Tips_cDNA_P Parameter: Tissue Value: Root Tips
  misc_feature: MA Experiment ID: 108463 Result: Up-regulated in Transcription
  misc_feature: MA Experiment 108463 PARAMETER Experiment Name: At_Germinating_Seeds_cDNA_P Parameter: Age (day) Value: 3 vs. 0
  misc_feature: MA Experiment 108463 PARAMETER Experiment Name: At_Germinating_Seeds_cDNA_P Parameter: Tissue Value: Germinating Seeds
  misc_feature: MA Experiment ID: 108464 Result: Up-regulated in Transcription
  misc_feature: MA Experiment 108464 PARAMETER Experiment Name: At_Germinating_Seeds_cDNA_P Parameter: Age (day) Value: 4 vs. 0
  misc_feature: MA Experiment 108464 PARAMETER Experiment Name: At_Germinating_Seeds_cDNA_P Parameter: Tissue Value: Germinating Seeds
  misc_feature: MA Experiment ID: 108569 Result: Up-regulated in Transcription
  misc_feature: MA Experiment 108569 PARAMETER Experiment Name: At_0.001%_MeJA__cDNA_P Parameter: Timepoint (hr) Value: 6
  misc_feature: MA Experiment 108569 PARAMETER Experiment Name: At_0.001%_MeJA__cDNA_P Parameter: Tissue Value: Aerial
  misc_feature: MA Experiment 108569 PARAMETER Experiment Name: At_0.001%_MeJA__cDNA_P Parameter: Treatment Value: 0.001% MeJA vs. No Treatment
  misc_feature: MA Experiment ID: 108572 Result: Up-regulated in Transcription
  misc_feature: MA Experiment 108572 PARAMETER Experiment Name: At_Drought_cDNA_P Parameter: Timepoint (hr) Value: 1
  misc_feature: MA Experiment 108572 PARAMETER Experiment Name: At_Drought_cDNA_P Parameter: Tissue Value: Aerial
  misc_feature: MA Experiment 108572 PARAMETER Experiment Name: At_Drought_cDNA_P Parameter: Treatment Value: Drought vs. No Drought
  misc_feature: MA Experiment ID: 108573 Result: Up-regulated in Transcription
  misc_feature: MA Experiment 108573 PARAMETER Experiment Name: At_Drought_cDNA_P Parameter: Timepoint (hr) Value: 6
  misc_feature: MA Experiment 108573 PARAMETER Experiment Name: At_Drought_cDNA_P Parameter: Tissue Value: Aerial
  misc_feature: MA Experiment 108573 PARAMETER Experiment Name: At_Drought_cDNA_P Parameter: Treatment Value: Drought vs. No Drought
  misc_feature: MA Experiment ID: 108574 Result: Up-regulated in Transcription
  misc_feature: MA Experiment 108574 PARAMETER Experiment Name: At_Wounding__cDNA_P Parameter: Timepoint (hr) Value: 1
  misc_feature: MA Experiment 108574 PARAMETER Experiment Name: At_Wounding__cDNA_P Parameter: Tissue Value: Aerial
  misc_feature: MA Experiment 108574 PARAMETER Experiment Name: At_Wounding__cDNA_P Parameter: Treatment Value: Wounding vs. No Wounding
  misc_feature: MA Experiment ID: 108585 Result: Up-regulated in Transcription
  misc_feature: MA Experiment 108585 PARAMETER Experiment Name: At_5mM_NaNP_cDNA_P Parameter: Timepoint (hr) Value: 6
  misc_feature: MA Experiment 108585 PARAMETER Experiment Name: At_5mM_NaNP_cDNA_P Parameter: Tissue Value: Aerial
  misc_feature: MA Experiment 108585 PARAMETER Experiment Name: At_5mM_NaNP_cDNA_P Parameter: Treatment Value: null
  misc_feature: MA Experiment ID: 20000071 Result: Up-regulated in Transcription
  misc_feature: MA Experiment 20000071 PARAMETER Experiment Name: At_100uM_ABA_Mutants_cDNA_P Parameter: Plant Line Value: CS8104
  misc_feature: MA Experiment 20000071 PARAMETER Experiment Name: At_100uM_ABA_Mutants_cDNA_P Parameter: Timepoint (hr) Value: 6
  misc_feature: MA Experiment 20000071 PARAMETER Experiment Name: At_100uM_ABA_Mutants_cDNA_P Parameter: Tissue Value: Aerial
  misc_feature: MA Experiment 20000071 PARAMETER Experiment Name: At_100uM_ABA_Mutants_cDNA_P Parameter: Treatment Value: 100uM ABA vs. No Treatment
  misc_feature: MA Experiment ID: 20000113 Result: Up-regulated in Transcription
  misc_feature: MA Experiment 20000113 PARAMETER Experiment Name: At_42deg_Heat_cDNA_P Parameter: Temperature (deg C) Value: 42 vs. 22
  misc_feature: MA Experiment 20000113 PARAMETER Experiment Name: At_42deg_Heat_cDNA_P Parameter: Timepoint (hr) Value: 8
  misc_feature: MA Experiment 20000113 PARAMETER Experiment Name: At_42deg_Heat_cDNA_P Parameter: Tissue Value: Aerial
  misc_feature: MA Experiment ID: 20000185 Result: Down-regulated in Transcription
  misc_feature: MA Experiment 20000185 PARAMETER Experiment Name: At_Roots__P Parameter: Age (day) Value: 7 vs. 21
  misc_feature: MA Experiment 20000185 PARAMETER Experiment Name: At_Roots__P Parameter: Organism Value: A. thaliana
  misc_feature: MA Experiment 20000185 PARAMETER Experiment Name: At_Roots__P Parameter: Tissue Value: Roots vs. Whole Plant
  misc_feature: MA Experiment ID: 20000211 Result: Up-regulated in Transcription
  misc_feature: MA Experiment 20000211 PARAMETER Experiment Name: At_0.001percent_MeJA__P Parameter: Age (day) Value: 14
  misc_feature: MA Experiment 20000211 PARAMETER Experiment Name: At_0.001percent_MeJA__P Parameter: Organism Value: A. thaliana
  misc_feature: MA Experiment 20000211 PARAMETER Experiment Name: At_0.001percent_MeJA__P Parameter: Plant Line Value: WS
  misc_feature: MA Experiment 20000211 PARAMETER Experiment Name: At_0.001percent_MeJA__P Parameter: Timepoint (hr) Value: 1
  misc_feature: MA Experiment 20000211 PARAMETER Experiment Name: At_0.001percent_MeJA__P Parameter: Tissue Value: Aerial
  misc_feature: MA Experiment 20000211 PARAMETER Experiment Name: At_0.001percent_MeJA__P Parameter: Treatment Value: 0.001percent MeJA vs. No Treatment
  misc_feature: MA Experiment ID: 20000227 Result: Down-regulated in Transcription
  misc_feature: MA Experiment 20000227 PARAMETER Experiment Name: At_Root-Tips-vs-Tops_P Parameter: Tissue Value: Root Tips vs. Root Tops
  misc_feature: MA Experiment ID: 20000234 Result: Down-regulated in Transcription
  misc_feature: MA Experiment 20000234 PARAMETER Experiment Name: At_Siliques_P Parameter: Age (day) Value: 21
  misc_feature: MA Experiment 20000234 PARAMETER Experiment Name: At_Siliques_P Parameter: Organism Value: A. thaliana
  misc_feature: MA Experiment 20000234 PARAMETER Experiment Name: At_Siliques_P Parameter: Plant Line Value: WS
  misc_feature: MA Experiment 20000234 PARAMETER Experiment Name: At_Siliques_P Parameter: Tissue Value: Less Than 5mm Siliques vs. Whole Plant
  misc_feature: MA Experiment ID: 20000438 Result: Down-regulated in Transcription
  misc_feature: MA Experiment 20000438 PARAMETER Experiment Name: At_Shoots__P Parameter: Age (day) Value: 14
  misc_feature: MA Experiment 20000438 PARAMETER Experiment Name: At_Shoots__P Parameter: Tissue Value: Shoots vs. Whole Plant
  misc_feature: MA Experiment ID: 20000495 Result: Down-regulated in Transcription
  misc_feature: MA Experiment 20000495 PARAMETER Experiment Name: At_Guard_Cells_P Parameter: Harvest Date Value: 8/2/2002
  misc_feature: MA Experiment 20000495 PARAMETER Experiment Name: At_Guard_Cells_P Parameter: Organism Value: A. thaliana
  misc_feature: MA Experiment 20000495 PARAMETER Experiment Name: At_Guard_Cells_P Parameter: Tissue Value: Guard Cells vs. Leaves
  misc_feature: MA Experiment ID: 20001451 Result: Down-regulated in Transcription
  misc_feature: MA Experiment 20001451 PARAMETER Experiment Name: At_Far-red-induction_P Parameter: Age (day) Value: 7
  misc_feature: MA Experiment 20001451 PARAMETER Experiment Name: At_Far-red-induction_P Parameter: Light Value: Far-red vs. White
  misc_feature: MA Experiment 20001451 PARAMETER Experiment Name: At_Far-red-induction_P Parameter: Organism Value: A. thaliana
  misc_feature: MA Experiment 20001451 PARAMETER Experiment Name: At_Far-red-induction_P Parameter: Plant Line Value: Columbia
  misc_feature: MA Experiment 20001451 PARAMETER Experiment Name: At_Far-red-induction_P Parameter: Timepoint (hr) Value: 24
  misc_feature: MA Experiment 20001451 PARAMETER Experiment Name: At_Far-red-induction_P Parameter: Tissue Value: Whole Plant
  misc_feature: MA Experiment ID: 20001905 Result: Up-regulated in Transcription
  misc_feature: MA Experiment 20001905 PARAMETER Experiment Name: At_Drought_Reproduction_P Parameter: Age (day) Value: 40
  misc_feature: MA Experiment 20001905 PARAMETER Experiment Name: At_Drought_Reproduction_P Parameter: Organism Value: A. thaliana
  misc_feature: MA Experiment 20001905 PARAMETER Experiment Name: At_Drought_Reproduction_P Parameter: Plant Line Value: WS
  misc_feature: MA Experiment 20001905 PARAMETER Experiment Name: At_Drought_Reproduction_P Parameter: Timepoint (day) Value: 10
  misc_feature: MA Experiment 20001905 PARAMETER Experiment Name: At_Drought_Reproduction_P Parameter: Tissue Value: Rosettes
  misc_feature: MA Experiment 20001905 PARAMETER Experiment Name: At_Drought_Reproduction_P Parameter: Treatment Value: Drought vs. No Drought
aaaacgcacttggcagagaaagataaacaagaaccctaagtttttttataagattcgagaaaattcaacaactcaggaaggaagatccttttgctccaatttctcaatcgaaacgatttcaatttcggtttcaacgatgtcgagtttttctgccgagtgttgggacttctctggtcgtaaaccgagcttttcacaaacatgtactcgattgagtcgttacctgaaggagaagggtagttttggagatctgagcttagggatgacatgcaagcccgacgttaatggaggttcacgtcagcctacaatgatgaatctgttcccttgtgaagcttcaggaatggattcttctgctggtcaagaagacattaaaccgaagactatgtttccgagacaatcaagcttttcttcttcctcttcctctgggaccaaagaagatgtacagatgatcaaagagactactaaatctgtgaagccagagtctcaatctgctccgttgactatattctacggtggtcgagttatggtgtttgatgatttttctgctgagaaagctaaagaagtcattgatttggctaacaaaggaagtgccaaaagcttcacatgtttcacagctgaagtaaacaataaccatagtgcttattctcaaaaagagattgcttctagcccaaatcctgtttgtagtcctgcaaaaaccgcagcacaagagccaattcagcctaacccggcctctttagcctgcgaactcccgattgcaagaagagcttcacttcatcggttccttgagaagaggaaggataggatcacatcaaaggcaccataccaaatagacggttcagctgaagcgtcttccaagcctactaacccagcttggctcagttcacggtaaacttcgagcctgtccgacccagaaggcacaacttgagagaccttcttgtaagattcttctgatgctccatcgttacaaatatcaagctgctcctctgttcattttttctatagattaatttcacccctagtagttttgtttgtttaactcccccgaaaactcattatatttgtatgaaatcaatatcaatagtgttcaatgtttgcttctggggtttaagttttagccagtgtgtataaccctttcctctgccgatctcaacattagcttgcaacttttgtaagaaacatcacttgtgtttttgtgttgatggccattaatataatccaagtttattt

SEQ ID NO: 26548 - protein, 294 aa, Arabidopsis thaliana
  peptide (1)..(294): Ceres Seq. ID no. 12333230
  misc_feature (158)..(193): Pfam Name: ZIM motif Pfam Description: ZIM motif
  misc_feature (136)..(288): Homolog of NCBI NO: 18394473 NR Description: expressed protein
  misc_feature (46)..(92): Homolog of NCBI NO: 21593242 NR Description: unknown [Arabidopsis thaliana]
  misc_feature (136)..(288): Homolog of NCBI NO: 21593242 NR Description: unknown [Arabidopsis thaliana]
  misc_feature (114)..(282): Homolog of NCBI NO: 29788814 NR Description: unknown protein [Oryza sativa (japonica
  misc_feature (60)..(288): Homolog of NCBI NO: 18410088 NR Description: expressed protein
  misc_feature (46)..(209): Homolog of NCBI NO: 16604489 NR Description: At1g19180/T29M8_5 [Arabidopsis thaliana]
  misc_feature (46)..(291): Homolog of NCBI NO: 21593416 NR Description: unknown [Arabidopsis thaliana]
  misc_feature (46)..(291): Homolog of NCBI NO: 18394706 NR Description: expressed protein
  misc_feature (46)..(294): Homolog of NCBI NO: 21592605 NR Description: unknown [Arabidopsis thaliana]
  misc_feature (46)..(294): Homolog of NCBI NO: 18410737 NR Description: expressed protein
KRTWQRKINKNPKFFYKIRENSTTQEGRSFCSNFSIETISISVSTMSSFSAECWDFSGRKPSFSQTCTRLSRYLKEKGSFGDLSLGMTCKPDVNGGSRQPTMMNLFPCEASGMDSSAGQEDIKPKTMFPRQSSFSSSSSSGTKEDVQMIKETTKSVKPESQSAPLTIFYGGRVMVFDDFSAEKAKEVIDLANKGSAKSFTCFTAEVNNNHSAYSQKEIASSPNPVCSPAKTAAQEPIQPNPASLACELPIARRASLHRFLEKRKDRITSKAPYQIDGSAEASSKPTNPAWLSSR

SEQ ID NO: 26549 - protein, 249 aa, Arabidopsis thaliana
  peptide (1)..(249): Ceres Seq. ID no. 12333231
  misc_feature (113)..(148): Pfam Name: ZIM motif Pfam Description: ZIM motif
  misc_feature (91)..(243): Homolog of NCBI NO: 18394473 NR Description: expressed protein
  misc_feature (1)..(47): Homolog of NCBI NO: 21593242 NR Description: unknown [Arabidopsis thaliana]
  misc_feature (91)..(243): Homolog of NCBI NO: 21593242 NR Description: unknown [Arabidopsis thaliana]
  misc_feature (69)..(237): Homolog of NCBI NO: 29788814 NR Description: unknown protein [Oryza sativa (japonica
  misc_feature (15)..(243): Homolog of NCBI NO: 18410088 NR Description: expressed protein
  misc_feature (1)..(164): Homolog of NCBI NO: 16604489 NR Description: At1g19180/T29M8_5 [Arabidopsis thaliana]
  misc_feature (1)..(246): Homolog of NCBI NO: 21593416 NR Description: unknown [Arabidopsis thaliana]
  misc_feature (1)..(246): Homolog of NCBI NO: 18394706 NR Description: expressed protein
  misc_feature (1)..(249): Homolog of NCBI NO: 21592605 NR Description: unknown [Arabidopsis thaliana]
  misc_feature (1)..(249): Homolog of NCBI NO: 18410737 NR Description: expressed protein
MSSFSAECWDFSGRKPSFSQTCTRLSRYLKEKGSFGDLSLGMTCKPDVNGGSRQPTMMNLFPCEASGMDSSAGQEDIKPKTMFPRQSSFSSSSSSGTKEDVQMIKETTKSVKPESQSAPLTIFYGGRVMVFDDFSAEKAKEVIDLANKGSAKSFTCFTAEVNNNHSAYSQKEIASSPNPVCSPAKTAAQEPIQPNPASLACELPIARRASLHRFLEKRKDRITSKAPYQIDGSAEASSKPTNPAWLSSR

SEQ ID NO: 26550 - protein, 208 aa, Arabidopsis thaliana
  peptide (1)..(208): Ceres Seq. ID no. 12333232
  misc_feature (72)..(107): Pfam Name: ZIM motif Pfam Description: ZIM motif
  misc_feature (1)..(72): Homolog of NCBI NO: 12247470 NR Description: PnFL-2 [Ipomoea nil]
  misc_feature (50)..(202): Homolog of NCBI NO: 18394473 NR Description: expressed protein
  misc_feature (50)..(202): Homolog of NCBI NO: 21593242 NR Description: unknown [Arabidopsis thaliana]
  misc_feature (28)..(196): Homolog of NCBI NO: 29788814 NR Description: unknown protein [Oryza sativa (japonica
  misc_feature (1)..(202): Homolog of NCBI NO: 18410088 NR Description: expressed protein
  misc_feature (1)..(123): Homolog of NCBI NO: 16604489 NR Description: At1g19180/T29M8_5 [Arabidopsis thaliana]
  misc_feature (1)..(205): Homolog of NCBI NO: 21593416 NR Description: unknown [Arabidopsis thaliana]
  misc_feature (1)..(205): Homolog of NCBI NO: 18394706 NR Description: expressed protein
  misc_feature (1)..(208): Homolog of NCBI NO: 21592605 NR Description: unknown [Arabidopsis thaliana]
  misc_feature (1)..(208): Homolog of NCBI NO: 18410737 NR Description: expressed protein
MTCKPDVNGGSRQPTMMNLFPCEASGMDSSAGQEDIKPKTMFPRQSSFSSSSSSGTKEDVQMIKETTKSVKPESQSAPLTIFYGGRVMVFDDFSAEKAKEVIDLANKGSAKSFTCFTAEVNNNHSAYSQKEIASSPNPVCSPAKTAAQEPIQPNPASLACELPIARRASLHRFLEKRKDRITSKAPYQIDGSAEASSKPTNPAWLSSR

SEQ ID NO: 26551 - DNA, 1476 bp, Arabidopsis thaliana
  misc_feature (1)..(1476): Ceres Seq. ID no. 12384697
  misc_feature: MA Experiment ID: 108577 Result: Down-regulated in Transcription
  misc_feature: MA Experiment 108577 PARAMETER Experiment Name: At_42deg_Heat_cDNA_P Parameter: Temperature (deg C) Value: 42 vs. 22
  misc_feature: MA Experiment 108577 PARAMETER Experiment Name: At_42deg_Heat_cDNA_P Parameter: Timepoint (hr) Value: 6
  misc_feature: MA Experiment 108577 PARAMETER Experiment Name: At_42deg_Heat_cDNA_P Parameter: Tissue Value: Aerial
  misc_feature: MA Experiment ID: 108595 Result: Down-regulated in Transcription
  misc_feature: MA Experiment 108595 PARAMETER Experiment Name: At_Ler-pi_Ovule_cDNA_P Parameter: Plant Line Value: null
  misc_feature: MA Experiment ID: 20000111 Result: Down-regulated in Transcription
  misc_feature: MA Experiment 20000111 PARAMETER Experiment Name: At_42deg_Heat_cDNA_P Parameter: Temperature (deg C) Value: 42 vs. 22
  misc_feature: MA Experiment 20000111 PARAMETER Experiment Name: At_42deg_Heat_cDNA_P Parameter: Timepoint (hr) Value: 6
  misc_feature: MA Experiment 20000111 PARAMETER Experiment Name: At_42deg_Heat_cDNA_P Parameter: Tissue Value: Aerial
  misc_feature: MA Experiment ID: 20000113 Result: Down-regulated in Transcription
  misc_feature: MA Experiment 20000113 PARAMETER Experiment Name: At_42deg_Heat_cDNA_P Parameter: Temperature (deg C) Value: 42 vs. 22
  misc_feature: MA Experiment 20000113 PARAMETER Experiment Name: At_42deg_Heat_cDNA_P Parameter: Timepoint (hr) Value: 8
  misc_feature: MA Experiment 20000113 PARAMETER Experiment Name: At_42deg_Heat_cDNA_P Parameter: Tissue Value: Aerial
  misc_feature: MA Experiment ID: 20000185 Result: Up-regulated in Transcription
  misc_feature: MA Experiment 20000185 PARAMETER Experiment Name: At_Roots__P Parameter: Age (day) Value: 7 vs. 21
  misc_feature: MA Experiment 20000185 PARAMETER Experiment Name: At_Roots__P Parameter: Organism Value: A. thaliana
  misc_feature: MA Experiment 20000185 PARAMETER Experiment Name: At_Roots__P Parameter: Tissue Value: Roots vs. Whole Plant
aattgaaatcatttcgttgtgttttagaacaacaacaaaaaaacagtgccctttcgctcacgctttgagtcgtatctgctctcttcttaatccgccgtctctcactttttcgccggcgtggttagatcgtacaaagctcagagagaatgttgggaatcttgaggcaaagagccatcgatggagcttcgactcttaggaggacgcgattcgcattggtttctgctaggagctatgcagctggtgcaaaagagatgacagtcagagatgctctaaattctgcaattgatgaggaaatgtctgctgatcctaaagtatttgtcatgggtgaagaggttggccaatatcaaggtgcctacaagatcactaaaggccttttggagaaatatggtcctgagagagtttacgatacccctattactgaggctggatttactggaattggagttggtgctgcctatgctggcttaaagcccgttgtagaatttatgacgtttaacttctctatgcaggcaattgatcatatcatcaattccgctgcaaagtcaaattacatgtctgctggacagataaatgtacccatcgtctttagaggacccaatggtgctgctgctggtgttggagctcaacattctcagtgctatgcagcgtggtatgcctcagttcctggtttgaaagtccttgctccgtattcagctgaagatgctcgtggtcttcttaaagctgccattagagaccctgaccctgttgtcttccttgaaaacgagttactatatggtgaatcattccctatttcagaagaagcccttgattcaagtttctgtcttcccataggcaaagccaagattgaacgagaaggaaaggacgtaacgatagtaactttctcgaagatggtcggtttcgccctcaaggcagctgagaagctcgcagaagagggaataagtgctgaggtaataaatcttcgatcaatccgtccgcttgaccgagccaccatcaatgcttcagtgaggaaaacgagtagattggtaacagttgaagaaggtttcccacaacatggagtctgtgcagaaatttgtgcgtcggttgtagaagagagcttttcgtacttggatgcaccggtcgagaggattgcaggagctgatgttccaatgccgtatgcagctaacctagagagattggctcttcctcagatagaggacatcgttcgtgcatcaaagagagcttgttacagatcgaaataaaatcgtcaacatcaacacatttcttctttgatctttaaagggaaaggaaaataagaaaaaaggagaaaaatgatctctctgtctctcacttttgctataagaaaccaccattcctcgtgatttatttcatcttttgctattattctttactgcagcggttttcgtttttctttttgtcccttcccaaattgataattctaatctttggggttaattgataaaaattgatcgagaatgc

SEQ ID NO: 26552 - protein, 363 aa, Arabidopsis thaliana
  peptide (1)..(363): Ceres Seq. ID no. 12384698
  misc_feature (229)..(351): Pfam Name: Transketolase, C-terminal domain Pfam Description: Transketolase, C-terminal domain
  misc_feature (21)..(363): Homolog of NCBI NO: 28829918 NR Description: similar to Arabidopsis thaliana (Mouse-ear
  misc_feature (4)..(355): Homolog of NCBI NO: 25012844 NR Description: RH05604p [Drosophila melanogaster]
  misc_feature (4)..(355): Homolog of NCBI NO: 21358145 NR Description: CG11876-PD [Drosophila melanogaster]
  misc_feature (1)..(362): Homolog of NCBI NO: 1709454 NR Description: Pyruvate dehydrogenase E1 component beta subunit,
  misc_feature (1)..(362): Homolog of NCBI NO: 3851003 NR Description: pyruvate dehydrogenase E1 beta subunit isoform 3
  misc_feature (1)..(362): Homolog of NCBI NO: 3851001 NR Description: pyruvate dehydrogenase E1 beta subunit isoform 2
  misc_feature (1)..(362): Homolog of NCBI NO: 3850999 NR Description: pyruvate dehydrogenase E1 beta subunit isoform 1
  misc_feature (1)..(362): Homolog of NCBI NO: 38175533 NR Description: putative pyruvate dehydrogenase E1 beta subunit
  misc_feature (1)..(363): Homolog of NCBI NO: 520478 NR Description: pyruvate dehydrogenase E1 beta subunit
  misc_feature (1)..(363): Homolog of NCBI NO: 15241286 NR Description: pyruvate dehydrogenase E1 component beta subunit,
MLGILRQRAIDGASTLRRTRFALVSARSYAAGAKEMTVRDALNSAIDEEMSADPKVFVMGEEVGQYQGAYKITKGLLEKYGPERVYDTPITEAGFTGIGVGAAYAGLKPVVEFMTFNFSMQAIDHIINSAAKSNYMSAGQINVPIVFRGPNGAAAGVGAQHSQCYAAWYASVPGLKVLAPYSAEDARGLLKAAIRDPDPVVFLENELLYGESFPISEEALDSSFCLPIGKAKIEREGKDVTIVTFSKMVGFALKAAEKLAEEGISAEVINLRSIRPLDRATINASVRKTSRLVTVEEGFPQHGVCAEICASVVEESFSYLDAPVERIAGADVPMPYAANLERLALPQIEDIVRASKRACYRSK

SEQ ID NO: 26553 - protein, 328 aa, Arabidopsis thaliana
  peptide (1)..(328): Ceres Seq. ID no. 12384699
  misc_feature (194)..(316): Pfam Name: Transketolase, C-terminal domain Pfam Description: Transketolase, C-terminal domain
  misc_feature (1)..(328): Homolog of NCBI NO: 28829918 NR Description: similar to Arabidopsis thaliana (Mouse-ear
  misc_feature (1)..(320): Homolog of NCBI NO: 25012844 NR Description: RH05604p [Drosophila melanogaster]
  misc_feature (1)..(320): Homolog of NCBI NO: 21358145 NR Description: CG11876-PD [Drosophila melanogaster]
  misc_feature (1)..(327): Homolog of NCBI NO: 1709454 NR Description: Pyruvate dehydrogenase E1 component beta subunit,
  misc_feature (1)..(327): Homolog of NCBI NO: 3851003 NR Description: pyruvate dehydrogenase E1 beta subunit isoform 3
  misc_feature (1)..(327): Homolog of NCBI NO: 3851001 NR Description: pyruvate dehydrogenase E1 beta subunit isoform 2
  misc_feature (1)..(327): Homolog of NCBI NO: 3850999 NR Description: pyruvate dehydrogenase E1 beta subunit isoform 1
  misc_feature (1)..(327): Homolog of NCBI NO: 38175533 NR Description: putative pyruvate dehydrogenase E1 beta subunit
  misc_feature (1)..(328): Homolog of NCBI NO: 520478 NR Description: pyruvate dehydrogenase E1 beta subunit
  misc_feature (1)..(328): Homolog of NCBI NO: 15241286 NR Description: pyruvate dehydrogenase E1 component beta subunit,
MTVRDALNSAIDEEMSADPKVFVMGEEVGQYQGAYKITKGLLEKYGPERVYDTPITEAGFTGIGVGAAYAGLKPVVEFMTFNFSMQAIDHIINSAAKSNYMSAGQINVPIVFRGPNGAAAGVGAQHSQCYAAWYASVPGLKVLAPYSAEDARGLLKAAIRDPDPVVFLENELLYGESFPISEEALDSSFCLPIGKAKIEREGKDVTIVTFSKMVGFALKAAEKLAEEGISAEVINLRSIRPLDRATINASVRKTSRLVTVEEGFPQHGVCAEICASVVEESFSYLDAPVERIAGADVPMPYAANLERLALPQIEDIVRASKRACYRSK

SEQ ID NO: 26554 - protein, 314 aa, Arabidopsis thaliana
  peptide (1)..(314): Ceres Seq. ID no. 12384700
  misc_feature (180)..(302): Pfam Name: Transketolase, C-terminal domain Pfam Description: Transketolase, C-terminal domain
  misc_feature (1)..(314): Homolog of NCBI NO: 28829918 NR Description: similar to Arabidopsis thaliana (Mouse-ear
  misc_feature (1)..(306): Homolog of NCBI NO: 25012844 NR Description: RH05604p [Drosophila melanogaster]
  misc_feature (1)..(306): Homolog of NCBI NO: 21358145 NR Description: CG11876-PD [Drosophila melanogaster]
  misc_feature (1)..(313): Homolog of NCBI NO: 1709454 NR Description: Pyruvate dehydrogenase E1 component beta subunit,
  misc_feature (1)..(313): Homolog of NCBI NO: 3851003 NR Description: pyruvate dehydrogenase E1 beta subunit isoform 3
  misc_feature (1)..(313): Homolog of NCBI NO: 3851001 NR Description: pyruvate dehydrogenase E1 beta subunit isoform 2
  misc_feature (1)..(313): Homolog of NCBI NO: 3850999 NR Description: pyruvate dehydrogenase E1 beta subunit isoform 1
  misc_feature (1)..(313): Homolog of NCBI NO: 38175533 NR Description: putative pyruvate dehydrogenase E1 beta subunit
  misc_feature (1)..(314): Homolog of NCBI NO: 520478 NR Description: pyruvate dehydrogenase E1 beta subunit
  misc_feature (1)..(314): Homolog of NCBI NO: 15241286 NR Description: pyruvate dehydrogenase E1 component beta subunit,
MSADPKVFVMGEEVGQYQGAYKITKGLLEKYGPERVYDTPITEAGFTGIGVGAAYAGLKPVVEFMTFNFSMQAIDHIINSAAKSNYMSAGQINVPIVFRGPNGAAAGVGAQHSQCYAAWYASVPGLKVLAPYSAEDARGLLKAAIRDPDPVVFLENELLYGESFPISEEALDSSFCLPIGKAKIEREGKDVTIVTFSKMVGFALKAAEKLAEEGISAEVINLRSIRPLDRATINASVRKTSRLVTVEEGFPQHGVCAEICASVVEESFSYLDAPVERIAGADVPMPYAANLERLALPQIEDIVRASKRACYRSK

SEQ ID NO: 26555 - DNA, 1430 bp, Arabidopsis thaliana
  misc_feature (1)..(1430): Ceres Seq. ID no. 13499596
  misc_feature: MA Experiment ID: 108573 Result: Down-regulated in Transcription
  misc_feature: MA Experiment 108573 PARAMETER Experiment Name: At_Drought_cDNA_P Parameter: Timepoint (hr) Value: 6
  misc_feature: MA Experiment 108573 PARAMETER Experiment Name: At_Drought_cDNA_P Parameter: Tissue Value: Aerial
  misc_feature: MA Experiment 108573 PARAMETER Experiment Name: At_Drought_cDNA_P Parameter: Treatment Value: Drought vs. No Drought
  misc_feature: MA Experiment ID: 20000184 Result: Down-regulated in Transcription
  misc_feature: MA Experiment 20000184 PARAMETER Experiment Name: At_Shoots__P Parameter: Age (day) Value: 7
  misc_feature: MA Experiment 20000184 PARAMETER Experiment Name: At_Shoots__P Parameter: Tissue Value: Shoots vs. Whole Plant
  misc_feature: MA Experiment ID: 20001558 Result: Up-regulated in Transcription
  misc_feature: MA Experiment 20001558 PARAMETER Experiment Name: At_Drought_Soil_Dry_P Parameter: Age (day) Value: 27
  misc_feature: MA Experiment 20001558 PARAMETER Experiment Name: At_Drought_Soil_Dry_P Parameter: Organism Value: A. thaliana
  misc_feature: MA Experiment 20001558 PARAMETER Experiment Name: At_Drought_Soil_Dry_P Parameter: Plant Line Value: WS
  misc_feature: MA Experiment 20001558 PARAMETER Experiment Name: At_Drought_Soil_Dry_P Parameter: Post Timepoint (hr) Value: 6
  misc_feature: MA Experiment 20001558 PARAMETER Experiment Name: At_Drought_Soil_Dry_P Parameter: Post-Treatment Value: Re-Water vs. No Drought
  misc_feature: MA Experiment 20001558 PARAMETER Experiment Name: At_Drought_Soil_Dry_P Parameter: Timepoint (day) Value: 13
  misc_feature: MA Experiment 20001558 PARAMETER Experiment Name: At_Drought_Soil_Dry_P Parameter: Treatment Value: Drought vs. No Drought
  misc_feature: Phenotype: ROSETTE LEAVES Other
  misc_feature: Phenotype: WHOLE PLANT Color-Dark Green
  misc_feature: Phenotype: INFLORESCENCE Branching-Reduced Apical Dominance
  misc_feature: Phenotype: INFLORESCENCE Flowering Time-Late Flowering
  misc_feature: Phenotype: INFLORESCENCE Other
  misc_feature: Phenotype: WHOLE PLANT Color-Dark Green
  misc_feature: Phenotype: WHOLE PLANT Size-Small
  misc_feature: Phenotype: INFLORESCENCE Branching-Reduced Apical Dominance
  misc_feature: Phenotype: INFLORESCENCE Flowering Time-Late Flowering
  misc_feature: Phenotype: INFLORESCENCE Other
  misc_feature: Phenotype: FERTILITY Fertility-Reduced
  misc_feature: Phenotype: INFLORESCENCE Branching-Reduced Apical Dominance
  misc_feature: Phenotype: INFLORESCENCE Other
  misc_feature: Phenotype: FERTILITY Fertility-Reduced
  misc_feature: Phenotype: ROSETTE LEAVES Other
  misc_feature: Phenotype: WHOLE PLANT Color-Dark Green
  misc_feature: Phenotype: INFLORESCENCE Flowering Time-Late Flowering
  misc_feature: Phenotype: ROSETTE LEAVES Shape-Oval
  misc_feature: Phenotype: ROSETTE LEAVES Other
  misc_feature: Phenotype: WHOLE PLANT Color-Dark Green
  misc_feature: Phenotype: INFLORESCENCE Branching-Reduced Apical Dominance
  misc_feature: Phenotype: INFLORESCENCE Other
  misc_feature: Phenotype: FERTILITY Fertility-Reduced
  misc_feature: Phenotype: INFLORESCENCE Branching-Reduced Apical Dominance
  misc_feature: Phenotype: INFLORESCENCE Other
  misc_feature: Phenotype: FERTILITY Fertility-Reduced
  misc_feature: Phenotype: ROSETTE LEAVES Shape-Oval
  misc_feature: Phenotype: ROSETTE LEAVES Other
  misc_feature: Phenotype: WHOLE PLANT Color-Dark Green
  misc_feature: Phenotype: INFLORESCENCE Branching-Reduced Apical Dominance
  misc_feature: Phenotype: INFLORESCENCE Other
  misc_feature: Phenotype: FERTILITY Fertility-Reduced
  misc_feature: Phenotype: ROSETTE LEAVES Shape-Oval
  misc_feature: Phenotype: WHOLE PLANT Size-Small
  misc_feature: Phenotype: INFLORESCENCE Branching-Reduced Apical Dominance
  misc_feature: Phenotype: INFLORESCENCE Other
  misc_feature: Phenotype: FERTILITY Fertility-Reduced
  misc_feature: Phenotype: ROSETTE LEAVES Petiole Length-Short Petioles
  misc_feature: Phenotype: ROSETTE LEAVES Shape-Serrate
  misc_feature: Phenotype: ROSETTE LEAVES Other
  misc_feature: Phenotype: WHOLE PLANT Color-Dark Green
  misc_feature: Phenotype: WHOLE PLANT Size-Small
  misc_feature: Phenotype: WHOLE PLANT Size-Small
agggttttcgattgtcaccaccaccaccacttctggtaacgcagtgtctctgattttcacttggttaaagacctctagcttcacggtcaaacatcataaaccttttgccgccgtcactaataggaattaactgatctcgtcaatggcggaggtggaggagattgcgcacgaggagcagaatatcgagaagagggagaagaagaaaggtaaacacgagaagccgaagccatgggatgatgacccaaacatcgaccgttggacaatcgagaagtttgatccggcatggaaccccactggtatgactgaaaccagcacgttctcaacactctttcctcaatacagagagaagtatcttcaggagtgttggcctagagttgaatctgctcttaaggagtacggtgtcgcctgcaagctcaacttggttgaaggttctatgactgtttcgacgacgaggaagacaagagatccatacatcattgtcaaagctagggatttgattaagcttctttccagaagtgtccctgctcctcaggcaattaagattctcgaagatgaggtgcaatgtgatatcatcaagatcggtaacttggttagaaataaggaaagatttgttaaaagaaggcagcggcttgtgggtcctaattcttctaccttgaaggcgctggaaatattaaccaactgttacattctagttcagggaagtactgtagccgctatgggtccatttaaaggtctcaaacagctcagaaggattgtggaagactgcgtacagaatataatgcatcctgtataccatataaagactctcatgatgaaaaaagaactggagaaggatccagctcttgcaaatgaaagctgggataggtttcttcccacattcaggaagaaaaatgttaagcaaaagaaacccaaaagcaaggagaagaagccatacacacctttcccacctcctcaaccacctagcaagattgatatgcagttggagtctggagaatacttcatgagtgataaaaagaagtcagagaaaaaatggcaggagaagcaagagaaacagtcagagaagagcacagagaacaaaagaaagagagatgcctcattcctcccacctgaggagcctatgaacaacaatagcaacgcaaacaaatcagaggatggaaagaatgatataaccgagttaacaaattccttgaagagcaagacgaaggagttgaaaaagcagaaaaagacacacgagagagtgaatgcggaggagtatattgctggtccatcttcttctgctgataaatcttccaagaagtccaaaaagattagagattaattctaaatcctgtttttttttaaaaaaaaaaaagagagaaaagattgaaacttatctatgctcaaaactgtaaaaacaagttaaatctttatttcagccgtcaagttacttc

SEQ ID NO: 26556 - protein, 391 aa, Arabidopsis thaliana
  peptide (1)..(391): Ceres Seq. ID no. 13499597
  misc_feature (4)..(388): Homolog of NCBI NO: 34864853 NR Description: similar to dribble CG4258-PA [Rattus norvegicus]
  misc_feature (13)..(388): Homolog of NCBI NO: 16877011 NR Description: HIV-1 rev binding protein 2 [Homo sapiens]
  misc_feature (24)..(370): Homolog of NCBI NO: 40739194 NR Description: hypothetical protein AN5875.2 [Aspergillus
  misc_feature (24)..(324): Homolog of NCBI NO: 6319791 NR Description: Involved in cell division and spore germination;
  misc_feature (1)..(324): Homolog of NCBI NO: 19112865 NR Description: strong similarity to yeast cell division and
  misc_feature (16)..(153): Homolog of NCBI NO: 34910546 NR Description: rev interacting protein-like
  misc_feature (172)..(388): Homolog of NCBI NO: 34910546 NR Description: rev interacting protein-like
  misc_feature (10)..(388): Homolog of NCBI NO: 37534940 NR Description: unknown protein [Oryza sativa (japonica
  misc_feature (1)..(391): Homolog of NCBI NO: 21592614 NR Description: rev interacting protein mis3-like [Arabidopsis
  misc_feature (1)..(391): Homolog of NCBI NO: 15241622 NR Description: rev interacting protein mis3 - like [Arabidopsis
MAEVEEIAHEEQNIEKREKKKGKHEKPKPWDDDPNIDRWTIEKFDPAWNPTGMTETSTFSTLFPQYREKYLQECWPRVESALKEYGVACKLNLVEGSMTVSTTRKTRDPYIIVKARDLIKLLSRSVPAPQAIKILEDEVQCDIIKIGNLVRNKERFVKRRQRLVGPNSSTLKALEILTNCYILVQGSTVAAMGPFKGLKQLRRIVEDCVQNIMHPVYHIKTLMMKKELEKDPALANESWDRFLPTFRKKNVKQKKPKSKEKKPYTPFPPPQPPSKIDMQLESGEYFMSDKKKSEKKWQEKQEKQSEKSTENKRKRDASFLPPEEPMNNNSNANKSEDGKNDITELTNSLKSKTKELKKQKKTHERVNAEEYIAGPSSSADKSSKKSKKIRD

SEQ ID NO: 26557 - protein, 339 aa, Arabidopsis thaliana
  peptide (1)..(339): Ceres Seq. ID no. 13499598
  misc_feature (1)..(336): Homolog of NCBI NO: 34864853 NR Description: similar to dribble CG4258-PA [Rattus norvegicus]
  misc_feature (1)..(336): Homolog of NCBI NO: 16877011 NR Description: HIV-1 rev binding protein 2 [Homo sapiens]
  misc_feature (1)..(318): Homolog of NCBI NO: 40739194 NR Description: hypothetical protein AN5875.2 [Aspergillus
  misc_feature (1)..(272): Homolog of NCBI NO: 6319791 NR Description: Involved in cell division and spore germination;
  misc_feature (1)..(272): Homolog of NCBI NO: 19112865 NR Description: strong similarity to yeast cell division and
  misc_feature (1)..(101): Homolog of NCBI NO: 34910546 NR Description: rev interacting protein-like
  misc_feature (120)..(336): Homolog of NCBI NO: 34910546 NR Description: rev interacting protein-like
  misc_feature (1)..(336): Homolog of NCBI NO: 37534940 NR Description: unknown protein [Oryza sativa (japonica
  misc_feature (1)..(339): Homolog of NCBI NO: 21592614 NR Description: rev interacting protein mis3-like [Arabidopsis
  misc_feature (1)..(339): Homolog of NCBI NO: 15241622 NR Description: rev interacting protein mis3 - like [Arabidopsis
MTETSTFSTLFPQYREKYLQECWPRVESALKEYGVACKLNLVEGSMTVSTTRKTRDPYIIVKARDLIKLLSRSVPAPQAIKILEDEVQCDIIKIGNLVRNKERFVKRRQRLVGPNSSTLKALEILTNCYILVQGSTVAAMGPFKGLKQLRRIVEDCVQNIMHPVYHIKTLMMKKELEKDPALANESWDRFLPTFRKKNVKQKKPKSKEKKPYTPFPPPQPPSKIDMQLESGEYFMSDKKKSEKKWQEKQEKQSEKSTENKRKRDASFLPPEEPMNNNSNANKSEDGKNDITELTNSLKSKTKELKKQKKTHERVNAEEYIAGPSSSADKSSKKSKKIRD

SEQ ID NO: 26558 - protein, 294 aa, Arabidopsis thaliana
  peptide (1)..(294): Ceres Seq. ID no. 13499599
  misc_feature (1)..(291): Homolog of NCBI NO: 37534940 NR Description: unknown protein [Oryza sativa (japonica
  misc_feature (1)..(294): Homolog of NCBI NO: 21592614 NR Description: rev interacting protein mis3-like [Arabidopsis
  misc_feature (1)..(294): Homolog of NCBI NO: 15241622 NR Description: rev interacting protein mis3 - like [Arabidopsis
  misc_feature (1)..(291): Homolog of NCBI NO: 34864853 NR Description: similar to dribble CG4258-PA [Rattus norvegicus]
  misc_feature (1)..(291): Homolog of NCBI NO: 16877011 NR Description: HIV-1 rev binding protein 2 [Homo sapiens]
  misc_feature (1)..(273): Homolog of NCBI NO: 40739194 NR Description: hypothetical protein AN5875.2 [Aspergillus
  misc_feature (1)..(227): Homolog of NCBI NO: 6319791 NR Description: Involved in cell division and spore germination;
  misc_feature (1)..(227): Homolog of NCBI NO: 19112865 NR Description: strong similarity to yeast cell division and
  misc_feature (1)..(56): Homolog of NCBI NO: 34910546 NR Description: rev interacting protein-like
  misc_feature (75)..(291): Homolog of NCBI NO: 34910546 NR Description: rev interacting protein-like
MTVSTTRKTRDPYIIVKARDLIKLLSRSVPAPQAIKILEDEVQCDIIKIGNLVRNKERFVKRRQRLVGPNSSTLKALEILTNCYILVQGSTVAAMGPFKGLKQLRRIVEDCVQNIMHPVYHIKTLMMKKELEKDPALANESWDRFLPTFRKKNVKQKKPKSKEKKPYTPFPPPQPPSKIDMQLESGEYFMSDKKKSEKKWQEKQEKQSEKSTENKRKRDASFLPPEEPMNNNSNANKSEDGKNDITELTNSLKSKTKELKKQKKTHERVNAEEYIAGPSSSADKSSKKSKKIRD

SEQ ID NO: 26559 - DNA, 1426 bp, Arabidopsis thaliana
  misc_feature (1)..(1426): Ceres Seq. ID no. 12337791
  misc_feature: MA Experiment ID: 108577 Result: Up-regulated in Transcription
  misc_feature: MA Experiment 108577 PARAMETER Experiment Name: At_42deg_Heat_cDNA_P Parameter: Temperature (deg C) Value: 42 vs. 22
  misc_feature: MA Experiment 108577 PARAMETER Experiment Name: At_42deg_Heat_cDNA_P Parameter: Timepoint (hr) Value: 6
  misc_feature: MA Experiment 108577 PARAMETER Experiment Name: At_42deg_Heat_cDNA_P Parameter: Tissue Value: Aerial
  misc_feature: MA Experiment ID: 108595 Result: Down-regulated in Transcription
  misc_feature: MA Experiment 108595 PARAMETER Experiment Name: At_Ler-pi_Ovule_cDNA_P Parameter: Plant Line Value: null
  misc_feature: MA Experiment ID: 20000173 Result: Up-regulated in Transcription
  misc_feature: MA Experiment 20000173 PARAMETER Experiment Name: At_42deg_Heat_P Parameter: Age (day) Value: 14
  misc_feature: MA Experiment 20000173 PARAMETER Experiment Name: At_42deg_Heat_P Parameter: Organism Value: A. thaliana
  misc_feature: MA Experiment 20000173 PARAMETER Experiment Name: At_42deg_Heat_P Parameter: Plant Line Value: WS
  misc_feature: MA Experiment 20000173 PARAMETER Experiment Name: At_42deg_Heat_P Parameter: Temperature (deg C) Value: 42 vs. 22
  misc_feature: MA Experiment 20000173 PARAMETER Experiment Name: At_42deg_Heat_P Parameter: Timepoint (hr) Value: 6
  misc_feature: MA Experiment 20000173 PARAMETER Experiment Name: At_42deg_Heat_P Parameter: Tissue Value: Aerial
  misc_feature: MA Experiment ID: 20000184 Result: Down-regulated in Transcription
  misc_feature: MA Experiment 20000184 PARAMETER Experiment Name: At_Shoots__P Parameter: Age (day) Value: 7
  misc_feature: MA Experiment 20000184 PARAMETER Experiment Name: At_Shoots__P Parameter: Tissue Value: Shoots vs. Whole Plant
  misc_feature: MA Experiment ID: 20000235 Result: Down-regulated in Transcription
  misc_feature: MA Experiment 20000235 PARAMETER Experiment Name: At_Siliques_P Parameter: Age (day) Value: 21
  misc_feature: MA Experiment 20000235 PARAMETER Experiment Name: At_Siliques_P Parameter: Organism Value: A. thaliana
  misc_feature: MA Experiment 20000235 PARAMETER Experiment Name: At_Siliques_P Parameter: Plant Line Value: WS
  misc_feature: MA Experiment 20000235 PARAMETER Experiment Name: At_Siliques_P Parameter: Tissue Value: 5-10mm Siliques vs. Whole Plant
  misc_feature: MA Experiment ID: 20000496 Result: Up-regulated in Transcription
  misc_feature: MA Experiment 20000496 PARAMETER Experiment Name: At_Guard_Cells_P Parameter: Harvest Date Value: 7/19/2002
  misc_feature: MA Experiment 20000496 PARAMETER Experiment Name: At_Guard_Cells_P Parameter: Organism Value: Canola
  misc_feature: MA Experiment 20000496 PARAMETER Experiment Name: At_Guard_Cells_P Parameter: Tissue Value: Guard Cells vs. Leaves
atttcttctctctcattctctcttctgacgtgtttcccttcttcggtttctcatcctcacgtccgccggatttcgaggaaacgaagaagaagaagaacaacaacaaaagccttttgagatatggacagcttctggcaattaggtgatgagctacgaggtcagacgagagcatcagaggatcacaaatggtctactgttgcaacgaagctagctgagcaaactaggatgaaaggggagaggatgaacaatcttgatctctccaaaggttacactgagtttagaccaagtgagaaattcagtttccaggagaacaatcttaacttcaacatgttgaatttagatggtaaatttggtgaaagcatcatggggaagacttcgatgcagagcaatgtttataatatgaatactgttttccagaagaatgactttaagagtggaggcaacatgaaagttaacaagtataatggtaatattgttgctaacaaggagatgagcaacaacaaacataacaacaactgcaatgataatgggaatatgaatttggctgttgacaagaggtttaaaaccttgcctgcttcggagactcttccgaggaatgaagttcttggtggttacatctttgtttgcaacaatgatactatgcaggaggatatgaaacgtcacctctttggtttacctccaagatacagagactctgttcgagctataacacctggattgcctctgtttctttacaactacaccactcaccagcttcatggtatctttgaggcaacaacttttggaggtactaatattgatgctactgcttgggaagacaaaaagtgcaaaggagagtcaaggtttccggctcaggtaaggatcagagtgaggaaaatctgcaaagccttggaagaggactccttcaggccagtacttcaccactatgatggtccaaaattccgccttgagctctctgttcctgagacattggatctgctagatctttgcgaacaagctggttctgcataagccgaaacgatcaaccttgcaatgccacgttgcaaagagggggatgttttgtatgaaatctatctatatatgtaagacctaccgtaagagcgtaagcttttgggatttagttaagagtcggattcaaatgtatgtttactaagaagggatgagagtatgtgtggtcttaaggcaagcaaaagagcgaagaggctctgccgaataagcgactactcttgttctgtgtcgtgtctgatgtgtgagtgtgtgtctgtgtttgtgagagattcgatactctttgaaacaaagatttatgtagaagaatatagagaaagaaagactactataaacagagccaaaaaatgatgtgagctactgtttgtgcttgcttgtgtaaggataaaacaaattgtcctaaatgacaagtttaacttct

SEQ ID NO: 26560 - protein, 296 aa, Arabidopsis thaliana
  peptide (1)..(296): Ceres Seq. ID no. 12337792
  misc_feature (141)..(289): Homolog of NCBI NO: 34896110 NR Description: P0701D05.9 [Oryza sativa (japonica
  misc_feature (174)..(285): Homolog of NCBI NO: 7488804 NR Description: gda-1 protein - garden pea
  misc_feature (37)..(283): Homolog of NCBI NO: 34913876 NR Description: B1156H12.22 [Oryza sativa (japonica
  misc_feature (87)..(289): Homolog of NCBI NO: 9757950 NR Description: gene_id:MJC20.15~similar to unknown
  misc_feature (113)..(292): Homolog of NCBI NO: 584825 NR Description: B2 PROTEIN
  misc_feature (47)..(289): Homolog of NCBI NO: 18422167 NR Description: putative protein
  misc_feature (82)..(296): Homolog of NCBI NO: 21665866 NR Description: GDA2 protein [Pisum sativum]
  misc_feature (1)..(296): Homolog of NCBI NO: 2369766 NR Description: hypothetical protein [Citrus x paradisi]
  misc_feature (1)..(296): Homolog of NCBI NO: 15232081 NR Description: gda-1, putative
  misc_feature (1)..(296): Homolog of NCBI NO: 21592623 NR Description: gda-1, putative [Arabidopsis thaliana]
MDSFWQLGDELRGQTRASEDHKWSTVATKLAEQTRMKGERMNNLDLSKGYTEFRPSEKFSFQENNLNFNMLNLDGKFGESIMGKTSMQSNVYNMNTVFQKNDFKSGGNMKVNKYNGNIVANKEMSNNKHNNNCNDNGNMNLAVDKRFKTLPASETLPRNEVLGGYIFVCNNDTMQEDMKRHLFGLPPRYRDSVRAITPGLPLFLYNYTTHQLHGIFEATTFGGTNIDATAWEDKKCKGESRFPAQVRIRVRKICKALEEDSFRPVLHHYDGPKFRLELSVPETLDLLDLCEQAGSA

SEQ ID NO: 26561 - protein, 261 aa, Arabidopsis thaliana
  peptide (1)..(261): Ceres Seq. ID no. 12337793
  misc_feature (106)..(254): Homolog of NCBI NO: 34896110 NR Description: P0701D05.9 [Oryza sativa (japonica
  misc_feature (139)..(250): Homolog of NCBI NO: 7488804 NR Description: gda-1 protein - garden pea
  misc_feature (2)..(248): Homolog of NCBI NO: 34913876 NR Description: B1156H12.22 [Oryza sativa (japonica
  misc_feature (52)..(254): Homolog of NCBI NO: 9757950 NR Description: gene_id:MJC20.15~similar to unknown
  misc_feature (78)..(257): Homolog of NCBI NO: 584825 NR Description: B2 PROTEIN
  misc_feature (12)..(254): Homolog of NCBI NO: 18422167 NR Description: putative protein
  misc_feature (47)..(261): Homolog of NCBI NO: 21665866 NR Description: GDA2 protein [Pisum sativum]
  misc_feature (1)..(261): Homolog of NCBI NO: 2369766 NR Description: hypothetical protein [Citrus x paradisi]
  misc_feature (1)..(261): Homolog of NCBI NO: 15232081 NR Description: gda-1, putative
  misc_feature (1)..(261): Homolog of NCBI NO: 21592623 NR Description: gda-1, putative [Arabidopsis thaliana]
MKGERMNNLDLSKGYTEFRPSEKFSFQENNLNFNMLNLDGKFGESIMGKTSMQSNVYNMNTVFQKNDFKSGGNMKVNKYNGNIVANKEMSNNKHNNNCNDNGNMNLAVDKRFKTLPASETLPRNEVLGGYIFVCNNDTMQEDMKRHLFGLPPRYRDSVRAITPGLPLFLYNYTTHQLHGIFEATTFGGTNIDATAWEDKKCKGESRFPAQVRIRVRKICKALEEDSFRPVLHHYDGPKFRLELSVPETLDLLDLCEQAGSA

SEQ ID NO: 26562 - protein, 256 aa, Arabidopsis thaliana
  peptide (1)..(256): Ceres Seq. ID no. 12337794
  misc_feature (101)..(249): Homolog of NCBI NO: 34896110 NR Description: P0701D05.9 [Oryza sativa (japonica
  misc_feature (134)..(245): Homolog of NCBI NO: 7488804 NR Description: gda-1 protein - garden pea
  misc_feature (1)..(243): Homolog of NCBI NO: 34913876 NR Description: B1156H12.22 [Oryza sativa (japonica
  misc_feature (47)..(249): Homolog of NCBI NO: 9757950 NR Description: gene_id:MJC20.15~similar to unknown
  misc_feature (73)..(252): Homolog of NCBI NO: 584825 NR Description: B2 PROTEIN
  misc_feature (7)..(249): Homolog of NCBI NO: 18422167 NR Description: putative protein
  misc_feature (42)..(256): Homolog of NCBI NO: 21665866 NR Description: GDA2 protein [Pisum sativum]
  misc_feature (1)..(256): Homolog of NCBI NO: 2369766 NR Description: hypothetical protein [Citrus x paradisi]
  misc_feature (1)..(256): Homolog of NCBI NO: 15232081 NR Description: gda-1, putative
  misc_feature (1)..(256): Homolog of NCBI NO: 21592623 NR Description: gda-1, putative [Arabidopsis thaliana]
MNNLDLSKGYTEFRPSEKFSFQENNLNFNMLNLDGKFGESIMGKTSMQSNVYNMNTVFQKNDFKSGGNMKVNKYNGNIVANKEMSNNKHNNNCNDNGNMNLAVDKRFKTLPASETLPRNEVLGGYIFVCNNDTMQEDMKRHLFGLPPRYRDSVRAITPGLPLFLYNYTTHQLHGIFEATTFGGTNIDATAWEDKKCKGESRFPAQVRIRVRKICKALEEDSFRPVLHHYDGPKFRLELSVPETLDLLDLCEQAGSA

SEQ ID NO: 26563 - DNA, 1074 bp, Arabidopsis thaliana
  misc_feature (1)..(1074): Ceres Seq. ID no. 12327678
  misc_feature: MA Experiment ID: 108434 Result: Up-regulated in Transcription
  misc_feature: MA Experiment 108434 PARAMETER Experiment Name: At_Root_Tips_cDNA_P Parameter: Tissue Value: Root Tips
  misc_feature: MA Experiment ID: 108461 Result: Up-regulated in Transcription
  misc_feature: MA Experiment 108461 PARAMETER Experiment Name: At_Germinating_Seeds_cDNA_P Parameter: Age (day) Value: 1 vs. 0
  misc_feature: MA Experiment 108461 PARAMETER Experiment Name: At_Germinating_Seeds_cDNA_P Parameter: Tissue Value: Germinating Seeds
  misc_feature: MA Experiment ID: 108462 Result: Up-regulated in Transcription
  misc_feature: MA Experiment 108462 PARAMETER Experiment Name: At_Germinating_Seeds_cDNA_P Parameter: Age (day) Value: 2 vs. 0
  misc_feature: MA Experiment 108462 PARAMETER Experiment Name: At_Germinating_Seeds_cDNA_P Parameter: Tissue Value: Germinating Seeds
  misc_feature: MA Experiment ID: 108463 Result: Up-regulated in Transcription
  misc_feature: MA Experiment 108463 PARAMETER Experiment Name: At_Germinating_Seeds_cDNA_P Parameter: Age (day) Value: 3 vs. 0
  misc_feature: MA Experiment 108463 PARAMETER Experiment Name: At_Germinating_Seeds_cDNA_P Parameter: Tissue Value: Germinating Seeds
  misc_feature: MA Experiment ID: 108464 Result: Up-regulated in Transcription
  misc_feature: MA Experiment 108464 PARAMETER Experiment Name: At_Germinating_Seeds_cDNA_P Parameter: Age (day) Value: 4 vs. 0
  misc_feature: MA Experiment 108464 PARAMETER Experiment Name: At_Germinating_Seeds_cDNA_P Parameter: Tissue Value: Germinating Seeds
  misc_feature: MA Experiment ID: 108488 Result: Up-regulated in Transcription
  misc_feature: MA Experiment ID: 108489 Result: Down-regulated in Transcription
  misc_feature: MA Experiment ID: 108573 Result: Down-regulated in Transcription
  misc_feature: MA Experiment 108573 PARAMETER Experiment Name: At_Drought_cDNA_P Parameter: Timepoint (hr) Value: 6
  misc_feature: MA Experiment 108573 PARAMETER Experiment Name: At_Drought_cDNA_P Parameter: Tissue Value: Aerial
  misc_feature: MA Experiment 108573 PARAMETER Experiment Name: At_Drought_cDNA_P Parameter: Treatment Value: Drought vs. No Drought
  misc_feature: MA Experiment ID: 108579 Result: Up-regulated in Transcription
  misc_feature: MA Experiment 108579 PARAMETER Experiment Name: At_4deg_Cold_cDNA_P Parameter: Temperature (deg C) Value: 4 vs. 22
  misc_feature: MA Experiment 108579 PARAMETER Experiment Name: At_4deg_Cold_cDNA_P Parameter: Timepoint (hr) Value: 6
  misc_feature: MA Experiment 108579 PARAMETER Experiment Name: At_4deg_Cold_cDNA_P Parameter: Tissue Value: Aerial
  misc_feature: MA Experiment ID: 108585 Result: Down-regulated in Transcription
  misc_feature: MA Experiment 108585 PARAMETER Experiment Name: At_5mM_NaNP_cDNA_P Parameter: Timepoint (hr) Value: 6
  misc_feature: MA Experiment 108585 PARAMETER Experiment Name: At_5mM_NaNP_cDNA_P Parameter: Tissue Value: Aerial
  misc_feature: MA Experiment 108585 PARAMETER Experiment Name: At_5mM_NaNP_cDNA_P Parameter: Treatment Value: null
  misc_feature: MA Experiment ID: 20000087 Result: Down-regulated in Transcription
  misc_feature: MA Experiment 20000087 PARAMETER Experiment Name: At_100uM_ABA_Mutants_cDNA_P Parameter: Plant Line Value: WS
  misc_feature: MA Experiment 20000087 PARAMETER Experiment Name: At_100uM_ABA_Mutants_cDNA_P Parameter: Timepoint (hr) Value: 6
  misc_feature: MA Experiment 20000087 PARAMETER Experiment Name: At_100uM_ABA_Mutants_cDNA_P Parameter: Tissue Value: Aerial
  misc_feature: MA Experiment 20000087 PARAMETER Experiment Name: At_100uM_ABA_Mutants_cDNA_P Parameter: Treatment Value: 100uM ABA vs. No Treatment
  misc_feature: MA Experiment ID: 20000224 Result: Up-regulated in Transcription
  misc_feature: MA Experiment ID: 20001248 Result: Down-regulated in Transcription
  misc_feature: MA Experiment 20001248 PARAMETER Experiment Name: At_Far-red-induction_P Parameter: Age (day) Value: 7
  misc_feature: MA Experiment 20001248 PARAMETER Experiment Name: At_Far-red-induction_P Parameter: Light Value: Far-red vs. White
  misc_feature: MA Experiment 20001248 PARAMETER Experiment Name: At_Far-red-induction_P Parameter: Organism Value: A. thaliana
  misc_feature: MA Experiment 20001248 PARAMETER Experiment Name: At_Far-red-induction_P Parameter: Plant Line Value: Columbia
  misc_feature: MA Experiment 20001248 PARAMETER Experiment Name: At_Far-red-induction_P Parameter: Timepoint (hr) Value: 4
  misc_feature: MA Experiment 20001248 PARAMETER Experiment Name: At_Far-red-induction_P Parameter: Tissue Value: Whole Plant
  misc_feature: MA Experiment ID: 20001450 Result: Down-regulated in Transcription
  misc_feature: MA Experiment 20001450 PARAMETER Experiment Name: At_Far-red-induction_P Parameter: Age (day) Value: 7
  misc_feature: MA Experiment 20001450 PARAMETER Experiment Name: At_Far-red-induction_P Parameter: Light Value: Far-red vs. White
  misc_feature: MA Experiment 20001450 PARAMETER Experiment Name: At_Far-red-induction_P Parameter: Organism Value: A. thaliana
  misc_feature: MA Experiment 20001450 PARAMETER Experiment Name: At_Far-red-induction_P Parameter: Plant Line Value: Columbia
  misc_feature: MA Experiment 20001450 PARAMETER Experiment Name: At_Far-red-induction_P Parameter: Timepoint (hr) Value: 8
  misc_feature: MA Experiment 20001450 PARAMETER Experiment Name: At_Far-red-induction_P Parameter: Tissue Value: Whole Plant
  misc_feature: MA Experiment ID: 20001451 Result: Down-regulated in Transcription
  misc_feature: MA Experiment 20001451 PARAMETER Experiment Name: At_Far-red-induction_P Parameter: Age (day) Value: 7
  misc_feature: MA Experiment 20001451 PARAMETER Experiment Name: At_Far-red-induction_P Parameter: Light Value: Far-red vs. White
  misc_feature: MA Experiment 20001451 PARAMETER Experiment Name: At_Far-red-induction_P Parameter: Organism Value: A. thaliana
  misc_feature: MA Experiment 20001451 PARAMETER Experiment Name: At_Far-red-induction_P Parameter: Plant Line Value: Columbia
  misc_feature: MA Experiment 20001451 PARAMETER Experiment Name: At_Far-red-induction_P Parameter: Timepoint (hr) Value: 24
  misc_feature: MA Experiment 20001451 PARAMETER Experiment Name: At_Far-red-induction_P Parameter: Tissue Value: Whole Plant
  misc_feature: MA Experiment ID: 20001557 Result: Down-regulated in Transcription
  misc_feature: MA Experiment 20001557 PARAMETER Experiment Name: At_Drought_Soil_Dry_P Parameter: Age (day) Value: 27
  misc_feature: MA Experiment 20001557 PARAMETER Experiment Name: At_Drought_Soil_Dry_P Parameter: Organism Value: A. thaliana
  misc_feature: MA Experiment 20001557 PARAMETER Experiment Name: At_Drought_Soil_Dry_P Parameter: Plant Line Value: WS
  misc_feature: MA Experiment 20001557 PARAMETER Experiment Name: At_Drought_Soil_Dry_P Parameter: Post Timepoint (hr) Value: 3
  misc_feature: MA Experiment 20001557 PARAMETER Experiment Name: At_Drought_Soil_Dry_P Parameter: Post-Treatment Value: Re-Water vs. No Drought
  misc_feature: MA Experiment 20001557 PARAMETER Experiment Name: At_Drought_Soil_Dry_P Parameter: Timepoint (day) Value: 13
  misc_feature: MA Experiment 20001557 PARAMETER Experiment Name: At_Drought_Soil_Dry_P Parameter: Treatment Value: Drought vs. No Drought
acagatatcaatgttgcatcaggtgaagaacgagagatagagaacgatgagtgtgattggaagcaagagctgtattttctctgtggctagatacacccgagaaaatgagaaatcttcttgcttcacttctatcaacaagaaatcttcgcttgatctgagtcttcccagaaatctggcgggagtttcctgcaaattctctggagaaaatccaggaacaaatggggtttctcttagctccaagaacaaaatggaggattacaatacagctatgaagagattgatgagaagcccttatgaatatcatcatgatctaggtatgaactatacattgataagagatgaacttatagttgggtcacagccacagaaacctgaggacatagatcacttgaagcaggaacagaatgttgcttacatacttaacttgcagcaggataaggacattgagtattggggaatcgatttggattccattgttagaagatgtaaggagcttggaatccgtcacatgagaaggcctgctaaagattttgatccactttcgttgagaagccaacttccaaaagctgtttcttctttggaatgggcggtttcagaaggtaaaggaagagtctatgtgcattgctcagccggattgggaagagctccaggggtttccattgcttatatgtattggttctgtgacatgaatcttaacacggcttatgacactttggtatcaaagcgtccatgtgggcctaacaaaggagccatccgtggtgcaacatatgatctggctaagaatgatccctggaaagagccctttgagagtctccctgagaacgcattcgaggacattgcagattgggaaaggaagttgattcaagaacgtgttcgggccctccgtggaacctgaaaatcagtagttctgagaatatgtataatttcgaataaaatgtagacttctgtatattttaaagctacggattacaaaacctcttctgcgaattaatcgaccttgttgtcaggaactctgtggttcttcttgtctagttctacaaagatgaagtctatataatttatacatacacttag

SEQ ID NO: 26564 - protein, 282 aa, Arabidopsis thaliana
  peptide (1)..(282): Ceres Seq. ID no. 12327679
  misc_feature (92)..(228): Pfam Name: Dual specificity phosphatase, catalytic domain Pfam Description: Dual specificity phosphatase, catalytic domain
  misc_feature (68)..(243): Homolog of NCBI NO: 6016710 NR Description: unknown protein [Arabidopsis thaliana]
  misc_feature (20)..(243): Homolog of NCBI NO: 21592520 NR Description: unknown [Arabidopsis thaliana]
  misc_feature (20)..(243): Homolog of NCBI NO: 18395843 NR Description: expressed protein
  misc_feature (58)..(243): Homolog of NCBI NO: 21536905 NR Description: unknown [Arabidopsis thaliana]
  misc_feature (56)..(243): Homolog of NCBI NO: 14970762 NR Description: protein tyrosine phosphatase [Lycopersicon
  misc_feature (59)..(243): Homolog of NCBI NO: 16612246 NR Description: AT3g52180/F4F15_290 [Arabidopsis thaliana]
  misc_feature (58)..(243): Homolog of NCBI NO: 18409505 NR Description: putative protein
  misc_feature (58)..(243): Homolog of NCBI NO: 11288831 NR Description: hypothetical protein F4F15.290 - Arabidopsis
  misc_feature (1)..(282): Homolog of NCBI NO: 18399058 NR Description: expressed protein
  misc_feature (1)..(282): Homolog of NCBI NO: 21592631 NR Description: unknown [Arabidopsis thaliana]
MSVIGSKSCIFSVARYTRENEKSSCFTSINKKSSLDLSLPRNLAGVSCKFSGENPGTNGVSLSSKNKMEDYNTAMKRLMRSPYEYHHDLGMNYTLIRDELIVGSQPQKPEDIDHLKQEQNVAYILNLQQDKDIEYWGIDLDSIVRRCKELGIRHMRRPAKDFDPLSLRSQLPKAVSSLEWAVSEGKGRVYVHCSAGLGRAPGVSIAYMYWFCDMNLNTAYDTLVSKRPCGPNKGAIRGATYDLAKNDPWKEPFESLPENAFEDIADWERKLIQERVRALRGT

SEQ ID NO: 26565 - protein, 215 aa, Arabidopsis thaliana
  peptide (1)..(215): Ceres Seq. ID no. 12327680
  misc_feature (25)..(161): Pfam Name: Dual specificity phosphatase, catalytic domain Pfam Description: Dual specificity phosphatase, catalytic domain
  misc_feature (1)..(176): Homolog of NCBI NO: 6016710 NR Description: unknown protein [Arabidopsis thaliana]
  misc_feature (1)..(176): Homolog of NCBI NO: 21592520 NR Description: unknown [Arabidopsis thaliana]
  misc_feature (1)..(176): Homolog of NCBI NO: 18395843 NR Description: expressed protein
  misc_feature (1)..(176): Homolog of NCBI NO: 21536905 NR Description: unknown [Arabidopsis thaliana]
  misc_feature (1)..(176): Homolog of NCBI NO: 14970762 NR Description: protein tyrosine phosphatase [Lycopersicon
  misc_feature (1)..(176): Homolog of NCBI NO: 16612246 NR Description: AT3g52180/F4F15_290 [Arabidopsis thaliana]
  misc_feature (1)..(176): Homolog of NCBI NO: 18409505 NR Description: putative protein
  misc_feature (1)..(176): Homolog of NCBI NO: 11288831 NR Description: hypothetical protein F4F15.290 - Arabidopsis
  misc_feature (1)..(215): Homolog of NCBI NO: 18399058 NR Description: expressed protein
  misc_feature (1)..(215): Homolog of NCBI NO: 21592631 NR Description: unknown [Arabidopsis thaliana]
MEDYNTAMKRLMRSPYEYHHDLGMNYTLIRDELIVGSQPQKPEDIDHLKQEQNVAYILNLQQDKDIEYWGIDLDSIVRRCKELGIRHMRRPAKDFDPLSLRSQLPKAVSSLEWAVSEGKGRVYVHCSAGLGRAPGVSIAYMYWFCDMNLNTAYDTLVSKRPCGPNKGAIRGATYDLAKNDPWKEPFESLPENAFEDIADWERKLIQERVRALRGT

SEQ ID NO: 26566 - protein, 208 aa, Arabidopsis thaliana
  peptide (1)..(208): Ceres Seq. ID no. 12327681
  misc_feature (18)..(154): Pfam Name: Dual specificity phosphatase, catalytic domain Pfam Description: Dual specificity phosphatase, catalytic domain
  misc_feature (1)..(169): Homolog of NCBI NO: 6016710 NR Description: unknown protein [Arabidopsis thaliana]
  misc_feature (1)..(169): Homolog of NCBI NO: 21592520 NR Description: unknown [Arabidopsis thaliana]
  misc_feature (1)..(169): Homolog of NCBI NO: 18395843 NR Description: expressed protein
  misc_feature (1)..(169): Homolog of NCBI NO: 21536905 NR Description: unknown [Arabidopsis thaliana]
  misc_feature (1)..(169): Homolog of NCBI NO: 14970762 NR Description: protein tyrosine phosphatase [Lycopersicon
  misc_feature (1)..(169): Homolog of NCBI NO: 16612246 NR Description: AT3g52180/F4F15_290 [Arabidopsis thaliana]
  misc_feature (1)..(169): Homolog of NCBI NO: 18409505 NR Description: putative protein
  misc_feature (1)..(169): Homolog of NCBI NO: 11288831 NR Description: hypothetical protein F4F15.290 - Arabidopsis
  misc_feature (1)..(208): Homolog of NCBI NO: 18399058 NR Description: expressed protein
  misc_feature (1)..(208): Homolog of NCBI NO: 21592631 NR Description: unknown [Arabidopsis thaliana]
MKRLMRSPYEYHHDLGMNYTLIRDELIVGSQPQKPEDIDHLKQEQNVAYILNLQQDKDIEYWGIDLDSIVRRCKELGIRHMRRPAKDFDPLSLRSQLPKAVSSLEWAVSEGKGRVYVHCSAGLGRAPGVSIAYMYWFCDMNLNTAYDTLVSKRPCGPNKGAIRGATYDLAKNDPWKEPFESLPENAFEDIADWERKLIQERVRALRGT

SEQ ID NO: 26567 - DNA, 1432 bp, Arabidopsis thaliana
  misc_feature (1)..(1432): Ceres Seq. ID no. 13489717
  misc_feature: MA Experiment ID: 20000169 Result: Up-regulated in Transcription
  misc_feature: MA Experiment 20000169 PARAMETER Experiment Name: At_100uM_ABA_P Parameter: Age (day) Value: 14
  misc_feature: MA Experiment 20000169 PARAMETER Experiment Name: At_100uM_ABA_P Parameter: Organism Value: A. thaliana
  misc_feature: MA Experiment 20000169 PARAMETER Experiment Name: At_100uM_ABA_P Parameter: Plant Line Value: WS
  misc_feature: MA Experiment 20000169 PARAMETER Experiment Name: At_100uM_ABA_P Parameter: Timepoint (hr) Value: 6
  misc_feature: MA Experiment 20000169 PARAMETER Experiment Name: At_100uM_ABA_P Parameter: Tissue Value: Aerial
  misc_feature: MA Experiment 20000169 PARAMETER Experiment Name: At_100uM_ABA_P Parameter: Treatment Value: 100uM ABA vs. No Treatment
  misc_feature: MA Experiment ID: 20000173 Result: Down-regulated in Transcription
  misc_feature: MA Experiment 20000173 PARAMETER Experiment Name: At_42deg_Heat_P Parameter: Age (day) Value: 14
  misc_feature: MA Experiment 20000173 PARAMETER Experiment Name: At_42deg_Heat_P Parameter: Organism Value: A. thaliana
  misc_feature: MA Experiment 20000173 PARAMETER Experiment Name: At_42deg_Heat_P Parameter: Plant Line Value: WS
  misc_feature: MA Experiment 20000173 PARAMETER Experiment Name: At_42deg_Heat_P Parameter: Temperature (deg C) Value: 42 vs. 22
  misc_feature: MA Experiment 20000173 PARAMETER Experiment Name: At_42deg_Heat_P Parameter: Timepoint (hr) Value: 6
  misc_feature: MA Experiment 20000173 PARAMETER Experiment Name: At_42deg_Heat_P Parameter: Tissue Value: Aerial
  misc_feature: MA Experiment ID: 20000184 Result: Down-regulated in Transcription
  misc_feature: MA Experiment 20000184 PARAMETER Experiment Name: At_Shoots__P Parameter: Age (day) Value: 7
  misc_feature: MA Experiment 20000184 PARAMETER Experiment Name: At_Shoots__P Parameter: Tissue Value: Shoots vs. Whole Plant
  misc_feature: MA Experiment ID: 20000185 Result: Down-regulated in Transcription
  misc_feature: MA Experiment 20000185 PARAMETER Experiment Name: At_Roots__P Parameter: Age (day) Value: 7 vs. 21
  misc_feature: MA Experiment 20000185 PARAMETER Experiment Name: At_Roots__P Parameter: Organism Value: A. thaliana
  misc_feature: MA Experiment 20000185 PARAMETER Experiment Name: At_Roots__P Parameter: Tissue Value: Roots vs. Whole Plant
  misc_feature: MA Experiment ID: 20000234 Result: Down-regulated in Transcription
  misc_feature: MA Experiment 20000234 PARAMETER Experiment Name: At_Siliques_P Parameter: Age (day) Value: 21
  misc_feature: MA Experiment 20000234 PARAMETER Experiment Name: At_Siliques_P Parameter: Organism Value: A. thaliana
  misc_feature: MA Experiment 20000234 PARAMETER Experiment Name: At_Siliques_P Parameter: Plant Line Value: WS
  misc_feature: MA Experiment 20000234 PARAMETER Experiment Name: At_Siliques_P Parameter: Tissue Value: Less Than 5mm Siliques vs. Whole Plant
  misc_feature: MA Experiment ID: 20000265 Result: Down-regulated in Transcription
  misc_feature: MA Experiment 20000265 PARAMETER Experiment Name: At_Open_Flower_P Parameter: Age (day) Value: 21
  misc_feature: MA Experiment 20000265 PARAMETER Experiment Name: At_Open_Flower_P Parameter: Plant Line Value: WS
  misc_feature: MA Experiment 20000265 PARAMETER Experiment Name: At_Open_Flower_P Parameter: Tissue Value: Closed Flower vs. Whole Plant
  misc_feature: MA Experiment ID: 20000286 Result: Down-regulated in Transcription
  misc_feature: MA Experiment 20000286 PARAMETER Experiment Name: At_Open_Flower_P Parameter: Age (day) Value: 21
  misc_feature: MA Experiment 20000286 PARAMETER Experiment Name: At_Open_Flower_P Parameter: Plant Line Value: WS
  misc_feature: MA Experiment 20000286 PARAMETER Experiment Name: At_Open_Flower_P Parameter: Tissue Value: Half Open vs. Whole Plant
  misc_feature: MA Experiment ID: 20000436 Result: Up-regulated in Transcription
  misc_feature: MA Experiment 20000436 PARAMETER Experiment Name: At_Drought_P Parameter: Age (day) Value: 7
  misc_feature: MA Experiment 20000436 PARAMETER Experiment Name: At_Drought_P Parameter: Organism Value: A. thaliana
  misc_feature: MA Experiment 20000436 PARAMETER Experiment Name: At_Drought_P Parameter: Plant Line Value: WS
  misc_feature: MA Experiment 20000436 PARAMETER Experiment Name: At_Drought_P Parameter: Timepoint (hr) Value: 12
  misc_feature: MA Experiment 20000436 PARAMETER Experiment Name: At_Drought_P Parameter: Tissue Value: Whole Plant
  misc_feature: MA Experiment 20000436 PARAMETER Experiment Name: At_Drought_P Parameter: Treatment Value: Drought vs. No Drought
  misc_feature: MA Experiment ID: 20000437 Result: Up-regulated in Transcription
  misc_feature: MA Experiment 20000437 PARAMETER Experiment Name: At_Drought_P Parameter: Age (day) Value: 8
  misc_feature: MA Experiment 20000437 PARAMETER Experiment Name: At_Drought_P Parameter: Organism Value: A. thaliana
  misc_feature: MA Experiment 20000437 PARAMETER Experiment Name: At_Drought_P Parameter: Plant Line Value: WS
  misc_feature: MA Experiment 20000437 PARAMETER Experiment Name: At_Drought_P Parameter: Timepoint (hr) Value: 24
  misc_feature: MA Experiment 20000437 PARAMETER Experiment Name: At_Drought_P Parameter: Tissue Value: Whole Plant
  misc_feature: MA Experiment 20000437 PARAMETER Experiment Name: At_Drought_P Parameter: Treatment Value: Drought vs. No Drought
  misc_feature: MA Experiment ID: 20000438 Result: Down-regulated in Transcription
  misc_feature: MA Experiment 20000438 PARAMETER Experiment Name: At_Shoots__P Parameter: Age (day) Value: 14
  misc_feature: MA Experiment 20000438 PARAMETER Experiment Name: At_Shoots__P Parameter: Tissue Value: Shoots vs. Whole Plant
  misc_feature: MA Experiment ID: 20000439 Result: Down-regulated in Transcription
  misc_feature: MA Experiment 20000439 PARAMETER Experiment Name: At_Roots__P Parameter: Age (day) Value: 14 vs. 21
  misc_feature: MA Experiment 20000439 PARAMETER Experiment Name: At_Roots__P Parameter: Organism Value: A. thaliana
  misc_feature: MA Experiment 20000439 PARAMETER Experiment Name: At_Roots__P Parameter: Tissue Value: Roots vs. Whole Plant
  misc_feature: MA Experiment ID: 20000453 Result: Up-regulated in Transcription
  misc_feature: MA Experiment 20000453 PARAMETER Experiment Name: At_100uM_ABA_P Parameter: Age (day) Value: 15
  misc_feature: MA Experiment 20000453 PARAMETER Experiment Name: At_100uM_ABA_P Parameter: Organism Value: A. thaliana
  misc_feature: MA Experiment 20000453 PARAMETER Experiment Name: At_100uM_ABA_P Parameter: Plant Line Value: WS
  misc_feature: MA Experiment 20000453 PARAMETER Experiment Name: At_100uM_ABA_P Parameter: Timepoint (hr) Value: 24
  misc_feature: MA Experiment 20000453 PARAMETER Experiment Name: At_100uM_ABA_P Parameter: Tissue Value: Aerial
  misc_feature: MA Experiment 20000453 PARAMETER Experiment Name: At_100uM_ABA_P Parameter: Treatment Value: 100uM ABA vs. No Treatment
  misc_feature: MA Experiment ID: 20000455 Result: Up-regulated in Transcription
  misc_feature: MA Experiment 20000455 PARAMETER Experiment Name: At_100uM_ABA_P Parameter: Age (day) Value: 16
  misc_feature: MA Experiment 20000455 PARAMETER Experiment Name: At_100uM_ABA_P Parameter: Organism Value: A. thaliana
  misc_feature: MA Experiment 20000455 PARAMETER Experiment Name: At_100uM_ABA_P Parameter: Plant Line Value: WS
  misc_feature: MA Experiment 20000455 PARAMETER Experiment Name: At_100uM_ABA_P Parameter: Timepoint (hr) Value: 48
  misc_feature: MA Experiment 20000455 PARAMETER Experiment Name: At_100uM_ABA_P Parameter: Tissue Value: Aerial
  misc_feature: MA Experiment 20000455 PARAMETER Experiment Name: At_100uM_ABA_P Parameter: Treatment Value: 100uM ABA vs. No Treatment
  misc_feature: MA Experiment ID: 20000574 Result: Up-regulated in Transcription
  misc_feature: MA Experiment 20000574 PARAMETER Experiment Name: At_100uM_ABA_Mutants__P Parameter: Organism Value: A. thaliana
  misc_feature: MA Experiment 20000574 PARAMETER Experiment Name: At_100uM_ABA_Mutants__P Parameter: Plant Line Value: CS23 vs. Ler wt
  misc_feature: MA Experiment 20000574 PARAMETER Experiment Name: At_100uM_ABA_Mutants__P Parameter: Timepoint (hr) Value: N/A
  misc_feature: MA Experiment 20000574 PARAMETER Experiment Name: At_100uM_ABA_Mutants__P Parameter: Tissue Value: Whole Plant
  misc_feature: MA Experiment 20000574 PARAMETER Experiment Name: At_100uM_ABA_Mutants__P Parameter: Treatment Value: None
  misc_feature: MA Experiment ID: 20000794 Result: Up-regulated in Transcription
  misc_feature: MA Experiment 20000794 PARAMETER Experiment Name: At_Petals_P Parameter: Age (day) Value: 23-25 days
  misc_feature: MA Experiment 20000794 PARAMETER Experiment Name: At_Petals_P Parameter: Plant Line Value: WS
  misc_feature: MA Experiment 20000794 PARAMETER Experiment Name: At_Petals_P Parameter: Tissue Value: Petals vs. Whole plant
  misc_feature: MA Experiment ID: 20001554 Result: Up-regulated in Transcription
  misc_feature: MA Experiment 20001554 PARAMETER Experiment Name: At_Drought_Soil_Dry_P Parameter: Age (day) Value: 21
  misc_feature: MA Experiment 20001554 PARAMETER Experiment Name: At_Drought_Soil_Dry_P Parameter: Organism Value: A. thaliana
  misc_feature: MA Experiment 20001554 PARAMETER Experiment Name: At_Drought_Soil_Dry_P Parameter: Plant Line Value: WS
  misc_feature: MA Experiment 20001554 PARAMETER Experiment Name: At_Drought_Soil_Dry_P Parameter: Post Timepoint (hr) Value: None
  misc_feature: MA Experiment 20001554 PARAMETER Experiment Name: At_Drought_Soil_Dry_P Parameter: Post-Treatment Value: None
  misc_feature: MA Experiment 20001554 PARAMETER Experiment Name: At_Drought_Soil_Dry_P Parameter: Timepoint (day) Value: 7
  misc_feature: MA Experiment 20001554 PARAMETER Experiment Name: At_Drought_Soil_Dry_P Parameter: Treatment Value: Drought vs. No Drought
  misc_feature: MA Experiment ID: 20001555 Result: Up-regulated in Transcription
  misc_feature: MA Experiment 20001555 PARAMETER Experiment Name: At_Drought_Soil_Dry_P Parameter: Age (day) Value: 24
  misc_feature: MA Experiment 20001555 PARAMETER Experiment Name: At_Drought_Soil_Dry_P Parameter: Organism Value: A. thaliana
  misc_feature: MA Experiment 20001555 PARAMETER Experiment Name: At_Drought_Soil_Dry_P Parameter: Plant Line Value: WS
  misc_feature: MA Experiment 20001555 PARAMETER Experiment Name: At_Drought_Soil_Dry_P Parameter: Post Timepoint (hr) Value: None
  misc_feature: MA Experiment 20001555 PARAMETER Experiment Name: At_Drought_Soil_Dry_P Parameter: Post-Treatment Value: None
  misc_feature: MA Experiment 20001555 PARAMETER Experiment Name: At_Drought_Soil_Dry_P Parameter: Timepoint (day) Value: 10
  misc_feature: MA Experiment 20001555 PARAMETER Experiment Name: At_Drought_Soil_Dry_P Parameter: Treatment Value: Drought vs. No Drought
  misc_feature: MA Experiment ID: 20001556 Result: Up-regulated in Transcription
  misc_feature: MA Experiment 20001556 PARAMETER Experiment Name: At_Drought_Soil_Dry_P Parameter: Age (day) Value: 26
  misc_feature: MA Experiment 20001556 PARAMETER Experiment Name: At_Drought_Soil_Dry_P Parameter: Organism Value: A. thaliana
  misc_feature: MA Experiment 20001556 PARAMETER Experiment Name: At_Drought_Soil_Dry_P Parameter: Plant Line Value: WS
  misc_feature: MA Experiment 20001556 PARAMETER Experiment Name: At_Drought_Soil_Dry_P Parameter: Post Timepoint (hr) Value: None
  misc_feature: MA Experiment 20001556 PARAMETER Experiment Name: At_Drought_Soil_Dry_P Parameter: Post-Treatment Value: None
  misc_feature: MA Experiment 20001556 PARAMETER Experiment Name: At_Drought_Soil_Dry_P Parameter: Timepoint (day) Value: 12
  misc_feature: MA Experiment 20001556 PARAMETER Experiment Name: At_Drought_Soil_Dry_P Parameter: Treatment Value: Drought vs. No Drought
  misc_feature: MA Experiment ID: 20001559 Result: Up-regulated in Transcription
  misc_feature: MA Experiment 20001559 PARAMETER Experiment Name: At_Drought_Soil_Dry_P Parameter: Age (day) Value: 28
  misc_feature: MA Experiment 20001559 PARAMETER Experiment Name: At_Drought_Soil_Dry_P Parameter: Organism Value: A. thaliana
  misc_feature: MA Experiment 20001559 PARAMETER Experiment Name: At_Drought_Soil_Dry_P Parameter: Plant Line Value: WS
  misc_feature: MA Experiment 20001559 PARAMETER Experiment Name: At_Drought_Soil_Dry_P Parameter: Post Timepoint (hr) Value: 29
  misc_feature: MA Experiment 20001559 PARAMETER Experiment Name: At_Drought_Soil_Dry_P Parameter: Post-Treatment Value: Re-Water vs. No Drought
  misc_feature: MA Experiment 20001559 PARAMETER Experiment Name: At_Drought_Soil_Dry_P Parameter: Timepoint (day) Value: 14
  misc_feature: MA Experiment 20001559 PARAMETER Experiment Name: At_Drought_Soil_Dry_P Parameter: Treatment Value: Drought vs. No Drought
  misc_feature: MA Experiment ID: 20001560 Result: Down-regulated in Transcription
  misc_feature: MA Experiment 20001560 PARAMETER Experiment Name: At_Drought_Soil_Dry_P Parameter: Age (day) Value: 28
  misc_feature: MA Experiment 20001560 PARAMETER Experiment Name: At_Drought_Soil_Dry_P Parameter: Organism Value: A. thaliana
  misc_feature: MA Experiment 20001560 PARAMETER Experiment Name: At_Drought_Soil_Dry_P Parameter: Plant Line Value: WS
  misc_feature: MA Experiment 20001560 PARAMETER Experiment Name: At_Drought_Soil_Dry_P Parameter: Post Timepoint (hr) Value: None
  misc_feature: MA Experiment 20001560 PARAMETER Experiment Name: At_Drought_Soil_Dry_P Parameter: Post-Treatment Value: None
  misc_feature: MA Experiment 20001560 PARAMETER Experiment Name: At_Drought_Soil_Dry_P Parameter: Timepoint (day) Value: 14
  misc_feature: MA Experiment 20001560 PARAMETER Experiment Name: At_Drought_Soil_Dry_P Parameter: Treatment Value: Drought vs. No Drought
  misc_feature: MA Experiment ID: 20001757 Result: Down-regulated in Transcription
  misc_feature: MA Experiment 20001757 PARAMETER Experiment Name: At_50mM_NH4NO3_L-to-H_P Parameter: Timepoint (hr) Value: 6
  misc_feature: MA Experiment 20001757 PARAMETER Experiment Name: At_50mM_NH4NO3_L-to-H_P Parameter: Tissue Value: Leaf
  misc_feature: MA Experiment 20001757 PARAMETER Experiment Name: At_50mM_NH4NO3_L-to-H_P Parameter: Treatment Value: 50mM NH4NO3 vs 100mM Mannitol
  misc_feature: MA Experiment ID: 20001904 Result: Up-regulated in Transcription
  misc_feature: MA Experiment 20001904 PARAMETER Experiment Name: At_Drought_Reproduction_P Parameter: Age (day) Value: 37
  misc_feature: MA Experiment 20001904 PARAMETER Experiment Name: At_Drought_Reproduction_P Parameter: Organism Value: A. thaliana
  misc_feature: MA Experiment 20001904 PARAMETER Experiment Name: At_Drought_Reproduction_P Parameter: Plant Line Value: WS
  misc_feature: MA Experiment 20001904 PARAMETER Experiment Name: At_Drought_Reproduction_P Parameter: Timepoint (day) Value: 7
  misc_feature: MA Experiment 20001904 PARAMETER Experiment Name: At_Drought_Reproduction_P Parameter: Tissue Value: Rosettes
  misc_feature: MA Experiment 20001904 PARAMETER Experiment Name: At_Drought_Reproduction_P Parameter: Treatment Value: Drought vs. No Drought
aaaccattcacaatcagacaatgacatctctccatacgttactcttctcttctcttcttttcttcatcgtctttccaaccttcacgttttcctccaccttattgtttcagagtttcaattgggagtcatggaagaaagaaggaggattctacaattctctccacaactccattgacgacatagccaacgctggaatcactcatctttggcttcctcctccttctcaatccgttgctcctgaaggttacttaccgggaaagctatacgatctaaacagctccaaatacggttcagaggcggaactgaaatcgttaatcaaagcgttgaatcaaaaaggaataaaagctttggctgatatagtgattaaccacagaacagctgagaggaaagacgataaatgtggatactgttatttcgaaggtgggacttccgatgatcgtcttgattgggatccttcctttgtctgccgcaatgaccctaaatttcccggtaccggaaacctcgacaccggaggagattttgatggagcgcccgacatcgaccaccttaaccctagagttcagaaagagttgtccgaatggatgaattggcttaaaactgaaatcggattccatggttggagatttgattatgttcgaggttatgcatcttccatcaccaaattatacgttcagaatacatcaccggattttgcggtgggtgagaaatgggacgatatgaagtacggaggagacgggaaactagactatgatcagaacgagcatcggtcgggtctcaaacagtggatcgaggaagcgggtggtggtgtgttgacagcttttgatttcaccaccaaagggatcttacagtctgctgtcaaaggtgagctttggagactaaaggactcgcagggaaaaccgcctggtatgataggaatcatgcccggaaacgctgtcacattcatagataaccatgatacattcagaacgtgggttttcccttctgataaagtcttgcttggatacgtttatatacttactcatccaggaactccttgcattttttataatcattacatagaatggggactaaaagagagcatctcaaagctggtggctatcaggaacaaaaatgggattggtagcacaagctctgtaacgataaaagcggcagaggcggatctctacttggctatgattgatgataaagttatcatgaagattggaccaaagcaagatgtgggaacacttgttccttctaattttgctttagcttattcaggccttgactttgctgtctgggagaagaagtaacgcataactcgaatcataagaaaagtaatcgaatgtatcttcttcctttttaataaaacattttggcagtatctaaagatatgtataatgaaatataaaatgataaagaatacctaaataaaaagagcactagtggtgct

SEQ ID NO: 26568 - protein, 429 aa, Arabidopsis thaliana
  peptide (1)..(429): Ceres Seq. ID no. 13489718
  misc_feature (17)..(428): Homolog of NCBI NO: 166985 NR Description: alpha-amylase
  misc_feature (18)..(429): Homolog of NCBI NO: 7435331 NR Description: alpha-amylase (EC 3.2.1.1) precursor - southern
  misc_feature (15)..(427): Homolog of NCBI NO: 3769330 NR Description: alpha-amylase [Phaseolus vulgaris]
  misc_feature (19)..(427): Homolog of NCBI NO: 30962522 NR Description: alpha-amylase [Vigna angularis]
  misc_feature (19)..(427): Homolog of NCBI NO: 113781 NR Description: ALPHA-AMYLASE PRECURSOR (1,4-ALPHA-D-GLUCAN
  misc_feature (19)..(427): Homolog of NCBI NO: 228404 NR Description: alpha amylase
  misc_feature (14)..(429): Homolog of NCBI NO: 21670851 NR Description: alpha-amylase [Ipomoea nil]
  misc_feature (7)..(429): Homolog of NCBI NO: 7435330 NR Description: alpha-amylase (EC 3.2.1.1) - Arabidopsis thaliana
  misc_feature (7)..(429): Homolog of NCBI NO: 21592633 NR Description: alpha-amylase-like protein [Arabidopsis thaliana]
  misc_feature (7)..(429): Homolog of NCBI NO: 18416465 NR Description: alpha-amylase (1,4-alpha-D-glucan
TIHNQTMTSLHTLLFSSLLFFIVFPTFTFSSTLLFQSFNWESWKKEGGFYNSLHNSIDDIANAGITHLWLPPPSQSVAPEGYLPGKLYDLNSSKYGSEAELKSLIKALNQKGIKALADIVINHRTAERKDDKCGYCYFEGGTSDDRLDWDPSFVCRNDPKFPGTGNLDTGGDFDGAPDIDHLNPRVQKELSEWMNWLKTEIGFHGWRFDYVRGYASSITKLYVQNTSPDFAVGEKWDDMKYGGDGKLDYDQNEHRSGLKQWIEEAGGGVLTAFDFTTKGILQSAVKGELWRLKDSQGKPPGMIGIMPGNAVTFIDNHDTFRTWVFPSDKVLLGYVYILTHPGTPCIFYNHYIEWGLKESISKLVAIRNKNGIGSTSSVTIKAAEADLYLAMIDDKVIMKIGPKQDVGTLVPSNFALAYSGLDFAVWEKK

SEQ ID NO: 26569 - protein, 423 aa, Arabidopsis thaliana
  peptide (1)..(423): Ceres Seq. ID no. 13489719
  misc_feature (11)..(422): Homolog of NCBI NO: 166985 NR Description: alpha-amylase
  misc_feature (12)..(423): Homolog of NCBI NO: 7435331 NR Description: alpha-amylase (EC 3.2.1.1) precursor - southern
  misc_feature (9)..(421): Homolog of NCBI NO: 3769330 NR Description: alpha-amylase [Phaseolus vulgaris]
  misc_feature (13)..(421): Homolog of NCBI NO: 30962522 NR Description: alpha-amylase [Vigna angularis]
  misc_feature (13)..(421): Homolog of NCBI NO: 113781 NR Description: ALPHA-AMYLASE PRECURSOR (1,4-ALPHA-D-GLUCAN
  misc_feature (13)..(421): Homolog of NCBI NO: 228404 NR Description: alpha amylase
  misc_feature (8)..(423): Homolog of NCBI NO: 21670851 NR Description: alpha-amylase [Ipomoea nil]
  misc_feature (1)..(423): Homolog of NCBI NO: 7435330 NR Description: alpha-amylase (EC 3.2.1.1) - Arabidopsis thaliana
  misc_feature (1)..(423): Homolog of NCBI NO: 21592633 NR Description: alpha-amylase-like protein [Arabidopsis thaliana]
  misc_feature (1)..(423): Homolog of NCBI NO: 18416465 NR Description: alpha-amylase (1,4-alpha-D-glucan
MTSLHTLLFSSLLFFIVFPTFTFSSTLLFQSFNWESWKKEGGFYNSLHNSIDDIANAGITHLWLPPPSQSVAPEGYLPGKLYDLNSSKYGSEAELKSLIKALNQKGIKALADIVINHRTAERKDDKCGYCYFEGGTSDDRLDWDPSFVCRNDPKFPGTGNLDTGGDFDGAPDIDHLNPRVQKELSEWMNWLKTEIGFHGWRFDYVRGYASSITKLYVQNTSPDFAVGEKWDDMKYGGDGKLDYDQNEHRSGLKQWIEEAGGGVLTAFDFTTKGILQSAVKGELWRLKDSQGKPPGMIGIMPGNAVTFIDNHDTFRTWVFPSDKVLLGYVYILTHPGTPCIFYNHYIEWGLKESISKLVAIRNKNGIGSTSSVTIKAAEADLYLAMIDDKVIMKIGPKQDVGTLVPSNFALAYSGLDFAVWEKK

SEQ ID NO: 26570 - protein, 236 aa, Arabidopsis thaliana
  peptide (1)..(236): Ceres Seq. ID no. 13489720
  misc_feature (1)..(235): Homolog of NCBI NO: 166985 NR Description: alpha-amylase
  misc_feature (1)..(236): Homolog of NCBI NO: 7435331 NR Description: alpha-amylase (EC 3.2.1.1) precursor - southern
  misc_feature (1)..(234): Homolog of NCBI NO: 3769330 NR Description: alpha-amylase [Phaseolus vulgaris]
  misc_feature (1)..(234): Homolog of NCBI NO: 30962522 NR Description: alpha-amylase [Vigna angularis]
  misc_feature (1)..(234): Homolog of NCBI NO: 113781 NR Description: ALPHA-AMYLASE PRECURSOR (1,4-ALPHA-D-GLUCAN
  misc_feature (1)..(234): Homolog of NCBI NO: 228404 NR Description: alpha amylase
  misc_feature (1)..(236): Homolog of NCBI NO: 21670851 NR Description: alpha-amylase [Ipomoea nil]
  misc_feature (1)..(236): Homolog of NCBI NO: 7435330 NR Description: alpha-amylase (EC 3.2.1.1) - Arabidopsis thaliana
  misc_feature (1)..(236): Homolog of NCBI NO: 21592633 NR Description: alpha-amylase-like protein [Arabidopsis thaliana]
  misc_feature (1)..(236): Homolog of NCBI NO: 18416465 NR Description: alpha-amylase (1,4-alpha-D-glucan
MNWLKTEIGFHGWRFDYVRGYASSITKLYVQNTSPDFAVGEKWDDMKYGGDGKLDYDQNEHRSGLKQWIEEAGGGVLTAFDFTTKGILQSAVKGELWRLKDSQGKPPGMIGIMPGNAVTFIDNHDTFRTWVFPSDKVLLGYVYILTHPGTPCIFYNHYIEWGLKESISKLVAIRNKNGIGSTSSVTIKAAEADLYLAMIDDKVIMKIGPKQDVGTLVPSNFALAYSGLDFAVWEKK

SEQ ID NO: 26571 - DNA, 1253 bp, Arabidopsis thaliana
  misc_feature (1)..(1253): Ceres Seq. ID no. 13488238
  misc_feature: MA Experiment ID: 108434 Result: Up-regulated in Transcription
  misc_feature: MA Experiment 108434 PARAMETER Experiment Name: At_Root_Tips_cDNA_P Parameter: Tissue Value: Root Tips
  misc_feature: MA Experiment ID: 108462 Result: Down-regulated in Transcription
  misc_feature: MA Experiment 108462 PARAMETER Experiment Name: At_Germinating_Seeds_cDNA_P Parameter: Age (day) Value: 2 vs. 0
  misc_feature: MA Experiment 108462 PARAMETER Experiment Name: At_Germinating_Seeds_cDNA_P Parameter: Tissue Value: Germinating Seeds
  misc_feature: MA Experiment ID: 108463 Result: Down-regulated in Transcription
  misc_feature: MA Experiment 108463 PARAMETER Experiment Name: At_Germinating_Seeds_cDNA_P Parameter: Age (day) Value: 3 vs. 0
  misc_feature: MA Experiment 108463 PARAMETER Experiment Name: At_Germinating_Seeds_cDNA_P Parameter: Tissue Value: Germinating Seeds
  misc_feature: MA Experiment ID: 108464 Result: Down-regulated in Transcription
  misc_feature: MA Experiment 108464 PARAMETER Experiment Name: At_Germinating_Seeds_cDNA_P Parameter: Age (day) Value: 4 vs. 0
  misc_feature: MA Experiment 108464 PARAMETER Experiment Name: At_Germinating_Seeds_cDNA_P Parameter: Tissue Value: Germinating Seeds
  misc_feature: MA Experiment ID: 20000180 Result: Down-regulated in Transcription
  misc_feature: MA Experiment 20000180 PARAMETER Experiment Name: At_Germinating_Seeds_P Parameter: Age (hr) Value: 24 vs. 0
  misc_feature: MA Experiment 20000180 PARAMETER Experiment Name: At_Germinating_Seeds_P Parameter: Tissue Value: Germinating Seeds
  misc_feature: MA Experiment ID: 20000184 Result: Down-regulated in Transcription
  misc_feature: MA Experiment 20000184 PARAMETER Experiment Name: At_Shoots__P Parameter: Age (day) Value: 7
  misc_feature: MA Experiment 20000184 PARAMETER Experiment Name: At_Shoots__P Parameter: Tissue Value: Shoots vs. Whole Plant
  misc_feature: MA Experiment ID: 20001557 Result: Up-regulated in Transcription
  misc_feature: MA Experiment 20001557 PARAMETER Experiment Name: At_Drought_Soil_Dry_P Parameter: Age (day) Value: 27
  misc_feature: MA Experiment 20001557 PARAMETER Experiment Name: At_Drought_Soil_Dry_P Parameter: Organism Value: A. thaliana
  misc_feature: MA Experiment 20001557 PARAMETER Experiment Name: At_Drought_Soil_Dry_P Parameter: Plant Line Value: WS
  misc_feature: MA Experiment 20001557 PARAMETER Experiment Name: At_Drought_Soil_Dry_P Parameter: Post Timepoint (hr) Value: 3
  misc_feature: MA Experiment 20001557 PARAMETER Experiment Name: At_Drought_Soil_Dry_P Parameter: Post-Treatment Value: Re-Water vs. No Drought
  misc_feature: MA Experiment 20001557 PARAMETER Experiment Name: At_Drought_Soil_Dry_P Parameter: Timepoint (day) Value: 13
  misc_feature: MA Experiment 20001557 PARAMETER Experiment Name: At_Drought_Soil_Dry_P Parameter: Treatment Value: Drought vs. No Drought
  misc_feature: MA Experiment ID: 20001558 Result: Up-regulated in Transcription
  misc_feature: MA Experiment 20001558 PARAMETER Experiment Name: At_Drought_Soil_Dry_P Parameter: Age (day) Value: 27
  misc_feature: MA Experiment 20001558 PARAMETER Experiment Name: At_Drought_Soil_Dry_P Parameter: Organism Value: A. thaliana
  misc_feature: MA Experiment 20001558 PARAMETER Experiment Name: At_Drought_Soil_Dry_P Parameter: Plant Line Value: WS
  misc_feature: MA Experiment 20001558 PARAMETER Experiment Name: At_Drought_Soil_Dry_P Parameter: Post Timepoint (hr) Value: 6
  misc_feature: MA Experiment 20001558 PARAMETER Experiment Name: At_Drought_Soil_Dry_P Parameter: Post-Treatment Value: Re-Water vs. No Drought
  misc_feature: MA Experiment 20001558 PARAMETER Experiment Name: At_Drought_Soil_Dry_P Parameter: Timepoint (day) Value: 13
  misc_feature: MA Experiment 20001558 PARAMETER Experiment Name: At_Drought_Soil_Dry_P Parameter: Treatment Value: Drought vs. No Drought
agagagagaggctttcgattaattttactttgtggccgccgtgacctttttcttagcgtcgctctctgtcaccttcaagttcactatctccgacttatcttctgtcaagtactgaacaagaatcatggaggagatcaccaaaccggtccttgttggaatagttaagaaagaagctccacagctagcatccgtgttgagagaaatgaagaatgttctagatgtggttaggagcaaagtggaagctctgactgcattggtaaaagcaaacagttttccgacagcgggtgggataagttatcttgaggccaagcatctgttacttctaagttattgccaggatcttgtatattatattctaaggaaagcaaaaggactctctattgatggtcatcctcttgtaaggagccttgtagagatacgtatgtttctggaaaagattcgtcccatagacaaaaaacttcagtaccagattcagaagctcaccacagccggtgggcctgtgacagagctagctcattccgagggaaaggggtcgtgtgaagcccaaaaatctgaagatctttcaaattataagcctaaacctgacttacttgctgacaaagaggatgaccaagaggatgatggtgtttatcgacccccgaaatttgcccctatgtctatggaagataagacttcaaaacaagaaagagatgctgccagaaaagagaaacacttttttagacaagccactgaaaatacatacatgaaagatgtgttggacgatctggaggacaggcctgaagagattagagactattatggggttgagagcaatgagcagaagaggtttatggcacagtatgaaaggcaacaaaaggcagaagaagagctctttacccgggcacctcgcactaaagaggataagaagagagagaagcgcttgaaatcaagcagcgggttgcatgaactaaccgagaacttttacgatgatatcaagttcttggataaggatggtgaaaagccaagaagcttcggccgtaataaaaggggagggccattcaagaaaagaaagacaaggcactgatatggatacaccagtggttcctttagctgcttcagtgcaccaattttgttgccatgaaaaagatacaaattttcgatttgcttttatgattaaatgttgaaagtggtgaatgtgagaacttgttatcagttttagtattggttcatggtcatgctcttgcagtaaaattaggaagagaccttttctcttt

SEQ ID NO: 26572 - protein, 312 aa, Arabidopsis thaliana
  peptide (1)..(312): Ceres Seq. ID no. 13488239
  misc_feature (11)..(104): Pfam Name: Sas10/Utp3 family Pfam Description: Sas10/Utp3 family
  misc_feature (1)..(312): Homolog of NCBI NO: 18390818 NR Description: expressed protein [Arabidopsis thaliana]
  misc_feature (12)..(311): Homolog of NCBI NO: 40675680 NR Description: Unknown (protein for IMAGE:5336691) [Silurana
  misc_feature (12)..(309): Homolog of NCBI NO: 34874139 NR Description: similar to CG11030-PA [Rattus norvegicus]
  misc_feature (12)..(309): Homolog of NCBI NO: 20876056 NR Description: RIKEN cDNA 1500001L15 [Mus musculus]
  misc_feature (5)..(309): Homolog of NCBI NO: 23272205 NR Description: 1500001L15Rik protein [Mus musculus]
  misc_feature (10)..(309): Homolog of NCBI NO: 21410066 NR Description: DKFZP564O092 protein [Homo sapiens]
  misc_feature (6)..(309): Homolog of NCBI NO: 37545892 NR Description: similar to hypothetical protein [Homo sapiens]
  misc_feature (6)..(309): Homolog of NCBI NO: 7512783 NR Description: hypothetical protein DKFZp564O092.1 - human
  misc_feature (16)..(122): Homolog of NCBI NO: 34906856 NR Description: P0470A12.5 [Oryza sativa (japonica
  misc_feature (1)..(271): Homolog of NCBI NO: 25372823 NR Description: protein F24B9.6 [imported] - Arabidopsis thaliana
MEEITKPVLVGIVKKEAPQLASVLREMKNVLDVVRSKVEALTALVKANSFPTAGGISYLEAKHLLLLSYCQDLVYYILRKAKGLSIDGHPLVRSLVEIRMFLEKIRPIDKKLQYQIQKLTTAGGPVTELAHSEGKGSCEAQKSEDLSNYKPKPDLLADKEDDQEDDGVYRPPKFAPMSMEDKTSKQERDAARKEKHFFRQATENTYMKDVLDDLEDRPEEIRDYYGVESNEQKRFMAQYERQQKAEEELFTRAPRTKEDKKREKRLKSSSGLHELTENFYDDIKFLDKDGEKPRSFGRNKRGGPFKKRKTRH

SEQ ID NO: 26573 - protein, 286 aa, Arabidopsis thaliana
  peptide (1)..(286): Ceres Seq. ID no. 13488240
  misc_feature (1)..(78): Pfam Name: Sas10/Utp3 family Pfam Description: Sas10/Utp3 family
  misc_feature (1)..(285): Homolog of NCBI NO: 40675680 NR Description: Unknown (protein for IMAGE:5336691) [Silurana
  misc_feature (1)..(283): Homolog of NCBI NO: 34874139 NR Description: similar to CG11030-PA [Rattus norvegicus]
  misc_feature (1)..(283): Homolog of NCBI NO: 20876056 NR Description: RIKEN cDNA 1500001L15 [Mus musculus]
  misc_feature (1)..(283): Homolog of NCBI NO: 23272205 NR Description: 1500001L15Rik protein [Mus musculus]
  misc_feature (1)..(283): Homolog of NCBI NO: 21410066 NR Description: DKFZP564O092 protein [Homo sapiens]
  misc_feature (1)..(283): Homolog of NCBI NO: 37545892 NR Description: similar to hypothetical protein [Homo sapiens]
  misc_feature (1)..(283): Homolog of NCBI NO: 7512783 NR Description: hypothetical protein DKFZp564O092.1 - human
  misc_feature (1)..(96): Homolog of NCBI NO: 34906856 NR Description: P0470A12.5 [Oryza sativa (japonica
  misc_feature (1)..(245): Homolog of NCBI NO: 25372823 NR Description: protein F24B9.6 [imported] - Arabidopsis thaliana
  misc_feature (1)..(286): Homolog of NCBI NO: 18390818 NR Description: expressed protein [Arabidopsis thaliana]
MKNVLDVVRSKVEALTALVKANSFPTAGGISYLEAKHLLLLSYCQDLVYYILRKAKGLSIDGHPLVRSLVEIRMFLEKIRPIDKKLQYQIQKLTTAGGPVTELAHSEGKGSCEAQKSEDLSNYKPKPDLLADKEDDQEDDGVYRPPKFAPMSMEDKTSKQERDAARKEKHFFRQATENTYMKDVLDDLEDRPEEIRDYYGVESNEQKRFMAQYERQQKAEEELFTRAPRTKEDKKREKRLKSSSGLHELTENFYDDIKFLDKDGEKPRSFGRNKRGGPFKKRKTRH

SEQ ID NO: 26574 - protein, 213 aa, Arabidopsis thaliana
  peptide (1)..(213): Ceres Seq. ID no. 13488241
  misc_feature (1)..(212): Homolog of NCBI NO: 40675680 NR Description: Unknown (protein for IMAGE:5336691) [Silurana
  misc_feature (1)..(210): Homolog of NCBI NO: 34874139 NR Description: similar to CG11030-PA [Rattus norvegicus]
  misc_feature (1)..(210): Homolog of NCBI NO: 20876056 NR Description: RIKEN cDNA 1500001L15 [Mus musculus]
  misc_feature (1)..(210): Homolog of NCBI NO: 23272205 NR Description: 1500001L15Rik protein [Mus musculus]
  misc_feature (1)..(210): Homolog of NCBI NO: 21410066 NR Description: DKFZP564O092 protein [Homo sapiens]
  misc_feature (1)..(210): Homolog of NCBI NO: 37545892 NR Description: similar to hypothetical protein [Homo sapiens]
  misc_feature (1)..(210): Homolog of NCBI NO: 7512783 NR Description: hypothetical protein DKFZp564O092.1 - human
  misc_feature (1)..(23): Homolog of NCBI NO: 34906856 NR Description: P0470A12.5 [Oryza sativa (japonica
  misc_feature (1)..(172): Homolog of NCBI NO: 25372823 NR Description: protein F24B9.6 [imported] - Arabidopsis thaliana
  misc_feature (1)..(213): Homolog of NCBI NO: 18390818 NR Description: expressed protein [Arabidopsis thaliana]
MFLEKIRPIDKKLQYQIQKLTTAGGPVTELAHSEGKGSCEAQKSEDLSNYKPKPDLLADKEDDQEDDGVYRPPKFAPMSMEDKTSKQERDAARKEKHFFRQATENTYMKDVLDDLEDRPEEIRDYYGVESNEQKRFMAQYERQQKAEEELFTRAPRTKEDKKREKRLKSSSGLHELTENFYDDIKFLDKDGEKPRSFGRNKRGGPFKKRKTRH

SEQ ID NO: 26575 - DNA, 921 bp, Arabidopsis thaliana
  misc_feature (1)..(921): Ceres Seq. ID no. 13487316
  misc_feature: MA Experiment ID: 20001248 Result: Down-regulated in Transcription
  misc_feature: MA Experiment 20001248 PARAMETER Experiment Name: At_Far-red-induction_P Parameter: Age (day) Value: 7
  misc_feature: MA Experiment 20001248 PARAMETER Experiment Name: At_Far-red-induction_P Parameter: Light Value: Far-red vs. White
  misc_feature: MA Experiment 20001248 PARAMETER Experiment Name: At_Far-red-induction_P Parameter: Organism Value: A. thaliana
  misc_feature: MA Experiment 20001248 PARAMETER Experiment Name: At_Far-red-induction_P Parameter: Plant Line Value: Columbia
  misc_feature: MA Experiment 20001248 PARAMETER Experiment Name: At_Far-red-induction_P Parameter: Timepoint (hr) Value: 4
  misc_feature: MA Experiment 20001248 PARAMETER Experiment Name: At_Far-red-induction_P Parameter: Tissue Value: Whole Plant
aaaaaaaattagggtcgccttcttcttcttcttctctgacatcggaagaatcttcagtgccgagaaagataaacaaaatggcggcaatcagaacgatgacgaacatgattctacgcgagttcatccatcatccacttctccttcactcttcatcgaaatcgtgtcaatctcttttaccatgtctccgtctcactcccctaatttctccaattcactctaattcccggctcgtatccgtccgatgtgcggcatcgacctccggtggaagcggtggtgatcggaaagtctcttcacggttgtcgcaggtgcaacagatgcttcatgaagccgaagagagagctagttccgctggcaatgagcctactcctcaaatcactctagacaatgttacacttaactttgctagaagtggtggtcctggaggccagaatgtgaacaaattgaataccaaagtagatatgcgcttcaatgttaagaacgcgtattggctgagtgacaggatcagagagaaaatcttactgacggagaagaatcggatcaacaaggatggtgaacttgtgatatcttctaccaaaaccagaacgcagaaaggtaacatcgacgatgcacttgaaaaactacaggcgataattgatgcggcttcatatgttccacctccaccatcagaagaacaaaagaagaaaatagtaaagctcgctgcgaaagctgacaataaacgacttaaaagcaaaaaagttctgtcagacaagaaatctgcgagaagaagccgcggtagttacgatgattaaacttaaaaccatacaatggagtccaggttgattctaaagcttttaacttaaaatgattgttattttcttggaatttaatgtaacacaacaatcaaatcatccaataaaaattgcagtatattggattttatgc

SEQ ID NO: 26576 - protein, 261 aa, Arabidopsis thaliana
  peptide (1)..(261): Ceres Seq. ID no. 13487317
  misc_feature (112)..(254): Homolog of NCBI NO: 4557657 NR Description: immature colon carcinoma transcript 1 [Homo
  misc_feature (124)..(254): Homolog of NCBI NO: 20306641 NR Description: Ict1 protein [Mus musculus]
  misc_feature (124)..(254): Homolog of NCBI NO: 12833859 NR Description: unnamed protein product [Mus musculus]
  misc_feature (119)..(254): Homolog of NCBI NO: 27690532 NR Description: similar to immature colon carcinoma transcript 1
  misc_feature (103)..(254): Homolog of NCBI NO: 19387848 NR Description: immature colon carcinoma transcript 1 [Mus
  misc_feature (232)..(261): Homolog of NCBI NO: 6630453 NR Description: F23N19.20 [Arabidopsis thaliana]
  misc_feature (127)..(195): Homolog of NCBI NO: 6630453 NR Description: F23N19.20 [Arabidopsis thaliana]
  misc_feature (26)..(126): Homolog of NCBI NO: 22330386 NR Description: expressed protein [Arabidopsis thaliana]
  misc_feature (153)..(261): Homolog of NCBI NO: 15221608 NR Description: expressed protein [Arabidopsis thaliana]
  misc_feature (26)..(261): Homolog of NCBI NO: 27754314 NR Description: unknown protein [Arabidopsis thaliana]
KKLGSPSSSSSLTSEESSVPRKINKMAAIRTMTNMILREFIHHPLLLHSSSKSCQSLLPCLRLTPLISPIHSNSRLVSVRCAASTSGGSGGDRKVSSRLSQVQQMLHEAEERASSAGNEPTPQITLDNVTLNFARSGGPGGQNVNKLNTKVDMRFNVKNAYWLSDRIREKILLTEKNRINKDGELVISSTKTRTQKGNIDDALEKLQAIIDAASYVPPPPSEEQKKKIVKLAAKADNKRLKSKKVLSDKKSARRSRGSYDD

SEQ ID NO: 26577 - protein, 236 aa, Arabidopsis thaliana
  peptide (1)..(236): Ceres Seq. ID no. 13487318
  misc_feature (87)..(229): Homolog of NCBI NO: 4557657 NR Description: immature colon carcinoma transcript 1 [Homo
  misc_feature (99)..(229): Homolog of NCBI NO: 20306641 NR Description: Ict1 protein [Mus musculus]
  misc_feature (99)..(229): Homolog of NCBI NO: 12833859 NR Description: unnamed protein product [Mus musculus]
  misc_feature (94)..(229): Homolog of NCBI NO: 27690532 NR Description: similar to immature colon carcinoma transcript 1
  misc_feature (78)..(229): Homolog of NCBI NO: 19387848 NR Description: immature colon carcinoma transcript 1 [Mus
  misc_feature (207)..(236): Homolog of NCBI NO: 6630453 NR Description: F23N19.20 [Arabidopsis thaliana]
  misc_feature (102)..(170): Homolog of NCBI NO: 6630453 NR Description: F23N19.20 [Arabidopsis thaliana]
  misc_feature (1)..(101): Homolog of NCBI NO: 22330386 NR Description: expressed protein [Arabidopsis thaliana]
  misc_feature (128)..(236): Homolog of NCBI NO: 15221608 NR Description: expressed protein [Arabidopsis thaliana]
  misc_feature (1)..(236): Homolog of NCBI NO: 27754314 NR Description: unknown protein [Arabidopsis thaliana]
MAAIRTMTNMILREFIHHPLLLHSSSKSCQSLLPCLRLTPLISPIHSNSRLVSVRCAASTSGGSGGDRKVSSRLSQVQQMLHEAEERASSAGNEPTPQITLDNVTLNFARSGGPGGQNVNKLNTKVDMRFNVKNAYWLSDRIREKILLTEKNRINKDGELVISSTKTRTQKGNIDDALEKLQAIIDAASYVPPPPSEEQKKKIVKLAAKADNKRLKSKKVLSDKKSARRSRGSYDD

SEQ ID NO: 26578 - protein, 230 aa, Arabidopsis thaliana
  peptide (1)..(230): Ceres Seq. ID no. 13487319
  misc_feature (81)..(223): Homolog of NCBI NO: 4557657 NR Description: immature colon carcinoma transcript 1 [Homo
  misc_feature (93)..(223): Homolog of NCBI NO: 20306641 NR Description: Ict1 protein [Mus musculus]
  misc_feature (93)..(223): Homolog of NCBI NO: 12833859 NR Description: unnamed protein product [Mus musculus]
  misc_feature (88)..(223): Homolog of NCBI NO: 27690532 NR Description: similar to immature colon carcinoma transcript 1
  misc_feature (72)..(223): Homolog of NCBI NO: 19387848 NR Description: immature colon carcinoma transcript 1 [Mus
  misc_feature (201)..(230): Homolog of NCBI NO: 6630453 NR Description: F23N19.20 [Arabidopsis thaliana]
  misc_feature (96)..(164): Homolog of NCBI NO: 6630453 NR Description: F23N19.20 [Arabidopsis thaliana]
  misc_feature (1)..(95): Homolog of NCBI NO: 22330386 NR Description: expressed protein [Arabidopsis thaliana]
  misc_feature (122)..(230): Homolog of NCBI NO: 15221608 NR Description: expressed protein [Arabidopsis thaliana]
  misc_feature (1)..(230): Homolog of NCBI NO: 27754314 NR Description: unknown protein [Arabidopsis thaliana]
MTNMILREFIHHPLLLHSSSKSCQSLLPCLRLTPLISPIHSNSRLVSVRCAASTSGGSGGDRKVSSRLSQVQQMLHEAEERASSAGNEPTPQITLDNVTLNFARSGGPGGQNVNKLNTKVDMRFNVKNAYWLSDRIREKILLTEKNRINKDGELVISSTKTRTQKGNIDDALEKLQAIIDAASYVPPPPSEEQKKKIVKLAAKADNKRLKSKKVLSDKKSARRSRGSYDD

SEQ ID NO: 26579 - DNA, 830 bp, Arabidopsis thaliana
  misc_feature (1)..(830): Ceres Seq. ID no. 13486615
  misc_feature: MA Experiment ID: 108434 Result: Up-regulated in Transcription
  misc_feature: MA Experiment 108434 PARAMETER Experiment Name: At_Root_Tips_cDNA_P Parameter: Tissue Value: Root Tips
  misc_feature: MA Experiment ID: 108462 Result: Down-regulated in Transcription
  misc_feature: MA Experiment 108462 PARAMETER Experiment Name: At_Germinating_Seeds_cDNA_P Parameter: Age (day) Value: 2 vs. 0
  misc_feature: MA Experiment 108462 PARAMETER Experiment Name: At_Germinating_Seeds_cDNA_P Parameter: Tissue Value: Germinating Seeds
  misc_feature: MA Experiment ID: 108463 Result: Down-regulated in Transcription
  misc_feature: MA Experiment 108463 PARAMETER Experiment Name: At_Germinating_Seeds_cDNA_P Parameter: Age (day) Value: 3 vs. 0
  misc_feature: MA Experiment 108463 PARAMETER Experiment Name: At_Germinating_Seeds_cDNA_P Parameter: Tissue Value: Germinating Seeds
  misc_feature: MA Experiment ID: 108464 Result: Down-regulated in Transcription
  misc_feature: MA Experiment 108464 PARAMETER Experiment Name: At_Germinating_Seeds_cDNA_P Parameter: Age (day) Value: 4 vs. 0
  misc_feature: MA Experiment 108464 PARAMETER Experiment Name: At_Germinating_Seeds_cDNA_P Parameter: Tissue Value: Germinating Seeds
  misc_feature: MA Experiment ID: 108579 Result: Down-regulated in Transcription
  misc_feature: MA Experiment 108579 PARAMETER Experiment Name: At_4deg_Cold_cDNA_P Parameter: Temperature (deg C) Value: 4 vs. 22
  misc_feature: MA Experiment 108579 PARAMETER Experiment Name: At_4deg_Cold_cDNA_P Parameter: Timepoint (hr) Value: 6
  misc_feature: MA Experiment 108579 PARAMETER Experiment Name: At_4deg_Cold_cDNA_P Parameter: Tissue Value: Aerial
attgagatcgaaattctcttcattttctcaggctccaatgtcgctggacttagctcgttgatcatcgtacaaaaagcttgctcgtagctatcagctccccggagaagaagatggtgcggaaacagtttcaacaggctaaaactggaatagaggcattgaagtcaatggatgctaacaactacttgaagaaggttggattagggcgtgacgatatgttcttttggaaacaagtgggaaaagcattgctatgcacttacacaatctttggtatggcttggatttacaatgaaacgtctcctttaggttggtggacgctgaagccaagaccaaaggaagagagagaattggctcatttgtatgagcggcgtgagtttccttatcctggtgatacagaggctatggaggattttgttgcaaaggggggaatgattggtactgcaattggaccgaaaggaattgttgagtccgaaggtgaggctgataattaccagaaggaaatggagaagaagaagtttgataaagaggctcagaaactgtggttgagaatgaggaatgaggttattactgaacttcaagagaaagggcataatcttgaataaggaagtgcaatagggttttgataaataaaaaagctgtgtgtaatttagggtgtgtatcagttagactaaggattcaaccactcgtacaagtgtttctgtctacgtatagctgaaagtactatactggttgatgttcttgctcttggggaagtagctcttgtcctttattggtggcttgattcatgttttggcttaaaccctttggaatataacttgatgcgttttgctccc

SEQ ID NO: 26580 - protein, 162 aa, Arabidopsis thaliana
  peptide (1)..(162): Ceres Seq. ID no. 13486616
  misc_feature (21)..(162): Homolog of NCBI NO: 14587335 NR Description: P0460H02.16 [Oryza sativa (japonica
  misc_feature (1)..(162): Homolog of NCBI NO: 21592650 NR Description: unknown [Arabidopsis thaliana]
  misc_feature (1)..(162): Homolog of NCBI NO: 15237778 NR Description: expressed protein [Arabidopsis thaliana]
MVRKQFQQAKTGIEALKSMDANNYLKKVGLGRDDMFFWKQVGKALLCTYTIFGMAWIYNETSPLGWWTLKPRPKEERELAHLYERREFPYPGDTEAMEDFVAKGGMIGTAIGPKGIVESEGEADNYQKEMEKKKFDKEAQKLWLRMRNEVITELQEKGHNLE

SEQ ID NO: 26581 - protein, 144 aa, Arabidopsis thaliana
  peptide (1)..(144): Ceres Seq. ID no. 13486617
  misc_feature (3)..(144): Homolog of NCBI NO: 14587335 NR Description: P0460H02.16 [Oryza sativa (japonica
  misc_feature (1)..(144): Homolog of NCBI NO: 21592650 NR Description: unknown [Arabidopsis thaliana]
  misc_feature (1)..(144): Homolog of NCBI NO: 15237778 NR Description: expressed protein [Arabidopsis thaliana]
MDANNYLKKVGLGRDDMFFWKQVGKALLCTYTIFGMAWIYNETSPLGWWTLKPRPKEERELAHLYERREFPYPGDTEAMEDFVAKGGMIGTAIGPKGIVESEGEADNYQKEMEKKKFDKEAQKLWLRMRNEVITELQEKGHNLE

SEQ ID NO: 26582 - protein, 128 aa, Arabidopsis thaliana
  peptide (1)..(128): Ceres Seq. ID no. 13486618
  misc_feature (1)..(128): Homolog of NCBI NO: 14587335 NR Description: P0460H02.16 [Oryza sativa (japonica
  misc_feature (1)..(128): Homolog of NCBI NO: 21592650 NR Description: unknown [Arabidopsis thaliana]
  misc_feature (1)..(128): Homolog of NCBI NO: 15237778 NR Description: expressed protein [Arabidopsis thaliana]
MFFWKQVGKALLCTYTIFGMAWIYNETSPLGWWTLKPRPKEERELAHLYERREFPYPGDTEAMEDFVAKGGMIGTAIGPKGIVESEGEADNYQKEMEKKKFDKEAQKLWLRMRNEVITELQEKGHNLE

SEQ ID NO: 26583 - DNA, 1357 bp, Arabidopsis thaliana
  misc_feature (1)..(1357): Ceres Seq. ID no. 12372055
  misc_feature: MA Experiment ID: 108488 Result: Down-regulated in Transcription
  misc_feature: MA Experiment ID: 108573 Result: Up-regulated in Transcription
  misc_feature: MA Experiment 108573 PARAMETER Experiment Name: At_Drought_cDNA_P Parameter: Timepoint (hr) Value: 6
  misc_feature: MA Experiment 108573 PARAMETER Experiment Name: At_Drought_cDNA_P Parameter: Tissue Value: Aerial
  misc_feature: MA Experiment 108573 PARAMETER Experiment Name: At_Drought_cDNA_P Parameter: Treatment Value: Drought vs. No Drought
  misc_feature: MA Experiment ID: 108577 Result: Down-regulated in Transcription
  misc_feature: MA Experiment 108577 PARAMETER Experiment Name: At_42deg_Heat_cDNA_P Parameter: Temperature (deg C) Value: 42 vs. 22
  misc_feature: MA Experiment 108577 PARAMETER Experiment Name: At_42deg_Heat_cDNA_P Parameter: Timepoint (hr) Value: 6
  misc_feature: MA Experiment 108577 PARAMETER Experiment Name: At_42deg_Heat_cDNA_P Parameter: Tissue Value: Aerial
  misc_feature: MA Experiment ID: 20000069 Result: Up-regulated in Transcription
  misc_feature: MA Experiment 20000069 PARAMETER Experiment Name: At_100uM_ABA_Mutants_cDNA_P Parameter: Plant Line Value: CS23
  misc_feature: MA Experiment 20000069 PARAMETER Experiment Name: At_100uM_ABA_Mutants_cDNA_P Parameter: Timepoint (hr) Value: 6
  misc_feature: MA Experiment 20000069 PARAMETER Experiment Name: At_100uM_ABA_Mutants_cDNA_P Parameter: Tissue Value: Aerial
  misc_feature: MA Experiment 20000069 PARAMETER Experiment Name: At_100uM_ABA_Mutants_cDNA_P Parameter: Treatment Value: 100uM ABA vs. No Treatment
  misc_feature: MA Experiment ID: 20000070 Result: Up-regulated in Transcription
  misc_feature: MA Experiment 20000070 PARAMETER Experiment Name: At_100uM_ABA_Mutants_cDNA_P Parameter: Plant Line Value: CS24
  misc_feature: MA Experiment 20000070 PARAMETER Experiment Name: At_100uM_ABA_Mutants_cDNA_P Parameter: Timepoint (hr) Value: 6
  misc_feature: MA Experiment 20000070 PARAMETER Experiment Name: At_100uM_ABA_Mutants_cDNA_P Parameter: Tissue Value: Aerial
  misc_feature: MA Experiment 20000070 PARAMETER Experiment Name: At_100uM_ABA_Mutants_cDNA_P Parameter: Treatment Value: 100uM ABA vs. No Treatment
  misc_feature: MA Experiment ID: 20000071 Result: Up-regulated in Transcription
  misc_feature: MA Experiment 20000071 PARAMETER Experiment Name: At_100uM_ABA_Mutants_cDNA_P Parameter: Plant Line Value: CS8104
  misc_feature: MA Experiment 20000071 PARAMETER Experiment Name: At_100uM_ABA_Mutants_cDNA_P Parameter: Timepoint (hr) Value: 6
  misc_feature: MA Experiment 20000071 PARAMETER Experiment Name: At_100uM_ABA_Mutants_cDNA_P Parameter: Tissue Value: Aerial
  misc_feature: MA Experiment 20000071 PARAMETER Experiment Name: At_100uM_ABA_Mutants_cDNA_P Parameter: Treatment Value: 100uM ABA vs. No Treatment
  misc_feature: MA Experiment ID: 20000072 Result: Up-regulated in Transcription
  misc_feature: MA Experiment 20000072 PARAMETER Experiment Name: At_100uM_ABA_Mutants_cDNA_P Parameter: Plant Line Value: CS8105
  misc_feature: MA Experiment 20000072 PARAMETER Experiment Name: At_100uM_ABA_Mutants_cDNA_P Parameter: Timepoint (hr) Value: 6
  misc_feature: MA Experiment 20000072 PARAMETER Experiment Name: At_100uM_ABA_Mutants_cDNA_P Parameter: Tissue Value: Aerial
  misc_feature: MA Experiment 20000072 PARAMETER Experiment Name: At_100uM_ABA_Mutants_cDNA_P Parameter: Treatment Value: 100uM ABA vs. No Treatment
  misc_feature: MA Experiment ID: 20000086 Result: Up-regulated in Transcription
  misc_feature: MA Experiment 20000086 PARAMETER Experiment Name: At_100uM_ABA_Mutants_cDNA_P Parameter: Plant Line Value: CS22
  misc_feature: MA Experiment 20000086 PARAMETER Experiment Name: At_100uM_ABA_Mutants_cDNA_P Parameter: Timepoint (hr) Value: 6
  misc_feature: MA Experiment 20000086 PARAMETER Experiment Name: At_100uM_ABA_Mutants_cDNA_P Parameter: Tissue Value: Aerial
  misc_feature: MA Experiment 20000086 PARAMETER Experiment Name: At_100uM_ABA_Mutants_cDNA_P Parameter: Treatment Value: 100uM ABA vs. No Treatment
  misc_feature: MA Experiment ID: 20000087 Result: Up-regulated in Transcription
  misc_feature: MA Experiment 20000087 PARAMETER Experiment Name: At_100uM_ABA_Mutants_cDNA_P Parameter: Plant Line Value: WS
  misc_feature: MA Experiment 20000087 PARAMETER Experiment Name: At_100uM_ABA_Mutants_cDNA_P Parameter: Timepoint (hr) Value: 6
  misc_feature: MA Experiment 20000087 PARAMETER Experiment Name: At_100uM_ABA_Mutants_cDNA_P Parameter: Tissue Value: Aerial
  misc_feature: MA Experiment 20000087 PARAMETER Experiment Name: At_100uM_ABA_Mutants_cDNA_P Parameter: Treatment Value: 100uM ABA vs. No Treatment
  misc_feature: MA Experiment ID: 20000088 Result: Up-regulated in Transcription
  misc_feature: MA Experiment 20000088 PARAMETER Experiment Name: At_100uM_ABA_Mutants_cDNA_P Parameter: Plant Line Value: Landsberg
  misc_feature: MA Experiment 20000088 PARAMETER Experiment Name: At_100uM_ABA_Mutants_cDNA_P Parameter: Timepoint (hr) Value: 6
  misc_feature: MA Experiment 20000088 PARAMETER Experiment Name: At_100uM_ABA_Mutants_cDNA_P Parameter: Tissue Value: Aerial
  misc_feature: MA Experiment 20000088 PARAMETER Experiment Name: At_100uM_ABA_Mutants_cDNA_P Parameter: Treatment Value: 100uM ABA vs. No Treatment
  misc_feature: MA Experiment ID: 20000111 Result: Down-regulated in Transcription
  misc_feature: MA Experiment 20000111 PARAMETER Experiment Name: At_42deg_Heat_cDNA_P Parameter: Temperature (deg C) Value: 42 vs. 22
  misc_feature: MA Experiment 20000111 PARAMETER Experiment Name: At_42deg_Heat_cDNA_P Parameter: Timepoint (hr) Value: 6
  misc_feature: MA Experiment 20000111 PARAMETER Experiment Name: At_42deg_Heat_cDNA_P Parameter: Tissue Value: Aerial
  misc_feature: MA Experiment ID: 20000113 Result: Down-regulated in Transcription
  misc_feature: MA Experiment 20000113 PARAMETER Experiment Name: At_42deg_Heat_cDNA_P Parameter: Temperature (deg C) Value: 42 vs. 22
  misc_feature: MA Experiment 20000113 PARAMETER Experiment Name: At_42deg_Heat_cDNA_P Parameter: Timepoint (hr) Value: 8
  misc_feature: MA Experiment 20000113 PARAMETER Experiment Name: At_42deg_Heat_cDNA_P Parameter: Tissue Value: Aerial
  misc_feature: MA Experiment ID: 20000173 Result: Down-regulated in Transcription
  misc_feature: MA Experiment 20000173 PARAMETER Experiment Name: At_42deg_Heat_P Parameter: Age (day) Value: 14
  misc_feature: MA Experiment 20000173 PARAMETER Experiment Name: At_42deg_Heat_P Parameter: Organism Value: A. thaliana
  misc_feature: MA Experiment 20000173 PARAMETER Experiment Name: At_42deg_Heat_P Parameter: Plant Line Value: WS
  misc_feature: MA Experiment 20000173 PARAMETER Experiment Name: At_42deg_Heat_P Parameter: Temperature (deg C) Value: 42 vs. 22
  misc_feature: MA Experiment 20000173 PARAMETER Experiment Name: At_42deg_Heat_P Parameter: Timepoint (hr) Value: 6
  misc_feature: MA Experiment 20000173 PARAMETER Experiment Name: At_42deg_Heat_P Parameter: Tissue Value: Aerial
  misc_feature: MA Experiment ID: 20000224 Result: Down-regulated in Transcription
  misc_feature: MA Experiment ID: 20000264 Result: Up-regulated in Transcription
  misc_feature: MA Experiment 20000264 PARAMETER Experiment Name: At_Open_Flower_P Parameter: Age (day) Value: 21
  misc_feature: MA Experiment 20000264 PARAMETER Experiment Name: At_Open_Flower_P Parameter: Plant Line Value: WS
  misc_feature: MA Experiment 20000264 PARAMETER Experiment Name: At_Open_Flower_P Parameter: Tissue Value: Open Flower vs. Whole Plant
  misc_feature: MA Experiment ID: 20000265 Result: Up-regulated in Transcription
  misc_feature: MA Experiment 20000265 PARAMETER Experiment Name: At_Open_Flower_P Parameter: Age (day) Value: 21
  misc_feature: MA Experiment 20000265 PARAMETER Experiment Name: At_Open_Flower_P Parameter: Plant Line Value: WS
  misc_feature: MA Experiment 20000265 PARAMETER Experiment Name: At_Open_Flower_P Parameter: Tissue Value: Closed Flower vs. Whole Plant
  misc_feature: MA Experiment ID: 20000286 Result: Up-regulated in Transcription
  misc_feature: MA Experiment 20000286 PARAMETER Experiment Name: At_Open_Flower_P Parameter: Age (day) Value: 21
  misc_feature: MA Experiment 20000286 PARAMETER Experiment Name: At_Open_Flower_P Parameter: Plant Line Value: WS
  misc_feature: MA Experiment 20000286 PARAMETER Experiment Name: At_Open_Flower_P Parameter: Tissue Value: Half Open vs. Whole Plant
  misc_feature: MA Experiment ID: 20000794 Result: Up-regulated in Transcription
  misc_feature: MA Experiment 20000794 PARAMETER Experiment Name: At_Petals_P Parameter: Age (day) Value: 23-25 days
  misc_feature: MA Experiment 20000794 PARAMETER Experiment Name: At_Petals_P Parameter: Plant Line Value: WS
  misc_feature: MA Experiment 20000794 PARAMETER Experiment Name: At_Petals_P Parameter: Tissue Value: Petals vs. Whole plant
  misc_feature: MA Experiment ID: 20001248 Result: Down-regulated in Transcription
  misc_feature: MA Experiment 20001248 PARAMETER Experiment Name: At_Far-red-induction_P Parameter: Age (day) Value: 7
  misc_feature: MA Experiment 20001248 PARAMETER Experiment Name: At_Far-red-induction_P Parameter: Light Value: Far-red vs. White
  misc_feature: MA Experiment 20001248 PARAMETER Experiment Name: At_Far-red-induction_P Parameter: Organism Value: A. thaliana
  misc_feature: MA Experiment 20001248 PARAMETER Experiment Name: At_Far-red-induction_P Parameter: Plant Line Value: Columbia
  misc_feature: MA Experiment 20001248 PARAMETER Experiment Name: At_Far-red-induction_P Parameter: Timepoint (hr) Value: 4
  misc_feature: MA Experiment 20001248 PARAMETER Experiment Name: At_Far-red-induction_P Parameter: Tissue Value: Whole Plant
  misc_feature: MA Experiment ID: 20001557 Result: Up-regulated in Transcription
  misc_feature: MA Experiment 20001557 PARAMETER Experiment Name: At_Drought_Soil_Dry_P Parameter: Age (day) Value: 27
  misc_feature: MA Experiment 20001557 PARAMETER Experiment Name: At_Drought_Soil_Dry_P Parameter: Organism Value: A. thaliana
  misc_feature: MA Experiment 20001557 PARAMETER Experiment Name: At_Drought_Soil_Dry_P Parameter: Plant Line Value: WS
  misc_feature: MA Experiment 20001557 PARAMETER Experiment Name: At_Drought_Soil_Dry_P Parameter: Post Timepoint (hr) Value: 3
  misc_feature: MA Experiment 20001557 PARAMETER Experiment Name: At_Drought_Soil_Dry_P Parameter: Post-Treatment Value: Re-Water vs. No Drought
  misc_feature: MA Experiment 20001557 PARAMETER Experiment Name: At_Drought_Soil_Dry_P Parameter: Timepoint (day) Value: 13
  misc_feature: MA Experiment 20001557 PARAMETER Experiment Name: At_Drought_Soil_Dry_P Parameter: Treatment Value: Drought vs. No Drought
  misc_feature: MA Experiment ID: 20001757 Result: Down-regulated in Transcription
  misc_feature: MA Experiment 20001757 PARAMETER Experiment Name: At_50mM_NH4NO3_L-to-H_P Parameter: Timepoint (hr) Value: 6
  misc_feature: MA Experiment 20001757 PARAMETER Experiment Name: At_50mM_NH4NO3_L-to-H_P Parameter: Tissue Value: Leaf
  misc_feature: MA Experiment 20001757 PARAMETER Experiment Name: At_50mM_NH4NO3_L-to-H_P Parameter: Treatment Value: 50mM NH4NO3 vs 100mM Mannitol
atcctctatctctcttttgttttttctctctctcacagagaaaaagaacacaatgccagtttctgcagagccttcttcatcttcttcaacaacaatcggtcaacacatgagactccaacgacctaggaatcatcgaaatctcccacccatttccaccgccgacgaacctctaatccccaaacctagccgcgtctctaaatccgccatgtcttccttcttcctcttgccagaaaccactaagaagaaacccaacggaacgacgtcgtttcgtgggctaggctgcacaacctccgcatctcagcaagtttcggtcccggcggtgattcgctcctccgctgattgggacgcgagtaatttcaaaattaagaagtcgaagaagaagaacaagaacaagggtagtagtagctacaatggtggttcgattaagatcttgagcgaggctagtagtagtagtagtagcgtcgcttgcgctgcgattcctgatgtttggtgtggacctggagttgggttttcgacggatgctgtcgttggagcctccaataacaccgtcgagtcagatcctccgcgaaggaatattccggtgagacgcaaaatcgatggagataaaaccaatagtaacagtaataataatcagcgagggggttcttcttctcttcttcctagacgatctctcaatcaagagtctaatccttattttgattctgattcgagttttttgacatcgcgggctgaacagactgatagatatcatcgtcatctaagactgccttaccctgatggactcgctgagatgatgatgatgcagaatggttttgtgatgggaggagtattaagctcattcgatcaattccgtgacatgaggcttaatgtcgataacatgacatacgagcaacttttggagcttggtgaaagaattgggcatgtgaacactggacttaatgaaaaacagatcaaaagttgtcttcggaaagtcaaaccactccggcaagatacaccagttgctgatagaaagtgcatcatctgtcaagacgagtatgaggcgaaggacgaggtaggggagttacgatgtggacacaggttccatatcgactgtgtgaaacaatggctagtgaggaagaactcttgtccggtctgtaaaacgatggcgtacaataagtcttagttagatattatctcttcctgtgatgtgattcttgatttcgggattgaaaccaaatcactattttatgttaagattcctttttggctttttattcatgattgctatttttctgaggaaaaactgttgagacctttgtattacctatggaaaagtctcggagacattgtgaaccccacattgcgtgtgggtttgttc

SEQ ID NO: 26584 - protein, 386 aa, Arabidopsis thaliana
  peptide (1)..(386): Ceres Seq. ID no. 12372056
  misc_feature (338)..(378): Pfam Name: Zinc finger, C3HC4 type (RING finger) Pfam Description: Zinc finger, C3HC4 type (RING finger)
  misc_feature (171)..(381): Homolog of NCBI NO: 40253261 NR Description: DNA binding zinc finger protein-like
  misc_feature (263)..(384): Homolog of NCBI NO: 15220067 NR Description: hypothetical protein; protein id: At1g45180.1
  misc_feature (245)..(386): Homolog of NCBI NO: 18417809 NR Description: putative protein
  misc_feature (245)..(386): Homolog of NCBI NO: 7486381 NR Description: hypothetical protein F3L17.20 - Arabidopsis
  misc_feature (327)..(380): Homolog of NCBI NO: 34911396 NR Description: RING zinc finger protein-like
  misc_feature (74)..(323): Homolog of NCBI NO: 34911396 NR Description: RING zinc finger protein-like
  misc_feature (48)..(385): Homolog of NCBI NO: 25511721 NR Description: F2H15.19 protein - Arabidopsis thaliana
  misc_feature (28)..(385): Homolog of NCBI NO: 21554695 NR Description: zinc-finger protein (C-terminal), putative
  misc_feature (28)..(385): Homolog of NCBI NO: 15220912 NR Description: zinc-finger protein (C-terminal), putative
  misc_feature (18)..(386): Homolog of NCBI NO: 15219544 NR Description: putative RING zinc finger protein; protein id:
SSISLLFFLSLTEKKNTMPVSAEPSSSSSTTIGQHMRLQRPRNHRNLPPISTADEPLIPKPSRVSKSAMSSFFLLPETTKKKPNGTTSFRGLGCTTSASQQVSVPAVIRSSADWDASNFKIKKSKKKNKNKGSSSYNGGSIKILSEASSSSSSVACAAIPDVWCGPGVGFSTDAVVGASNNTVESDPPRRNIPVRRKIDGDKTNSNSNNNQRGGSSSLLPRRSLNQESNPYFDSDSSFLTSRAEQTDRYHRHLRLPYPDGLAEMMMMQNGFVMGGVLSSFDQFRDMRLNVDNMTYEQLLELGERIGHVNTGLNEKQIKSCLRKVKPLRQDTPVADRKCIICQDEYEAKDEVGELRCGHRFHIDCVKQWLVRKNSCPVCKTMAYNKS

SEQ ID NO: 26585 - protein, 369 aa, Arabidopsis thaliana
  peptide (1)..(369): Ceres Seq. ID no. 12372057
  misc_feature (321)..(361): Pfam Name: Zinc finger, C3HC4 type (RING finger) Pfam Description: Zinc finger, C3HC4 type (RING finger)
  misc_feature (154)..(364): Homolog of NCBI NO: 40253261 NR Description: DNA binding zinc finger protein-like
  misc_feature (246)..(367): Homolog of NCBI NO: 15220067 NR Description: hypothetical protein; protein id: At1g45180.1
  misc_feature (228)..(369): Homolog of NCBI NO: 18417809 NR Description: putative protein
  misc_feature (228)..(369): Homolog of NCBI NO: 7486381 NR Description: hypothetical protein F3L17.20 - Arabidopsis
  misc_feature (310)..(363): Homolog of NCBI NO: 34911396 NR Description: RING zinc finger protein-like
  misc_feature (57)..(306): Homolog of NCBI NO: 34911396 NR Description: RING zinc finger protein-like
  misc_feature (31)..(368): Homolog of NCBI NO: 25511721 NR Description: F2H15.19 protein - Arabidopsis thaliana
  misc_feature (11)..(368): Homolog of NCBI NO: 21554695 NR Description: zinc-finger protein (C-terminal), putative
  misc_feature (11)..(368): Homolog of NCBI NO: 15220912 NR Description: zinc-finger protein (C-terminal), putative
  misc_feature (1)..(369): Homolog of NCBI NO: 15219544 NR Description: putative RING zinc finger protein; protein id:
MPVSAEPSSSSSTTIGQHMRLQRPRNHRNLPPISTADEPLIPKPSRVSKSAMSSFFLLPETTKKKPNGTTSFRGLGCTTSASQQVSVPAVIRSSADWDASNFKIKKSKKKNKNKGSSSYNGGSIKILSEASSSSSSVACAAIPDVWCGPGVGFSTDAVVGASNNTVESDPPRRNIPVRRKIDGDKTNSNSNNNQRGGSSSLLPRRSLNQESNPYFDSDSSFLTSRAEQTDRYHRHLRLPYPDGLAEMMMMQNGFVMGGVLSSFDQFRDMRLNVDNMTYEQLLELGERIGHVNTGLNEKQIKSCLRKVKPLRQDTPVADRKCIICQDEYEAKDEVGELRCGHRFHIDCVKQWLVRKNSCPVCKTMAYNKS

SEQ ID NO: 26586 - protein, 351 aa, Arabidopsis thaliana
  peptide (1)..(351): Ceres Seq. ID no. 12372058
  misc_feature (303)..(343): Pfam Name: Zinc finger, C3HC4 type (RING finger) Pfam Description: Zinc finger, C3HC4 type (RING finger)
  misc_feature (292)..(345): Homolog of NCBI NO: 34911396 NR Description: RING zinc finger protein-like
  misc_feature (39)..(288): Homolog of NCBI NO: 34911396 NR Description: RING zinc finger protein-like
  misc_feature (13)..(350): Homolog of NCBI NO: 25511721 NR Description: F2H15.19 protein - Arabidopsis thaliana
  misc_feature (136)..(346): Homolog of NCBI NO: 40253261 NR Description: DNA binding zinc finger protein-like
  misc_feature (210)..(351): Homolog of NCBI NO: 18417809 NR Description: putative protein
  misc_feature (210)..(351): Homolog of NCBI NO: 7486381 NR Description: hypothetical protein F3L17.20 - Arabidopsis
  misc_feature (228)..(349): Homolog of NCBI NO: 15220067 NR Description: hypothetical protein; protein id: At1g45180.1
  misc_feature (1)..(350): Homolog of NCBI NO: 21554695 NR Description: zinc-finger protein (C-terminal), putative
  misc_feature (1)..(350): Homolog of NCBI NO: 15220912 NR Description: zinc-finger protein (C-terminal), putative
  misc_feature (1)..(351): Homolog of NCBI NO: 15219544 NR Description: putative RING zinc finger protein; protein id:
MRLQRPRNHRNLPPISTADEPLIPKPSRVSKSAMSSFFLLPETTKKKPNGTTSFRGLGCTTSASQQVSVPAVIRSSADWDASNFKIKKSKKKNKNKGSSSYNGGSIKILSEASSSSSSVACAAIPDVWCGPGVGFSTDAVVGASNNTVESDPPRRNIPVRRKIDGDKTNSNSNNNQRGGSSSLLPRRSLNQESNPYFDSDSSFLTSRAEQTDRYHRHLRLPYPDGLAEMMMMQNGFVMGGVLSSFDQFRDMRLNVDNMTYEQLLELGERIGHVNTGLNEKQIKSCLRKVKPLRQDTPVADRKCIICQDEYEAKDEVGELRCGHRFHIDCVKQWLVRKNSCPVCKTMAYNKS

SEQ ID NO: 26587 - DNA, 2331 bp, Arabidopsis thaliana
  misc_feature (1)..(2331): Ceres Seq. ID no. 12372162
  misc_feature: MA Experiment ID: 108434 Result: Down-regulated in Transcription
  misc_feature: MA Experiment 108434 PARAMETER Experiment Name: At_Root_Tips_cDNA_P Parameter: Tissue Value: Root Tips
  misc_feature: MA Experiment ID: 108462 Result: Up-regulated in Transcription
  misc_feature: MA Experiment 108462 PARAMETER Experiment Name: At_Germinating_Seeds_cDNA_P Parameter: Age (day) Value: 2 vs. 0
  misc_feature: MA Experiment 108462 PARAMETER Experiment Name: At_Germinating_Seeds_cDNA_P Parameter: Tissue Value: Germinating Seeds
  misc_feature: MA Experiment ID: 108489 Result: Down-regulated in Transcription
  misc_feature: MA Experiment ID: 108585 Result: Up-regulated in Transcription
  misc_feature: MA Experiment 108585 PARAMETER Experiment Name: At_5mM_NaNP_cDNA_P Parameter: Timepoint (hr) Value: 6
  misc_feature: MA Experiment 108585 PARAMETER Experiment Name: At_5mM_NaNP_cDNA_P Parameter: Tissue Value: Aerial
  misc_feature: MA Experiment 108585 PARAMETER Experiment Name: At_5mM_NaNP_cDNA_P Parameter: Treatment Value: null
  misc_feature: MA Experiment ID: 108594 Result: Up-regulated in Transcription
  misc_feature: MA Experiment 108594 PARAMETER Experiment Name: At_Ler-rhl_Root_cDNA_P Parameter: Plant Line Value: null
  misc_feature: MA Experiment ID: 108607 Result: Down-regulated in Transcription
  misc_feature: MA Experiment 108607 PARAMETER Experiment Name: At_100uM_ABA_cDNA_P Parameter: Timepoint (hr) Value: 4
  misc_feature: MA Experiment 108607 PARAMETER Experiment Name: At_100uM_ABA_cDNA_P Parameter: Tissue Value: Aerial
  misc_feature: MA Experiment 108607 PARAMETER Experiment Name: At_100uM_ABA_cDNA_P Parameter: Treatment Value: 100uM ABA vs. No Treatment
  misc_feature: MA Experiment ID: 20000086 Result: Down-regulated in Transcription
  misc_feature: MA Experiment 20000086 PARAMETER Experiment Name: At_100uM_ABA_Mutants_cDNA_P Parameter: Plant Line Value: CS22
  misc_feature: MA Experiment 20000086 PARAMETER Experiment Name: At_100uM_ABA_Mutants_cDNA_P Parameter: Timepoint (hr) Value: 6
  misc_feature: MA Experiment 20000086 PARAMETER Experiment Name: At_100uM_ABA_Mutants_cDNA_P Parameter: Tissue Value: Aerial
  misc_feature: MA Experiment 20000086 PARAMETER Experiment Name: At_100uM_ABA_Mutants_cDNA_P Parameter: Treatment Value: 100uM ABA vs. No Treatment
  misc_feature: MA Experiment ID: 20000113 Result: Up-regulated in Transcription
  misc_feature: MA Experiment 20000113 PARAMETER Experiment Name: At_42deg_Heat_cDNA_P Parameter: Temperature (deg C) Value: 42 vs. 22
  misc_feature: MA Experiment 20000113 PARAMETER Experiment Name: At_42deg_Heat_cDNA_P Parameter: Timepoint (hr) Value: 8
  misc_feature: MA Experiment 20000113 PARAMETER Experiment Name: At_42deg_Heat_cDNA_P Parameter: Tissue Value: Aerial
  misc_feature: MA Experiment ID: 20000227 Result: Up-regulated in Transcription
  misc_feature: MA Experiment 20000227 PARAMETER Experiment Name: At_Root-Tips-vs-Tops_P Parameter: Tissue Value: Root Tips vs. Root Tops
  misc_feature: MA Experiment ID: 20000495 Result: Up-regulated in Transcription
  misc_feature: MA Experiment 20000495 PARAMETER Experiment Name: At_Guard_Cells_P Parameter: Harvest Date Value: 8/2/2002
  misc_feature: MA Experiment 20000495 PARAMETER Experiment Name: At_Guard_Cells_P Parameter: Organism Value: A. thaliana
  misc_feature: MA Experiment 20000495 PARAMETER Experiment Name: At_Guard_Cells_P Parameter: Tissue Value: Guard Cells vs. Leaves
  misc_feature: MA Experiment ID: 20001247 Result: Up-regulated in Transcription
  misc_feature: MA Experiment 20001247 PARAMETER Experiment Name: At_Far-red-induction_P Parameter: Age (day) Value: 7
  misc_feature: MA Experiment 20001247 PARAMETER Experiment Name: At_Far-red-induction_P Parameter: Light Value: Far-red vs. White
  misc_feature: MA Experiment 20001247 PARAMETER Experiment Name: At_Far-red-induction_P Parameter: Organism Value: A. thaliana
  misc_feature: MA Experiment 20001247 PARAMETER Experiment Name: At_Far-red-induction_P Parameter: Plant Line Value: Columbia
  misc_feature: MA Experiment 20001247 PARAMETER Experiment Name: At_Far-red-induction_P Parameter: Timepoint (hr) Value: 1
  misc_feature: MA Experiment 20001247 PARAMETER Experiment Name: At_Far-red-induction_P Parameter: Tissue Value: Whole Plant
  misc_feature: MA Experiment ID: 20001451 Result: Up-regulated in Transcription
  misc_feature: MA Experiment 20001451 PARAMETER Experiment Name: At_Far-red-induction_P Parameter: Age (day) Value: 7
  misc_feature: MA Experiment 20001451 PARAMETER Experiment Name: At_Far-red-induction_P Parameter: Light Value: Far-red vs. White
  misc_feature: MA Experiment 20001451 PARAMETER Experiment Name: At_Far-red-induction_P Parameter: Organism Value: A. thaliana
  misc_feature: MA Experiment 20001451 PARAMETER Experiment Name: At_Far-red-induction_P Parameter: Plant Line Value: Columbia
  misc_feature: MA Experiment 20001451 PARAMETER Experiment Name: At_Far-red-induction_P Parameter: Timepoint (hr) Value: 24
  misc_feature: MA Experiment 20001451 PARAMETER Experiment Name: At_Far-red-induction_P Parameter: Tissue Value: Whole Plant
  misc_feature: MA Experiment ID: 20001555 Result: Down-regulated in Transcription
  misc_feature: MA Experiment 20001555 PARAMETER Experiment Name: At_Drought_Soil_Dry_P Parameter: Age (day) Value: 24
  misc_feature: MA Experiment 20001555 PARAMETER Experiment Name: At_Drought_Soil_Dry_P Parameter: Organism Value: A. thaliana
  misc_feature: MA Experiment 20001555 PARAMETER Experiment Name: At_Drought_Soil_Dry_P Parameter: Plant Line Value: WS
  misc_feature: MA Experiment 20001555 PARAMETER Experiment Name: At_Drought_Soil_Dry_P Parameter: Post Timepoint (hr) Value: None
  misc_feature: MA Experiment 20001555 PARAMETER Experiment Name: At_Drought_Soil_Dry_P Parameter: Post-Treatment Value: None
  misc_feature: MA Experiment 20001555 PARAMETER Experiment Name: At_Drought_Soil_Dry_P Parameter: Timepoint (day) Value: 10
  misc_feature: MA Experiment 20001555 PARAMETER Experiment Name: At_Drought_Soil_Dry_P Parameter: Treatment Value: Drought vs. No Drought
  misc_feature: MA Experiment ID: 20001556 Result: Down-regulated in Transcription
  misc_feature: MA Experiment 20001556 PARAMETER Experiment Name: At_Drought_Soil_Dry_P Parameter: Age (day) Value: 26
  misc_feature: MA Experiment 20001556 PARAMETER Experiment Name: At_Drought_Soil_Dry_P Parameter: Organism Value: A. thaliana
  misc_feature: MA Experiment 20001556 PARAMETER Experiment Name: At_Drought_Soil_Dry_P Parameter: Plant Line Value: WS
  misc_feature: MA Experiment 20001556 PARAMETER Experiment Name: At_Drought_Soil_Dry_P Parameter: Post Timepoint (hr) Value: None
  misc_feature: MA Experiment 20001556 PARAMETER Experiment Name: At_Drought_Soil_Dry_P Parameter: Post-Treatment Value: None
  misc_feature: MA Experiment 20001556 PARAMETER Experiment Name: At_Drought_Soil_Dry_P Parameter: Timepoint (day) Value: 12
  misc_feature: MA Experiment 20001556 PARAMETER Experiment Name: At_Drought_Soil_Dry_P Parameter: Treatment Value: Drought vs. No Drought
  misc_feature: MA Experiment ID: 20001559 Result: Down-regulated in Transcription
  misc_feature: MA Experiment 20001559 PARAMETER Experiment Name: At_Drought_Soil_Dry_P Parameter: Age (day) Value: 28
  misc_feature: MA Experiment 20001559 PARAMETER Experiment Name: At_Drought_Soil_Dry_P Parameter: Organism Value: A. thaliana
  misc_feature: MA Experiment 20001559 PARAMETER Experiment Name: At_Drought_Soil_Dry_P Parameter: Plant Line Value: WS
  misc_feature: MA Experiment 20001559 PARAMETER Experiment Name: At_Drought_Soil_Dry_P Parameter: Post Timepoint (hr) Value: 29
  misc_feature: MA Experiment 20001559 PARAMETER Experiment Name: At_Drought_Soil_Dry_P Parameter: Post-Treatment Value: Re-Water vs. No Drought
  misc_feature: MA Experiment 20001559 PARAMETER Experiment Name: At_Drought_Soil_Dry_P Parameter: Timepoint (day) Value: 14
  misc_feature: MA Experiment 20001559 PARAMETER Experiment Name: At_Drought_Soil_Dry_P Parameter: Treatment Value: Drought vs. No Drought
  misc_feature: MA Experiment ID: 20001905 Result: Down-regulated in Transcription
  misc_feature: MA Experiment 20001905 PARAMETER Experiment Name: At_Drought_Reproduction_P Parameter: Age (day) Value: 40
  misc_feature: MA Experiment 20001905 PARAMETER Experiment Name: At_Drought_Reproduction_P Parameter: Organism Value: A. thaliana
  misc_feature: MA Experiment 20001905 PARAMETER Experiment Name: At_Drought_Reproduction_P Parameter: Plant Line Value: WS
  misc_feature: MA Experiment 20001905 PARAMETER Experiment Name: At_Drought_Reproduction_P Parameter: Timepoint (day) Value: 10
  misc_feature: MA Experiment 20001905 PARAMETER Experiment Name: At_Drought_Reproduction_P Parameter: Tissue Value: Rosettes
  misc_feature: MA Experiment 20001905 PARAMETER Experiment Name: At_Drought_Reproduction_P Parameter: Treatment Value: Drought vs. No Drought
  misc_feature: MA Experiment ID: 20001911 Result: Down-regulated in Transcription
  misc_feature: MA Experiment 20001911 PARAMETER Experiment Name: At_Drought_Reproduction_P Parameter: Age (day) Value: 40
  misc_feature: MA Experiment 20001911 PARAMETER Experiment Name: At_Drought_Reproduction_P Parameter: Organism Value: A. thaliana
  misc_feature: MA Experiment 20001911 PARAMETER Experiment Name: At_Drought_Reproduction_P Parameter: Plant Line Value: WS
  misc_feature: MA Experiment 20001911 PARAMETER Experiment Name: At_Drought_Reproduction_P Parameter: Timepoint (day) Value: 10
  misc_feature: MA Experiment 20001911 PARAMETER Experiment Name: At_Drought_Reproduction_P Parameter: Tissue Value: Flowers
  misc_feature: MA Experiment 20001911 PARAMETER Experiment Name: At_Drought_Reproduction_P Parameter: Treatment Value: Drought vs. No Drought
acataaagattcctagtcttatactctgtctctctctctctctctctttttcacactcacacacaaactaaaccggaatggccaccgccgacgaattctccgacgaagatacatcaccgattgaagaagtccgtttaacggtaacaaacaccgacgatccaacactaccggtttggacattcaggatgtggttcttgggtctaatctcatgttctctcctctctttccttaaccaattcttctcgtaccgaaccgaaccgctcgtaatcactcaaatcacggttcaggtggctacactacctatcggtcatttcttggccaaggtgcttcccaaaacccggtttgggttacccggttgtggatcggcccggttctcgctgaacccgggtccgtttaacatgaaagagcatgttttgatatcgatatttgcgaatgcgggtagtgctttcggatccgggtcggcttatgcggttggtatcatcacaattattaaagctttttatggccggagtatctcttttattgccggctggctcctcatcatcactacacaggtattgggatatggctgggccggtttactgaggaaatatgtggtcgaaccggctcatatgtggtggcctagcactctggttcaagtgtcactgtttagggcattgcatgagaaggacgaccaaaggatgacgagagcaaaattctttgtgatagcattagtctgtagttttggatggtacatagtccctggctatctcttcacaacactcacaagcatctcatgggtttgttgggcatttccaagatcagtcactgctcaacagattggttctggaatgagaggtcttggtcttggagcctttacactagactggaccgcggttgcctctttcttgtttagtccacttatcagccccttcttcgccatcgctaatgttttcatcggttatgttcttttgatctacttcgtcttgcctttagcctattggggatttgattcttataacgctacgaggtttcctatattttcgtcgcatcttttcacatcggttggtaatacatatgatattcctgcgatcgtgaatgataactttgagctcgatttagctaagtatgagcaacaaggaaggattaacttgagcatgttctttgctcttacctatgggcttggtttcgccaccattgcttctacgctcactcatgtagctctcttctatggcaaggaaatttctgagaggtttcgagtttcatacaaaggcaaggaagatatacacactaggttaatgaagagatataaagacataccttcatggtggttttactcaatgttggctgcgacactacttatctctcttgcattatgtgttttcttgaacgatgaggttcaaatgccttggtggggacttgtgttcgcaagcgcgatggctttcgtcttcacactcccgataagcatcataaccgcaacaactaaccaaacaccgggattgaatataataacagagtacgcaatgggactcatttacccgggacgacctatcgcaaacgtatgcttcaaagtctatggatacatgagtatggcacaagcagtctctttcttaaatgacttcaaacttggtcattacatgaagatcccacctagatccatgttcttggttcaattcatcggtacaattcttgccggaacaatcaacataacggtcgcatggtggcagttaaactctatcaaaaacatatgtcaagaggaacttctacctcccaacagtccatggacatgtccgggtgaccgtgttttcttcgatgcatcggtcatttggggattggtcggaccaaaacggatttttggttctcagggaaactatgcggccatgaactggtttttcctcggaggtgcattaggaccagtcatagtgtggtcattgcacaaagcgttcccaaaacgttcttggattccacttgtaaatctccctgttcttctaggagcaaccgcaatgatgccacctgcgaccgcggtgaactacaactcgtggatattggtggggacgatattcaacttgtttgtgttccggtacaggaaaagttggtggcagaggtataactacgttctctcagccgctatggatgccggtgtagctttcatggcggttttgttgtacttctcggtggggatggaggaaaagagtttggactggtggggaacaagaggtgaacattgtgatctagctaaatgtccaaccgctagaggagtaattgttgatggttgtccggttaaataatcttaaaggatccattggtgtgtttcaacaatgtatgatacacaaagtaactaattaagaattt

SEQ ID NO: 26588 - protein, 729 aa, Arabidopsis thaliana
  peptide (1)..(729): Ceres Seq. ID no. 12372163
  misc_feature (10)..(704): Homolog of NCBI NO: 19115899 NR Description: putative pheromone response and mating-type
  misc_feature (1)..(704): Homolog of NCBI NO: 2367386 NR Description: Opt1p [Candida albicans]
  misc_feature (5)..(704): Homolog of NCBI NO: 32420327 NR Description: hypothetical protein [Neurospora crassa]
  misc_feature (1)..(728): Homolog of NCBI NO: 15236800 NR Description: isp4 like protein
  misc_feature (8)..(728): Homolog of NCBI NO: 25553564 NR Description: putative isp4 protein [Oryza sativa (japonica
  misc_feature (5)..(728): Homolog of NCBI NO: 15236912 NR Description: putative oligopeptide transporter
  misc_feature (4)..(159): Homolog of NCBI NO: 25345764 NR Description: hypothetical protein [imported] - Arabidopsis
  misc_feature (197)..(724): Homolog of NCBI NO: 25345764 NR Description: hypothetical protein [imported] - Arabidopsis
  misc_feature (4)..(728): Homolog of NCBI NO: 15218331 NR Description: unknown protein; protein id: At1g09930.1
  misc_feature (9)..(728): Homolog of NCBI NO: 34912940 NR Description: putative sexual differentiation process protein
MATADEFSDEDTSPIEEVRLTVTNTDDPTLPVWTFRMWFLGLISCSLLSFLNQFFSYRTEPLVITQITVQVATLPIGHFLAKVLPKTRFGLPGCGSARFSLNPGPFNMKEHVLISIFANAGSAFGSGSAYAVGIITIIKAFYGRSISFIAGWLLIITTQVLGYGWAGLLRKYVVEPAHMWWPSTLVQVSLFRALHEKDDQRMTRAKFFVIALVCSFGWYIVPGYLFTTLTSISWVCWAFPRSVTAQQIGSGMRGLGLGAFTLDWTAVASFLFSPLISPFFAIANVFIGYVLLIYFVLPLAYWGFDSYNATRFPIFSSHLFTSVGNTYDIPAIVNDNFELDLAKYEQQGRINLSMFFALTYGLGFATIASTLTHVALFYGKEISERFRVSYKGKEDIHTRLMKRYKDIPSWWFYSMLAATLLISLALCVFLNDEVQMPWWGLVFASAMAFVFTLPISIITATTNQTPGLNIITEYAMGLIYPGRPIANVCFKVYGYMSMAQAVSFLNDFKLGHYMKIPPRSMFLVQFIGTILAGTINITVAWWQLNSIKNICQEELLPPNSPWTCPGDRVFFDASVIWGLVGPKRIFGSQGNYAAMNWFFLGGALGPVIVWSLHKAFPKRSWIPLVNLPVLLGATAMMPPATAVNYNSWILVGTIFNLFVFRYRKSWWQRYNYVLSAAMDAGVAFMAVLLYFSVGMEEKSLDWWGTRGEHCDLAKCPTARGVIVDGCPVK

SEQ ID NO: 26589 - protein, 693 aa, Arabidopsis thaliana
  peptide (1)..(693): Ceres Seq. ID no. 12372164
  misc_feature (1)..(668): Homolog of NCBI NO: 19115899 NR Description: putative pheromone response and mating-type
  misc_feature (1)..(668): Homolog of NCBI NO: 2367386 NR Description: Opt1p [Candida albicans]
  misc_feature (1)..(668): Homolog of NCBI NO: 32420327 NR Description: hypothetical protein [Neurospora crassa]
  misc_feature (1)..(692): Homolog of NCBI NO: 15236800 NR Description: isp4 like protein
  misc_feature (1)..(692): Homolog of NCBI NO: 25553564 NR Description: putative isp4 protein [Oryza sativa (japonica
  misc_feature (1)..(692): Homolog of NCBI NO: 15236912 NR Description: putative oligopeptide transporter
  misc_feature (1)..(123): Homolog of NCBI NO: 25345764 NR Description: hypothetical protein [imported] - Arabidopsis
  misc_feature (161)..(688): Homolog of NCBI NO: 25345764 NR Description: hypothetical protein [imported] - Arabidopsis
  misc_feature (1)..(692): Homolog of NCBI NO: 15218331 NR Description: unknown protein; protein id: At1g09930.1
  misc_feature (1)..(692): Homolog of NCBI NO: 34912940 NR Description: putative sexual differentiation process protein
MWFLGLISCSLLSFLNQFFSYRTEPLVITQITVQVATLPIGHFLAKVLPKTRFGLPGCGSARFSLNPGPFNMKEHVLISIFANAGSAFGSGSAYAVGIITIIKAFYGRSISFIAGWLLIITTQVLGYGWAGLLRKYVVEPAHMWWPSTLVQVSLFRALHEKDDQRMTRAKFFVIALVCSFGWYIVPGYLFTTLTSISWVCWAFPRSVTAQQIGSGMRGLGLGAFTLDWTAVASFLFSPLISPFFAIANVFIGYVLLIYFVLPLAYWGFDSYNATRFPIFSSHLFTSVGNTYDIPAIVNDNFELDLAKYEQQGRINLSMFFALTYGLGFATIASTLTHVALFYGKEISERFRVSYKGKEDIHTRLMKRYKDIPSWWFYSMLAATLLISLALCVFLNDEVQMPWWGLVFASAMAFVFTLPISIITATTNQTPGLNIITEYAMGLIYPGRPIANVCFKVYGYMSMAQAVSFLNDFKLGHYMKIPPRSMFLVQFIGTILAGTINITVAWWQLNSIKNICQEELLPPNSPWTCPGDRVFFDASVIWGLVGPKRIFGSQGNYAAMNWFFLGGALGPVIVWSLHKAFPKRSWIPLVNLPVLLGATAMMPPATAVNYNSWILVGTIFNLFVFRYRKSWWQRYNYVLSAAMDAGVAFMAVLLYFSVGMEEKSLDWWGTRGEHCDLAKCPTARGVIVDGCPVK

SEQ ID NO: 26590 - protein, 622 aa, Arabidopsis thaliana
  peptide (1)..(622): Ceres Seq. ID no. 12372165
  misc_feature (1)..(597): Homolog of NCBI NO: 19115899 NR Description: putative pheromone response and mating-type
  misc_feature (1)..(597): Homolog of NCBI NO: 2367386 NR Description: Opt1p [Candida albicans]
  misc_feature (1)..(597): Homolog of NCBI NO: 32420327 NR Description: hypothetical protein [Neurospora crassa]
  misc_feature (1)..(621): Homolog of NCBI NO: 15236800 NR Description: isp4 like protein
  misc_feature (1)..(621): Homolog of NCBI NO: 25553564 NR Description: putative isp4 protein [Oryza sativa (japonica
  misc_feature (1)..(621): Homolog of NCBI NO: 15236912 NR Description: putative oligopeptide transporter
  misc_feature (1)..(52): Homolog of NCBI NO: 25345764 NR Description: hypothetical protein [imported] - Arabidopsis
  misc_feature (90)..(617): Homolog of NCBI NO: 25345764 NR Description: hypothetical protein [imported] - Arabidopsis
  misc_feature (1)..(621): Homolog of NCBI NO: 15218331 NR Description: unknown protein; protein id: At1g09930.1
  misc_feature (1)..(621): Homolog of NCBI NO: 34912940 NR Description: putative sexual differentiation process protein
MKEHVLISIFANAGSAFGSGSAYAVGIITIIKAFYGRSISFIAGWLLIITTQVLGYGWAGLLRKYVVEPAHMWWPSTLVQVSLFRALHEKDDQRMTRAKFFVIALVCSFGWYIVPGYLFTTLTSISWVCWAFPRSVTAQQIGSGMRGLGLGAFTLDWTAVASFLFSPLISPFFAIANVFIGYVLLIYFVLPLAYWGFDSYNATRFPIFSSHLFTSVGNTYDIPAIVNDNFELDLAKYEQQGRINLSMFFALTYGLGFATIASTLTHVALFYGKEISERFRVSYKGKEDIHTRLMKRYKDIPSWWFYSMLAATLLISLALCVFLNDEVQMPWWGLVFASAMAFVFTLPISIITATTNQTPGLNIITEYAMGLIYPGRPIANVCFKVYGYMSMAQAVSFLNDFKLGHYMKIPPRSMFLVQFIGTILAGTINITVAWWQLNSIKNICQEELLPPNSPWTCPGDRVFFDASVIWGLVGPKRIFGSQGNYAAMNWFFLGGALGPVIVWSLHKAFPKRSWIPLVNLPVLLGATAMMPPATAVNYNSWILVGTIFNLFVFRYRKSWWQRYNYVLSAAMDAGVAFMAVLLYFSVGMEEKSLDWWGTRGEHCDLAKCPTARGVIVDGCPVK

SEQ ID NO: 26591 - DNA, 1101 bp, Arabidopsis thaliana
  misc_feature (1)..(1101): Ceres Seq. ID no. 12423040
  misc_feature: MA Experiment ID: 108434 Result: Down-regulated in Transcription
  misc_feature: MA Experiment 108434 PARAMETER Experiment Name: At_Root_Tips_cDNA_P Parameter: Tissue Value: Root Tips
  misc_feature: MA Experiment ID: 108488 Result: Down-regulated in Transcription
  misc_feature: MA Experiment ID: 108576 Result: Down-regulated in Transcription
  misc_feature: MA Experiment 108576 PARAMETER Experiment Name: At_42deg_Heat_cDNA_P Parameter: Temperature (deg C) Value: 42 vs. 22
  misc_feature: MA Experiment 108576 PARAMETER Experiment Name: At_42deg_Heat_cDNA_P Parameter: Timepoint (hr) Value: 1
  misc_feature: MA Experiment 108576 PARAMETER Experiment Name: At_42deg_Heat_cDNA_P Parameter: Tissue Value: Aerial
  misc_feature: MA Experiment ID: 108577 Result: Down-regulated in Transcription
  misc_feature: MA Experiment 108577 PARAMETER Experiment Name: At_42deg_Heat_cDNA_P Parameter: Temperature (deg C) Value: 42 vs. 22
  misc_feature: MA Experiment 108577 PARAMETER Experiment Name: At_42deg_Heat_cDNA_P Parameter: Timepoint (hr) Value: 6
  misc_feature: MA Experiment 108577 PARAMETER Experiment Name: At_42deg_Heat_cDNA_P Parameter: Tissue Value: Aerial
  misc_feature: MA Experiment ID: 108595 Result: Down-regulated in Transcription
  misc_feature: MA Experiment 108595 PARAMETER Experiment Name: At_Ler-pi_Ovule_cDNA_P Parameter: Plant Line Value: null
  misc_feature: MA Experiment ID: 20000112 Result: Down-regulated in Transcription
  misc_feature: MA Experiment 20000112 PARAMETER Experiment Name: At_42deg_Heat_cDNA_P Parameter: Temperature (deg C) Value: 42 vs. 22
  misc_feature: MA Experiment 20000112 PARAMETER Experiment Name: At_42deg_Heat_cDNA_P Parameter: Timepoint (hr) Value: 2
  misc_feature: MA Experiment 20000112 PARAMETER Experiment Name: At_42deg_Heat_cDNA_P Parameter: Tissue Value: Aerial
  misc_feature: MA Experiment ID: 20000113 Result: Down-regulated in Transcription
  misc_feature: MA Experiment 20000113 PARAMETER Experiment Name: At_42deg_Heat_cDNA_P Parameter: Temperature (deg C) Value: 42 vs. 22
  misc_feature: MA Experiment 20000113 PARAMETER Experiment Name: At_42deg_Heat_cDNA_P Parameter: Timepoint (hr) Value: 8
  misc_feature: MA Experiment 20000113 PARAMETER Experiment Name: At_42deg_Heat_cDNA_P Parameter: Tissue Value: Aerial
  misc_feature: MA Experiment ID: 20000173 Result: Down-regulated in Transcription
  misc_feature: MA Experiment 20000173 PARAMETER Experiment Name: At_42deg_Heat_P Parameter: Age (day) Value: 14
  misc_feature: MA Experiment 20000173 PARAMETER Experiment Name: At_42deg_Heat_P Parameter: Organism Value: A. thaliana
  misc_feature: MA Experiment 20000173 PARAMETER Experiment Name: At_42deg_Heat_P Parameter: Plant Line Value: WS
  misc_feature: MA Experiment 20000173 PARAMETER Experiment Name: At_42deg_Heat_P Parameter: Temperature (deg C) Value: 42 vs. 22
  misc_feature: MA Experiment 20000173 PARAMETER Experiment Name: At_42deg_Heat_P Parameter: Timepoint (hr) Value: 6
  misc_feature: MA Experiment 20000173 PARAMETER Experiment Name: At_42deg_Heat_P Parameter: Tissue Value: Aerial
  misc_feature: MA Experiment ID: 20001557 Result: Up-regulated in Transcription
  misc_feature: MA Experiment 20001557 PARAMETER Experiment Name: At_Drought_Soil_Dry_P Parameter: Age (day) Value: 27
  misc_feature: MA Experiment 20001557 PARAMETER Experiment Name: At_Drought_Soil_Dry_P Parameter: Organism Value: A. thaliana
  misc_feature: MA Experiment 20001557 PARAMETER Experiment Name: At_Drought_Soil_Dry_P Parameter: Plant Line Value: WS
  misc_feature: MA Experiment 20001557 PARAMETER Experiment Name: At_Drought_Soil_Dry_P Parameter: Post Timepoint (hr) Value: 3
  misc_feature: MA Experiment 20001557 PARAMETER Experiment Name: At_Drought_Soil_Dry_P Parameter: Post-Treatment Value: Re-Water vs. No Drought
  misc_feature: MA Experiment 20001557 PARAMETER Experiment Name: At_Drought_Soil_Dry_P Parameter: Timepoint (day) Value: 13
  misc_feature: MA Experiment 20001557 PARAMETER Experiment Name: At_Drought_Soil_Dry_P Parameter: Treatment Value: Drought vs. No Drought
aacttgttttcttcagcgagcgacattttggaaggaagcattccattagcttttttgctgtctccagaaaataaattttcaatctttcgtcggaaaaaagaagaagaagaagcagagctgggtttagttttttcacgagaagcaaagagatcaataagtcagtgagcttttttctcgtttctgacgatggcggttgcgccggcaagagctcgttcagactatgattacctcatcaagcttcttctcatcggcgatagcggtgtggggaagagttgtttgttacttcgattctcagatgatactttcactacaagtttcattactaccattggtattgacttcaagataagaactgttgaacttgatgggaagcgtatcaaattgcagatttgggacactgctggtcaagaacgtttcagaactatcactacagcgtattacaggggagcgatgggtatattgcttgtctacgatgtaacggatgagtcatcttttaacaatattaggaactggatgaagaacattgagcaacatgcctcagataatgtcaacaaaatattggttggtaacaaagctgatatggatgaaagcaaaagggctgttccaacagcaaagggccaagctttggctgatgagtatggaatcaaattctttgagacgagtgcaaaaacaaacctcaatgtcgaaaatgttttcatgtcaatcgcaaaagacataaaacaaagattgacagaaaccgacacgaaggcagagccccaaggcatcaagatcactaaacaagatactgccgcatcgtcttctacagccgagaagtcagcttgctgtagttacgtttaggagtatgattgctctttttcgcctgcaccgggttttttaaatatctggccatctttttcatctcttacgtctcaaatcagagataattctcatgttgttacctagaacgagtaggaaatctcattgatggttgtgatctttatgtctaatttgttatctccataattcctgtacaatgatcttcctgatatggaagactatgttggtcaaaaaactatgtgaaaaagactttgaatttataaaaatgaaactgttgtagtgtgc

SEQ ID NO: 26592 - protein, 216 aa, Arabidopsis thaliana
  peptide (1)..(216): Ceres Seq. ID no. 12423041
  misc_feature (17)..(179): Pfam Name: Ras family Pfam Description: Ras family
  misc_feature (1)..(213): Homolog of NCBI NO: 15231322 NR Description: GTP-binding protein ara-3
  misc_feature (1)..(213): Homolog of NCBI NO: 18447913 NR Description: ras-related protein RAB8-1 [Nicotiana tabacum]
  misc_feature (1)..(213): Homolog of NCBI NO: 18447915 NR Description: ras-related protein RAB8-2 [Nicotiana tabacum]
  misc_feature (1)..(213): Homolog of NCBI NO: 1362066 NR Description: GTP-binding protein GTP6 - garden pea
  misc_feature (1)..(213): Homolog of NCBI NO: 1362065 NR Description: GTP-binding protein GTP11 - garden pea
  misc_feature (1)..(213): Homolog of NCBI NO: 18447917 NR Description: ras-related protein RAB8-3 [Nicotiana tabacum]
  misc_feature (1)..(213): Homolog of NCBI NO: 1362067 NR Description: GTP-binding protein GTP13 - garden pea
  misc_feature (1)..(216): Homolog of NCBI NO: 15232784 NR Description: Ras family GTP-binding protein, putative
  misc_feature (1)..(216): Homolog of NCBI NO: 21592670 NR Description: putative Ras-like GTP-binding protein
  misc_feature (1)..(216): Homolog of NCBI NO: 15242773 NR Description: GTP-binding protein, putative
MAVAPARARSDYDYLIKLLLIGDSGVGKSCLLLRFSDDTFTTSFITTIGIDFKIRTVELDGKRIKLQIWDTAGQERFRTITTAYYRGAMGILLVYDVTDESSFNNIRNWMKNIEQHASDNVNKILVGNKADMDESKRAVPTAKGQALADEYGIKFFETSAKTNLNVENVFMSIAKDIKQRLTETDTKAEPQGIKITKQDTAASSSTAEKSACCSYV

SEQ ID NO: 26593 - protein, 128 aa, Arabidopsis thaliana
  peptide (1)..(128): Ceres Seq. ID no. 12423042
  misc_feature (1)..(91): Pfam Name: Ras family Pfam Description: Ras family
  misc_feature (1)..(125): Homolog of NCBI NO: 18447913 NR Description: ras-related protein RAB8-1 [Nicotiana tabacum]
  misc_feature (1)..(125): Homolog of NCBI NO: 18447915 NR Description: ras-related protein RAB8-2 [Nicotiana tabacum]
  misc_feature (1)..(125): Homolog of NCBI NO: 15231322 NR Description: GTP-binding protein ara-3
  misc_feature (1)..(125): Homolog of NCBI NO: 1362066 NR Description: GTP-binding protein GTP6 - garden pea
  misc_feature (1)..(125): Homolog of NCBI NO: 1362065 NR Description: GTP-binding protein GTP11 - garden pea
  misc_feature (1)..(125): Homolog of NCBI NO: 18447917 NR Description: ras-related protein RAB8-3 [Nicotiana tabacum]
  misc_feature (1)..(125): Homolog of NCBI NO: 1362067 NR Description: GTP-binding protein GTP13 - garden pea
  misc_feature (1)..(128): Homolog of NCBI NO: 15232784 NR Description: Ras family GTP-binding protein, putative
  misc_feature (1)..(128): Homolog of NCBI NO: 21592670 NR Description: putative Ras-like GTP-binding protein
  misc_feature (1)..(128): Homolog of NCBI NO: 15242773 NR Description: GTP-binding protein, putative
MGILLVYDVTDESSFNNIRNWMKNIEQHASDNVNKILVGNKADMDESKRAVPTAKGQALADEYGIKFFETSAKTNLNVENVFMSIAKDIKQRLTETDTKAEPQGIKITKQDTAASSSTAEKSACCSYV

SEQ ID NO: 26594 - DNA, 943 bp, Arabidopsis thaliana
  misc_feature (1)..(943): Ceres Seq. ID no. 13500307
  misc_feature: MA Experiment ID: 108434 Result: Down-regulated in Transcription
  misc_feature: MA Experiment 108434 PARAMETER Experiment Name: At_Root_Tips_cDNA_P Parameter: Tissue Value: Root Tips
  misc_feature: MA Experiment ID: 108462 Result: Down-regulated in Transcription
  misc_feature: MA Experiment 108462 PARAMETER Experiment Name: At_Germinating_Seeds_cDNA_P Parameter: Age (day) Value: 2 vs. 0
  misc_feature: MA Experiment 108462 PARAMETER Experiment Name: At_Germinating_Seeds_cDNA_P Parameter: Tissue Value: Germinating Seeds
  misc_feature: MA Experiment ID: 108463 Result: Down-regulated in Transcription
  misc_feature: MA Experiment 108463 PARAMETER Experiment Name: At_Germinating_Seeds_cDNA_P Parameter: Age (day) Value: 3 vs. 0
  misc_feature: MA Experiment 108463 PARAMETER Experiment Name: At_Germinating_Seeds_cDNA_P Parameter: Tissue Value: Germinating Seeds
  misc_feature: MA Experiment ID: 108469 Result: Up-regulated in Transcription
  misc_feature: MA Experiment ID: 108488 Result: Down-regulated in Transcription
  misc_feature: MA Experiment ID: 108585 Result: Up-regulated in Transcription
  misc_feature: MA Experiment 108585 PARAMETER Experiment Name: At_5mM_NaNP_cDNA_P Parameter: Timepoint (hr) Value: 6
  misc_feature: MA Experiment 108585 PARAMETER Experiment Name: At_5mM_NaNP_cDNA_P Parameter: Tissue Value: Aerial
  misc_feature: MA Experiment 108585 PARAMETER Experiment Name: At_5mM_NaNP_cDNA_P Parameter: Treatment Value: null
  misc_feature: MA Experiment ID: 108668 Result: Up-regulated in Transcription
  misc_feature: MA Experiment 108668 PARAMETER Experiment Name: At_2mM_SA_cDNA_P Parameter: Plant Line Value: WS
  misc_feature: MA Experiment 108668 PARAMETER Experiment Name: At_2mM_SA_cDNA_P Parameter: Timepoint (hr) Value: 6
  misc_feature: MA Experiment 108668 PARAMETER Experiment Name: At_2mM_SA_cDNA_P Parameter: Treatment Value: 2mM SA vs. No Treatment
  misc_feature: MA Experiment ID: 20000182 Result: Up-regulated in Transcription
  misc_feature: MA Experiment 20000182 PARAMETER Experiment Name: At_2mM_SA_P Parameter: Age (day) Value: 14
  misc_feature: MA Experiment 20000182 PARAMETER Experiment Name: At_2mM_SA_P Parameter: Organism Value: A. thaliana
  misc_feature: MA Experiment 20000182 PARAMETER Experiment Name: At_2mM_SA_P Parameter: Plant Line Value: WS
  misc_feature: MA Experiment 20000182 PARAMETER Experiment Name: At_2mM_SA_P Parameter: Timepoint (hr) Value: 6
  misc_feature: MA Experiment 20000182 PARAMETER Experiment Name: At_2mM_SA_P Parameter: Tissue Value: Aerial
  misc_feature: MA Experiment 20000182 PARAMETER Experiment Name: At_2mM_SA_P Parameter: Treatment Value: 2mM SA vs. No Treatment
  misc_feature: MA Experiment ID: 20000185 Result: Down-regulated in Transcription
  misc_feature: MA Experiment 20000185 PARAMETER Experiment Name: At_Roots__P Parameter: Age (day) Value: 7 vs. 21
  misc_feature: MA Experiment 20000185 PARAMETER Experiment Name: At_Roots__P Parameter: Organism Value: A. thaliana
  misc_feature: MA Experiment 20000185 PARAMETER Experiment Name: At_Roots__P Parameter: Tissue Value: Roots vs. Whole Plant
  misc_feature: MA Experiment ID: 20001557 Result: Up-regulated in Transcription
  misc_feature: MA Experiment 20001557 PARAMETER Experiment Name: At_Drought_Soil_Dry_P Parameter: Age (day) Value: 27
  misc_feature: MA Experiment 20001557 PARAMETER Experiment Name: At_Drought_Soil_Dry_P Parameter: Organism Value: A. thaliana
  misc_feature: MA Experiment 20001557 PARAMETER Experiment Name: At_Drought_Soil_Dry_P Parameter: Plant Line Value: WS
  misc_feature: MA Experiment 20001557 PARAMETER Experiment Name: At_Drought_Soil_Dry_P Parameter: Post Timepoint (hr) Value: 3
  misc_feature: MA Experiment 20001557 PARAMETER Experiment Name: At_Drought_Soil_Dry_P Parameter: Post-Treatment Value: Re-Water vs. No Drought
  misc_feature: MA Experiment 20001557 PARAMETER Experiment Name: At_Drought_Soil_Dry_P Parameter: Timepoint (day) Value: 13
  misc_feature: MA Experiment 20001557 PARAMETER Experiment Name: At_Drought_Soil_Dry_P Parameter: Treatment Value: Drought vs. No Drought
gaaaatcacaaagcaagtcgcgtacaatgggttctgcattcgatccccttgtcacggccactgaggatctcgccgccgtcaactcggcgccgccactctcaaacctcacgcaagaagaactcaagaaaatcgccgcttataaagccgtcgaattcgtcgaatctggaatggttatcggtctcggcactggctccaccgcgaaacacgccgtggctcgtatcagcgagcttctccgagaaggaaaactcaaggatataatcggaatccctacttcaaccacaacgcatgagcaagcggtgtctctagggataccattatccgatctagattcgcatccggtggtggatctatcaatcgatggcgccgacgaagtcgatccggctcttaatctggtgaaaggacgcggcggatcgttattgagagagaagatgattgaaggagcatctaagaagttcgttgtgattgttgatgaatcgaagcttgtcaagtatatcggaggaagcggactcgctgttccggtggaggttgttccgttctgctgcgatttcacaagggggaaactggaagagctatttagagattcgggatgtgttgcgaagctgaggatgaaaatcggatctaacggcgaagaggcggcgccggctgtgacggataataggaattatgtggtggatttgtatttggagagagatattggagatttagaggtggcgagtgaggcgatattgaggtttcctggagtagtggagcatgggatgtttctgggaatggcgactacgttgatcgtcgccggcaaatttggtgttaccgtcaaggataggtttggataaaagtgtcatttgaaaaccattagggtttatggtttgattttgattttcgatggattctctctggttctgtaaaccctttcctcctattggtttaaaactttgacttatttttc

SEQ ID NO: 26595 - protein, 275 aa, Arabidopsis thaliana
  peptide (1)..(275): Ceres Seq. ID no. 13500308
  misc_feature (85)..(269): Pfam Name: Ribose 5-phosphate isomerase A (phosphoriboisomerase A) Pfam Description: Ribose 5-phosphate isomerase A
  misc_feature (9)..(267): Homolog of NCBI NO: 38347196 NR Description: OSJNBa0023J03.8 [Oryza sativa (japonica
  misc_feature (35)..(270): Homolog of NCBI NO: 15229349 NR Description: ribose 5-phosphate isomerase -related
  misc_feature (35)..(270): Homolog of NCBI NO: 21594002 NR Description: putative ribose 5-phosphate isomerase
  misc_feature (35)..(273): Homolog of NCBI NO: 34393835 NR Description: putative ribose-5-phosphate isomerase
  misc_feature (8)..(273): Homolog of NCBI NO: 34393836 NR Description: putative ribose-5-phosphate isomerase
  misc_feature (15)..(273): Homolog of NCBI NO: 18654317 NR Description: ribose-5-phosphate isomerase [Spinacia oleracea]
  misc_feature (9)..(273): Homolog of NCBI NO: 15226223 NR Description: ribose 5-phosphate isomerase -related
  misc_feature (9)..(275): Homolog of NCBI NO: 21592672 NR Description: putative ribose 5-phosphate isomerase
  misc_feature (9)..(275): Homolog of NCBI NO: 13430836 NR Description: putative ribose 5-phosphate isomerase
  misc_feature (9)..(275): Homolog of NCBI NO: 15223936 NR Description: ribose 5-phosphate isomerase -related
KSQSKSRTMGSAFDPLVTATEDLAAVNSAPPLSNLTQEELKKIAAYKAVEFVESGMVIGLGTGSTAKHAVARISELLREGKLKDIIGIPTSTTTHEQAVSLGIPLSDLDSHPVVDLSIDGADEVDPALNLVKGRGGSLLREKMIEGASKKFVVIVDESKLVKYIGGSGLAVPVEVVPFCCDFTRGKLEELFRDSGCVAKLRMKIGSNGEEAAPAVTDNRNYVVDLYLERDIGDLEVASEAILRFPGVVEHGMFLGMATTLIVAGKFGVTVKDRFG

SEQ ID NO: 26596 - protein, 267 aa, Arabidopsis thaliana
  peptide (1)..(267): Ceres Seq. ID no. 13500309
  misc_feature (77)..(261): Pfam Name: Ribose 5-phosphate isomerase A (phosphoriboisomerase A) Pfam Description: Ribose 5-phosphate isomerase A
  misc_feature (1)..(259): Homolog of NCBI NO: 38347196 NR Description: OSJNBa0023J03.8 [Oryza sativa (japonica
  misc_feature (27)..(262): Homolog of NCBI NO: 15229349 NR Description: ribose 5-phosphate isomerase -related
  misc_feature (27)..(262): Homolog of NCBI NO: 21594002 NR Description: putative ribose 5-phosphate isomerase
  misc_feature (27)..(265): Homolog of NCBI NO: 34393835 NR Description: putative ribose-5-phosphate isomerase
  misc_feature (1)..(265): Homolog of NCBI NO: 34393836 NR Description: putative ribose-5-phosphate isomerase
  misc_feature (7)..(265): Homolog of NCBI NO: 18654317 NR Description: ribose-5-phosphate isomerase [Spinacia oleracea]
  misc_feature (1)..(265): Homolog of NCBI NO: 15226223 NR Description: ribose 5-phosphate isomerase -related
  misc_feature (1)..(267): Homolog of NCBI NO: 21592672 NR Description: putative ribose 5-phosphate isomerase
  misc_feature (1)..(267): Homolog of NCBI NO: 13430836 NR Description: putative ribose 5-phosphate isomerase
  misc_feature (1)..(267): Homolog of NCBI NO: 15223936 NR Description: ribose 5-phosphate isomerase -related
MGSAFDPLVTATEDLAAVNSAPPLSNLTQEELKKIAAYKAVEFVESGMVIGLGTGSTAKHAVARISELLREGKLKDIIGIPTSTTTHEQAVSLGIPLSDLDSHPVVDLSIDGADEVDPALNLVKGRGGSLLREKMIEGASKKFVVIVDESKLVKYIGGSGLAVPVEVVPFCCDFTRGKLEELFRDSGCVAKLRMKIGSNGEEAAPAVTDNRNYVVDLYLERDIGDLEVASEAILRFPGVVEHGMFLGMATTLIVAGKFGVTVKDRFG

SEQ ID NO: 26597 - protein, 220 aa, Arabidopsis thaliana
  peptide (1)..(220): Ceres Seq. ID no. 13500310
  misc_feature (30)..(214): Pfam Name: Ribose 5-phosphate isomerase A (phosphoriboisomerase A) Pfam Description: Ribose 5-phosphate isomerase A
  misc_feature (1)..(215): Homolog of NCBI NO: 21594002 NR Description: putative ribose 5-phosphate isomerase
  misc_feature (1)..(218): Homolog of NCBI NO: 34393835 NR Description: putative ribose-5-phosphate isomerase
  misc_feature (1)..(218): Homolog of NCBI NO: 34393836 NR Description: putative ribose-5-phosphate isomerase
  misc_feature (1)..(218): Homolog of NCBI NO: 18654317 NR Description: ribose-5-phosphate isomerase [Spinacia oleracea]
  misc_feature (1)..(212): Homolog of NCBI NO: 38347196 NR Description: OSJNBa0023J03.8 [Oryza sativa (japonica
  misc_feature (1)..(215): Homolog of NCBI NO: 15229349 NR Description: ribose 5-phosphate isomerase -related
  misc_feature (1)..(218): Homolog of NCBI NO: 15226223 NR Description: ribose 5-phosphate isomerase -related
  misc_feature (1)..(220): Homolog of NCBI NO: 21592672 NR Description: putative ribose 5-phosphate isomerase
  misc_feature (1)..(220): Homolog of NCBI NO: 13430836 NR Description: putative ribose 5-phosphate isomerase
  misc_feature (1)..(220): Homolog of NCBI NO: 15223936 NR Description: ribose 5-phosphate isomerase -related
MVIGLGTGSTAKHAVARISELLREGKLKDIIGIPTSTTTHEQAVSLGIPLSDLDSHPVVDLSIDGADEVDPALNLVKGRGGSLLREKMIEGASKKFVVIVDESKLVKYIGGSGLAVPVEVVPFCCDFTRGKLEELFRDSGCVAKLRMKIGSNGEEAAPAVTDNRNYVVDLYLERDIGDLEVASEAILRFPGVVEHGMFLGMATTLIVAGKFGVTVKDRFG

SEQ ID NO: 26598 - DNA, 2668 bp, Arabidopsis thaliana
  misc_feature (1)..(2668): Ceres Seq. ID no. 13500222
  misc_feature: MA Experiment ID: 108461 Result: Up-regulated in Transcription
  misc_feature: MA Experiment 108461 PARAMETER Experiment Name: At_Germinating_Seeds_cDNA_P Parameter: Age (day) Value: 1 vs. 0
  misc_feature: MA Experiment 108461 PARAMETER Experiment Name: At_Germinating_Seeds_cDNA_P Parameter: Tissue Value: Germinating Seeds
  misc_feature: MA Experiment ID: 108462 Result: Up-regulated in Transcription
  misc_feature: MA Experiment 108462 PARAMETER Experiment Name: At_Germinating_Seeds_cDNA_P Parameter: Age (day) Value: 2 vs. 0
  misc_feature: MA Experiment 108462 PARAMETER Experiment Name: At_Germinating_Seeds_cDNA_P Parameter: Tissue Value: Germinating Seeds
  misc_feature: MA Experiment ID: 20000180 Result: Up-regulated in Transcription
  misc_feature: MA Experiment 20000180 PARAMETER Experiment Name: At_Germinating_Seeds_P Parameter: Age (hr) Value: 24 vs. 0
  misc_feature: MA Experiment 20000180 PARAMETER Experiment Name: At_Germinating_Seeds_P Parameter: Tissue Value: Germinating Seeds
  misc_feature: MA Experiment ID: 20000264 Result: Up-regulated in Transcription
  misc_feature: MA Experiment 20000264 PARAMETER Experiment Name: At_Open_Flower_P Parameter: Age (day) Value: 21
  misc_feature: MA Experiment 20000264 PARAMETER Experiment Name: At_Open_Flower_P Parameter: Plant Line Value: WS
  misc_feature: MA Experiment 20000264 PARAMETER Experiment Name: At_Open_Flower_P Parameter: Tissue Value: Open Flower vs. Whole Plant
  misc_feature: MA Experiment ID: 20000794 Result: Up-regulated in Transcription
  misc_feature: MA Experiment 20000794 PARAMETER Experiment Name: At_Petals_P Parameter: Age (day) Value: 23-25 days
  misc_feature: MA Experiment 20000794 PARAMETER Experiment Name: At_Petals_P Parameter: Plant Line Value: WS
  misc_feature: MA Experiment 20000794 PARAMETER Experiment Name: At_Petals_P Parameter: Tissue Value: Petals vs. Whole plant
  misc_feature: MA Experiment ID: 20001247 Result: Up-regulated in Transcription
  misc_feature: MA Experiment 20001247 PARAMETER Experiment Name: At_Far-red-induction_P Parameter: Age (day) Value: 7
  misc_feature: MA Experiment 20001247 PARAMETER Experiment Name: At_Far-red-induction_P Parameter: Light Value: Far-red vs. White
  misc_feature: MA Experiment 20001247 PARAMETER Experiment Name: At_Far-red-induction_P Parameter: Organism Value: A. thaliana
  misc_feature: MA Experiment 20001247 PARAMETER Experiment Name: At_Far-red-induction_P Parameter: Plant Line Value: Columbia
  misc_feature: MA Experiment 20001247 PARAMETER Experiment Name: At_Far-red-induction_P Parameter: Timepoint (hr) Value: 1
  misc_feature: MA Experiment 20001247 PARAMETER Experiment Name: At_Far-red-induction_P Parameter: Tissue Value: Whole Plant
  misc_feature: MA Experiment ID: 20001757 Result: Down-regulated in Transcription
  misc_feature: MA Experiment 20001757 PARAMETER Experiment Name: At_50mM_NH4NO3_L-to-H_P Parameter: Timepoint (hr) Value: 6
  misc_feature: MA Experiment 20001757 PARAMETER Experiment Name: At_50mM_NH4NO3_L-to-H_P Parameter: Tissue Value: Leaf
  misc_feature: MA Experiment 20001757 PARAMETER Experiment Name: At_50mM_NH4NO3_L-to-H_P Parameter: Treatment Value: 50mM NH4NO3 vs 100mM Mannitol
  misc_feature: MA Experiment ID: 20001910 Result: Up-regulated in Transcription
  misc_feature: MA Experiment 20001910 PARAMETER Experiment Name: At_Drought_Reproduction_P Parameter: Age (day) Value: 37
  misc_feature: MA Experiment 20001910 PARAMETER Experiment Name: At_Drought_Reproduction_P Parameter: Organism Value: A. thaliana
  misc_feature: MA Experiment 20001910 PARAMETER Experiment Name: At_Drought_Reproduction_P Parameter: Plant Line Value: WS
  misc_feature: MA Experiment 20001910 PARAMETER Experiment Name: At_Drought_Reproduction_P Parameter: Timepoint (day) Value: 7
  misc_feature: MA Experiment 20001910 PARAMETER Experiment Name: At_Drought_Reproduction_P Parameter: Tissue Value: Flowers
  misc_feature: MA Experiment 20001910 PARAMETER Experiment Name: At_Drought_Reproduction_P Parameter: Treatment Value: Drought vs. No Drought
atccttttagattactttcctcttttttttttttttttttttctttcgcgtgtgattattaactcgaggtaatttctctaatcccagttaatatcacacgcggaatatcaaagatctgattttttgtaaacattgtaccaaaatcatcagaagattataagtggagtctttcgaagaagaacaaatttgtaacacgcgtctccatcaatcttctagctggcaatgagatccattctttagcttctttcttctctgttttttcttttttgaagaaaaaaaaaatggcaccaaagtttgaatggtgggctaaaggaaacaacaacaacactcgtaaaggaacaccagtcgttgtcaaaatggaaaaccctaataactggtcaatggtggaacttgaatcaccttctcatgacgatttcctcgtaagaactcatgagaaatctcgtaacaagaacgcaagacagctcacttgggttctacttctcaaagctcatcgtgccgcaggttgtctcacttctctcggttctgcattattcgctctcggcaccgccgtgcgccgccgtatcgccgccggccgtacagacattgaaatctcctcctcgggagtgggttcattacagaagcaaaaccatacgaagaaatcgaaacttttctactcttgcttaaaggtgtttctatggctttctttaatccttttgggttttgagattgctgcttatttcaaaggttggagctttggaacttctaagcttcagcttcagtttatcttcaataaagggttctttgattgggtttacacgagatgggttttgcttcgtgttgagtatcttgctcctcctcttcagtttcttgctaatggctgcattgttctgtttcttgttcagagtcttgatagactcattctttgtcttggttgtttttggatccggtttaagaagattaaaccggttcctaaaccggattctatctctgatcttgaatctggtgataatggtgctttcctccctatggttcttgttcaaatccctatgtgtaatgagaaagaggtttatcagcaatctattgcagctgtgtgtaacttagactggcctaaagggaagattttgattcaaattctcgatgattcggatgatccgataacgcagagtttgattaaagaagaggttcataaatggcagaagctaggtgcacgcattgtgtatcgtcaccgtgttaatagagaaggttacaaagctggtaatcttaagtctgctatgaactgtagttatgttaaagactacgaattcgttgcgattttcgacgcagattttcaacctctacctgatttcctcaagaagaccattcctcattttaaggacaatgaggaaataggattggttcaagctaggtggtcttttgtgaataaggaagagaacttgttgacaagattacagaatattaacttggcttttcactttgaggttgagcaacaagtgaatagtgtcttcttgaatttcttcgggtttaacgggacagccggtgtgtggaggatcaaagctttggaagattccggtggttggctcgagagaactaccgtcgaggatatggacattgcggttcgtgctcaccttcacggatggaaattcgttttcctaaatgacgttgagtgccaatgtgaattaccggaatcgtatgaagcttatagaaaacagcaacatagatggcattcaggtcctatgcaactatttcgtctttgtttgcccgcggtcattaaatcaaagataagcataggaaagaaattcaatttgatattcctcttctttctcctgaggaagctaatcttgccattctactcattcactctcttttgtattatcctgccaatgactatgtttgtacccgaagctgagcttcccgcttgggttgtttgctacatacctgccacaatgtctttcctcaacatccttcccgccccgaagtcgtttccgtttatcgtcccgtaccttctctttgagaacacaatgtctgtgactaagttcaacgcaatggtctcgggtttgtttcagctaggaagtgcttatgaatgggttgttacaaaaaaatcaggacggtcatcagaaggagatcttgctgcgttagtcgaaaaagacgaaaagacaactaaacatcagagaggtgtgtctgcacccgaaaccgaagccgagaaaaaggcggaaaagactaagaggaagaagaagaagcacaataggatttatatgaaggagctatctctagcgtttctgttactgaccgcggcaactcgaagtcttttatcggcgcaaggaatccatttctacttccttttgtttcaaggaatatctttcttacttgtgggtctagatcttattggagaacaagttgaatgacactcaaagagattgaagtagtgcttgtagaagagacgttgtagaagacgggaaacatgaagagaaaaaggaagagggtctggacccaaaaaaatacaatacaacattgaacatagatcggtttcattgaggaaggacatggattaactctgttggtagtgaatgtgtaaggttttaacttttctctcttttgggtttgcccacagttgtttattctttcgattaaatggggacaactcttttgtaagaaagttttgttcaattatgaaagcaaattgttttagctc

SEQ ID NO: 26599 - protein, 699 aa, Arabidopsis thaliana
  peptide (1)..(699): Ceres Seq. ID no. 13500223
  misc_feature (244)..(419): Pfam Name: Glycosyl transferase Pfam Description: Glycosyl transferase
  misc_feature (22)..(150): Homolog of NCBI NO: 18405677 NR Description: glycosyltransferase family 2 [Arabidopsis
  misc_feature (81)..(698): Homolog of NCBI NO: 18405677 NR Description: glycosyltransferase family 2 [Arabidopsis
  misc_feature (123)..(699): Homolog of NCBI NO: 17385963 NR Description: CSLC9 [Oryza sativa]
  misc_feature (123)..(699): Homolog of NCBI NO: 16974749 NR Description: CSLC9 [Oryza sativa]
  misc_feature (604)..(698): Homolog of NCBI NO: 34419220 NR Description: TPA: cellulose synthase-like C3
  misc_feature (7)..(154): Homolog of NCBI NO: 34419220 NR Description: TPA: cellulose synthase-like C3
  misc_feature (164)..(626): Homolog of NCBI NO: 34419220 NR Description: TPA: cellulose synthase-like C3
  misc_feature (1)..(698): Homolog of NCBI NO: 15224178 NR Description: glycosyltransferase family 2 [Arabidopsis
  misc_feature (1)..(698): Homolog of NCBI NO: 15236004 NR Description: glycosyltransferase family 2 [Arabidopsis
  misc_feature (1)..(699): Homolog of NCBI NO: 28201308 NR Description: putative CSLC9(cellulose synthase-like)
MAPKFEWWAKGNNNNTRKGTPVVVKMENPNNWSMVELESPSHDDFLVRTHEKSRNKNARQLTWVLLLKAHRAAGCLTSLGSALFALGTAVRRRIAAGRTDIEISSSGVGSLQKQNHTKKSKLFYSCLKVFLWLSLILLGFEIAAYFKGWSFGTSKLQLQFIFNKGFFDWVYTRWVLLRVEYLAPPLQFLANGCIVLFLVQSLDRLILCLGCFWIRFKKIKPVPKPDSISDLESGDNGAFLPMVLVQIPMCNEKEVYQQSIAAVCNLDWPKGKILIQILDDSDDPITQSLIKEEVHKWQKLGARIVYRHRVNREGYKAGNLKSAMNCSYVKDYEFVAIFDADFQPLPDFLKKTIPHFKDNEEIGLVQARWSFVNKEENLLTRLQNINLAFHFEVEQQVNSVFLNFFGFNGTAGVWRIKALEDSGGWLERTTVEDMDIAVRAHLHGWKFVFLNDVECQCELPESYEAYRKQQHRWHSGPMQLFRLCLPAVIKSKISIGKKFNLIFLFFLLRKLILPFYSFTLFCIILPMTMFVPEAELPAWVVCYIPATMSFLNILPAPKSFPFIVPYLLFENTMSVTKFNAMVSGLFQLGSAYEWVVTKKSGRSSEGDLAALVEKDEKTTKHQRGVSAPETEAEKKAEKTKRKKKKHNRIYMKELSLAFLLLTAATRSLLSAQGIHFYFLLFQGISFLLVGLDLIGEQVE

SEQ ID NO: 26600 - protein, 674 aa, Arabidopsis thaliana
  peptide (1)..(674): Ceres Seq. ID no. 13500224
  misc_feature (219)..(394): Pfam Name: Glycosyl transferase Pfam Description: Glycosyl transferase
  misc_feature (1)..(125): Homolog of NCBI NO: 18405677 NR Description: glycosyltransferase family 2 [Arabidopsis
  misc_feature (56)..(673): Homolog of NCBI NO: 18405677 NR Description: glycosyltransferase family 2 [Arabidopsis
  misc_feature (98)..(674): Homolog of NCBI NO: 17385963 NR Description: CSLC9 [Oryza sativa]
  misc_feature (98)..(674): Homolog of NCBI NO: 16974749 NR Description: CSLC9 [Oryza sativa]
  misc_feature (579)..(673): Homolog of NCBI NO: 34419220 NR Description: TPA: cellulose synthase-like C3
  misc_feature (1)..(129): Homolog of NCBI NO: 34419220 NR Description: TPA: cellulose synthase-like C3
  misc_feature (139)..(601): Homolog of NCBI NO: 34419220 NR Description: TPA: cellulose synthase-like C3
  misc_feature (1)..(673): Homolog of NCBI NO: 15224178 NR Description: glycosyltransferase family 2 [Arabidopsis
  misc_feature (1)..(673): Homolog of NCBI NO: 15236004 NR Description: glycosyltransferase family 2 [Arabidopsis
  misc_feature (1)..(674): Homolog of NCBI NO: 28201308 NR Description: putative CSLC9(cellulose synthase-like)
MENPNNWSMVELESPSHDDFLVRTHEKSRNKNARQLTWVLLLKAHRAAGCLTSLGSALFALGTAVRRRIAAGRTDIEISSSGVGSLQKQNHTKKSKLFYSCLKVFLWLSLILLGFEIAAYFKGWSFGTSKLQLQFIFNKGFFDWVYTRWVLLRVEYLAPPLQFLANGCIVLFLVQSLDRLILCLGCFWIRFKKIKPVPKPDSISDLESGDNGAFLPMVLVQIPMCNEKEVYQQSIAAVCNLDWPKGKILIQILDDSDDPITQSLIKEEVHKWQKLGARIVYRHRVNREGYKAGNLKSAMNCSYVKDYEFVAIFDADFQPLPDFLKKTIPHFKDNEEIGLVQARWSFVNKEENLLTRLQNINLAFHFEVEQQVNSVFLNFFGFNGTAGVWRIKALEDSGGWLERTTVEDMDIAVRAHLHGWKFVFLNDVECQCELPESYEAYRKQQHRWHSGPMQLFRLCLPAVIKSKISIGKKFNLIFLFFLLRKLILPFYSFTLFCIILPMTMFVPEAELPAWVVCYIPATMSFLNILPAPKSFPFIVPYLLFENTMSVTKFNAMVSGLFQLGSAYEWVVTKKSGRSSEGDLAALVEKDEKTTKHQRGVSAPETEAEKKAEKTKRKKKKHNRIYMKELSLAFLLLTAATRSLLSAQGIHFYFLLFQGISFLLVGLDLIGEQVE

SEQ ID NO: 26601 - protein, 666 aa, Arabidopsis thaliana
  peptide (1)..(666): Ceres Seq. ID no. 13500225
  misc_feature (211)..(386): Pfam Name: Glycosyl transferase Pfam Description: Glycosyl transferase
  misc_feature (1)..(117): Homolog of NCBI NO: 18405677 NR Description: glycosyltransferase family 2 [Arabidopsis
  misc_feature (48)..(665): Homolog of NCBI NO: 18405677 NR Description: glycosyltransferase family 2 [Arabidopsis
  misc_feature (90)..(666): Homolog of NCBI NO: 17385963 NR Description: CSLC9 [Oryza sativa]
  misc_feature (90)..(666): Homolog of NCBI NO: 16974749 NR Description: CSLC9 [Oryza sativa]
  misc_feature (571)..(665): Homolog of NCBI NO: 34419220 NR Description: TPA: cellulose synthase-like C3
  misc_feature (1)..(121): Homolog of NCBI NO: 34419220 NR Description: TPA: cellulose synthase-like C3
  misc_feature (131)..(593): Homolog of NCBI NO: 34419220 NR Description: TPA: cellulose synthase-like C3
  misc_feature (1)..(665): Homolog of NCBI NO: 15224178 NR Description: glycosyltransferase family 2 [Arabidopsis
  misc_feature (1)..(665): Homolog of NCBI NO: 15236004 NR Description: glycosyltransferase family 2 [Arabidopsis
  misc_feature (1)..(666): Homolog of NCBI NO: 28201308 NR Description: putative CSLC9(cellulose synthase-like)
MVELESPSHDDFLVRTHEKSRNKNARQLTWVLLLKAHRAAGCLTSLGSALFALGTAVRRRIAAGRTDIEISSSGVGSLQKQNHTKKSKLFYSCLKVFLWLSLILLGFEIAAYFKGWSFGTSKLQLQFIFNKGFFDWVYTRWVLLRVEYLAPPLQFLANGCIVLFLVQSLDRLILCLGCFWIRFKKIKPVPKPDSISDLESGDNGAFLPMVLVQIPMCNEKEVYQQSIAAVCNLDWPKGKILIQILDDSDDPITQSLIKEEVHKWQKLGARIVYRHRVNREGYKAGNLKSAMNCSYVKDYEFVAIFDADFQPLPDFLKKTIPHFKDNEEIGLVQARWSFVNKEENLLTRLQNINLAFHFEVEQQVNSVFLNFFGFNGTAGVWRIKALEDSGGWLERTTVEDMDIAVRAHLHGWKFVFLNDVECQCELPESYEAYRKQQHRWHSGPMQLFRLCLPAVIKSKISIGKKFNLIFLFFLLRKLILPFYSFTLFCIILPMTMFVPEAELPAWVVCYIPATMSFLNILPAPKSFPFIVPYLLFENTMSVTKFNAMVSGLFQLGSAYEWVVTKKSGRSSEGDLAALVEKDEKTTKHQRGVSAPETEAEKKAEKTKRKKKKHNRIYMKELSLAFLLLTAATRSLLSAQGIHFYFLLFQGISFLLVGLDLIGEQVE

SEQ ID NO: 26602 - DNA, 750 bp, Arabidopsis thaliana
  misc_feature (1)..(750): Ceres Seq. ID no. 12321126
  misc_feature: MA Experiment ID: 108434 Result: Down-regulated in Transcription
  misc_feature: MA Experiment 108434 PARAMETER Experiment Name: At_Root_Tips_cDNA_P Parameter: Tissue Value: Root Tips
  misc_feature: MA Experiment ID: 108463 Result: Up-regulated in Transcription
  misc_feature: MA Experiment 108463 PARAMETER Experiment Name: At_Germinating_Seeds_cDNA_P Parameter: Age (day) Value: 3 vs. 0
  misc_feature: MA Experiment 108463 PARAMETER Experiment Name: At_Germinating_Seeds_cDNA_P Parameter: Tissue Value: Germinating Seeds
  misc_feature: MA Experiment ID: 108464 Result: Up-regulated in Transcription
  misc_feature: MA Experiment 108464 PARAMETER Experiment Name: At_Germinating_Seeds_cDNA_P Parameter: Age (day) Value: 4 vs. 0
  misc_feature: MA Experiment 108464 PARAMETER Experiment Name: At_Germinating_Seeds_cDNA_P Parameter: Tissue Value: Germinating Seeds
  misc_feature: MA Experiment ID: 108585 Result: Up-regulated in Transcription
  misc_feature: MA Experiment 108585 PARAMETER Experiment Name: At_5mM_NaNP_cDNA_P Parameter: Timepoint (hr) Value: 6
  misc_feature: MA Experiment 108585 PARAMETER Experiment Name: At_5mM_NaNP_cDNA_P Parameter: Tissue Value: Aerial
  misc_feature: MA Experiment 108585 PARAMETER Experiment Name: At_5mM_NaNP_cDNA_P Parameter: Treatment Value: null
  misc_feature: MA Experiment ID: 20000071 Result: Down-regulated in Transcription
  misc_feature: MA Experiment 20000071 PARAMETER Experiment Name: At_100uM_ABA_Mutants_cDNA_P Parameter: Plant Line Value: CS8104
  misc_feature: MA Experiment 20000071 PARAMETER Experiment Name: At_100uM_ABA_Mutants_cDNA_P Parameter: Timepoint (hr) Value: 6
  misc_feature: MA Experiment 20000071 PARAMETER Experiment Name: At_100uM_ABA_Mutants_cDNA_P Parameter: Tissue Value: Aerial
  misc_feature: MA Experiment 20000071 PARAMETER Experiment Name: At_100uM_ABA_Mutants_cDNA_P Parameter: Treatment Value: 100uM ABA vs. No Treatment
  misc_feature: MA Experiment ID: 20000113 Result: Up-regulated in Transcription
  misc_feature: MA Experiment 20000113 PARAMETER Experiment Name: At_42deg_Heat_cDNA_P Parameter: Temperature (deg C) Value: 42 vs. 22
  misc_feature: MA Experiment 20000113 PARAMETER Experiment Name: At_42deg_Heat_cDNA_P Parameter: Timepoint (hr) Value: 8
  misc_feature: MA Experiment 20000113 PARAMETER Experiment Name: At_42deg_Heat_cDNA_P Parameter: Tissue Value: Aerial
  misc_feature: MA Experiment ID: 20000180 Result: Up-regulated in Transcription
  misc_feature: MA Experiment 20000180 PARAMETER Experiment Name: At_Germinating_Seeds_P Parameter: Age (hr) Value: 24 vs. 0
  misc_feature: MA Experiment 20000180 PARAMETER Experiment Name: At_Germinating_Seeds_P Parameter: Tissue Value: Germinating Seeds
  misc_feature: MA Experiment ID: 20000185 Result: Up-regulated in Transcription
  misc_feature: MA Experiment 20000185 PARAMETER Experiment Name: At_Roots__P Parameter: Age (day) Value: 7 vs. 21
  misc_feature: MA Experiment 20000185 PARAMETER Experiment Name: At_Roots__P Parameter: Organism Value: A. thaliana
  misc_feature: MA Experiment 20000185 PARAMETER Experiment Name: At_Roots__P Parameter: Tissue Value: Roots vs. Whole Plant
  misc_feature: MA Experiment ID: 20000227 Result: Down-regulated in Transcription
  misc_feature: MA Experiment 20000227 PARAMETER Experiment Name: At_Root-Tips-vs-Tops_P Parameter: Tissue Value: Root Tips vs. Root Tops
  misc_feature: MA Experiment ID: 20000234 Result: Down-regulated in Transcription
  misc_feature: MA Experiment 20000234 PARAMETER Experiment Name: At_Siliques_P Parameter: Age (day) Value: 21
  misc_feature: MA Experiment 20000234 PARAMETER Experiment Name: At_Siliques_P Parameter: Organism Value: A. thaliana
  misc_feature: MA Experiment 20000234 PARAMETER Experiment Name: At_Siliques_P Parameter: Plant Line Value: WS
  misc_feature: MA Experiment 20000234 PARAMETER Experiment Name: At_Siliques_P Parameter: Tissue Value: Less Than 5mm Siliques vs. Whole Plant
  misc_feature: MA Experiment ID: 20000439 Result: Up-regulated in Transcription
  misc_feature: MA Experiment 20000439 PARAMETER Experiment Name: At_Roots__P Parameter: Age (day) Value: 14 vs. 21
  misc_feature: MA Experiment 20000439 PARAMETER Experiment Name: At_Roots__P Parameter: Organism Value: A. thaliana
  misc_feature: MA Experiment 20000439 PARAMETER Experiment Name: At_Roots__P Parameter: Tissue Value: Roots vs. Whole Plant
  misc_feature: MA Experiment ID: 20001248 Result: Up-regulated in Transcription
  misc_feature: MA Experiment 20001248 PARAMETER Experiment Name: At_Far-red-induction_P Parameter: Age (day) Value: 7
  misc_feature: MA Experiment 20001248 PARAMETER Experiment Name: At_Far-red-induction_P Parameter: Light Value: Far-red vs. White
  misc_feature: MA Experiment 20001248 PARAMETER Experiment Name: At_Far-red-induction_P Parameter: Organism Value: A. thaliana
  misc_feature: MA Experiment 20001248 PARAMETER Experiment Name: At_Far-red-induction_P Parameter: Plant Line Value: Columbia
  misc_feature: MA Experiment 20001248 PARAMETER Experiment Name: At_Far-red-induction_P Parameter: Timepoint (hr) Value: 4
  misc_feature: MA Experiment 20001248 PARAMETER Experiment Name: At_Far-red-induction_P Parameter: Tissue Value: Whole Plant
  misc_feature: MA Experiment ID: 20001556 Result: Down-regulated in Transcription
  misc_feature: MA Experiment 20001556 PARAMETER Experiment Name: At_Drought_Soil_Dry_P Parameter: Age (day) Value: 26
  misc_feature: MA Experiment 20001556 PARAMETER Experiment Name: At_Drought_Soil_Dry_P Parameter: Organism Value: A. thaliana
  misc_feature: MA Experiment 20001556 PARAMETER Experiment Name: At_Drought_Soil_Dry_P Parameter: Plant Line Value: WS
  misc_feature: MA Experiment 20001556 PARAMETER Experiment Name: At_Drought_Soil_Dry_P Parameter: Post Timepoint (hr) Value: None
  misc_feature: MA Experiment 20001556 PARAMETER Experiment Name: At_Drought_Soil_Dry_P Parameter: Post-Treatment Value: None
  misc_feature: MA Experiment 20001556 PARAMETER Experiment Name: At_Drought_Soil_Dry_P Parameter: Timepoint (day) Value: 12
  misc_feature: MA Experiment 20001556 PARAMETER Experiment Name: At_Drought_Soil_Dry_P Parameter: Treatment Value: Drought vs. No Drought
  misc_feature: MA Experiment ID: 20001557 Result: Up-regulated in Transcription
  misc_feature: MA Experiment 20001557 PARAMETER Experiment Name: At_Drought_Soil_Dry_P Parameter: Age (day) Value: 27
  misc_feature: MA Experiment 20001557 PARAMETER Experiment Name: At_Drought_Soil_Dry_P Parameter: Organism Value: A. thaliana
  misc_feature: MA Experiment 20001557 PARAMETER Experiment Name: At_Drought_Soil_Dry_P Parameter: Plant Line Value: WS
  misc_feature: MA Experiment 20001557 PARAMETER Experiment Name: At_Drought_Soil_Dry_P Parameter: Post Timepoint (hr) Value: 3
  misc_feature: MA Experiment 20001557 PARAMETER Experiment Name: At_Drought_Soil_Dry_P Parameter: Post-Treatment Value: Re-Water vs. No Drought
  misc_feature: MA Experiment 20001557 PARAMETER Experiment Name: At_Drought_Soil_Dry_P Parameter: Timepoint (day) Value: 13
  misc_feature: MA Experiment 20001557 PARAMETER Experiment Name: At_Drought_Soil_Dry_P Parameter: Treatment Value: Drought vs. No Drought
  misc_feature: MA Experiment ID: 20001773 Result: Up-regulated in Transcription
  misc_feature: MA Experiment 20001773 PARAMETER Experiment Name: At_Far-red-enriched-adult_P Parameter: Age (day) Value: 30
  misc_feature: MA Experiment 20001773 PARAMETER Experiment Name: At_Far-red-enriched-adult_P Parameter: Light Value: Far-red enriched vs. White
  misc_feature: MA Experiment 20001773 PARAMETER Experiment Name: At_Far-red-enriched-adult_P Parameter: Organism Value: A. thaliana
  misc_feature: MA Experiment 20001773 PARAMETER Experiment Name: At_Far-red-enriched-adult_P Parameter: Plant Line Value: Columbia
  misc_feature: MA Experiment 20001773 PARAMETER Experiment Name: At_Far-red-enriched-adult_P Parameter: Timepoint (hr) Value: 48
  misc_feature: MA Experiment 20001773 PARAMETER Experiment Name: At_Far-red-enriched-adult_P Parameter: Tissue Value: Aerial
ctcccacttcttctcctctctctctactccaagttttcagaatgacattcttcatcgaagacactagtctcatcatcagccacgttctctacaaaacggcacttatcatcaccgttttacgatggatctttgcatggatcctccgttaccgctcaagatcatcatcatcatcatcatcatcatctcaatcgtcctcttctccttctatttcatcacaaaccatcaaagaaagcctagccgtgttcgctttccgcgacgcggtggagagatctcccgcggcgataaacgacatgtgtgccgtgtgtctaggagatcttgaagacgaggacgaaatcagagagcttaggaactgtactcacgtgtttcatcgtgattgtattgaccgatggctagattatgaatgttgcggcggtgatgatgataaccaccgtacttgtccgctatgtcgaacgccgttgcttccatctttcactgattattcaaccgttactcaaactagttgggctgttgaacgacttctttacctcttcggcgacgatcttcttccctgacttttatttttcttttagaaaacatttgatttcatattttttttatgaatattgtaattggtagaggggtagaataggaaatataagagtgattgatcgcaattatacgaaatcgaatcaatttgatttgattgtatatacaaatgttaaactgtattaattctcctcttcagataaatgtctaacattttttattatt

SEQ ID NO: 26603 - protein, 182 aa, Arabidopsis thaliana
  peptide (1)..(182): Ceres Seq. ID no. 12321127
  misc_feature (98)..(148): Pfam Name: Zinc finger, C3HC4 type (RING finger) Pfam Description: Zinc finger, C3HC4 type (RING finger)
  misc_feature (54)..(168): Homolog of NCBI NO: 15222553 NR Description: putative RING zinc finger protein
  misc_feature (54)..(158): Homolog of NCBI NO: 11358786 NR Description: RING-H2 finger protein RHX1a
  misc_feature (18)..(158): Homolog of NCBI NO: 15232280 NR Description: RING-H2 zinc finger protein ATL4
  misc_feature (18)..(158): Homolog of NCBI NO: 25456491 NR Description: RING-H2 zinc finger protein ATL4
  misc_feature (54)..(173): Homolog of NCBI NO: 15238072 NR Description: RING zinc finger protein-like
  misc_feature (54)..(173): Homolog of NCBI NO: 21554155 NR Description: RING zinc finger protein-like [Arabidopsis
  misc_feature (22)..(166): Homolog of NCBI NO: 23451086 NR Description: RING-H2 protein [Medicago sativa]
  misc_feature (5)..(168): Homolog of NCBI NO: 15233117 NR Description: RING finger protein
  misc_feature (14)..(180): Homolog of NCBI NO: 18420336 NR Description: putative protein
  misc_feature (14)..(182): Homolog of NCBI NO: 15229284 NR Description: putative protein
PTSSPLSLLQVFRMTFFIEDTSLIISHVLYKTALIITVLRWIFAWILRYRSRSSSSSSSSSQSSSSPSISSQTIKESLAVFAFRDAVERSPAAINDMCAVCLGDLEDEDEIRELRNCTHVFHRDCIDRWLDYECCGGDDDNHRTCPLCRTPLLPSFTDYSTVTQTSWAVERLLYLFGDDLLP

SEQ ID NO: 26604 - protein, 169 aa, Arabidopsis thaliana
  peptide (1)..(169): Ceres Seq. ID no. 12321128
  misc_feature (85)..(135): Pfam Name: Zinc finger, C3HC4 type (RING finger) Pfam Description: Zinc finger, C3HC4 type (RING finger)
  misc_feature (41)..(155): Homolog of NCBI NO: 15222553 NR Description: putative RING zinc finger protein
  misc_feature (41)..(145): Homolog of NCBI NO: 11358786 NR Description: RING-H2 finger protein RHX1a
  misc_feature (5)..(145): Homolog of NCBI NO: 15232280 NR Description: RING-H2 zinc finger protein ATL4
  misc_feature (5)..(145): Homolog of NCBI NO: 25456491 NR Description: RING-H2 zinc finger protein ATL4
  misc_feature (41)..(160): Homolog of NCBI NO: 15238072 NR Description: RING zinc finger protein-like
  misc_feature (41)..(160): Homolog of NCBI NO: 21554155 NR Description: RING zinc finger protein-like [Arabidopsis
  misc_feature (9)..(153): Homolog of NCBI NO: 23451086 NR Description: RING-H2 protein [Medicago sativa]
  misc_feature (1)..(155): Homolog of NCBI NO: 15233117 NR Description: RING finger protein
  misc_feature (1)..(167): Homolog of NCBI NO: 18420336 NR Description: putative protein
  misc_feature (1)..(169): Homolog of NCBI NO: 15229284 NR Description: putative protein
MTFFIEDTSLIISHVLYKTALIITVLRWIFAWILRYRSRSSSSSSSSSQSSSSPSISSQTIKESLAVFAFRDAVERSPAAINDMCAVCLGDLEDEDEIRELRNCTHVFHRDCIDRWLDYECCGGDDDNHRTCPLCRTPLLPSFTDYSTVTQTSWAVERLLYLFGDDLLP

SEQ ID NO: 26605 - DNA, 1204 bp, Arabidopsis thaliana
  misc_feature (1)..(1204): Ceres Seq. ID no. 12371447
  misc_feature: MA Experiment ID: 20000184 Result: Up-regulated in Transcription
  misc_feature: MA Experiment 20000184 PARAMETER Experiment Name: At_Shoots__P Parameter: Age (day) Value: 7
  misc_feature: MA Experiment 20000184 PARAMETER Experiment Name: At_Shoots__P Parameter: Tissue Value: Shoots vs. Whole Plant
  misc_feature: MA Experiment ID: 20000234 Result: Up-regulated in Transcription
  misc_feature: MA Experiment 20000234 PARAMETER Experiment Name: At_Siliques_P Parameter: Age (day) Value: 21
  misc_feature: MA Experiment 20000234 PARAMETER Experiment Name: At_Siliques_P Parameter: Organism Value: A. thaliana
  misc_feature: MA Experiment 20000234 PARAMETER Experiment Name: At_Siliques_P Parameter: Plant Line Value: WS
  misc_feature: MA Experiment 20000234 PARAMETER Experiment Name: At_Siliques_P Parameter: Tissue Value: Less Than 5mm Siliques vs. Whole Plant
  misc_feature: MA Experiment ID: 20000264 Result: Up-regulated in Transcription
  misc_feature: MA Experiment 20000264 PARAMETER Experiment Name: At_Open_Flower_P Parameter: Age (day) Value: 21
  misc_feature: MA Experiment 20000264 PARAMETER Experiment Name: At_Open_Flower_P Parameter: Plant Line Value: WS
  misc_feature: MA Experiment 20000264 PARAMETER Experiment Name: At_Open_Flower_P Parameter: Tissue Value: Open Flower vs. Whole Plant
  misc_feature: MA Experiment ID: 20000265 Result: Up-regulated in Transcription
  misc_feature: MA Experiment 20000265 PARAMETER Experiment Name: At_Open_Flower_P Parameter: Age (day) Value: 21
  misc_feature: MA Experiment 20000265 PARAMETER Experiment Name: At_Open_Flower_P Parameter: Plant Line Value: WS
  misc_feature: MA Experiment 20000265 PARAMETER Experiment Name: At_Open_Flower_P Parameter: Tissue Value: Closed Flower vs. Whole Plant
  misc_feature: MA Experiment ID: 20000436 Result: Down-regulated in Transcription
  misc_feature: MA Experiment 20000436 PARAMETER Experiment Name: At_Drought_P Parameter: Age (day) Value: 7
  misc_feature: MA Experiment 20000436 PARAMETER Experiment Name: At_Drought_P Parameter: Organism Value: A. thaliana
  misc_feature: MA Experiment 20000436 PARAMETER Experiment Name: At_Drought_P Parameter: Plant Line Value: WS
  misc_feature: MA Experiment 20000436 PARAMETER Experiment Name: At_Drought_P Parameter: Timepoint (hr) Value: 12
  misc_feature: MA Experiment 20000436 PARAMETER Experiment Name: At_Drought_P Parameter: Tissue Value: Whole Plant
  misc_feature: MA Experiment 20000436 PARAMETER Experiment Name: At_Drought_P Parameter: Treatment Value: Drought vs. No Drought
  misc_feature: MA Experiment ID: 20000437 Result: Down-regulated in Transcription
  misc_feature: MA Experiment 20000437 PARAMETER Experiment Name: At_Drought_P Parameter: Age (day) Value: 8
  misc_feature: MA Experiment 20000437 PARAMETER Experiment Name: At_Drought_P Parameter: Organism Value: A. thaliana
  misc_feature: MA Experiment 20000437 PARAMETER Experiment Name: At_Drought_P Parameter: Plant Line Value: WS
  misc_feature: MA Experiment 20000437 PARAMETER Experiment Name: At_Drought_P Parameter: Timepoint (hr) Value: 24
  misc_feature: MA Experiment 20000437 PARAMETER Experiment Name: At_Drought_P Parameter: Tissue Value: Whole Plant
  misc_feature: MA Experiment 20000437 PARAMETER Experiment Name: At_Drought_P Parameter: Treatment Value: Drought vs. No Drought
  misc_feature: MA Experiment ID: 20000453 Result: Down-regulated in Transcription
  misc_feature: MA Experiment 20000453 PARAMETER Experiment Name: At_100uM_ABA_P Parameter: Age (day) Value: 15
  misc_feature: MA Experiment 20000453 PARAMETER Experiment Name: At_100uM_ABA_P Parameter: Organism Value: A. thaliana
  misc_feature: MA Experiment 20000453 PARAMETER Experiment Name: At_100uM_ABA_P Parameter: Plant Line Value: WS
  misc_feature: MA Experiment 20000453 PARAMETER Experiment Name: At_100uM_ABA_P Parameter: Timepoint (hr) Value: 24
  misc_feature: MA Experiment 20000453 PARAMETER Experiment Name: At_100uM_ABA_P Parameter: Tissue Value: Aerial
  misc_feature: MA Experiment 20000453 PARAMETER Experiment Name: At_100uM_ABA_P Parameter: Treatment Value: 100uM ABA vs. No Treatment
  misc_feature: MA Experiment ID: 20000794 Result: Down-regulated in Transcription
  misc_feature: MA Experiment 20000794 PARAMETER Experiment Name: At_Petals_P Parameter: Age (day) Value: 23-25 days
  misc_feature: MA Experiment 20000794 PARAMETER Experiment Name: At_Petals_P Parameter: Plant Line Value: WS
  misc_feature: MA Experiment 20000794 PARAMETER Experiment Name: At_Petals_P Parameter: Tissue Value: Petals vs. Whole plant
  misc_feature: MA Experiment ID: 20001451 Result: Down-regulated in Transcription
  misc_feature: MA Experiment 20001451 PARAMETER Experiment Name: At_Far-red-induction_P Parameter: Age (day) Value: 7
  misc_feature: MA Experiment 20001451 PARAMETER Experiment Name: At_Far-red-induction_P Parameter: Light Value: Far-red vs. White
  misc_feature: MA Experiment 20001451 PARAMETER Experiment Name: At_Far-red-induction_P Parameter: Organism Value: A. thaliana
  misc_feature: MA Experiment 20001451 PARAMETER Experiment Name: At_Far-red-induction_P Parameter: Plant Line Value: Columbia
  misc_feature: MA Experiment 20001451 PARAMETER Experiment Name: At_Far-red-induction_P Parameter: Timepoint (hr) Value: 24
  misc_feature: MA Experiment 20001451 PARAMETER Experiment Name: At_Far-red-induction_P Parameter: Tissue Value: Whole Plant
  misc_feature: MA Experiment ID: 20001458 Result: Up-regulated in Transcription
  misc_feature: MA Experiment 20001458 PARAMETER Experiment Name: At_50mM_NH4NO3_L-to-H_P Parameter: Age (day) Value: Undefined
  misc_feature: MA Experiment 20001458 PARAMETER Experiment Name: At_50mM_NH4NO3_L-to-H_P Parameter: Organism Value: Undefined
  misc_feature: MA Experiment 20001458 PARAMETER Experiment Name: At_50mM_NH4NO3_L-to-H_P Parameter: Plant Line Value: Undefined
  misc_feature: MA Experiment 20001458 PARAMETER Experiment Name: At_50mM_NH4NO3_L-to-H_P Parameter: Timepoint (hr) Value: 2
  misc_feature: MA Experiment 20001458 PARAMETER Experiment Name: At_50mM_NH4NO3_L-to-H_P Parameter: Tissue Value: Siliques
  misc_feature: MA Experiment 20001458 PARAMETER Experiment Name: At_50mM_NH4NO3_L-to-H_P Parameter: Treatment Value: 50mM NH4NO3 vs. 100mM Manitol
  misc_feature: MA Experiment ID: 20001557 Result: Up-regulated in Transcription
  misc_feature: MA Experiment 20001557 PARAMETER Experiment Name: At_Drought_Soil_Dry_P Parameter: Age (day) Value: 27
  misc_feature: MA Experiment 20001557 PARAMETER Experiment Name: At_Drought_Soil_Dry_P Parameter: Organism Value: A. thaliana
  misc_feature: MA Experiment 20001557 PARAMETER Experiment Name: At_Drought_Soil_Dry_P Parameter: Plant Line Value: WS
  misc_feature: MA Experiment 20001557 PARAMETER Experiment Name: At_Drought_Soil_Dry_P Parameter: Post Timepoint (hr) Value: 3
  misc_feature: MA Experiment 20001557 PARAMETER Experiment Name: At_Drought_Soil_Dry_P Parameter: Post-Treatment Value: Re-Water vs. No Drought
  misc_feature: MA Experiment 20001557 PARAMETER Experiment Name: At_Drought_Soil_Dry_P Parameter: Timepoint (day) Value: 13
  misc_feature: MA Experiment 20001557 PARAMETER Experiment Name: At_Drought_Soil_Dry_P Parameter: Treatment Value: Drought vs. No Drought
  misc_feature: MA Experiment ID: 20001558 Result: Up-regulated in Transcription
  misc_feature: MA Experiment 20001558 PARAMETER Experiment Name: At_Drought_Soil_Dry_P Parameter: Age (day) Value: 27
  misc_feature: MA Experiment 20001558 PARAMETER Experiment Name: At_Drought_Soil_Dry_P Parameter: Organism Value: A. thaliana
  misc_feature: MA Experiment 20001558 PARAMETER Experiment Name: At_Drought_Soil_Dry_P Parameter: Plant Line Value: WS
  misc_feature: MA Experiment 20001558 PARAMETER Experiment Name: At_Drought_Soil_Dry_P Parameter: Post Timepoint (hr) Value: 6
  misc_feature: MA Experiment 20001558 PARAMETER Experiment Name: At_Drought_Soil_Dry_P Parameter: Post-Treatment Value: Re-Water vs. No Drought
  misc_feature: MA Experiment 20001558 PARAMETER Experiment Name: At_Drought_Soil_Dry_P Parameter: Timepoint (day) Value: 13
  misc_feature: MA Experiment 20001558 PARAMETER Experiment Name: At_Drought_Soil_Dry_P Parameter: Treatment Value: Drought vs. No Drought
  misc_feature: MA Experiment ID: 20001560 Result: Up-regulated in Transcription
  misc_feature: MA Experiment 20001560 PARAMETER Experiment Name: At_Drought_Soil_Dry_P Parameter: Age (day) Value: 28
  misc_feature: MA Experiment 20001560 PARAMETER Experiment Name: At_Drought_Soil_Dry_P Parameter: Organism Value: A. thaliana
  misc_feature: MA Experiment 20001560 PARAMETER Experiment Name: At_Drought_Soil_Dry_P Parameter: Plant Line Value: WS
  misc_feature: MA Experiment 20001560 PARAMETER Experiment Name: At_Drought_Soil_Dry_P Parameter: Post Timepoint (hr) Value: None
  misc_feature: MA Experiment 20001560 PARAMETER Experiment Name: At_Drought_Soil_Dry_P Parameter: Post-Treatment Value: None
  misc_feature: MA Experiment 20001560 PARAMETER Experiment Name: At_Drought_Soil_Dry_P Parameter: Timepoint (day) Value: 14
  misc_feature: MA Experiment 20001560 PARAMETER Experiment Name: At_Drought_Soil_Dry_P Parameter: Treatment Value: Drought vs. No Drought
  misc_feature: MA Experiment ID: 20001757 Result: Up-regulated in Transcription
  misc_feature: MA Experiment 20001757 PARAMETER Experiment Name: At_50mM_NH4NO3_L-to-H_P Parameter: Timepoint (hr) Value: 6
  misc_feature: MA Experiment 20001757 PARAMETER Experiment Name: At_50mM_NH4NO3_L-to-H_P Parameter: Tissue Value: Leaf
  misc_feature: MA Experiment 20001757 PARAMETER Experiment Name: At_50mM_NH4NO3_L-to-H_P Parameter: Treatment Value: 50mM NH4NO3 vs 100mM Mannitol
  misc_feature: MA Experiment ID: 20001911 Result: Down-regulated in Transcription
  misc_feature: MA Experiment 20001911 PARAMETER Experiment Name: At_Drought_Reproduction_P Parameter: Age (day) Value: 40
  misc_feature: MA Experiment 20001911 PARAMETER Experiment Name: At_Drought_Reproduction_P Parameter: Organism Value: A. thaliana
  misc_feature: MA Experiment 20001911 PARAMETER Experiment Name: At_Drought_Reproduction_P Parameter: Plant Line Value: WS
  misc_feature: MA Experiment 20001911 PARAMETER Experiment Name: At_Drought_Reproduction_P Parameter: Timepoint (day) Value: 10
  misc_feature: MA Experiment 20001911 PARAMETER Experiment Name: At_Drought_Reproduction_P Parameter: Tissue Value: Flowers
  misc_feature: MA Experiment 20001911 PARAMETER Experiment Name: At_Drought_Reproduction_P Parameter: Treatment Value: Drought vs. No Drought
atttttgccctctcccatttttgtcgccgaaaccctaaatctcgacctcaaaccctgaaccatggctgaaggactcgtgttgaaaggcacaatgtgtgcccacactgatatggtcaccgccattgctacaccggtcgataactccgacgtgattgtaacttcgtcgcgtgacaaatcaatcatcctctggaaactcacaaaggaagacaagtcatacggtgttgctcagcggaggatgactggtcactctcacttcgttcaagacgttgttctctcctccgatggacaattcgctctctccggatcttgggacggtgagcttcgtctctgggatctcgctaccggagaatctactcgtcgtttcgttggtcacacgaaagatgttctctctgttgctttctctaccgataaccgtcagatcgtctctgcttctcgtgatcgtacgattaagctttggaacacgcttggtgagtgtaagtataccatctctgaagctgatggtcacaaggaatgggttagttgtgttaggtttagtcctaatactcttgtgccaactattgtatctgcttcttgggataaaactgtgaaggtctggaatcttcagaattgtaagcttaggaacactcttgctggtcactctggttacttgaacactgtggctgtgtcacctgatggttcgttgtgtgccagtggtggcaaagatggtgtgatcttgctttgggatttggctgaagggaagaagttgtattctcttgaagctggctctattattcattcactttgcttcagtcccaataggtactggttgtgtgcagcaacagagaatagcattaggatttgggatctcgagagtaagtctgttgttgaggatttgaaggttgatcttaaggctgaggctgaaaagactgatggttctactggaatcggaaacaagaccaaggtgatctactgcacaagcttgaactggagtgcagatggaaacactttgttcagtggatacactgatggagttatcagggtttggggtattggtcgttactagagagacaagaagtttctttattctctccaaatttttccatcgactctaaagtcttctcttctgaattagtgttttgaggatttattttttgttcttttctattttcagaatccacaaatgtgatattttgatacattgattttgtttcatatttgttttctt

SEQ ID NO: 26606 - protein, 326 aa, Arabidopsis thaliana [sequence omitted]

SEQ ID NO: 26607 - protein, 316 aa, Arabidopsis thaliana
  peptide (1)..(316): Ceres Seq. ID no. 12371449
  misc_feature (1)..(316): Homolog of NCBI NO: 3023857 NR Description: GUANINE NUCLEOTIDE-BINDING PROTEIN BETA
  misc_feature (1)..(316): Homolog of NCBI NO: 2289095 NR Description: WD-40 repeat protein [Arabidopsis thaliana]
  misc_feature (1)..(316): Homolog of NCBI NO: 15220941 NR Description: G-protein beta family
  misc_feature (1)..(316): Homolog of NCBI NO: 15229589 NR Description: protein kinase C-receptor/G-protein, putative
  misc_feature (1)..(316): Homolog of NCBI NO: 21593440 NR Description: guanine nucleotide-binding protein, putative
  misc_feature (1)..(316): Homolog of NCBI NO: 15221916 NR Description: guanine nucleotide-binding protein, putative
  misc_feature (1)..(316): Homolog of NCBI NO: 3023857 NR Description: GUANINE NUCLEOTIDE-BINDING PROTEIN BETA
  misc_feature (1)..(316): Homolog of NCBI NO: 2289095 NR Description: WD-40 repeat protein [Arabidopsis thaliana]
  misc_feature (1)..(316): Homolog of NCBI NO: 15220941 NR Description: G-protein beta family
  misc_feature (1)..(316): Homolog of NCBI NO: 15229589 NR Description: protein kinase C-receptor/G-protein, putative
  misc_feature (1)..(316): Homolog of NCBI NO: 21593440 NR Description: guanine nucleotide-binding protein, putative
  misc_feature (1)..(316): Homolog of NCBI NO: 15221916 NR Description: guanine nucleotide-binding protein, putative
MCAHTDMVTAIATPVDNSDVIVTSSRDKSIILWKLTKEDKSYGVAQRRMTGHSHFVQDVVLSSDGQFALSGSWDGELRLWDLATGESTRRFVGHTKDVLSVAFSTDNRQIVSASRDRTIKLWNTLGECKYTISEADGHKEWVSCVRFSPNTLVPTIVSASWDKTVKVWNLQNCKLRNTLAGHSGYLNTVAVSPDGSLCASGGKDGVILLWDLAEGKKLYSLEAGSIIHSLCFSPNRYWLCAATENSIRIWDLESKSVVEDLKVDLKAEAEKTDGSTGIGNKTKVIYCTSLNWSADGNTLFSGYTDGVIRVWGIGRY

SEQ ID NO: 26608 - protein, 310 aa, Arabidopsis thaliana
  peptide (1)..(310): Ceres Seq. ID no. 12371450
  misc_feature (1)..(310): Homolog of NCBI NO: 3023857 NR Description: GUANINE NUCLEOTIDE-BINDING PROTEIN BETA
  misc_feature (1)..(310): Homolog of NCBI NO: 2289095 NR Description: WD-40 repeat protein [Arabidopsis thaliana]
  misc_feature (1)..(310): Homolog of NCBI NO: 15220941 NR Description: G-protein beta family
  misc_feature (1)..(310): Homolog of NCBI NO: 15229589 NR Description: protein kinase C-receptor/G-protein, putative
  misc_feature (1)..(310): Homolog of NCBI NO: 21593440 NR Description: guanine nucleotide-binding protein, putative
  misc_feature (1)..(310): Homolog of NCBI NO: 15221916 NR Description: guanine nucleotide-binding protein, putative
  misc_feature (1)..(310): Homolog of NCBI NO: 3023857 NR Description: GUANINE NUCLEOTIDE-BINDING PROTEIN BETA
  misc_feature (1)..(310): Homolog of NCBI NO: 2289095 NR Description: WD-40 repeat protein [Arabidopsis thaliana]
  misc_feature (1)..(310): Homolog of NCBI NO: 15220941 NR Description: G-protein beta family
  misc_feature (1)..(310): Homolog of NCBI NO: 15229589 NR Description: protein kinase C-receptor/G-protein, putative
  misc_feature (1)..(310): Homolog of NCBI NO: 21593440 NR Description: guanine nucleotide-binding protein, putative
  misc_feature (1)..(310): Homolog of NCBI NO: 15221916 NR Description: guanine nucleotide-binding protein, putative
MVTAIATPVDNSDVIVTSSRDKSIILWKLTKEDKSYGVAQRRMTGHSHFVQDVVLSSDGQFALSGSWDGELRLWDLATGESTRRFVGHTKDVLSVAFSTDNRQIVSASRDRTIKLWNTLGECKYTISEADGHKEWVSCVRFSPNTLVPTIVSASWDKTVKVWNLQNCKLRNTLAGHSGYLNTVAVSPDGSLCASGGKDGVILLWDLAEGKKLYSLEAGSIIHSLCFSPNRYWLCAATENSIRIWDLESKSVVEDLKVDLKAEAEKTDGSTGIGNKTKVIYCTSLNWSADGNTLFSGYTDGVIRVWGIGRY

SEQ ID NO: 26609 - DNA, 2145 bp, Arabidopsis thaliana
  misc_feature (1)..(2145): Ceres Seq. ID no. 13491465
  misc_feature: MA Experiment ID: 20000235 Result: Down-regulated in Transcription
  misc_feature: MA Experiment 20000235 PARAMETER Experiment Name: At_Siliques_P Parameter: Age (day) Value: 21
  misc_feature: MA Experiment 20000235 PARAMETER Experiment Name: At_Siliques_P Parameter: Organism Value: A. thaliana
  misc_feature: MA Experiment 20000235 PARAMETER Experiment Name: At_Siliques_P Parameter: Plant Line Value: WS
  misc_feature: MA Experiment 20000235 PARAMETER Experiment Name: At_Siliques_P Parameter: Tissue Value: 5-10mm Siliques vs. Whole Plant
  misc_feature: MA Experiment ID: 20001559 Result: Up-regulated in Transcription
  misc_feature: MA Experiment 20001559 PARAMETER Experiment Name: At_Drought_Soil_Dry_P Parameter: Age (day) Value: 28
  misc_feature: MA Experiment 20001559 PARAMETER Experiment Name: At_Drought_Soil_Dry_P Parameter: Organism Value: A. thaliana
  misc_feature: MA Experiment 20001559 PARAMETER Experiment Name: At_Drought_Soil_Dry_P Parameter: Plant Line Value: WS
  misc_feature: MA Experiment 20001559 PARAMETER Experiment Name: At_Drought_Soil_Dry_P Parameter: Post Timepoint (hr) Value: 29
  misc_feature: MA Experiment 20001559 PARAMETER Experiment Name: At_Drought_Soil_Dry_P Parameter: Post-Treatment Value: Re-Water vs. No Drought
  misc_feature: MA Experiment 20001559 PARAMETER Experiment Name: At_Drought_Soil_Dry_P Parameter: Timepoint (day) Value: 14
  misc_feature: MA Experiment 20001559 PARAMETER Experiment Name: At_Drought_Soil_Dry_P Parameter: Treatment Value: Drought vs. No Drought
gagccgctgagaatttggtccccttggcacgtataaaccctagcagagacattaaaccctgaaagtaattagggatcactgttctccggctccggcgaaaaaatccctcgaaatcgatcctaacctcaattgattgaaggaagttatgtattcgctttcgaggattctccaaaggagtcaaagatataactttgcaccttcttcgtttggtgcggtcagtaaattagaagtatcaagtggtggtgataaagaacgggtctttaaatcatttggattgatttatagcaaacctcaaggtttagtcagactttattccgcaagagatgtgttttcacggttctttggcatccacaagctttcttctatagctgatgctaaagataaaggagatgaggtagttagggaagaggagctgtctgaatcagaggaggcggttcctgtttctggggatgtaccagagggagttgttgatgatgattctttgttcgagcctgaacttggtagtgacaatgatgatcttgaaattgaagagaagcattcgaaagatggtgggaaaccaactaagaaaagaggtcaatctgagctgtacgaatccattgttgcttataaatcagtgaaacatgttcttgaaaaatgggtcaaagaaggaaaagatttgagtcaagctgaggttactcttgctatacacaatctgcgtaaacgcaaatcctatgctatgtgtttgcagttgtgggagtggttgggagctaatacgcagtttgagttcacagaggcaaattatgcttctcagttggatttggtggccaaggtacatagtttacaaaaagctgaaatctttttgaaagatattccagaatcttctaggggagaagtagtatacagaaccctgctggcaaattgtgtacttaagcatcatgtaaataaagctgaagacattttcaacaaaatgaaagagctaaaatttccaacaagtgtgtttgcttgcaaccagctgcttctcctctacagtatgcatgatagaaagaagataagtgatgttttgttgctaatggagagagaaaacatcaagccgagtcgtgctacctatcattttttaatcaatagtaaaggtttagccggagacataactggaatggagaagatcgtggagacaattaaggaagaaggcatcgaactagatcctgaactgcagtctattctggctaagtactacataagagcggggcttaaagaaagagcacaagaccttatgaaggagatagaagggaaaggtttgcaacaaactccatgggtgtgccggtcattactcccactttatgcagacataggagacagtgacaatgtgagaagactgagtaggtttgttgatcaaaatccgagatacgataattgcatttctgccattaaagcatggggaaagctgaaggaagtcgaagaagcagaggcagtgtttgagagacttgtggagaaatacaaaattttccctatgatgccatattttgccctcatggagatatacacagagaacaagatgctagcaaaaggcagagatctggttaaaagaatgggaaatgcagggattgcgattgggccgtcgacatggcacgcgcttgtgaagctatacatcaaagcaggagaagttggaaaagctgagttgatattgaacagagctacaaaggataataagatgagacctatgttcactacttacatggcgattcttgaagaatatgcaaaaagaggcgatgttcataacacagagaaggtattcatgaaaatgaaaagggcaagctatgcagctcagcttatgcagtatgaaaccgtgctcctggcttatatcaacgccaaaactcctgcttacgggatgattgagaggatgaaggcagacaatgtgttcccgaacaagagtctagctgcgaaactggctcaggttaatccgtttaaaaagtgtccagtgtctgttttacttgacatataacgataatcatcttatgtattgagctgttaagtgtttgttctggttgcttccaagctaggaaataataaacagaggattcgtttttcttccaaagtttctcatttttgagtttgtgttcctgtggttttttgtaagtgacataaactggaataaaattgaactggatt

SEQ ID NO: 26610 - protein, 610 aa, Arabidopsis thaliana
  peptide (1)..(610): Ceres Seq. ID no. 13491466
  misc_feature (243)..(277): Pfam Name: PPR repeat Pfam Description: PPR repeat
  misc_feature (240)..(593): Homolog of NCBI NO: 34394024 NR Description: putative DNA-binding protein
  misc_feature (99)..(593): Homolog of NCBI NO: 34900334 NR Description: P0592C06.16 [Oryza sativa (japonica
  misc_feature (75)..(609): Homolog of NCBI NO: 34903362 NR Description: unnamed protein product [Oryza sativa (japonica
  misc_feature (115)..(583): Homolog of NCBI NO: 17064738 NR Description: Unknown protein [Arabidopsis thaliana]
  misc_feature (132)..(597): Homolog of NCBI NO: 15219808 NR Description: pentatricopeptide (PPR) repeat-containing protein
  misc_feature (144)..(600): Homolog of NCBI NO: 34905294 NR Description: putative DNA-binding protein
  misc_feature (115)..(583): Homolog of NCBI NO: 15235508 NR Description: pentatricopeptide (PPR) repeat-containing protein
  misc_feature (75)..(609): Homolog of NCBI NO: 6958202 NR Description: DNA-binding protein [Triticum aestivum]
  misc_feature (25)..(609): Homolog of NCBI NO: 15218196 NR Description: DNA-binding protein, putative [Arabidopsis
  misc_feature (1)..(609): Homolog of NCBI NO: 15220095 NR Description: DNA binding protein, putative [Arabidopsis
MYSLSRILQRSQRYNFAPSSFGAVSKLEVSSGGDKERVFKSFGLIYSKPQGLVRLYSARDVFSRFFGIHKLSSIADAKDKGDEVVREEELSESEEAVPVSGDVPEGVVDDDSLFEPELGSDNDDLEIEEKHSKDGGKPTKKRGQSELYESIVAYKSVKHVLEKWVKEGKDLSQAEVTLAIHNLRKRKSYAMCLQLWEWLGANTQFEFTEANYASQLDLVAKVHSLQKAEIFLKDIPESSRGEVVYRTLLANCVLKHHVNKAEDIFNKMKELKFPTSVFACNQLLLLYSMHDRKKISDVLLLMERENIKPSRATYHFLINSKGLAGDITGMEKIVETIKEEGIELDPELQSILAKYYIRAGLKERAQDLMKEIEGKGLQQTPWVCRSLLPLYADIGDSDNVRRLSRFVDQNPRYDNCISAIKAWGKLKEVEEAEAVFERLVEKYKIFPMMPYFALMEIYTENKMLAKGRDLVKRMGNAGIAIGPSTWHALVKLYIKAGEVGKAELILNRATKDNKMRPMFTTYMAILEEYAKRGDVHNTEKVFMKMKRASYAAQLMQYETVLLAYINAKTPAYGMIERMKADNVFPNKSLAAKLAQVNPFKKCPVSVLLDI

SEQ ID NO: 26611 - protein, 420 aa, Arabidopsis thaliana
  peptide (1)..(420): Ceres Seq. ID no. 13491467
  misc_feature (53)..(87): Pfam Name: PPR repeat Pfam Description: PPR repeat
  misc_feature (1)..(393): Homolog of NCBI NO: 17064738 NR Description: Unknown protein [Arabidopsis thaliana]
  misc_feature (1)..(393): Homolog of NCBI NO: 15235508 NR Description: pentatricopeptide (PPR) repeat-containing protein
  misc_feature (1)..(407): Homolog of NCBI NO: 15219808 NR Description: pentatricopeptide (PPR) repeat-containing protein
  misc_feature (1)..(410): Homolog of NCBI NO: 34905294 NR Description: putative DNA-binding protein
  misc_feature (50)..(403): Homolog of NCBI NO: 34394024 NR Description: putative DNA-binding protein
  misc_feature (1)..(403): Homolog of NCBI NO: 34900334 NR Description: P0592C06.16 [Oryza sativa (japonica
  misc_feature (1)..(419): Homolog of NCBI NO: 34903362 NR Description: unnamed protein product [Oryza sativa (japonica
  misc_feature (1)..(419): Homolog of NCBI NO: 6958202 NR Description: DNA-binding protein [Triticum aestivum]
  misc_feature (1)..(419): Homolog of NCBI NO: 15218196 NR Description: DNA-binding protein, putative [Arabidopsis
  misc_feature (1)..(419): Homolog of NCBI NO: 15220095 NR Description: DNA binding protein, putative [Arabidopsis
MCLQLWEWLGANTQFEFTEANYASQLDLVAKVHSLQKAEIFLKDIPESSRGEVVYRTLLANCVLKHHVNKAEDIFNKMKELKFPTSVFACNQLLLLYSMHDRKKISDVLLLMERENIKPSRATYHFLINSKGLAGDITGMEKIVETIKEEGIELDPELQSILAKYYIRAGLKERAQDLMKEIEGKGLQQTPWVCRSLLPLYADIGDSDNVRRLSRFVDQNPRYDNCISAIKAWGKLKEVEEAEAVFERLVEKYKIFPMMPYFALMEIYTENKMLAKGRDLVKRMGNAGIAIGPSTWHALVKLYIKAGEVGKAELILNRATKDNKMRPMFTTYMAILEEYAKRGDVHNTEKVFMKMKRASYAAQLMQYETVLLAYINAKTPAYGMIERMKADNVFPNKSLAAKLAQVNPFKKCPVSVLLDI

SEQ ID NO: 26612 - protein, 343 aa, Arabidopsis thaliana
  peptide (1)..(343): Ceres Seq. ID no. 13491468
  misc_feature (1)..(316): Homolog of NCBI NO: 17064738 NR Description: Unknown protein [Arabidopsis thaliana]
  misc_feature (1)..(316): Homolog of NCBI NO: 15235508 NR Description: pentatricopeptide (PPR) repeat-containing protein
  misc_feature (1)..(330): Homolog of NCBI NO: 15219808 NR Description: pentatricopeptide (PPR) repeat-containing protein
  misc_feature (1)..(333): Homolog of NCBI NO: 34905294 NR Description: putative DNA-binding protein
  misc_feature (1)..(326): Homolog of NCBI NO: 34394024 NR Description: putative DNA-binding protein
  misc_feature (1)..(326): Homolog of NCBI NO: 34900334 NR Description: P0592C06.16 [Oryza sativa (japonica
  misc_feature (1)..(342): Homolog of NCBI NO: 34903362 NR Description: unnamed protein product [Oryza sativa (japonica
  misc_feature (1)..(342): Homolog of NCBI NO: 6958202 NR Description: DNA-binding protein [Triticum aestivum]
  misc_feature (1)..(342): Homolog of NCBI NO: 15218196 NR Description: DNA-binding protein, putative [Arabidopsis
  misc_feature (1)..(342): Homolog of NCBI NO: 15220095 NR Description: DNA binding protein, putative [Arabidopsis
MKELKFPTSVFACNQLLLLYSMHDRKKISDVLLLMERENIKPSRATYHFLINSKGLAGDITGMEKIVETIKEEGIELDPELQSILAKYYIRAGLKERAQDLMKEIEGKGLQQTPWVCRSLLPLYADIGDSDNVRRLSRFVDQNPRYDNCISAIKAWGKLKEVEEAEAVFERLVEKYKIFPMMPYFALMEIYTENKMLAKGRDLVKRMGNAGIAIGPSTWHALVKLYIKAGEVGKAELILNRATKDNKMRPMFTTYMAILEEYAKRGDVHNTEKVFMKMKRASYAAQLMQYETVLLAYINAKTPAYGMIERMKADNVFPNKSLAAKLAQVNPFKKCPVSVLLDI

SEQ ID NO: 26613 - DNA, 1228 bp, Arabidopsis thaliana
  misc_feature (1)..(1228): Ceres Seq. ID no. 12370721
  misc_feature: MA Experiment ID: 108573 Result: Up-regulated in Transcription
  misc_feature: MA Experiment 108573 PARAMETER Experiment Name: At_Drought_cDNA_P Parameter: Timepoint (hr) Value: 6
  misc_feature: MA Experiment 108573 PARAMETER Experiment Name: At_Drought_cDNA_P Parameter: Tissue Value: Aerial
  misc_feature: MA Experiment 108573 PARAMETER Experiment Name: At_Drought_cDNA_P Parameter: Treatment Value: Drought vs. No Drought
  misc_feature: MA Experiment ID: 108595 Result: Down-regulated in Transcription
  misc_feature: MA Experiment 108595 PARAMETER Experiment Name: At_Ler-pi_Ovule_cDNA_P Parameter: Plant Line Value: null
  misc_feature: MA Experiment ID: 20000071 Result: Up-regulated in Transcription
  misc_feature: MA Experiment 20000071 PARAMETER Experiment Name: At_100uM_ABA_Mutants_cDNA_P Parameter: Plant Line Value: CS8104
  misc_feature: MA Experiment 20000071 PARAMETER Experiment Name: At_100uM_ABA_Mutants_cDNA_P Parameter: Timepoint (hr) Value: 6
  misc_feature: MA Experiment 20000071 PARAMETER Experiment Name: At_100uM_ABA_Mutants_cDNA_P Parameter: Tissue Value: Aerial
  misc_feature: MA Experiment 20000071 PARAMETER Experiment Name: At_100uM_ABA_Mutants_cDNA_P Parameter: Treatment Value: 100uM ABA vs. No Treatment
  misc_feature: MA Experiment ID: 20000088 Result: Up-regulated in Transcription
  misc_feature: MA Experiment 20000088 PARAMETER Experiment Name: At_100uM_ABA_Mutants_cDNA_P Parameter: Plant Line Value: Landsberg
  misc_feature: MA Experiment 20000088 PARAMETER Experiment Name: At_100uM_ABA_Mutants_cDNA_P Parameter: Timepoint (hr) Value: 6
  misc_feature: MA Experiment 20000088 PARAMETER Experiment Name: At_100uM_ABA_Mutants_cDNA_P Parameter: Tissue Value: Aerial
  misc_feature: MA Experiment 20000088 PARAMETER Experiment Name: At_100uM_ABA_Mutants_cDNA_P Parameter: Treatment Value: 100uM ABA vs. No Treatment
  misc_feature: MA Experiment ID: 20000090 Result: Up-regulated in Transcription
  misc_feature: MA Experiment ID: 20000439 Result: Down-regulated in Transcription
  misc_feature: MA Experiment 20000439 PARAMETER Experiment Name: At_Roots__P Parameter: Age (day) Value: 14 vs. 21
  misc_feature: MA Experiment 20000439 PARAMETER Experiment Name: At_Roots__P Parameter: Organism Value: A. thaliana
  misc_feature: MA Experiment 20000439 PARAMETER Experiment Name: At_Roots__P Parameter: Tissue Value: Roots vs. Whole Plant
  misc_feature: MA Experiment ID: 20001248 Result: Down-regulated in Transcription
  misc_feature: MA Experiment 20001248 PARAMETER Experiment Name: At_Far-red-induction_P Parameter: Age (day) Value: 7
  misc_feature: MA Experiment 20001248 PARAMETER Experiment Name: At_Far-red-induction_P Parameter: Light Value: Far-red vs. White
  misc_feature: MA Experiment 20001248 PARAMETER Experiment Name: At_Far-red-induction_P Parameter: Organism Value: A. thaliana
  misc_feature: MA Experiment 20001248 PARAMETER Experiment Name: At_Far-red-induction_P Parameter: Plant Line Value: Columbia
  misc_feature: MA Experiment 20001248 PARAMETER Experiment Name: At_Far-red-induction_P Parameter: Timepoint (hr) Value: 4
  misc_feature: MA Experiment 20001248 PARAMETER Experiment Name: At_Far-red-induction_P Parameter: Tissue Value: Whole Plant
  misc_feature: MA Experiment ID: 20001451 Result: Down-regulated in Transcription
  misc_feature: MA Experiment 20001451 PARAMETER Experiment Name: At_Far-red-induction_P Parameter: Age (day) Value: 7
  misc_feature: MA Experiment 20001451 PARAMETER Experiment Name: At_Far-red-induction_P Parameter: Light Value: Far-red vs. White
  misc_feature: MA Experiment 20001451 PARAMETER Experiment Name: At_Far-red-induction_P Parameter: Organism Value: A. thaliana
  misc_feature: MA Experiment 20001451 PARAMETER Experiment Name: At_Far-red-induction_P Parameter: Plant Line Value: Columbia
  misc_feature: MA Experiment 20001451 PARAMETER Experiment Name: At_Far-red-induction_P Parameter: Timepoint (hr) Value: 24
  misc_feature: MA Experiment 20001451 PARAMETER Experiment Name: At_Far-red-induction_P Parameter: Tissue Value: Whole Plant
  misc_feature: MA Experiment ID: 20001557 Result: Down-regulated in Transcription
  misc_feature: MA Experiment 20001557 PARAMETER Experiment Name: At_Drought_Soil_Dry_P Parameter: Age (day) Value: 27
  misc_feature: MA Experiment 20001557 PARAMETER Experiment Name: At_Drought_Soil_Dry_P Parameter: Organism Value: A. thaliana
  misc_feature: MA Experiment 20001557 PARAMETER Experiment Name: At_Drought_Soil_Dry_P Parameter: Plant Line Value: WS
  misc_feature: MA Experiment 20001557 PARAMETER Experiment Name: At_Drought_Soil_Dry_P Parameter: Post Timepoint (hr) Value: 3
  misc_feature: MA Experiment 20001557 PARAMETER Experiment Name: At_Drought_Soil_Dry_P Parameter: Post-Treatment Value: Re-Water vs. No Drought
  misc_feature: MA Experiment 20001557 PARAMETER Experiment Name: At_Drought_Soil_Dry_P Parameter: Timepoint (day) Value: 13
  misc_feature: MA Experiment 20001557 PARAMETER Experiment Name: At_Drought_Soil_Dry_P Parameter: Treatment Value: Drought vs. No Drought
  misc_feature: MA Experiment ID: 20001558 Result: Down-regulated in Transcription
  misc_feature: MA Experiment 20001558 PARAMETER Experiment Name: At_Drought_Soil_Dry_P Parameter: Age (day) Value: 27
  misc_feature: MA Experiment 20001558 PARAMETER Experiment Name: At_Drought_Soil_Dry_P Parameter: Organism Value: A. thaliana
  misc_feature: MA Experiment 20001558 PARAMETER Experiment Name: At_Drought_Soil_Dry_P Parameter: Plant Line Value: WS
  misc_feature: MA Experiment 20001558 PARAMETER Experiment Name: At_Drought_Soil_Dry_P Parameter: Post Timepoint (hr) Value: 6
  misc_feature: MA Experiment 20001558 PARAMETER Experiment Name: At_Drought_Soil_Dry_P Parameter: Post-Treatment Value: Re-Water vs. No Drought
  misc_feature: MA Experiment 20001558 PARAMETER Experiment Name: At_Drought_Soil_Dry_P Parameter: Timepoint (day) Value: 13
  misc_feature: MA Experiment 20001558 PARAMETER Experiment Name: At_Drought_Soil_Dry_P Parameter: Treatment Value: Drought vs. No Drought
aggagagaaaggtcttcttcggaagcaagctaagtcatggcaacgatttcgtcaactctactcttaaattcttctagatcagctttaccactaagattcccaaaattctcgggattttcttcttcctctccattcgctagatcttacagatttggacgacgtaatctggaaccactttccaacggaatgctttcgtcgggaagtagagccgacggtgctacggcggcggctgcatcgatggaaggagtgatgacggaggcgatgaaactgattcaatcggcgtcaccaacttggaaatcagctgtggctaacaatttattgatttttgttctcggttcaccgcttcttgttaccggattgtccgcttctgggatcgccgccgcgtttttgcttggtactttaacttggagagcttatggctctgctggtttcctcttagtcgctgcttacttcgtcataggaacagcggcaacgaaggttaaaatgacgcaaaaggaagcacaaggtgtggccgaaaagagaaagggtagaagaggaccacgcagtgtgattggttcaagtgctgctggttgtgtctgtgcttttctttcaatatatcaagtgggaggagcagctttttcccagcttttccggcttggttttgtttccagtttctgcactaaagtatctgacactgtctcgagcgagataggcaaagcttatggaaaaacaacgtatttagctacgacatttaagattgtaccaagaggaacagagggagctatgagtcttgaaggaacattggctggacttttagcatcattttttcttgcatctgttggctgcttcctgggtcagataactcctccagaagcagctgtatgtgtactagcttcccagattgccaatcttggagagagcataataggtgcttcttttcaagacaaagaaggattcaaatggctaaacaatgatgtagtcaacgtgatcaacataagcttgggaagcattgtggcgattttgatgcaacagtttatactccagaactgggtcaagtaaaacctgccacgaaggtcatgtattctcagtgaggttagattctttttttatattgttaaacacagccttacgtattcagtggtgttataaattatactctgttgtgtacaactagtagtccaacatcaatgaggggaaaaaacttctgggaccattgtctagcaattattggatgatatttatgtgaatt

SEQ ID NO: 26614 - protein, 333 aa, Arabidopsis thaliana
  peptide (1)..(333): Ceres Seq. ID no. 12370722
  misc_feature (85)..(324): Pfam Name: Integral membrane protein DUF92 Pfam Description: Integral membrane protein DUF92
  misc_feature (86)..(320): Homolog of NCBI NO: 37520469 NR Description: hypothetical protein gll0900 [Gloeobacter
  misc_feature (80)..(321): Homolog of NCBI NO: 16330187 NR Description: hypothetical protein [Synechocystis sp. PCC 6803]
  misc_feature (79)..(323): Homolog of NCBI NO: 23043616 NR Description: hypothetical protein [Trichodesmium erythraeum
  misc_feature (79)..(323): Homolog of NCBI NO: 17229104 NR Description: hypothetical protein [Nostoc sp. PCC 7120]
  misc_feature (78)..(182): Homolog of NCBI NO: 23125371 NR Description: hypothetical protein [Nostoc punctiforme]
  misc_feature (193)..(323): Homolog of NCBI NO: 23125371 NR Description: hypothetical protein [Nostoc punctiforme]
  misc_feature (67)..(321): Homolog of NCBI NO: 22299927 NR Description: ORF_ID:tlr2384~hypothetical protein
  misc_feature (59)..(303): Homolog of NCBI NO: 34910822 NR Description: P0456A01.17 [Oryza sativa (japonica
  misc_feature (1)..(333): Homolog of NCBI NO: 21592713 NR Description: unknown [Arabidopsis thaliana]
  misc_feature (1)..(333): Homolog of NCBI NO: 18412044 NR Description: expressed protein
MATISSTLLLNSSRSALPLRFPKFSGFSSSSPFARSYRFGRRNLEPLSNGMLSSGSRADGATAAAASMEGVMTEAMKLIQSASPTWKSAVANNLLIFVLGSPLLVTGLSASGIAAAFLLGTLTWRAYGSAGFLLVAAYFVIGTAATKVKMTQKEAQGVAEKRKGRRGPRSVIGSSAAGCVCAFLSIYQVGGAAFSQLFRLGFVSSFCTKVSDTVSSEIGKAYGKTTYLATTFKIVPRGTEGAMSLEGTLAGLLASFFLASVGCFLGQITPPEAAVCVLASQIANLGESIIGASFQDKEGFKWLNNDVVNVINISLGSIVAILMQQFILQNWVK

SEQ ID NO: 26615 - protein, 283 aa, Arabidopsis thaliana
  peptide (1)..(283): Ceres Seq. ID no. 12370723
  misc_feature (35)..(274): Pfam Name: Integral membrane protein DUF92 Pfam Description: Integral membrane protein DUF92
  misc_feature (36)..(270): Homolog of NCBI NO: 37520469 NR Description: hypothetical protein gll0900 [Gloeobacter
  misc_feature (30)..(271): Homolog of NCBI NO: 16330187 NR Description: hypothetical protein [Synechocystis sp. PCC 6803]
  misc_feature (29)..(273): Homolog of NCBI NO: 23043616 NR Description: hypothetical protein [Trichodesmium erythraeum
  misc_feature (29)..(273): Homolog of NCBI NO: 17229104 NR Description: hypothetical protein [Nostoc sp. PCC 7120]
  misc_feature (28)..(132): Homolog of NCBI NO: 23125371 NR Description: hypothetical protein [Nostoc punctiforme]
  misc_feature (143)..(273): Homolog of NCBI NO: 23125371 NR Description: hypothetical protein [Nostoc punctiforme]
  misc_feature (17)..(271): Homolog of NCBI NO: 22299927 NR Description: ORF_ID:tlr2384~hypothetical protein
  misc_feature (9)..(253): Homolog of NCBI NO: 34910822 NR Description: P0456A01.17 [Oryza sativa (japonica
  misc_feature (1)..(283): Homolog of NCBI NO: 21592713 NR Description: unknown [Arabidopsis thaliana]
  misc_feature (1)..(283): Homolog of NCBI NO: 18412044 NR Description: expressed protein
MLSSGSRADGATAAAASMEGVMTEAMKLIQSASPTWKSAVANNLLIFVLGSPLLVTGLSASGIAAAFLLGTLTWRAYGSAGFLLVAAYFVIGTAATKVKMTQKEAQGVAEKRKGRRGPRSVIGSSAAGCVCAFLSIYQVGGAAFSQLFRLGFVSSFCTKVSDTVSSEIGKAYGKTTYLATTFKIVPRGTEGAMSLEGTLAGLLASFFLASVGCFLGQITPPEAAVCVLASQIANLGESIIGASFQDKEGFKWLNNDVVNVINISLGSIVAILMQQFILQNWVK

SEQ ID NO: 26616 - protein, 266 aa, Arabidopsis thaliana
  peptide (1)..(266): Ceres Seq. ID no. 12370724
  misc_feature (18)..(257): Pfam Name: Integral membrane protein DUF92 Pfam Description: Integral membrane protein DUF92
  misc_feature (19)..(253): Homolog of NCBI NO: 37520469 NR Description: hypothetical protein gll0900 [Gloeobacter
  misc_feature (13)..(254): Homolog of NCBI NO: 16330187 NR Description: hypothetical protein [Synechocystis sp. PCC 6803]
  misc_feature (12)..(256): Homolog of NCBI NO: 23043616 NR Description: hypothetical protein [Trichodesmium erythraeum
  misc_feature (12)..(256): Homolog of NCBI NO: 17229104 NR Description: hypothetical protein [Nostoc sp. PCC 7120]
  misc_feature (11)..(115): Homolog of NCBI NO: 23125371 NR Description: hypothetical protein [Nostoc punctiforme]
  misc_feature (126)..(256): Homolog of NCBI NO: 23125371 NR Description: hypothetical protein [Nostoc punctiforme]
  misc_feature (1)..(254): Homolog of NCBI NO: 22299927 NR Description: ORF_ID:tlr2384~hypothetical protein
  misc_feature (1)..(236): Homolog of NCBI NO: 34910822 NR Description: P0456A01.17 [Oryza sativa (japonica
  misc_feature (1)..(266): Homolog of NCBI NO: 21592713 NR Description: unknown [Arabidopsis thaliana]
  misc_feature (1)..(266): Homolog of NCBI NO: 18412044 NR Description: expressed protein
MEGVMTEAMKLIQSASPTWKSAVANNLLIFVLGSPLLVTGLSASGIAAAFLLGTLTWRAYGSAGFLLVAAYFVIGTAATKVKMTQKEAQGVAEKRKGRRGPRSVIGSSAAGCVCAFLSIYQVGGAAFSQLFRLGFVSSFCTKVSDTVSSEIGKAYGKTTYLATTFKIVPRGTEGAMSLEGTLAGLLASFFLASVGCFLGQITPPEAAVCVLASQIANLGESIIGASFQDKEGFKWLNNDVVNVINISLGSIVAILMQQFILQNWVK

SEQ ID NO: 26617 - DNA, 1230 bp, Arabidopsis thaliana
  misc_feature (1)..(1230): Ceres Seq. ID no. 13495647
  misc_feature: MA Experiment ID: 108574 Result: Down-regulated in Transcription
  misc_feature: MA Experiment 108574 PARAMETER Experiment Name: At_Wounding__cDNA_P Parameter: Timepoint (hr) Value: 1
  misc_feature: MA Experiment 108574 PARAMETER Experiment Name: At_Wounding__cDNA_P Parameter: Tissue Value: Aerial
  misc_feature: MA Experiment 108574 PARAMETER Experiment Name: At_Wounding__cDNA_P Parameter: Treatment Value: Wounding vs. No Wounding
  misc_feature: MA Experiment ID: 108585 Result: Up-regulated in Transcription
  misc_feature: MA Experiment 108585 PARAMETER Experiment Name: At_5mM_NaNP_cDNA_P Parameter: Timepoint (hr) Value: 6
  misc_feature: MA Experiment 108585 PARAMETER Experiment Name: At_5mM_NaNP_cDNA_P Parameter: Tissue Value: Aerial
  misc_feature: MA Experiment 108585 PARAMETER Experiment Name: At_5mM_NaNP_cDNA_P Parameter: Treatment Value: null
  misc_feature: MA Experiment ID: 108594 Result: Down-regulated in Transcription
  misc_feature: MA Experiment 108594 PARAMETER Experiment Name: At_Ler-rhl_Root_cDNA_P Parameter: Plant Line Value: null
  misc_feature: MA Experiment ID: 108595 Result: Up-regulated in Transcription
  misc_feature: MA Experiment 108595 PARAMETER Experiment Name: At_Ler-pi_Ovule_cDNA_P Parameter: Plant Line Value: null
  misc_feature: MA Experiment ID: 108668 Result: Up-regulated in Transcription
  misc_feature: MA Experiment 108668 PARAMETER Experiment Name: At_2mM_SA_cDNA_P Parameter: Plant Line Value: WS
  misc_feature: MA Experiment 108668 PARAMETER Experiment Name: At_2mM_SA_cDNA_P Parameter: Timepoint (hr) Value: 6
  misc_feature: MA Experiment 108668 PARAMETER Experiment Name: At_2mM_SA_cDNA_P Parameter: Treatment Value: 2mM SA vs. No Treatment
  misc_feature: MA Experiment ID: 20000173 Result: Down-regulated in Transcription
  misc_feature: MA Experiment 20000173 PARAMETER Experiment Name: At_42deg_Heat_P Parameter: Age (day) Value: 14
  misc_feature: MA Experiment 20000173 PARAMETER Experiment Name: At_42deg_Heat_P Parameter: Organism Value: A. thaliana
  misc_feature: MA Experiment 20000173 PARAMETER Experiment Name: At_42deg_Heat_P Parameter: Plant Line Value: WS
  misc_feature: MA Experiment 20000173 PARAMETER Experiment Name: At_42deg_Heat_P Parameter: Temperature (deg C) Value: 42 vs. 22
  misc_feature: MA Experiment 20000173 PARAMETER Experiment Name: At_42deg_Heat_P Parameter: Timepoint (hr) Value: 6
  misc_feature: MA Experiment 20000173 PARAMETER Experiment Name: At_42deg_Heat_P Parameter: Tissue Value: Aerial
  misc_feature: MA Experiment ID: 20000182 Result: Up-regulated in Transcription
  misc_feature: MA Experiment 20000182 PARAMETER Experiment Name: At_2mM_SA_P Parameter: Age (day) Value: 14
  misc_feature: MA Experiment 20000182 PARAMETER Experiment Name: At_2mM_SA_P Parameter: Organism Value: A. thaliana
  misc_feature: MA Experiment 20000182 PARAMETER Experiment Name: At_2mM_SA_P Parameter: Plant Line Value: WS
  misc_feature: MA Experiment 20000182 PARAMETER Experiment Name: At_2mM_SA_P Parameter: Timepoint (hr) Value: 6
  misc_feature: MA Experiment 20000182 PARAMETER Experiment Name: At_2mM_SA_P Parameter: Tissue Value: Aerial
  misc_feature: MA Experiment 20000182 PARAMETER Experiment Name: At_2mM_SA_P Parameter: Treatment Value: 2mM SA vs. No Treatment
  misc_feature: MA Experiment ID: 20000184 Result: Down-regulated in Transcription
  misc_feature: MA Experiment 20000184 PARAMETER Experiment Name: At_Shoots__P Parameter: Age (day) Value: 7
  misc_feature: MA Experiment 20000184 PARAMETER Experiment Name: At_Shoots__P Parameter: Tissue Value: Shoots vs. Whole Plant
  misc_feature: MA Experiment ID: 20000185 Result: Up-regulated in Transcription
  misc_feature: MA Experiment 20000185 PARAMETER Experiment Name: At_Roots__P Parameter: Age (day) Value: 7 vs. 21
  misc_feature: MA Experiment 20000185 PARAMETER Experiment Name: At_Roots__P Parameter: Organism Value: A. thaliana
  misc_feature: MA Experiment 20000185 PARAMETER Experiment Name: At_Roots__P Parameter: Tissue Value: Roots vs. Whole Plant
  misc_feature: MA Experiment ID: 20000227 Result: Down-regulated in Transcription
  misc_feature: MA Experiment 20000227 PARAMETER Experiment Name: At_Root-Tips-vs-Tops_P Parameter: Tissue Value: Root Tips vs. Root Tops
  misc_feature: MA Experiment ID: 20000234 Result: Down-regulated in Transcription
  misc_feature: MA Experiment 20000234 PARAMETER Experiment Name: At_Siliques_P Parameter: Age (day) Value: 21
  misc_feature: MA Experiment 20000234 PARAMETER Experiment Name: At_Siliques_P Parameter: Organism Value: A. thaliana
  misc_feature: MA Experiment 20000234 PARAMETER Experiment Name: At_Siliques_P Parameter: Plant Line Value: WS
  misc_feature: MA Experiment 20000234 PARAMETER Experiment Name: At_Siliques_P Parameter: Tissue Value: Less Than 5mm Siliques vs. Whole Plant
  misc_feature: MA Experiment ID: 20000235 Result: Down-regulated in Transcription
  misc_feature: MA Experiment 20000235 PARAMETER Experiment Name: At_Siliques_P Parameter: Age (day) Value: 21
  misc_feature: MA Experiment 20000235 PARAMETER Experiment Name: At_Siliques_P Parameter: Organism Value: A. thaliana
  misc_feature: MA Experiment 20000235 PARAMETER Experiment Name: At_Siliques_P Parameter: Plant Line Value: WS
  misc_feature: MA Experiment 20000235 PARAMETER Experiment Name: At_Siliques_P Parameter: Tissue Value: 5-10mm Siliques vs. Whole Plant
  misc_feature: MA Experiment ID: 20000264 Result: Down-regulated in Transcription
  misc_feature: MA Experiment 20000264 PARAMETER Experiment Name: At_Open_Flower_P Parameter: Age (day) Value: 21
  misc_feature: MA Experiment 20000264 PARAMETER Experiment Name: At_Open_Flower_P Parameter: Plant Line Value: WS
  misc_feature: MA Experiment 20000264 PARAMETER Experiment Name: At_Open_Flower_P Parameter: Tissue Value: Open Flower vs. Whole Plant
  misc_feature: MA Experiment ID: 20000269 Result: Down-regulated in Transcription
  misc_feature: MA Experiment 20000269 PARAMETER Experiment Name: At_1mM_KNO3_L-vs-H_Roots_P Parameter: Age (day) Value: 7,10,12
  misc_feature: MA Experiment 20000269 PARAMETER Experiment Name: At_1mM_KNO3_L-vs-H_Roots_P Parameter: Organism Value: A. thaliana
  misc_feature: MA Experiment 20000269 PARAMETER Experiment Name: At_1mM_KNO3_L-vs-H_Roots_P Parameter: Plant Line Value: WS
  misc_feature: MA Experiment 20000269 PARAMETER Experiment Name: At_1mM_KNO3_L-vs-H_Roots_P Parameter: Timepoint (day) Value: 7,10,12
  misc_feature: MA Experiment 20000269 PARAMETER Experiment Name: At_1mM_KNO3_L-vs-H_Roots_P Parameter: Tissue Value: Roots
  misc_feature: MA Experiment 20000269 PARAMETER Experiment Name: At_1mM_KNO3_L-vs-H_Roots_P Parameter: Treatment Value: 1mM KNO3 vs. 50mM KNO3
  misc_feature: MA Experiment ID: 20000286 Result: Down-regulated in Transcription
  misc_feature: MA Experiment 20000286 PARAMETER Experiment Name: At_Open_Flower_P Parameter: Age (day) Value: 21
  misc_feature: MA Experiment 20000286 PARAMETER Experiment Name: At_Open_Flower_P Parameter: Plant Line Value: WS
  misc_feature: MA Experiment 20000286 PARAMETER Experiment Name: At_Open_Flower_P Parameter: Tissue Value: Half Open vs. Whole Plant
  misc_feature: MA Experiment ID: 20000308 Result: Up-regulated in Transcription
  misc_feature: MA Experiment 20000308 PARAMETER Experiment Name: At_100mM_NaCl__P Parameter: Age (day) Value: 17
  misc_feature: MA Experiment 20000308 PARAMETER Experiment Name: At_100mM_NaCl__P Parameter: Organism Value: A. thaliana
  misc_feature: MA Experiment 20000308 PARAMETER Experiment Name: At_100mM_NaCl__P Parameter: Plant Line Value: WS
  misc_feature: MA Experiment 20000308 PARAMETER Experiment Name: At_100mM_NaCl__P Parameter: Timepoint (hr) Value: 72
  misc_feature: MA Experiment 20000308 PARAMETER Experiment Name: At_100mM_NaCl__P Parameter: Tissue Value: Whole Plant
  misc_feature: MA Experiment 20000308 PARAMETER Experiment Name: At_100mM_NaCl__P Parameter: Treatment Value: 100mM NaCl vs. No Treatment
  misc_feature: MA Experiment ID: 20000438 Result: Down-regulated in Transcription
  misc_feature: MA Experiment 20000438 PARAMETER Experiment Name: At_Shoots__P Parameter: Age (day) Value: 14
  misc_feature: MA Experiment 20000438 PARAMETER Experiment Name: At_Shoots__P Parameter: Tissue Value: Shoots vs. Whole Plant
  misc_feature: MA Experiment ID: 20000439 Result: Up-regulated in Transcription
  misc_feature: MA Experiment 20000439 PARAMETER Experiment Name: At_Roots__P Parameter: Age (day) Value: 14 vs. 21
  misc_feature: MA Experiment 20000439 PARAMETER Experiment Name: At_Roots__P Parameter: Organism Value: A. thaliana
  misc_feature: MA Experiment 20000439 PARAMETER Experiment Name: At_Roots__P Parameter: Tissue Value: Roots vs. Whole Plant
  misc_feature: MA Experiment ID: 20000453 Result: Up-regulated in Transcription
  misc_feature: MA Experiment 20000453 PARAMETER Experiment Name: At_100uM_ABA_P Parameter: Age (day) Value: 15
  misc_feature: MA Experiment 20000453 PARAMETER Experiment Name: At_100uM_ABA_P Parameter: Organism Value: A. thaliana
  misc_feature: MA Experiment 20000453 PARAMETER Experiment Name: At_100uM_ABA_P Parameter: Plant Line Value: WS
  misc_feature: MA Experiment 20000453 PARAMETER Experiment Name: At_100uM_ABA_P Parameter: Timepoint (hr) Value: 24
  misc_feature: MA Experiment 20000453 PARAMETER Experiment Name: At_100uM_ABA_P Parameter: Tissue Value: Aerial
  misc_feature: MA Experiment 20000453 PARAMETER Experiment Name: At_100uM_ABA_P Parameter: Treatment Value: 100uM ABA vs. No Treatment
  misc_feature: MA Experiment ID: 20000456 Result: Down-regulated in Transcription
  misc_feature: MA Experiment 20000456 PARAMETER Experiment Name: At_100uM_BA_P Parameter: Age (day) Value: 14
  misc_feature: MA Experiment 20000456 PARAMETER Experiment Name: At_100uM_BA_P Parameter: Organism Value: A. thaliana
  misc_feature: MA Experiment 20000456 PARAMETER Experiment Name: At_100uM_BA_P Parameter: Plant Line Value: WS
  misc_feature: MA Experiment 20000456 PARAMETER Experiment Name: At_100uM_BA_P Parameter: Timepoint (hr) Value: 6
  misc_feature: MA Experiment 20000456 PARAMETER Experiment Name: At_100uM_BA_P Parameter: Tissue Value: Aerial
  misc_feature: MA Experiment 20000456 PARAMETER Experiment Name: At_100uM_BA_P Parameter: Treatment Value: 100uM BA vs. No Treatment
  misc_feature: MA Experiment ID: 20000527 Result: Down-regulated in Transcription
  misc_feature: MA Experiment 20000527 PARAMETER Experiment Name: At_10percent_PEG_P Parameter: Age (day) Value: 20
  misc_feature: MA Experiment 20000527 PARAMETER Experiment Name: At_10percent_PEG_P Parameter: Organism Value: A. thaliana
  misc_feature: MA Experiment 20000527 PARAMETER Experiment Name: At_10percent_PEG_P Parameter: Plant Line Value: WS
  misc_feature: MA Experiment 20000527 PARAMETER Experiment Name: At_10percent_PEG_P Parameter: Timepoint (day) Value: 20
  misc_feature: MA Experiment 20000527 PARAMETER Experiment Name: At_10percent_PEG_P Parameter: Tissue Value: Whole Plant
  misc_feature: MA Experiment 20000527 PARAMETER Experiment Name: At_10percent_PEG_P Parameter: Treatment Value: 10percent PEG vs. No Treatment
  misc_feature: MA Experiment ID: 20000794 Result: Down-regulated in Transcription
  misc_feature: MA Experiment 20000794 PARAMETER Experiment Name: At_Petals_P Parameter: Age (day) Value: 23-25 days
  misc_feature: MA Experiment 20000794 PARAMETER Experiment Name: At_Petals_P Parameter: Plant Line Value: WS
  misc_feature: MA Experiment 20000794 PARAMETER Experiment Name: At_Petals_P Parameter: Tissue Value: Petals vs. Whole plant
  misc_feature: MA Experiment ID: 20001450 Result: Down-regulated in Transcription
  misc_feature: MA Experiment 20001450 PARAMETER Experiment Name: At_Far-red-induction_P Parameter: Age (day) Value: 7
  misc_feature: MA Experiment 20001450 PARAMETER Experiment Name: At_Far-red-induction_P Parameter: Light Value: Far-red vs. White
  misc_feature: MA Experiment 20001450 PARAMETER Experiment Name: At_Far-red-induction_P Parameter: Organism Value: A. thaliana
  misc_feature: MA Experiment 20001450 PARAMETER Experiment Name: At_Far-red-induction_P Parameter: Plant Line Value: Columbia
  misc_feature: MA Experiment 20001450 PARAMETER Experiment Name: At_Far-red-induction_P Parameter: Timepoint (hr) Value: 8
  misc_feature: MA Experiment 20001450 PARAMETER Experiment Name: At_Far-red-induction_P Parameter: Tissue Value: Whole Plant
  misc_feature: MA Experiment ID: 20001451 Result: Up-regulated in Transcription
  misc_feature: MA Experiment 20001451 PARAMETER Experiment Name: At_Far-red-induction_P Parameter: Age (day) Value: 7
  misc_feature: MA Experiment 20001451 PARAMETER Experiment Name: At_Far-red-induction_P Parameter: Light Value: Far-red vs. White
  misc_feature: MA Experiment 20001451 PARAMETER Experiment Name: At_Far-red-induction_P Parameter: Organism Value: A. thaliana
  misc_feature: MA Experiment 20001451 PARAMETER Experiment Name: At_Far-red-induction_P Parameter: Plant Line Value: Columbia
  misc_feature: MA Experiment 20001451 PARAMETER Experiment Name: At_Far-red-induction_P Parameter: Timepoint (hr) Value: 24
  misc_feature: MA Experiment 20001451 PARAMETER Experiment Name: At_Far-red-induction_P Parameter: Tissue Value: Whole Plant
  misc_feature: MA Experiment ID: 20001554 Result: Down-regulated in Transcription
  misc_feature: MA Experiment 20001554 PARAMETER Experiment Name: At_Drought_Soil_Dry_P Parameter: Age (day) Value: 21
  misc_feature: MA Experiment 20001554 PARAMETER Experiment Name: At_Drought_Soil_Dry_P Parameter: Organism Value: A. thaliana
  misc_feature: MA Experiment 20001554 PARAMETER Experiment Name: At_Drought_Soil_Dry_P Parameter: Plant Line Value: WS
  misc_feature: MA Experiment 20001554 PARAMETER Experiment Name: At_Drought_Soil_Dry_P Parameter: Post Timepoint (hr) Value: None
  misc_feature: MA Experiment 20001554 PARAMETER Experiment Name: At_Drought_Soil_Dry_P Parameter: Post-Treatment Value: None
  misc_feature: MA Experiment 20001554 PARAMETER Experiment Name: At_Drought_Soil_Dry_P Parameter: Timepoint (day) Value: 7
  misc_feature: MA Experiment 20001554 PARAMETER Experiment Name: At_Drought_Soil_Dry_P Parameter: Treatment Value: Drought vs. No Drought
  misc_feature: MA Experiment ID: 20001555 Result: Down-regulated in Transcription
  misc_feature: MA Experiment 20001555 PARAMETER Experiment Name: At_Drought_Soil_Dry_P Parameter: Age (day) Value: 24
  misc_feature: MA Experiment 20001555 PARAMETER Experiment Name: At_Drought_Soil_Dry_P Parameter: Organism Value: A. thaliana
  misc_feature: MA Experiment 20001555 PARAMETER Experiment Name: At_Drought_Soil_Dry_P Parameter: Plant Line Value: WS
  misc_feature: MA Experiment 20001555 PARAMETER Experiment Name: At_Drought_Soil_Dry_P Parameter: Post Timepoint (hr) Value: None
  misc_feature: MA Experiment 20001555 PARAMETER Experiment Name: At_Drought_Soil_Dry_P Parameter: Post-Treatment Value: None
  misc_feature: MA Experiment 20001555 PARAMETER Experiment Name: At_Drought_Soil_Dry_P Parameter: Timepoint (day) Value: 10
  misc_feature: MA Experiment 20001555 PARAMETER Experiment Name: At_Drought_Soil_Dry_P Parameter: Treatment Value: Drought vs. No Drought
  misc_feature: MA Experiment ID: 20001556 Result: Down-regulated in Transcription
  misc_feature: MA Experiment 20001556 PARAMETER Experiment Name: At_Drought_Soil_Dry_P Parameter: Age (day) Value: 26
  misc_feature: MA Experiment 20001556 PARAMETER Experiment Name: At_Drought_Soil_Dry_P Parameter: Organism Value: A. thaliana
  misc_feature: MA Experiment 20001556 PARAMETER Experiment Name: At_Drought_Soil_Dry_P Parameter: Plant Line Value: WS
  misc_feature: MA Experiment 20001556 PARAMETER Experiment Name: At_Drought_Soil_Dry_P Parameter: Post Timepoint (hr) Value: None
  misc_feature: MA Experiment 20001556 PARAMETER Experiment Name: At_Drought_Soil_Dry_P Parameter: Post-Treatment Value: None
  misc_feature: MA Experiment 20001556 PARAMETER Experiment Name: At_Drought_Soil_Dry_P Parameter: Timepoint (day) Value: 12
  misc_feature: MA Experiment 20001556 PARAMETER Experiment Name: At_Drought_Soil_Dry_P Parameter: Treatment Value: Drought vs. No Drought
  misc_feature: MA Experiment ID: 20001557 Result: Down-regulated in Transcription
  misc_feature: MA Experiment 20001557 PARAMETER Experiment Name: At_Drought_Soil_Dry_P Parameter: Age (day) Value: 27
  misc_feature: MA Experiment 20001557 PARAMETER Experiment Name: At_Drought_Soil_Dry_P Parameter: Organism Value: A. thaliana
  misc_feature: MA Experiment 20001557 PARAMETER Experiment Name: At_Drought_Soil_Dry_P Parameter: Plant Line Value: WS
  misc_feature: MA Experiment 20001557 PARAMETER Experiment Name: At_Drought_Soil_Dry_P Parameter: Post Timepoint (hr) Value: 3
  misc_feature: MA Experiment 20001557 PARAMETER Experiment Name: At_Drought_Soil_Dry_P Parameter: Post-Treatment Value: Re-Water vs. No Drought
  misc_feature: MA Experiment 20001557 PARAMETER Experiment Name: At_Drought_Soil_Dry_P Parameter: Timepoint (day) Value: 13
  misc_feature: MA Experiment 20001557 PARAMETER Experiment Name: At_Drought_Soil_Dry_P Parameter: Treatment Value: Drought vs. No Drought
  misc_feature: MA Experiment ID: 20001558 Result: Down-regulated in Transcription
  misc_feature: MA Experiment 20001558 PARAMETER Experiment Name: At_Drought_Soil_Dry_P Parameter: Age (day) Value: 27
  misc_feature: MA Experiment 20001558 PARAMETER Experiment Name: At_Drought_Soil_Dry_P Parameter: Organism Value: A. thaliana
  misc_feature: MA Experiment 20001558 PARAMETER Experiment Name: At_Drought_Soil_Dry_P Parameter: Plant Line Value: WS
  misc_feature: MA Experiment 20001558 PARAMETER Experiment Name: At_Drought_Soil_Dry_P Parameter: Post Timepoint (hr) Value: 6
  misc_feature: MA Experiment 20001558 PARAMETER Experiment Name: At_Drought_Soil_Dry_P Parameter: Post-Treatment Value: Re-Water vs. No Drought
  misc_feature: MA Experiment 20001558 PARAMETER Experiment Name: At_Drought_Soil_Dry_P Parameter: Timepoint (day) Value: 13
  misc_feature: MA Experiment 20001558 PARAMETER Experiment Name: At_Drought_Soil_Dry_P Parameter: Treatment Value: Drought vs. No Drought
  misc_feature: MA Experiment ID: 20001559 Result: Down-regulated in Transcription
  misc_feature: MA Experiment 20001559 PARAMETER Experiment Name: At_Drought_Soil_Dry_P Parameter: Age (day) Value: 28
  misc_feature: MA Experiment 20001559 PARAMETER Experiment Name: At_Drought_Soil_Dry_P Parameter: Organism Value: A. thaliana
  misc_feature: MA Experiment 20001559 PARAMETER Experiment Name: At_Drought_Soil_Dry_P Parameter: Plant Line Value: WS
  misc_feature: MA Experiment 20001559 PARAMETER Experiment Name: At_Drought_Soil_Dry_P Parameter: Post Timepoint (hr) Value: 29
  misc_feature: MA Experiment 20001559 PARAMETER Experiment Name: At_Drought_Soil_Dry_P Parameter: Post-Treatment Value: Re-Water vs. No Drought
  misc_feature: MA Experiment 20001559 PARAMETER Experiment Name: At_Drought_Soil_Dry_P Parameter: Timepoint (day) Value: 14
  misc_feature: MA Experiment 20001559 PARAMETER Experiment Name: At_Drought_Soil_Dry_P Parameter: Treatment Value: Drought vs. No Drought
  misc_feature: MA Experiment ID: 20001560 Result: Down-regulated in Transcription
  misc_feature: MA Experiment 20001560 PARAMETER Experiment Name: At_Drought_Soil_Dry_P Parameter: Age (day) Value: 28
  misc_feature: MA Experiment 20001560 PARAMETER Experiment Name: At_Drought_Soil_Dry_P Parameter: Organism Value: A. thaliana
  misc_feature: MA Experiment 20001560 PARAMETER Experiment Name: At_Drought_Soil_Dry_P Parameter: Plant Line Value: WS
  misc_feature: MA Experiment 20001560 PARAMETER Experiment Name: At_Drought_Soil_Dry_P Parameter: Post Timepoint (hr) Value: None
  misc_feature: MA Experiment 20001560 PARAMETER Experiment Name: At_Drought_Soil_Dry_P Parameter: Post-Treatment Value: None
  misc_feature: MA Experiment 20001560 PARAMETER Experiment Name: At_Drought_Soil_Dry_P Parameter: Timepoint (day) Value: 14
  misc_feature: MA Experiment 20001560 PARAMETER Experiment Name: At_Drought_Soil_Dry_P Parameter: Treatment Value: Drought vs. No Drought
acatatcaatgttaatttgtatataaggagctaagaacaaacccaattaggcaactagcaattgctaaaacacgtaagatctcaaatatgaccacgttattcctccttattgctctattcatcacaaccatcctcaacccaacaagtggagaatcagtaggtgtatgctatggaatgatggggaacaaccttccttctcaatcagacacaatcgctctctttagacaaaacaacatccgacgtgttagactctacgatccaaaccaagccgctttaaacgctcttagaaacacgggtatcgaagtcatcatcggcgttccaaacaccgatcttcgttcactcactaacccttcttccgctagatcatggctccaaaacaacgtcctcaactattaccccgccgttagcttcaagtacatcgccgtaggtaacgaagtatctccgtcgaacggcggtgatgttgtgctccctgccatgcgtaacgtttacgatgctctaagaggtgcaaatcttcaagatcgtattaaagtttctaccgccattgatatgactttgattggaaactctttccctccttcctccggagagtttcgtggtgacgttagatggtatatcgatcccgtcatcgggtttcttacgagtacgaactcagcgttactagccaacatctatccttacttcagctacgttgacaatccacgtgacatatctctctcttacgctctcttcacttctccttccgtcgtcgtatgggacggctctcgtggctaccaaaacctctttgacgctttacttgacgttgtttactctgccgttgaacgctcaggcggtggatctctcccagtggttgtttccgagagcggatggccttctaacggtggaaacgccgcgagtttcgataacgcgcgagctttttacacgaatcttgcgtcgcgtgtgagagagaacagaggaacaccgaagagacctggaagaggagtggaaacgtatttgttcgctatgtttgatgagaatcaaaagagtcctgagatcgagaagaattttggtttgttttttcctaataaacaaccaaaatttccgatcacattctctgccgcgagagacggtacggcggttgagtgatgattttatatgctgagatttatgtgaataattgggagattatcccataaaaggttccaaataaagacaaatttcaaataaaacctgttagtccaagttaaattaagt

SEQ ID NO: 26618 - protein, 344 aa, Arabidopsis thaliana
  peptide (1)..(344): Ceres Seq. ID no. 13495648
  misc_feature (24)..(295): Pfam Name: Glycosyl hydrolases family 17 Pfam Description: Glycosyl hydrolases family 17
  misc_feature (1)..(338): Homolog of NCBI NO: 4883425 NR Description: glucan-endo-1,3-beta-glucosidase [Cicer arietinum]
  misc_feature (1)..(340): Homolog of NCBI NO: 7447979 NR Description: 1,3-beta-glucanase (EC 3.2.1.-), acidic - alfalfa
  misc_feature (1)..(344): Homolog of NCBI NO: 1169445 NR Description: GLUCAN ENDO-1,3-BETA-GLUCOSIDASE PRECURSOR ((1-
  misc_feature (24)..(334): Homolog of NCBI NO: 10946499 NR Description: beta-1,3-glucanase [Hevea brasiliensis]
  misc_feature (1)..(334): Homolog of NCBI NO: 4469175 NR Description: beta-1,3-glucanase [Hevea brasiliensis]
  misc_feature (1)..(338): Homolog of NCBI NO: 22550395 NR Description: beta-1,3-glucanase [Vitis vinifera]
  misc_feature (2)..(339): Homolog of NCBI NO: 1706547 NR Description: Glucan endo-1,3-beta-glucosidase, basic vacuolar
  misc_feature (1)..(339): Homolog of NCBI NO: 32765543 NR Description: beta-1,3-glucanase [Hevea brasiliensis]
  misc_feature (1)..(302): Homolog of NCBI NO: 15234880 NR Description: glycosyl hydrolase family 17 [Arabidopsis
  misc_feature (1)..(344): Homolog of NCBI NO: 17381238 NR Description: AT4g16260/dl4170c [Arabidopsis thaliana]
MTTLFLLIALFITTILNPTSGESVGVCYGMMGNNLPSQSDTIALFRQNNIRRVRLYDPNQAALNALRNTGIEVIIGVPNTDLRSLTNPSSARSWLQNNVLNYYPAVSFKYIAVGNEVSPSNGGDVVLPAMRNVYDALRGANLQDRIKVSTAIDMTLIGNSFPPSSGEFRGDVRWYIDPVIGFLTSTNSALLANIYPYFSYVDNPRDISLSYALFTSPSVVVWDGSRGYQNLFDALLDVVYSAVERSGGGSLPVVVSESGWPSNGGNAASFDNARAFYTNLASRVRENRGTPKRPGRGVETYLFAMFDENQKSPEIEKNFGLFFPNKQPKFPITFSAARDGTAVE

SEQ ID NO: 26619 - protein, 315 aa, Arabidopsis thaliana
  peptide (1)..(315): Ceres Seq. ID no. 13495649
  misc_feature (1)..(266): Pfam Name: Glycosyl hydrolases family 17 Pfam Description: Glycosyl hydrolases family 17
  misc_feature (1)..(309): Homolog of NCBI NO: 4883425 NR Description: glucan-endo-1,3-beta-glucosidase [Cicer arietinum]
  misc_feature (1)..(311): Homolog of NCBI NO: 7447979 NR Description: 1,3-beta-glucanase (EC 3.2.1.-), acidic - alfalfa
  misc_feature (1)..(315): Homolog of NCBI NO: 1169445 NR Description: GLUCAN ENDO-1,3-BETA-GLUCOSIDASE PRECURSOR ((1-
  misc_feature (1)..(305): Homolog of NCBI NO: 10946499 NR Description: beta-1,3-glucanase [Hevea brasiliensis]
  misc_feature (1)..(305): Homolog of NCBI NO: 4469175 NR Description: beta-1,3-glucanase [Hevea brasiliensis]
  misc_feature (1)..(309): Homolog of NCBI NO: 22550395 NR Description: beta-1,3-glucanase [Vitis vinifera]
  misc_feature (1)..(310): Homolog of NCBI NO: 1706547 NR Description: Glucan endo-1,3-beta-glucosidase, basic vacuolar
  misc_feature (1)..(310): Homolog of NCBI NO: 32765543 NR Description: beta-1,3-glucanase [Hevea brasiliensis]
  misc_feature (1)..(273): Homolog of NCBI NO: 15234880 NR Description: glycosyl hydrolase family 17 [Arabidopsis
  misc_feature (1)..(315): Homolog of NCBI NO: 17381238 NR Description: AT4g16260/dl4170c [Arabidopsis thaliana]
MMGNNLPSQSDTIALFRQNNIRRVRLYDPNQAALNALRNTGIEVIIGVPNTDLRSLTNPSSARSWLQNNVLNYYPAVSFKYIAVGNEVSPSNGGDVVLPAMRNVYDALRGANLQDRIKVSTAIDMTLIGNSFPPSSGEFRGDVRWYIDPVIGFLTSTNSALLANIYPYFSYVDNPRDISLSYALFTSPSVVVWDGSRGYQNLFDALLDVVYSAVERSGGGSLPVVVSESGWPSNGGNAASFDNARAFYTNLASRVRENRGTPKRPGRGVETYLFAMFDENQKSPEIEKNFGLFFPNKQPKFPITFSAARDGTAVE

SEQ ID NO: 26620 - protein, 314 aa, Arabidopsis thaliana
  peptide (1)..(314): Ceres Seq. ID no. 13495650
  misc_feature (1)..(265): Pfam Name: Glycosyl hydrolases family 17 Pfam Description: Glycosyl hydrolases family 17
  misc_feature (1)..(308): Homolog of NCBI NO: 4883425 NR Description: glucan-endo-1,3-beta-glucosidase [Cicer arietinum]
  misc_feature (1)..(310): Homolog of NCBI NO: 7447979 NR Description: 1,3-beta-glucanase (EC 3.2.1.-), acidic - alfalfa
  misc_feature (1)..(314): Homolog of NCBI NO: 1169445 NR Description: GLUCAN ENDO-1,3-BETA-GLUCOSIDASE PRECURSOR ((1-
  misc_feature (1)..(304): Homolog of NCBI NO: 10946499 NR Description: beta-1,3-glucanase [Hevea brasiliensis]
  misc_feature (1)..(304): Homolog of NCBI NO: 4469175 NR Description: beta-1,3-glucanase [Hevea brasiliensis]
  misc_feature (1)..(308): Homolog of NCBI NO: 22550395 NR Description: beta-1,3-glucanase [Vitis vinifera]
  misc_feature (1)..(309): Homolog of NCBI NO: 1706547 NR Description: Glucan endo-1,3-beta-glucosidase, basic vacuolar
  misc_feature (1)..(309): Homolog of NCBI NO: 32765543 NR Description: beta-1,3-glucanase [Hevea brasiliensis]
  misc_feature (1)..(272): Homolog of NCBI NO: 15234880 NR Description: glycosyl hydrolase family 17 [Arabidopsis
  misc_feature (1)..(314): Homolog of NCBI NO: 17381238 NR Description: AT4g16260/dl4170c [Arabidopsis thaliana]
MGNNLPSQSDTIALFRQNNIRRVRLYDPNQAALNALRNTGIEVIIGVPNTDLRSLTNPSSARSWLQNNVLNYYPAVSFKYIAVGNEVSPSNGGDVVLPAMRNVYDALRGANLQDRIKVSTAIDMTLIGNSFPPSSGEFRGDVRWYIDPVIGFLTSTNSALLANIYPYFSYVDNPRDISLSYALFTSPSVVVWDGSRGYQNLFDALLDVVYSAVERSGGGSLPVVVSESGWPSNGGNAASFDNARAFYTNLASRVRENRGTPKRPGRGVETYLFAMFDENQKSPEIEKNFGLFFPNKQPKFPITFSAARDGTAVE

SEQ ID NO: 26621 - DNA, 1634 bp, Arabidopsis thaliana
  misc_feature (1)..(1634): Ceres Seq. ID no. 13495783
  misc_feature: MA Experiment ID: 108435 Result: Down-regulated in Transcription
  misc_feature: MA Experiment 108435 PARAMETER Experiment Name: At_stm_Mutants_cDNA_P Parameter: Plant Line Value: wt Landsburg vs stm
  misc_feature: MA Experiment 108435 PARAMETER Experiment Name: At_stm_Mutants_cDNA_P Parameter: Tissue Value: Shoot Apical Meristem Region
  misc_feature: MA Experiment ID: 108461 Result: Up-regulated in Transcription
  misc_feature: MA Experiment 108461 PARAMETER Experiment Name: At_Germinating_Seeds_cDNA_P Parameter: Age (day) Value: 1 vs. 0
  misc_feature: MA Experiment 108461 PARAMETER Experiment Name: At_Germinating_Seeds_cDNA_P Parameter: Tissue Value: Germinating Seeds
  misc_feature: MA Experiment ID: 108462 Result: Up-regulated in Transcription
  misc_feature: MA Experiment 108462 PARAMETER Experiment Name: At_Germinating_Seeds_cDNA_P Parameter: Age (day) Value: 2 vs. 0
  misc_feature: MA Experiment 108462 PARAMETER Experiment Name: At_Germinating_Seeds_cDNA_P Parameter: Tissue Value: Germinating Seeds
  misc_feature: MA Experiment ID: 108463 Result: Up-regulated in Transcription
  misc_feature: MA Experiment 108463 PARAMETER Experiment Name: At_Germinating_Seeds_cDNA_P Parameter: Age (day) Value: 3 vs. 0
  misc_feature: MA Experiment 108463 PARAMETER Experiment Name: At_Germinating_Seeds_cDNA_P Parameter: Tissue Value: Germinating Seeds
  misc_feature: MA Experiment ID: 108464 Result: Up-regulated in Transcription
  misc_feature: MA Experiment 108464 PARAMETER Experiment Name: At_Germinating_Seeds_cDNA_P Parameter: Age (day) Value: 4 vs. 0
  misc_feature: MA Experiment 108464 PARAMETER Experiment Name: At_Germinating_Seeds_cDNA_P Parameter: Tissue Value: Germinating Seeds
  misc_feature: MA Experiment ID: 108569 Result: Up-regulated in Transcription
  misc_feature: MA Experiment 108569 PARAMETER Experiment Name: At_0.001%_MeJA__cDNA_P Parameter: Timepoint (hr) Value: 6
  misc_feature: MA Experiment 108569 PARAMETER Experiment Name: At_0.001%_MeJA__cDNA_P Parameter: Tissue Value: Aerial
  misc_feature: MA Experiment 108569 PARAMETER Experiment Name: At_0.001%_MeJA__cDNA_P Parameter: Treatment Value: 0.001% MeJA vs. No Treatment
  misc_feature: MA Experiment ID: 108573 Result: Up-regulated in Transcription
  misc_feature: MA Experiment 108573 PARAMETER Experiment Name: At_Drought_cDNA_P Parameter: Timepoint (hr) Value: 6
  misc_feature: MA Experiment 108573 PARAMETER Experiment Name: At_Drought_cDNA_P Parameter: Tissue Value: Aerial
  misc_feature: MA Experiment 108573 PARAMETER Experiment Name: At_Drought_cDNA_P Parameter: Treatment Value: Drought vs. No Drought
  misc_feature: MA Experiment ID: 108595 Result: Down-regulated in Transcription
  misc_feature: MA Experiment 108595 PARAMETER Experiment Name: At_Ler-pi_Ovule_cDNA_P Parameter: Plant Line Value: null
  misc_feature: MA Experiment ID: 20000087 Result: Down-regulated in Transcription
  misc_feature: MA Experiment 20000087 PARAMETER Experiment Name: At_100uM_ABA_Mutants_cDNA_P Parameter: Plant Line Value: WS
  misc_feature: MA Experiment 20000087 PARAMETER Experiment Name: At_100uM_ABA_Mutants_cDNA_P Parameter: Timepoint (hr) Value: 6
  misc_feature: MA Experiment 20000087 PARAMETER Experiment Name: At_100uM_ABA_Mutants_cDNA_P Parameter: Tissue Value: Aerial
  misc_feature: MA Experiment 20000087 PARAMETER Experiment Name: At_100uM_ABA_Mutants_cDNA_P Parameter: Treatment Value: 100uM ABA vs. No Treatment
  misc_feature: MA Experiment ID: 20000090 Result: Down-regulated in Transcription
  misc_feature: MA Experiment ID: 20000111 Result: Down-regulated in Transcription
  misc_feature: MA Experiment 20000111 PARAMETER Experiment Name: At_42deg_Heat_cDNA_P Parameter: Temperature (deg C) Value: 42 vs. 22
  misc_feature: MA Experiment 20000111 PARAMETER Experiment Name: At_42deg_Heat_cDNA_P Parameter: Timepoint (hr) Value: 6
  misc_feature: MA Experiment 20000111 PARAMETER Experiment Name: At_42deg_Heat_cDNA_P Parameter: Tissue Value: Aerial
  misc_feature: MA Experiment ID: 20000117 Result: Down-regulated in Transcription
  misc_feature: MA Experiment 20000117 PARAMETER Experiment Name: At_100uM_ABA_Mutants_cDNA_P Parameter: Plant Line Value: Columbia
  misc_feature: MA Experiment 20000117 PARAMETER Experiment Name: At_100uM_ABA_Mutants_cDNA_P Parameter: Timepoint (hr) Value: 6
  misc_feature: MA Experiment 20000117 PARAMETER Experiment Name: At_100uM_ABA_Mutants_cDNA_P Parameter: Tissue Value: Aerial
  misc_feature: MA Experiment 20000117 PARAMETER Experiment Name: At_100uM_ABA_Mutants_cDNA_P Parameter: Treatment Value: 100uM ABA vs. No Treatment
  misc_feature: MA Experiment ID: 20000224 Result: Down-regulated in Transcription
  misc_feature: MA Experiment ID: 20000439 Result: Down-regulated in Transcription
  misc_feature: MA Experiment 20000439 PARAMETER Experiment Name: At_Roots__P Parameter: Age (day) Value: 14 vs. 21
  misc_feature: MA Experiment 20000439 PARAMETER Experiment Name: At_Roots__P Parameter: Organism Value: A. thaliana
  misc_feature: MA Experiment 20000439 PARAMETER Experiment Name: At_Roots__P Parameter: Tissue Value: Roots vs. Whole Plant
  misc_feature: MA Experiment ID: 20000495 Result: Down-regulated in Transcription
  misc_feature: MA Experiment 20000495 PARAMETER Experiment Name: At_Guard_Cells_P Parameter: Harvest Date Value: 8/2/2002
  misc_feature: MA Experiment 20000495 PARAMETER Experiment Name: At_Guard_Cells_P Parameter: Organism Value: A. thaliana
  misc_feature: MA Experiment 20000495 PARAMETER Experiment Name: At_Guard_Cells_P Parameter: Tissue Value: Guard Cells vs. Leaves
acccatcttatcattattttataaagatcctatgtctatccgtaaatggactaatctttagacacacagagaatataatgagtttgaaaataaagtttctgcttctgcttgtcttgtatcatcatgttgattctgcctctatcgtcaagtttcttcctggttttgaaggccctcttcctttcgaacttgaaaccgggtacattggtattggtgaggacgagaatgtgcaatttttctactatttcatcaaatctgaaaacaatccaaaagaagatcctcttcttatatggttaaatggaggacctggatgttcttgtcttggtggtattatttttgagaacggaccggtgggtttgaagtttgaggtgttcaacggaagtgctccttctttgttctctactacatattcatggacaaagatggcaaacattatattcttggatcagccagtaggatctggcttctcctactcaaaaactccaattgataaaactggtgacataagtgaagtaaagaggacccatgagtttcttcaaaagtggctaagcaggcatccacaatatttctccaaccctttatatgtagttggagattcttattccggtatgattgtcccggccctcgttcaagaaatctcacaaggaaattatatatgttgcgaacctcctataaatctacagggttatatgcttggaaaccctgtaacatatatggactttgaacaaaacttccgcattccatatgcttatggtatgggattaatctccgacgaaatctatgagccaatgaagagaatctgcaacggaaattattacaatgtggatccatctaacacacaatgtttgaaacttactgaagaatatcataagtgcactgccaaaataaatatccatcacatattaacaccagattgcgatgtaaccaatgtaacatctcctgattgttattattatccatatcatctcattgaatgttgggctaacgacgagagcgttcgcgaagctcttcatattgaaaagggtagtaaaggaaaatgggcgcgatgtaatcggactattccatacaatcacgacattgtaagcagcataccatatcacatgaataacagcatcagtggataccgatctcttatttacagtggtgatcacgacatcgcggtcccttttcttgcaactcaagcctggataagatctctcaattactcccccattcataactggaggccatggatgataaacaatcaaatcgctggatacacgagagcttattccaataagatgacatttgctactatcaaagcaagtggacacacggcagagtatagaccaaacgagacctttatcatgttccaaaggtggatcagtggccaacccctgtaacaaaaggcttatgaccttcacctataattatctaccaactaatatccacgttaagcgcagttgtttgtgttgaaatgtttttgttgtttgctttgttgcattcttttgtgctttatgttacaattttatgtgttttatgtactacagttcattattgtgcgttgtgcaattccttttacatttaactagggactaacccgggctagccccggtatatttcctaactatacgtgcaagaaaatgatgttctatttc

SEQ ID NO: 26622 - protein, 458 aa, Arabidopsis thaliana
  peptide (1)..(458): Ceres Seq. ID no. 13495784
  misc_feature (52)..(455): Pfam Name: Serine carboxypeptidase Pfam Description: Serine carboxypeptidase
  misc_feature (26)..(439): Homolog of NCBI NO: 30681910 NR Description: serine carboxypeptidase -related [Arabidopsis
  misc_feature (34)..(458): Homolog of NCBI NO: 15228300 NR Description: serine carboxypeptidase -related [Arabidopsis
  misc_feature (26)..(458): Homolog of NCBI NO: 25289782 NR Description: probable serine carboxypeptidase I
  misc_feature (26)..(458): Homolog of NCBI NO: 15227769 NR Description: serine carboxypeptidase -related [Arabidopsis
  misc_feature (29)..(458): Homolog of NCBI NO: 15227765 NR Description: serine carboxypeptidase -related [Arabidopsis
  misc_feature (27)..(458): Homolog of NCBI NO: 15227772 NR Description: serine carboxypeptidase -related [Arabidopsis
  misc_feature (26)..(458): Homolog of NCBI NO: 15227773 NR Description: serine carboxypeptidase -related [Arabidopsis
  misc_feature (26)..(433): Homolog of NCBI NO: 30681915 NR Description: serine carboxypeptidase -related [Arabidopsis
  misc_feature (26)..(458): Homolog of NCBI NO: 30681900 NR Description: serine carboxypeptidase -related [Arabidopsis
  misc_feature (26)..(458): Homolog of NCBI NO: 18400137 NR Description: serine carboxypeptidase -related [Arabidopsis
PSYHYFIKILCLSVNGLIFRHTENIMSLKIKFLLLLVLYHHVDSASIVKFLPGFEGPLPFELETGYIGIGEDENVQFFYYFIKSENNPKEDPLLIWLNGGPGCSCLGGIIFENGPVGLKFEVFNGSAPSLFSTTYSWTKMANIIFLDQPVGSGFSYSKTPIDKTGDISEVKRTHEFLQKWLSRHPQYFSNPLYVVGDSYSGMIVPALVQEISQGNYICCEPPINLQGYMLGNPVTYMDFEQNFRIPYAYGMGLISDEIYEPMKRICNGNYYNVDPSNTQCLKLTEEYHKCTAKINIHHILTPDCDVTNVTSPDCYYYPYHLIECWANDESVREALHIEKGSKGKWARCNRTIPYNHDIVSSIPYHMNNSISGYRSLIYSGDHDIAVPFLATQAWIRSLNYSPIHNWRPWMINNQIAGYTRAYSNKMTFATIKASGHTAEYRPNETFIMFQRWISGQPL

SEQ ID NO: 26623 - protein, 433 aa, Arabidopsis thaliana
  peptide (1)..(433): Ceres Seq. ID no. 13495785
  misc_feature (27)..(430): Pfam Name: Serine carboxypeptidase Pfam Description: Serine carboxypeptidase
  misc_feature (9)..(433): Homolog of NCBI NO: 15228300 NR Description: serine carboxypeptidase -related [Arabidopsis
  misc_feature (1)..(433): Homolog of NCBI NO: 25289782 NR Description: probable serine carboxypeptidase I
  misc_feature (1)..(433): Homolog of NCBI NO: 15227769 NR Description: serine carboxypeptidase -related [Arabidopsis
  misc_feature (4)..(433): Homolog of NCBI NO: 15227765 NR Description: serine carboxypeptidase -related [Arabidopsis
  misc_feature (2)..(433): Homolog of NCBI NO: 15227772 NR Description: serine carboxypeptidase -related [Arabidopsis
  misc_feature (1)..(433): Homolog of NCBI NO: 15227773 NR Description: serine carboxypeptidase -related [Arabidopsis
  misc_feature (1)..(408): Homolog of NCBI NO: 30681915 NR Description: serine carboxypeptidase -related [Arabidopsis
  misc_feature (1)..(433): Homolog of NCBI NO: 30681900 NR Description: serine carboxypeptidase -related [Arabidopsis
  misc_feature (1)..(433): Homolog of NCBI NO: 18400137 NR Description: serine carboxypeptidase -related [Arabidopsis
  misc_feature (1)..(414): Homolog of NCBI NO: 30681910 NR Description: serine carboxypeptidase -related [Arabidopsis
MSLKIKFLLLLVLYHHVDSASIVKFLPGFEGPLPFELETGYIGIGEDENVQFFYYFIKSENNPKEDPLLIWLNGGPGCSCLGGIIFENGPVGLKFEVFNGSAPSLFSTTYSWTKMANIIFLDQPVGSGFSYSKTPIDKTGDISEVKRTHEFLQKWLSRHPQYFSNPLYVVGDSYSGMIVPALVQEISQGNYICCEPPINLQGYMLGNPVTYMDFEQNFRIPYAYGMGLISDEIYEPMKRICNGNYYNVDPSNTQCLKLTEEYHKCTAKINIHHILTPDCDVTNVTSPDCYYYPYHLIECWANDESVREALHIEKGSKGKWARCNRTIPYNHDIVSSIPYHMNNSISGYRSLIYSGDHDIAVPFLATQAWIRSLNYSPIHNWRPWMINNQIAGYTRAYSNKMTFATIKASGHTAEYRPNETFIMFQRWISGQPL

SEQ ID NO: 26624 - protein, 319 aa, Arabidopsis thaliana
  peptide (1)..(319): Ceres Seq. ID no. 13495786
  misc_feature (1)..(316): Pfam Name: Serine carboxypeptidase Pfam Description: Serine carboxypeptidase
  misc_feature (1)..(319): Homolog of NCBI NO: 15228300 NR Description: serine carboxypeptidase -related [Arabidopsis
  misc_feature (1)..(319): Homolog of NCBI NO: 25289782 NR Description: probable serine carboxypeptidase I
  misc_feature (1)..(319): Homolog of NCBI NO: 15227769 NR Description: serine carboxypeptidase -related [Arabidopsis
  misc_feature (1)..(319): Homolog of NCBI NO: 15227765 NR Description: serine carboxypeptidase -related [Arabidopsis
  misc_feature (1)..(319): Homolog of NCBI NO: 15227772 NR Description: serine carboxypeptidase -related [Arabidopsis
  misc_feature (1)..(319): Homolog of NCBI NO: 15227773 NR Description: serine carboxypeptidase -related [Arabidopsis
  misc_feature (1)..(294): Homolog of NCBI NO: 30681915 NR Description: serine carboxypeptidase -related [Arabidopsis
  misc_feature (1)..(319): Homolog of NCBI NO: 30681900 NR Description: serine carboxypeptidase -related [Arabidopsis
  misc_feature (1)..(319): Homolog of NCBI NO: 18400137 NR Description: serine carboxypeptidase -related [Arabidopsis
  misc_feature (1)..(300): Homolog of NCBI NO: 30681910 NR Description: serine carboxypeptidase -related [Arabidopsis
MANIIFLDQPVGSGFSYSKTPIDKTGDISEVKRTHEFLQKWLSRHPQYFSNPLYVVGDSYSGMIVPALVQEISQGNYICCEPPINLQGYMLGNPVTYMDFEQNFRIPYAYGMGLISDEIYEPMKRICNGNYYNVDPSNTQCLKLTEEYHKCTAKINIHHILTPDCDVTNVTSPDCYYYPYHLIECWANDESVREALHIEKGSKGKWARCNRTIPYNHDIVSSIPYHMNNSISGYRSLIYSGDHDIAVPFLATQAWIRSLNYSPIHNWRPWMINNQIAGYTRAYSNKMTFATIKASGHTAEYRPNETFIMFQRWISGQPL

SEQ ID NO: 26625 - DNA, 1867 bp, Arabidopsis thaliana
  misc_feature (1)..(1867): Ceres Seq. ID no. 12331510
  misc_feature: MA Experiment ID: 108464 Result: Up-regulated in Transcription
  misc_feature: MA Experiment 108464 PARAMETER Experiment Name: At_Germinating_Seeds_cDNA_P Parameter: Age (day) Value: 4 vs. 0
  misc_feature: MA Experiment 108464 PARAMETER Experiment Name: At_Germinating_Seeds_cDNA_P Parameter: Tissue Value: Germinating Seeds
  misc_feature: MA Experiment ID: 108585 Result: Down-regulated in Transcription
  misc_feature: MA Experiment 108585 PARAMETER Experiment Name: At_5mM_NaNP_cDNA_P Parameter: Timepoint (hr) Value: 6
  misc_feature: MA Experiment 108585 PARAMETER Experiment Name: At_5mM_NaNP_cDNA_P Parameter: Tissue Value: Aerial
  misc_feature: MA Experiment 108585 PARAMETER Experiment Name: At_5mM_NaNP_cDNA_P Parameter: Treatment Value: null
  misc_feature: MA Experiment ID: 108608 Result: Down-regulated in Transcription
  misc_feature: MA Experiment 108608 PARAMETER Experiment Name: At_100uM_ABA_cDNA_P Parameter: Timepoint (hr) Value: 1
  misc_feature: MA Experiment 108608 PARAMETER Experiment Name: At_100uM_ABA_cDNA_P Parameter: Tissue Value: Aerial
  misc_feature: MA Experiment 108608 PARAMETER Experiment Name: At_100uM_ABA_cDNA_P Parameter: Treatment Value: 100uM ABA vs. No Treatment
  misc_feature: MA Experiment ID: 20000111 Result: Down-regulated in Transcription
  misc_feature: MA Experiment 20000111 PARAMETER Experiment Name: At_42deg_Heat_cDNA_P Parameter: Temperature (deg C) Value: 42 vs. 22
  misc_feature: MA Experiment 20000111 PARAMETER Experiment Name: At_42deg_Heat_cDNA_P Parameter: Timepoint (hr) Value: 6
  misc_feature: MA Experiment 20000111 PARAMETER Experiment Name: At_42deg_Heat_cDNA_P Parameter: Tissue Value: Aerial
  misc_feature: MA Experiment ID: 20000112 Result: Down-regulated in Transcription
  misc_feature: MA Experiment 20000112 PARAMETER Experiment Name: At_42deg_Heat_cDNA_P Parameter: Temperature (deg C) Value: 42 vs. 22
  misc_feature: MA Experiment 20000112 PARAMETER Experiment Name: At_42deg_Heat_cDNA_P Parameter: Timepoint (hr) Value: 2
  misc_feature: MA Experiment 20000112 PARAMETER Experiment Name: At_42deg_Heat_cDNA_P Parameter: Tissue Value: Aerial
  misc_feature: MA Experiment ID: 20000113 Result: Down-regulated in Transcription
  misc_feature: MA Experiment 20000113 PARAMETER Experiment Name: At_42deg_Heat_cDNA_P Parameter: Temperature (deg C) Value: 42 vs. 22
  misc_feature: MA Experiment 20000113 PARAMETER Experiment Name: At_42deg_Heat_cDNA_P Parameter: Timepoint (hr) Value: 8
  misc_feature: MA Experiment 20000113 PARAMETER Experiment Name: At_42deg_Heat_cDNA_P Parameter: Tissue Value: Aerial
  misc_feature: MA Experiment ID: 20000166 Result: Down-regulated in Transcription
  misc_feature: MA Experiment 20000166 PARAMETER Experiment Name: At_100uM_ABA_P Parameter: Age (day) Value: 14
  misc_feature: MA Experiment 20000166 PARAMETER Experiment Name: At_100uM_ABA_P Parameter: Organism Value: A. thaliana
  misc_feature: MA Experiment 20000166 PARAMETER Experiment Name: At_100uM_ABA_P Parameter: Plant Line Value: WS
  misc_feature: MA Experiment 20000166 PARAMETER Experiment Name: At_100uM_ABA_P Parameter: Timepoint (hr) Value: 1
  misc_feature: MA Experiment 20000166 PARAMETER Experiment Name: At_100uM_ABA_P Parameter: Tissue Value: Aerial
  misc_feature: MA Experiment 20000166 PARAMETER Experiment Name: At_100uM_ABA_P Parameter: Treatment Value: 100uM ABA vs. No Treatment
  misc_feature: MA Experiment ID: 20000171 Result: Down-regulated in Transcription
  misc_feature: MA Experiment 20000171 PARAMETER Experiment Name: At_42deg_Heat_P Parameter: Age (day) Value: 14
  misc_feature: MA Experiment 20000171 PARAMETER Experiment Name: At_42deg_Heat_P Parameter: Organism Value: A. thaliana
  misc_feature: MA Experiment 20000171 PARAMETER Experiment Name: At_42deg_Heat_P Parameter: Plant Line Value: WS
  misc_feature: MA Experiment 20000171 PARAMETER Experiment Name: At_42deg_Heat_P Parameter: Temperature (deg C) Value: 42 vs. 22
  misc_feature: MA Experiment 20000171 PARAMETER Experiment Name: At_42deg_Heat_P Parameter: Timepoint (hr) Value: 1
  misc_feature: MA Experiment 20000171 PARAMETER Experiment Name: At_42deg_Heat_P Parameter: Tissue Value: Aerial
  misc_feature: MA Experiment ID: 20000173 Result: Down-regulated in Transcription
  misc_feature: MA Experiment 20000173 PARAMETER Experiment Name: At_42deg_Heat_P Parameter: Age (day) Value: 14
  misc_feature: MA Experiment 20000173 PARAMETER Experiment Name: At_42deg_Heat_P Parameter: Organism Value: A. thaliana
  misc_feature: MA Experiment 20000173 PARAMETER Experiment Name: At_42deg_Heat_P Parameter: Plant Line Value: WS
  misc_feature: MA Experiment 20000173 PARAMETER Experiment Name: At_42deg_Heat_P Parameter: Temperature (deg C) Value: 42 vs. 22
  misc_feature: MA Experiment 20000173 PARAMETER Experiment Name: At_42deg_Heat_P Parameter: Timepoint (hr) Value: 6
  misc_feature: MA Experiment 20000173 PARAMETER Experiment Name: At_42deg_Heat_P Parameter: Tissue Value: Aerial
  misc_feature: MA Experiment ID: 20000184 Result: Down-regulated in Transcription
  misc_feature: MA Experiment 20000184 PARAMETER Experiment Name: At_Shoots__P Parameter: Age (day) Value: 7
  misc_feature: MA Experiment 20000184 PARAMETER Experiment Name: At_Shoots__P Parameter: Tissue Value: Shoots vs. Whole Plant
  misc_feature: MA Experiment ID: 20000224 Result: Up-regulated in Transcription
  misc_feature: MA Experiment ID: 20000227 Result: Up-regulated in Transcription
  misc_feature: MA Experiment 20000227 PARAMETER Experiment Name: At_Root-Tips-vs-Tops_P Parameter: Tissue Value: Root Tips vs. Root Tops
  misc_feature: MA Experiment ID: 20000436 Result: Down-regulated in Transcription
  misc_feature: MA Experiment 20000436 PARAMETER Experiment Name: At_Drought_P Parameter: Age (day) Value: 7
  misc_feature: MA Experiment 20000436 PARAMETER Experiment Name: At_Drought_P Parameter: Organism Value: A. thaliana
  misc_feature: MA Experiment 20000436 PARAMETER Experiment Name: At_Drought_P Parameter: Plant Line Value: WS
  misc_feature: MA Experiment 20000436 PARAMETER Experiment Name: At_Drought_P Parameter: Timepoint (hr) Value: 12
  misc_feature: MA Experiment 20000436 PARAMETER Experiment Name: At_Drought_P Parameter: Tissue Value: Whole Plant
  misc_feature: MA Experiment 20000436 PARAMETER Experiment Name: At_Drought_P Parameter: Treatment Value: Drought vs. No Drought
  misc_feature: MA Experiment ID: 20000437 Result: Down-regulated in Transcription
  misc_feature: MA Experiment 20000437 PARAMETER Experiment Name: At_Drought_P Parameter: Age (day) Value: 8
  misc_feature: MA Experiment 20000437 PARAMETER Experiment Name: At_Drought_P Parameter: Organism Value: A. thaliana
  misc_feature: MA Experiment 20000437 PARAMETER Experiment Name: At_Drought_P Parameter: Plant Line Value: WS
  misc_feature: MA Experiment 20000437 PARAMETER Experiment Name: At_Drought_P Parameter: Timepoint (hr) Value: 24
  misc_feature: MA Experiment 20000437 PARAMETER Experiment Name: At_Drought_P Parameter: Tissue Value: Whole Plant
  misc_feature: MA Experiment 20000437 PARAMETER Experiment Name: At_Drought_P Parameter: Treatment Value: Drought vs. No Drought
  misc_feature: MA Experiment ID: 20000794 Result: Up-regulated in Transcription
  misc_feature: MA Experiment 20000794 PARAMETER Experiment Name: At_Petals_P Parameter: Age (day) Value: 23-25 days
  misc_feature: MA Experiment 20000794 PARAMETER Experiment Name: At_Petals_P Parameter: Plant Line Value: WS
  misc_feature: MA Experiment 20000794 PARAMETER Experiment Name: At_Petals_P Parameter: Tissue Value: Petals vs. Whole plant
  misc_feature: MA Experiment ID: 20001247 Result: Up-regulated in Transcription
  misc_feature: MA Experiment 20001247 PARAMETER Experiment Name: At_Far-red-induction_P Parameter: Age (day) Value: 7
  misc_feature: MA Experiment 20001247 PARAMETER Experiment Name: At_Far-red-induction_P Parameter: Light Value: Far-red vs. White
  misc_feature: MA Experiment 20001247 PARAMETER Experiment Name: At_Far-red-induction_P Parameter: Organism Value: A. thaliana
  misc_feature: MA Experiment 20001247 PARAMETER Experiment Name: At_Far-red-induction_P Parameter: Plant Line Value: Columbia
  misc_feature: MA Experiment 20001247 PARAMETER Experiment Name: At_Far-red-induction_P Parameter: Timepoint (hr) Value: 1
  misc_feature: MA Experiment 20001247 PARAMETER Experiment Name: At_Far-red-induction_P Parameter: Tissue Value: Whole Plant
  misc_feature: MA Experiment ID: 20001451 Result: Up-regulated in Transcription
  misc_feature: MA Experiment 20001451 PARAMETER Experiment Name: At_Far-red-induction_P Parameter: Age (day) Value: 7
  misc_feature: MA Experiment 20001451 PARAMETER Experiment Name: At_Far-red-induction_P Parameter: Light Value: Far-red vs. White
  misc_feature: MA Experiment 20001451 PARAMETER Experiment Name: At_Far-red-induction_P Parameter: Organism Value: A. thaliana
  misc_feature: MA Experiment 20001451 PARAMETER Experiment Name: At_Far-red-induction_P Parameter: Plant Line Value: Columbia
  misc_feature: MA Experiment 20001451 PARAMETER Experiment Name: At_Far-red-induction_P Parameter: Timepoint (hr) Value: 24
  misc_feature: MA Experiment 20001451 PARAMETER Experiment Name: At_Far-red-induction_P Parameter: Tissue Value: Whole Plant
acaaccttcgtcttctcttgaaactctcctcatctctctcaagaaagattcaagttcgagtcttagctatgtctggaaactcagaaggactgttagagagctcaggcggcggcgtgggaggttccgtcgaggaggaaaaagatatgaagatggaggaaaccggtgaaggagccggcagcggaggaaaccggtggccaagaccagagactttagctctattgagaatacgttcagagatggataaagcttttcgtgactctactctcaaagctcccttatgggaagaaatttccaggaaaatgatggagcttggttacaagagaagttcaaagaaatgcaaggagaagttcgagaacgtgtacaagtaccacaaacgtaccaaagaaggtcgtaccgggaaatccgaaggcaaaacttaccggtttttcgaagagttagaagctttcgagactctcagttcctatcaacctgaacctgagtcgcaacccgcgaaatcttctgcagtgatcacgaacgcgcccgcaacctcttccttgataccatggattagctctagcaatccatcaaccgaaaaaagttcttcaccgttgaaacatcatcatcaggttagtgtacaacccatcaccacaaaccctaccttcctcgccaagcaaccatcttccacgacgccttttcctttttatagcagcaacaatactactactgttagccagccgccaatttcaaatgacttgatgaacaatgtttcatcgctgaatcttttctcgagctcaacttcttcatctactgcatctgacgaggaagaagatcatcatcaggttaagagctcgagaaagaagaggaagtattggaaagggttgtttacgaagttgacaaaagagttaatggagaaacaagagaagatgcaaaaaaggttcttggaaacactggagtatcgtgagaaagagagaatctcaagagaagaagcttggagggtccaagagatagggagaatcaacagagaacacgaaacattaatccatgagaggtccaatgctgcagctaaagacgctgcaatcatatccttcttacacaaaatctcaggaggacaaccacaacaaccgcaacaacataatcataaaccatcacaaaggaaacaatatcaaagcgatcattcaataacgtttgagagtaaagagccgagggcggttctattggatacaacaataaagatggggaattacgataacaatcattcggtgtctcctagttcttcaagatggcctaaaaccgaggtcgaggccttgataaggataagaaagaatcttgaagctaactatcaagaaaacggtactaagggaccattatgggaagagatctctgcagggatgagaagattgggatacaatagaagcgcgaaacgatgcaaagagaagtgggaaaacatcaacaagtactttaagaaagtcaaagaaagcaacaagaaacgtccccttgattccaagacttgcccttattttcaccagctcgaagctttgtacaacgagaggaacaaaagtggggcaatgccattgccattgcctctaatggtgactccacagagacagttgcttctctcgcaagaaacccagaccgagtttgagactgatcagagggaaaaagttggtgataaagaagatgaagaagaaggagagagtgaagaagatgaatacgatgaagaagaagagggagaaggagacaatgagacaagtgagttcgagattgtgttgaacaaaacatcttcacctatggacattaacaataatcttttcacctaagtggttttataatcattttattatatacactttcctgtaaaatgaggttgaaggaaaaaaaaaaagcatat

SEQ ID NO: 26626 - protein, 597 aa, Arabidopsis thaliana
  peptide (1)..(597): Ceres Seq. ID no. 12331511
  misc_feature (432)..(476): Pfam Name: Myb-like DNA-binding domain Pfam Description: Myb-like DNA-binding domain
  misc_feature (409)..(555): Homolog of NCBI NO: 25403172 NR Description: protein trihelix DNA-binding protein (GTL1)
  misc_feature (54)..(374): Homolog of NCBI NO: 25403172 NR Description: protein trihelix DNA-binding protein (GTL1)
  misc_feature (409)..(561): Homolog of NCBI NO: 15217472 NR Description: DNA-binding factor, putative; protein id:
  misc_feature (54)..(374): Homolog of NCBI NO: 15217472 NR Description: DNA-binding factor, putative; protein id:
  misc_feature (365)..(513): Homolog of NCBI NO: 38344985 NR Description: OSJNBa0011L07.15 [Oryza sativa (japonica
  misc_feature (30)..(367): Homolog of NCBI NO: 38344985 NR Description: OSJNBa0011L07.15 [Oryza sativa (japonica
  misc_feature (100)..(597): Homolog of NCBI NO: 30699205 NR Description: trihelix DNA-binding protein (GT2) [Arabidopsis
  misc_feature (50)..(597): Homolog of NCBI NO: 21592726 NR Description: trihelix DNA-binding protein (GT2) [Arabidopsis
  misc_feature (23)..(597): Homolog of NCBI NO: 2664202 NR Description: GT2 [Arabidopsis thaliana]
  misc_feature (23)..(597): Homolog of NCBI NO: 15223771 NR Description: trihelix DNA-binding protein (GT2)
NLRLLLKLSSSLSRKIQVRVLAMSGNSEGLLESSGGGVGGSVEEEKDMKMEETGEGAGSGGNRWPRPETLALLRIRSEMDKAFRDSTLKAPLWEEISRKMMELGYKRSSKKCKEKFENVYKYHKRTKEGRTGKSEGKTYRFFEELEAFETLSSYQPEPESQPAKSSAVITNAPATSSLIPWISSSNPSTEKSSSPLKHHHQVSVQPITTNPTFLAKQPSSTTPFPFYSSNNTTTVSQPPISNDLMNNVSSLNLFSSSTSSSTASDEEEDHHQVKSSRKKRKYWKGLFTKLTKELMEKQEKMQKRFLETLEYREKERISREEAWRVQEIGRINREHETLIHERSNAAAKDAAIISFLHKISGGQPQQPQQHNHKPSQRKQYQSDHSITFESKEPRAVLLDTTIKMGNYDNNHSVSPSSSRWPKTEVEALIRIRKNLEANYQENGTKGPLWEEISAGMRRLGYNRSAKRCKEKWENINKYFKKVKESNKKRPLDSKTCPYFHQLEALYNERNKSGAMPLPLPLMVTPQRQLLLSQETQTEFETDQREKVGDKEDEEEGESEEDEYDEEEEGEGDNETSEFEIVLNKTSSPMDINNNLFT

SEQ ID NO: 26627 - protein, 575 aa, Arabidopsis thaliana
  peptide (1)..(575): Ceres Seq. ID no. 12331512
  misc_feature (410)..(454): Pfam Name: Myb-like DNA-binding domain Pfam Description: Myb-like DNA-binding domain
  misc_feature (387)..(533): Homolog of NCBI NO: 25403172 NR Description: protein trihelix DNA-binding protein (GTL1)
  misc_feature (32)..(352): Homolog of NCBI NO: 25403172 NR Description: protein trihelix DNA-binding protein (GTL1)
  misc_feature (387)..(539): Homolog of NCBI NO: 15217472 NR Description: DNA-binding factor, putative; protein id:
  misc_feature (32)..(352): Homolog of NCBI NO: 15217472 NR Description: DNA-binding factor, putative; protein id:
  misc_feature (343)..(491): Homolog of NCBI NO: 38344985 NR Description: OSJNBa0011L07.15 [Oryza sativa (japonica
  misc_feature (8)..(345): Homolog of NCBI NO: 38344985 NR Description: OSJNBa0011L07.15 [Oryza sativa (japonica
  misc_feature (78)..(575): Homolog of NCBI NO: 30699205 NR Description: trihelix DNA-binding protein (GT2) [Arabidopsis
  misc_feature (28)..(575): Homolog of NCBI NO: 21592726 NR Description: trihelix DNA-binding protein (GT2) [Arabidopsis
  misc_feature (1)..(575): Homolog of NCBI NO: 2664202 NR Description: GT2 [Arabidopsis thaliana]
  misc_feature (1)..(575): Homolog of NCBI NO: 15223771 NR Description: trihelix DNA-binding protein (GT2)
MSGNSEGLLESSGGGVGGSVEEEKDMKMEETGEGAGSGGNRWPRPETLALLRIRSEMDKAFRDSTLKAPLWEEISRKMMELGYKRSSKKCKEKFENVYKYHKRTKEGRTGKSEGKTYRFFEELEAFETLSSYQPEPESQPAKSSAVITNAPATSSLIPWISSSNPSTEKSSSPLKHHHQVSVQPITTNPTFLAKQPSSTTPFPFYSSNNTTTVSQPPISNDLMNNVSSLNLFSSSTSSSTASDEEEDHHQVKSSRKKRKYWKGLFTKLTKELMEKQEKMQKRFLETLEYREKERISREEAWRVQEIGRINREHETLIHERSNAAAKDAAIISFLHKISGGQPQQPQQHNHKPSQRKQYQSDHSITFESKEPRAVLLDTTIKMGNYDNNHSVSPSSSRWPKTEVEALIRIRKNLEANYQENGTKGPLWEEISAGMRRLGYNRSAKRCKEKWENINKYFKKVKESNKKRPLDSKTCPYFHQLEALYNERNKSGAMPLPLPLMVTPQRQLLLSQETQTEFETDQREKVGDKEDEEEGESEEDEYDEEEEGEGDNETSEFEIVLNKTSSPMDINNNLFT

SEQ ID NO: 26628 - protein, 550 aa, Arabidopsis thaliana
  peptide (1)..(550): Ceres Seq. ID no. 12331513
  misc_feature (385)..(429): Pfam Name: Myb-like DNA-binding domain Pfam Description: Myb-like DNA-binding domain
  misc_feature (362)..(508): Homolog of NCBI NO: 25403172 NR Description: protein trihelix DNA-binding protein (GTL1)
  misc_feature (7)..(327): Homolog of NCBI NO: 25403172 NR Description: protein trihelix DNA-binding protein (GTL1)
  misc_feature (362)..(514): Homolog of NCBI NO: 15217472 NR Description: DNA-binding factor, putative; protein id:
  misc_feature (7)..(327): Homolog of NCBI NO: 15217472 NR Description: DNA-binding factor, putative; protein id:
  misc_feature (318)..(466): Homolog of NCBI NO: 38344985 NR Description: OSJNBa0011L07.15 [Oryza sativa (japonica
  misc_feature (1)..(320): Homolog of NCBI NO: 38344985 NR Description: OSJNBa0011L07.15 [Oryza sativa (japonica
  misc_feature (53)..(550): Homolog of NCBI NO: 30699205 NR Description: trihelix DNA-binding protein (GT2) [Arabidopsis
  misc_feature (3)..(550): Homolog of NCBI NO: 21592726 NR Description: trihelix DNA-binding protein (GT2) [Arabidopsis
  misc_feature (1)..(550): Homolog of NCBI NO: 2664202 NR Description: GT2 [Arabidopsis thaliana]
  misc_feature (1)..(550): Homolog of NCBI NO: 15223771 NR Description: trihelix DNA-binding protein (GT2)
MKMEETGEGAGSGGNRWPRPETLALLRIRSEMDKAFRDSTLKAPLWEEISRKMMELGYKRSSKKCKEKFENVYKYHKRTKEGRTGKSEGKTYRFFEELEAFETLSSYQPEPESQPAKSSAVITNAPATSSLIPWISSSNPSTEKSSSPLKHHHQVSVQPITTNPTFLAKQPSSTTPFPFYSSNNTTTVSQPPISNDLMNNVSSLNLFSSSTSSSTASDEEEDHHQVKSSRKKRKYWKGLFTKLTKELMEKQEKMQKRFLETLEYREKERISREEAWRVQEIGRINREHETLIHERSNAAAKDAAIISFLHKISGGQPQQPQQHNHKPSQRKQYQSDHSITFESKEPRAVLLDTTIKMGNYDNNHSVSPSSSRWPKTEVEALIRIRKNLEANYQENGTKGPLWEEISAGMRRLGYNRSAKRCKEKWENINKYFKKVKESNKKRPLDSKTCPYFHQLEALYNERNKSGAMPLPLPLMVTPQRQLLLSQETQTEFETDQREKVGDKEDEEEGESEEDEYDEEEEGEGDNETSEFEIVLNKTSSPMDINNNLFT

SEQ ID NO: 26629 - DNA, 796 bp, Arabidopsis thaliana
  misc_feature (1)..(796): Ceres Seq. ID no. 12721008
  misc_feature: MA Experiment ID: 108434 Result: Down-regulated in Transcription
  misc_feature: MA Experiment 108434 PARAMETER Experiment Name: At_Root_Tips_cDNA_P Parameter: Tissue Value: Root Tips
agtcctcgcctcctctacaaaggtgtaagtaagtagctgctgcgttaatctcaaagaagacgaatacaagtctttctgttttgctcaattcatcacaaccacaagaagacgattttttattcttgtttccaaactgaatctgagatgggcgagccactaggactgctccaggtgactgttattcaaggaaagaaactggtgatccgagatttcaagtcaagtgatccttatgtgattgtcaaattaggaaatgagtcagcgaagaccaaagtgatcaacaattgcctgaatccagtgtggaatgaggaactgaactttactctgaaagatcctgcagcagttctcgcattggaagtgtttgataaagataggttcaaggcagatgacaagatgggccatgcctctctcagccttcaaccgcttatctcagttgccagactaagacacgtagtccgcgtgtcctctggtgagacaacgcttaggaaagtattaccggatccagagaactgcgtatctcgagagagcacaatcagttgcatagacggagaggtggtgcagagtgtgtggctgaggctgtgtgctgttgaatcgggtgagattgagttgaagataaagttgattgatcctcctggaacaaacaagtagcaatagggtattttatgttagtttgtaacacgagacccgtttgtgactagtataattgcaacatcagtatggtcttgtcttgtttccaagtgtgcctttgtgactactcaccaatttattaggaatctttgagatacattgttctgctctc

SEQ ID NO: 26630 - protein, 166 aa, Arabidopsis thaliana
  peptide (1)..(166): Ceres Seq. ID no. 12721009
  misc_feature (8)..(87): Pfam Name: C2 domain Pfam Description: C2 domain
  misc_feature (1)..(163): Homolog of NCBI NO: 33146446 NR Description: zinc finger and C2 domain protein-like
  misc_feature (1)..(163): Homolog of NCBI NO: 18408493 NR Description: expressed protein
  misc_feature (3)..(157): Homolog of NCBI NO: 15226306 NR Description: hypothetical protein
  misc_feature (1)..(163): Homolog of NCBI NO: 25405940 NR Description: protein T1N15.21 [imported] - Arabidopsis
  misc_feature (1)..(163): Homolog of NCBI NO: 15221907 NR Description: unknown protein; protein id: At1g48590.1
  misc_feature (1)..(164): Homolog of NCBI NO: 15219500 NR Description: hypothetical protein; protein id: At1g73580.1
  misc_feature (1)..(159): Homolog of NCBI NO: 19386828 NR Description: putative zinc finger and C2 domain protein
  misc_feature (3)..(163): Homolog of NCBI NO: 18409675 NR Description: zinc finger and C2 domain protein, putative
  misc_feature (1)..(164): Homolog of NCBI NO: 30684739 NR Description: C2 domain-containing protein [Arabidopsis
  misc_feature (1)..(166): Homolog of NCBI NO: 15238792 NR Description: putative protein
MGEPLGLLQVTVIQGKKLVIRDFKSSDPYVIVKLGNESAKTKVINNCLNPVWNEELNFTLKDPAAVLALEVFDKDRFKADDKMGHASLSLQPLISVARLRHVVRVSSGETTLRKVLPDPENCVSRESTISCIDGEVVQSVWLRLCAVESGEIELKIKLIDPPGTNK

SEQ ID NO: 26631 - protein, 84 aa, Arabidopsis thaliana
  peptide (1)..(84): Ceres Seq. ID no. 12721010
  misc_feature (1)..(82): Homolog of NCBI NO: 15219500 NR Description: hypothetical protein; protein id: At1g73580.1
  misc_feature (1)..(77): Homolog of NCBI NO: 19386828 NR Description: putative zinc finger and C2 domain protein
  misc_feature (1)..(81): Homolog of NCBI NO: 18409675 NR Description: zinc finger and C2 domain protein, putative
  misc_feature (1)..(82): Homolog of NCBI NO: 30684739 NR Description: C2 domain-containing protein [Arabidopsis
  misc_feature (1)..(84): Homolog of NCBI NO: 15238792 NR Description: putative protein
  misc_feature (1)..(81): Homolog of NCBI NO: 33146446 NR Description: zinc finger and C2 domain protein-like
  misc_feature (1)..(81): Homolog of NCBI NO: 18408493 NR Description: expressed protein
  misc_feature (1)..(75): Homolog of NCBI NO: 15226306 NR Description: hypothetical protein
  misc_feature (1)..(81): Homolog of NCBI NO: 25405940 NR Description: protein T1N15.21 [imported] - Arabidopsis
  misc_feature (1)..(81): Homolog of NCBI NO: 15221907 NR Description: unknown protein; protein id: At1g48590.1
MGHASLSLQPLISVARLRHVVRVSSGETTLRKVLPDPENCVSRESTISCIDGEVVQSVWLRLCAVESGEIELKIKLIDPPGTNK

SEQ ID NO: 26632 - DNA, 560 bp, Arabidopsis thaliana
  misc_feature (1)..(560): Ceres Seq. ID no. 12339185
  misc_feature: MA Experiment ID: 108434 Result: Down-regulated in Transcription
  misc_feature: MA Experiment 108434 PARAMETER Experiment Name: At_Root_Tips_cDNA_P Parameter: Tissue Value: Root Tips
  misc_feature: MA Experiment ID: 108462 Result: Up-regulated in Transcription
  misc_feature: MA Experiment 108462 PARAMETER Experiment Name: At_Germinating_Seeds_cDNA_P Parameter: Age (day) Value: 2 vs. 0
  misc_feature: MA Experiment 108462 PARAMETER Experiment Name: At_Germinating_Seeds_cDNA_P Parameter: Tissue Value: Germinating Seeds
  misc_feature: MA Experiment ID: 108464 Result: Up-regulated in Transcription
  misc_feature: MA Experiment 108464 PARAMETER Experiment Name: At_Germinating_Seeds_cDNA_P Parameter: Age (day) Value: 4 vs. 0
  misc_feature: MA Experiment 108464 PARAMETER Experiment Name: At_Germinating_Seeds_cDNA_P Parameter: Tissue Value: Germinating Seeds
  misc_feature: MA Experiment ID: 108469 Result: Up-regulated in Transcription
  misc_feature: MA Experiment ID: 108473 Result: Up-regulated in Transcription
  misc_feature: MA Experiment 108473 PARAMETER Experiment Name: At_Drought_Flowers_cDNA_P Parameter: Timepoint (hr) Value: 7 d
  misc_feature: MA Experiment 108473 PARAMETER Experiment Name: At_Drought_Flowers_cDNA_P Parameter: Tissue Value: Flower
  misc_feature: MA Experiment 108473 PARAMETER Experiment Name: At_Drought_Flowers_cDNA_P Parameter: Treatment Value: Drought vs. No Drought
  misc_feature: MA Experiment ID: 108488 Result: Down-regulated in Transcription
  misc_feature: MA Experiment ID: 108501 Result: Down-regulated in Transcription
  misc_feature: MA Experiment 108501 PARAMETER Experiment Name: At_ap2_floral_buds_cDNA_P Parameter: Plant Line Value: ap2 (Ler.)
  misc_feature: MA Experiment 108501 PARAMETER Experiment Name: At_ap2_floral_buds_cDNA_P Parameter: Tissue Value: Closed Flower
  misc_feature: MA Experiment ID: 108572 Result: Up-regulated in Transcription
  misc_feature: MA Experiment 108572 PARAMETER Experiment Name: At_Drought_cDNA_P Parameter: Timepoint (hr) Value: 1
  misc_feature: MA Experiment 108572 PARAMETER Experiment Name: At_Drought_cDNA_P Parameter: Tissue Value: Aerial
  misc_feature: MA Experiment 108572 PARAMETER Experiment Name: At_Drought_cDNA_P Parameter: Treatment Value: Drought vs. No Drought
  misc_feature: MA Experiment ID: 108585 Result: Up-regulated in Transcription
  misc_feature: MA Experiment 108585 PARAMETER Experiment Name: At_5mM_NaNP_cDNA_P Parameter: Timepoint (hr) Value: 6
  misc_feature: MA Experiment 108585 PARAMETER Experiment Name: At_5mM_NaNP_cDNA_P Parameter: Tissue Value: Aerial
  misc_feature: MA Experiment 108585 PARAMETER Experiment Name: At_5mM_NaNP_cDNA_P Parameter: Treatment Value: null
  misc_feature: MA Experiment ID: 108595 Result: Up-regulated in Transcription
  misc_feature: MA Experiment 108595 PARAMETER Experiment Name: At_Ler-pi_Ovule_cDNA_P Parameter: Plant Line Value: null
  misc_feature: MA Experiment ID: 108605 Result: Up-regulated in Transcription
  misc_feature: MA Experiment 108605 PARAMETER Experiment Name: At_100uM_ABA_cDNA_P Parameter: Timepoint (hr) Value: 6
  misc_feature: MA Experiment 108605 PARAMETER Experiment Name: At_100uM_ABA_cDNA_P Parameter: Tissue Value: Aerial
  misc_feature: MA Experiment 108605 PARAMETER Experiment Name: At_100uM_ABA_cDNA_P Parameter: Treatment Value: 100uM ABA vs. No Treatment
  misc_feature: MA Experiment ID: 108607 Result: Up-regulated in Transcription
  misc_feature: MA Experiment 108607 PARAMETER Experiment Name: At_100uM_ABA_cDNA_P Parameter: Timepoint (hr) Value: 4
  misc_feature: MA Experiment 108607 PARAMETER Experiment Name: At_100uM_ABA_cDNA_P Parameter: Tissue Value: Aerial
  misc_feature: MA Experiment 108607 PARAMETER Experiment Name: At_100uM_ABA_cDNA_P Parameter: Treatment Value: 100uM ABA vs. No Treatment
  misc_feature: MA Experiment ID: 108608 Result: Up-regulated in Transcription
  misc_feature: MA Experiment 108608 PARAMETER Experiment Name: At_100uM_ABA_cDNA_P Parameter: Timepoint (hr) Value: 1
  misc_feature: MA Experiment 108608 PARAMETER Experiment Name: At_100uM_ABA_cDNA_P Parameter: Tissue Value: Aerial
  misc_feature: MA Experiment 108608 PARAMETER Experiment Name: At_100uM_ABA_cDNA_P Parameter: Treatment Value: 100uM ABA vs. No Treatment
  misc_feature: MA Experiment ID: 108668 Result: Up-regulated in Transcription
  misc_feature: MA Experiment 108668 PARAMETER Experiment Name: At_2mM_SA_cDNA_P Parameter: Plant Line Value: WS
  misc_feature: MA Experiment 108668 PARAMETER Experiment Name: At_2mM_SA_cDNA_P Parameter: Timepoint (hr) Value: 6
  misc_feature: MA Experiment 108668 PARAMETER Experiment Name: At_2mM_SA_cDNA_P Parameter: Treatment Value: 2mM SA vs. No Treatment
  misc_feature: MA Experiment ID: 20000069 Result: Up-regulated in Transcription
  misc_feature: MA Experiment 20000069 PARAMETER Experiment Name: At_100uM_ABA_Mutants_cDNA_P Parameter: Plant Line Value: CS23
  misc_feature: MA Experiment 20000069 PARAMETER Experiment Name: At_100uM_ABA_Mutants_cDNA_P Parameter: Timepoint (hr) Value: 6
  misc_feature: MA Experiment 20000069 PARAMETER Experiment Name: At_100uM_ABA_Mutants_cDNA_P Parameter: Tissue Value: Aerial
  misc_feature: MA Experiment 20000069 PARAMETER Experiment Name: At_100uM_ABA_Mutants_cDNA_P Parameter: Treatment Value: 100uM ABA vs. No Treatment
  misc_feature: MA Experiment ID: 20000070 Result: Up-regulated in Transcription
  misc_feature: MA Experiment 20000070 PARAMETER Experiment Name: At_100uM_ABA_Mutants_cDNA_P Parameter: Plant Line Value: CS24
  misc_feature: MA Experiment 20000070 PARAMETER Experiment Name: At_100uM_ABA_Mutants_cDNA_P Parameter: Timepoint (hr) Value: 6
  misc_feature: MA Experiment 20000070 PARAMETER Experiment Name: At_100uM_ABA_Mutants_cDNA_P Parameter: Tissue Value: Aerial
  misc_feature: MA Experiment 20000070 PARAMETER Experiment Name: At_100uM_ABA_Mutants_cDNA_P Parameter: Treatment Value: 100uM ABA vs. No Treatment
  misc_feature: MA Experiment ID: 20000071 Result: Up-regulated in Transcription
  misc_feature: MA Experiment 20000071 PARAMETER Experiment Name: At_100uM_ABA_Mutants_cDNA_P Parameter: Plant Line Value: CS8104
  misc_feature: MA Experiment 20000071 PARAMETER Experiment Name: At_100uM_ABA_Mutants_cDNA_P Parameter: Timepoint (hr) Value: 6
  misc_feature: MA Experiment 20000071 PARAMETER Experiment Name: At_100uM_ABA_Mutants_cDNA_P Parameter: Tissue Value: Aerial
  misc_feature: MA Experiment 20000071 PARAMETER Experiment Name: At_100uM_ABA_Mutants_cDNA_P Parameter: Treatment Value: 100uM ABA vs. No Treatment
  misc_feature: MA Experiment ID: 20000087 Result: Up-regulated in Transcription
  misc_feature: MA Experiment 20000087 PARAMETER Experiment Name: At_100uM_ABA_Mutants_cDNA_P Parameter: Plant Line Value: WS
  misc_feature: MA Experiment 20000087 PARAMETER Experiment Name: At_100uM_ABA_Mutants_cDNA_P Parameter: Timepoint (hr) Value: 6
  misc_feature: MA Experiment 20000087 PARAMETER Experiment Name: At_100uM_ABA_Mutants_cDNA_P Parameter: Tissue Value: Aerial
  misc_feature: MA Experiment 20000087 PARAMETER Experiment Name: At_100uM_ABA_Mutants_cDNA_P Parameter: Treatment Value: 100uM ABA vs. No Treatment
  misc_feature: MA Experiment ID: 20000089 Result: Up-regulated in Transcription
  misc_feature: MA Experiment ID: 20000090 Result: Up-regulated in Transcription
  misc_feature: MA Experiment ID: 20000112 Result: Up-regulated in Transcription
  misc_feature: MA Experiment 20000112 PARAMETER Experiment Name: At_42deg_Heat_cDNA_P Parameter: Temperature (deg C) Value: 42 vs. 22
  misc_feature: MA Experiment 20000112 PARAMETER Experiment Name: At_42deg_Heat_cDNA_P Parameter: Timepoint (hr) Value: 2
  misc_feature: MA Experiment 20000112 PARAMETER Experiment Name: At_42deg_Heat_cDNA_P Parameter: Tissue Value: Aerial
  misc_feature: MA Experiment ID: 20000117 Result: Up-regulated in Transcription
  misc_feature: MA Experiment 20000117 PARAMETER Experiment Name: At_100uM_ABA_Mutants_cDNA_P Parameter: Plant Line Value: Columbia
  misc_feature: MA Experiment 20000117 PARAMETER Experiment Name: At_100uM_ABA_Mutants_cDNA_P Parameter: Timepoint (hr) Value: 6
  misc_feature: MA Experiment 20000117 PARAMETER Experiment Name: At_100uM_ABA_Mutants_cDNA_P Parameter: Tissue Value: Aerial
  misc_feature: MA Experiment 20000117 PARAMETER Experiment Name: At_100uM_ABA_Mutants_cDNA_P Parameter: Treatment Value: 100uM ABA vs. No Treatment
  misc_feature: MA Experiment ID: 20000166 Result: Up-regulated in Transcription
  misc_feature: MA Experiment 20000166 PARAMETER Experiment Name: At_100uM_ABA_P Parameter: Age (day) Value: 14
  misc_feature: MA Experiment 20000166 PARAMETER Experiment Name: At_100uM_ABA_P Parameter: Organism Value: A. thaliana
  misc_feature: MA Experiment 20000166 PARAMETER Experiment Name: At_100uM_ABA_P Parameter: Plant Line Value: WS
  misc_feature: MA Experiment 20000166 PARAMETER Experiment Name: At_100uM_ABA_P Parameter: Timepoint (hr) Value: 1
  misc_feature: MA Experiment 20000166 PARAMETER Experiment Name: At_100uM_ABA_P Parameter: Tissue Value: Aerial
  misc_feature: MA Experiment 20000166 PARAMETER Experiment Name: At_100uM_ABA_P Parameter: Treatment Value: 100uM ABA vs. No Treatment
  misc_feature: MA Experiment ID: 20000169 Result: Up-regulated in Transcription
  misc_feature: MA Experiment 20000169 PARAMETER Experiment Name: At_100uM_ABA_P Parameter: Age (day) Value: 14
  misc_feature: MA Experiment 20000169 PARAMETER Experiment Name: At_100uM_ABA_P Parameter: Organism Value: A. thaliana
  misc_feature: MA Experiment 20000169 PARAMETER Experiment Name: At_100uM_ABA_P Parameter: Plant Line Value: WS
  misc_feature: MA Experiment 20000169 PARAMETER Experiment Name: At_100uM_ABA_P Parameter: Timepoint (hr) Value: 6
  misc_feature: MA Experiment 20000169 PARAMETER Experiment Name: At_100uM_ABA_P Parameter: Tissue Value: Aerial
  misc_feature: MA Experiment 20000169 PARAMETER Experiment Name: At_100uM_ABA_P Parameter: Treatment Value: 100uM ABA vs. No Treatment
  misc_feature: MA Experiment ID: 20000179 Result: Down-regulated in Transcription
  misc_feature: MA Experiment 20000179 PARAMETER Experiment Name: At_Germinating_Seeds_P Parameter: Age (hr) Value: 6 vs. 0
  misc_feature: MA Experiment 20000179 PARAMETER Experiment Name: At_Germinating_Seeds_P Parameter: Tissue Value: Germinating Seeds
  misc_feature: MA Experiment ID: 20000182 Result: Up-regulated in Transcription
  misc_feature: MA Experiment 20000182 PARAMETER Experiment Name: At_2mM_SA_P Parameter: Age (day) Value: 14
  misc_feature: MA Experiment 20000182 PARAMETER Experiment Name: At_2mM_SA_P Parameter: Organism Value: A. thaliana
  misc_feature: MA Experiment 20000182 PARAMETER Experiment Name: At_2mM_SA_P Parameter: Plant Line Value: WS
  misc_feature: MA Experiment 20000182 PARAMETER Experiment Name: At_2mM_SA_P Parameter: Timepoint (hr) Value: 6
  misc_feature: MA Experiment 20000182 PARAMETER Experiment Name: At_2mM_SA_P Parameter: Tissue Value: Aerial
  misc_feature: MA Experiment 20000182 PARAMETER Experiment Name: At_2mM_SA_P Parameter: Treatment Value: 2mM SA vs. No Treatment
  misc_feature: MA Experiment ID: 20000184 Result: Down-regulated in Transcription
  misc_feature: MA Experiment 20000184 PARAMETER Experiment Name: At_Shoots__P Parameter: Age (day) Value: 7
  misc_feature: MA Experiment 20000184 PARAMETER Experiment Name: At_Shoots__P Parameter: Tissue Value: Shoots vs. Whole Plant
  misc_feature: MA Experiment ID: 20000185 Result: Up-regulated in Transcription
  misc_feature: MA Experiment 20000185 PARAMETER Experiment Name: At_Roots__P Parameter: Age (day) Value: 7 vs. 21
  misc_feature: MA Experiment 20000185 PARAMETER Experiment Name: At_Roots__P Parameter: Organism Value: A. thaliana
  misc_feature: MA Experiment 20000185 PARAMETER Experiment Name: At_Roots__P Parameter: Tissue Value: Roots vs. Whole Plant
  misc_feature: MA Experiment ID: 20000224 Result: Up-regulated in Transcription
  misc_feature: MA Experiment ID: 20000227 Result: Down-regulated in Transcription
  misc_feature: MA Experiment 20000227 PARAMETER Experiment Name: At_Root-Tips-vs-Tops_P Parameter: Tissue Value: Root Tips vs. Root Tops
  misc_feature: MA Experiment ID: 20000234 Result: Down-regulated in Transcription
  misc_feature: MA Experiment 20000234 PARAMETER Experiment Name: At_Siliques_P Parameter: Age (day) Value: 21
  misc_feature: MA Experiment 20000234 PARAMETER Experiment Name: At_Siliques_P Parameter: Organism Value: A. thaliana
  misc_feature: MA Experiment 20000234 PARAMETER Experiment Name: At_Siliques_P Parameter: Plant Line Value: WS
  misc_feature: MA Experiment 20000234 PARAMETER Experiment Name: At_Siliques_P Parameter: Tissue Value: Less Than 5mm Siliques vs. Whole Plant
  misc_feature: MA Experiment ID: 20000235 Result: Down-regulated in Transcription
  misc_feature: MA Experiment 20000235 PARAMETER Experiment Name: At_Siliques_P Parameter: Age (day) Value: 21
  misc_feature: MA Experiment 20000235 PARAMETER Experiment Name: At_Siliques_P Parameter: Organism Value: A. thaliana
  misc_feature: MA Experiment 20000235 PARAMETER Experiment Name: At_Siliques_P Parameter: Plant Line Value: WS
  misc_feature: MA Experiment 20000235 PARAMETER Experiment Name: At_Siliques_P Parameter: Tissue Value: 5-10mm Siliques vs. Whole Plant
  misc_feature: MA Experiment ID: 20000264 Result: Down-regulated in Transcription
  misc_feature: MA Experiment 20000264 PARAMETER Experiment Name: At_Open_Flower_P Parameter: Age (day) Value: 21
  misc_feature: MA Experiment 20000264 PARAMETER Experiment Name: At_Open_Flower_P Parameter: Plant Line Value: WS
  misc_feature: MA Experiment 20000264 PARAMETER Experiment Name: At_Open_Flower_P Parameter: Tissue Value: Open Flower vs. Whole Plant
  misc_feature: MA Experiment ID: 20000286 Result: Down-regulated in Transcription
  misc_feature: MA Experiment 20000286 PARAMETER Experiment Name: At_Open_Flower_P Parameter: Age (day) Value: 21
  misc_feature: MA Experiment 20000286 PARAMETER Experiment Name: At_Open_Flower_P Parameter: Plant Line Value: WS
  misc_feature: MA Experiment 20000286 PARAMETER Experiment Name: At_Open_Flower_P Parameter: Tissue Value: Half Open vs. Whole Plant
  misc_feature: MA Experiment ID: 20000438 Result: Down-regulated in Transcription
  misc_feature: MA Experiment 20000438 PARAMETER Experiment Name: At_Shoots__P Parameter: Age (day) Value: 14
  misc_feature: MA Experiment 20000438 PARAMETER Experiment Name: At_Shoots__P Parameter: Tissue Value: Shoots vs. Whole Plant
  misc_feature: MA Experiment ID: 20000439 Result: Up-regulated in Transcription
  misc_feature: MA Experiment 20000439 PARAMETER Experiment Name: At_Roots__P Parameter: Age (day) Value: 14 vs. 21
  misc_feature: MA Experiment 20000439 PARAMETER Experiment Name: At_Roots__P Parameter: Organism Value: A. thaliana
  misc_feature: MA Experiment 20000439 PARAMETER Experiment Name: At_Roots__P Parameter: Tissue Value: Roots vs. Whole Plant
  misc_feature: MA Experiment ID: 20000453 Result: Up-regulated in Transcription
  misc_feature: MA Experiment 20000453 PARAMETER Experiment Name: At_100uM_ABA_P Parameter: Age (day) Value: 15
  misc_feature: MA Experiment 20000453 PARAMETER Experiment Name: At_100uM_ABA_P Parameter: Organism Value: A. thaliana
  misc_feature: MA Experiment 20000453 PARAMETER Experiment Name: At_100uM_ABA_P Parameter: Plant Line Value: WS
  misc_feature: MA Experiment 20000453 PARAMETER Experiment Name: At_100uM_ABA_P Parameter: Timepoint (hr) Value: 24
  misc_feature: MA Experiment 20000453 PARAMETER Experiment Name: At_100uM_ABA_P Parameter: Tissue Value: Aerial
  misc_feature: MA Experiment 20000453 PARAMETER Experiment Name: At_100uM_ABA_P Parameter: Treatment Value: 100uM ABA vs. No Treatment
  misc_feature: MA Experiment ID: 20000527 Result: Down-regulated in Transcription
  misc_feature: MA Experiment 20000527 PARAMETER Experiment Name: At_10percent_PEG_P Parameter: Age (day) Value: 20
  misc_feature: MA Experiment 20000527 PARAMETER Experiment Name: At_10percent_PEG_P Parameter: Organism Value: A. thaliana
  misc_feature: MA Experiment 20000527 PARAMETER Experiment Name: At_10percent_PEG_P Parameter: Plant Line Value: WS
  misc_feature: MA Experiment 20000527 PARAMETER Experiment Name: At_10percent_PEG_P Parameter: Timepoint (day) Value: 20
  misc_feature: MA Experiment 20000527 PARAMETER Experiment Name: At_10percent_PEG_P Parameter: Tissue Value: Whole Plant
  misc_feature: MA Experiment 20000527 PARAMETER Experiment Name: At_10percent_PEG_P Parameter: Treatment Value: 10percent PEG vs. No Treatment
  misc_feature: MA Experiment ID: 20000573 Result: Up-regulated in Transcription
  misc_feature: MA Experiment 20000573 PARAMETER Experiment Name: At_100uM_ABA_Mutants__P Parameter: Organism Value: A. thaliana
  misc_feature: MA Experiment 20000573 PARAMETER Experiment Name: At_100uM_ABA_Mutants__P Parameter: Plant Line Value: CS22 vs. Ler wt
  misc_feature: MA Experiment 20000573 PARAMETER Experiment Name: At_100uM_ABA_Mutants__P Parameter: Timepoint (hr) Value: N/A
  misc_feature: MA Experiment 20000573 PARAMETER Experiment Name: At_100uM_ABA_Mutants__P Parameter: Tissue Value: Whole Plant
  misc_feature: MA Experiment 20000573 PARAMETER Experiment Name: At_100uM_ABA_Mutants__P Parameter: Treatment Value: None
  misc_feature: MA Experiment ID: 20001557 Result: Down-regulated in Transcription
  misc_feature: MA Experiment 20001557 PARAMETER Experiment Name: At_Drought_Soil_Dry_P Parameter: Age (day) Value: 27
  misc_feature: MA Experiment 20001557 PARAMETER Experiment Name: At_Drought_Soil_Dry_P Parameter: Organism Value: A. thaliana
  misc_feature: MA Experiment 20001557 PARAMETER Experiment Name: At_Drought_Soil_Dry_P Parameter: Plant Line Value: WS
  misc_feature: MA Experiment 20001557 PARAMETER Experiment Name: At_Drought_Soil_Dry_P Parameter: Post Timepoint (hr) Value: 3
  misc_feature: MA Experiment 20001557 PARAMETER Experiment Name: At_Drought_Soil_Dry_P Parameter: Post-Treatment Value: Re-Water vs. No Drought
  misc_feature: MA Experiment 20001557 PARAMETER Experiment Name: At_Drought_Soil_Dry_P Parameter: Timepoint (day) Value: 13
  misc_feature: MA Experiment 20001557 PARAMETER Experiment Name: At_Drought_Soil_Dry_P Parameter: Treatment Value: Drought vs. No Drought
  misc_feature: MA Experiment ID: 20001558 Result: Down-regulated in Transcription
  misc_feature: MA Experiment 20001558 PARAMETER Experiment Name: At_Drought_Soil_Dry_P Parameter: Age (day) Value: 27
  misc_feature: MA Experiment 20001558 PARAMETER Experiment Name: At_Drought_Soil_Dry_P Parameter: Organism Value: A. thaliana
  misc_feature: MA Experiment 20001558 PARAMETER Experiment Name: At_Drought_Soil_Dry_P Parameter: Plant Line Value: WS
  misc_feature: MA Experiment 20001558 PARAMETER Experiment Name: At_Drought_Soil_Dry_P Parameter: Post Timepoint (hr) Value: 6
  misc_feature: MA Experiment 20001558 PARAMETER Experiment Name: At_Drought_Soil_Dry_P Parameter: Post-Treatment Value: Re-Water vs. No Drought
  misc_feature: MA Experiment 20001558 PARAMETER Experiment Name: At_Drought_Soil_Dry_P Parameter: Timepoint (day) Value: 13
  misc_feature: MA Experiment 20001558 PARAMETER Experiment Name: At_Drought_Soil_Dry_P Parameter: Treatment Value: Drought vs. No Drought
  misc_feature: MA Experiment ID: 20001560 Result: Down-regulated in Transcription
  misc_feature: MA Experiment 20001560 PARAMETER Experiment Name: At_Drought_Soil_Dry_P Parameter: Age (day) Value: 28
  misc_feature: MA Experiment 20001560 PARAMETER Experiment Name: At_Drought_Soil_Dry_P Parameter: Organism Value: A. thaliana
  misc_feature: MA Experiment 20001560 PARAMETER Experiment Name: At_Drought_Soil_Dry_P Parameter: Plant Line Value: WS
  misc_feature: MA Experiment 20001560 PARAMETER Experiment Name: At_Drought_Soil_Dry_P Parameter: Post Timepoint (hr) Value: None
  misc_feature: MA Experiment 20001560 PARAMETER Experiment Name: At_Drought_Soil_Dry_P Parameter: Post-Treatment Value: None
  misc_feature: MA Experiment 20001560 PARAMETER Experiment Name: At_Drought_Soil_Dry_P Parameter: Timepoint (day) Value: 14
  misc_feature: MA Experiment 20001560 PARAMETER Experiment Name: At_Drought_Soil_Dry_P Parameter: Treatment Value: Drought vs. No Drought
  misc_feature: MA Experiment ID: 20001905 Result: Up-regulated in Transcription
  misc_feature: MA Experiment 20001905 PARAMETER Experiment Name: At_Drought_Reproduction_P Parameter: Age (day) Value: 40
  misc_feature: MA Experiment 20001905 PARAMETER Experiment Name: At_Drought_Reproduction_P Parameter: Organism Value: A. thaliana
  misc_feature: MA Experiment 20001905 PARAMETER Experiment Name: At_Drought_Reproduction_P Parameter: Plant Line Value: WS
  misc_feature: MA Experiment 20001905 PARAMETER Experiment Name: At_Drought_Reproduction_P Parameter: Timepoint (day) Value: 10
  misc_feature: MA Experiment 20001905 PARAMETER Experiment Name: At_Drought_Reproduction_P Parameter: Tissue Value: Rosettes
  misc_feature: MA Experiment 20001905 PARAMETER Experiment Name: At_Drought_Reproduction_P Parameter: Treatment Value: Drought vs. No Drought
  misc_feature: MA Experiment ID: 20001911 Result: Up-regulated in Transcription
  misc_feature: MA Experiment 20001911 PARAMETER Experiment Name: At_Drought_Reproduction_P Parameter: Age (day) Value: 40
  misc_feature: MA Experiment 20001911 PARAMETER Experiment Name: At_Drought_Reproduction_P Parameter: Organism Value: A. thaliana
  misc_feature: MA Experiment 20001911 PARAMETER Experiment Name: At_Drought_Reproduction_P Parameter: Plant Line Value: WS
  misc_feature: MA Experiment 20001911 PARAMETER Experiment Name: At_Drought_Reproduction_P Parameter: Timepoint (day) Value: 10
  misc_feature: MA Experiment 20001911 PARAMETER Experiment Name: At_Drought_Reproduction_P Parameter: Tissue Value: Flowers
  misc_feature: MA Experiment 20001911 PARAMETER Experiment Name: At_Drought_Reproduction_P Parameter: Treatment Value: Drought vs. No Drought
tcattcaccaaaaaaaactcatcaatcaaacaaaactcttaaaagcttaagaacaaataataaaaatggccggtgaaggagaagtgattgcttgccataccctcgaagtttggaacgagaaggtcaaagacgccaatgaatccaagaaactgattgtgatagacttcacagcatcatggtgtccaccttgccgtttcattgcaccagtgtttgcagagatggctaagaagttcactaatgttgtcttcttcaagatcgatgttgatgaattgcaagctgttgctcaggaattcaaagttgaggcaatgcctacttttgttttcatgaaagaaggcaacatcattgatcgtgttgtcggtgctgcgaaagatgagatcaatgagaagctgatgaagcatggtggtcttgtagcttctgcttgattgatttcagtttctaactctttgcatcataataaagtttttatctttcgtatgaaataaaagtgatgcattgctactgcacatttgtattataactatgttgatttttcgattactggtttgttatctcttggcttc

SEQ ID NO: 26633 - protein, 118 aa, Arabidopsis thaliana
  peptide (1)..(118): Ceres Seq. ID no. 12339186
  misc_feature (2)..(118): Homolog of NCBI NO: 11135265 NR Description: Thioredoxin H-type 2 (TRX-H-2)
  misc_feature (4)..(111): Homolog of NCBI NO: 15230385 NR Description: thioredoxin h; protein id: At3g51030.1, supported
  misc_feature (5)..(117): Homolog of NCBI NO: 11135129 NR Description: Thioredoxin H-type (TRX-H)
  misc_feature (5)..(117): Homolog of NCBI NO: 11494247 NR Description: thioredoxin-h-like protein 1 [Brassica oleracea
  misc_feature (5)..(117): Homolog of NCBI NO: 11135277 NR Description: Thioredoxin H-type 1 (TRX-H-1) (Pollen coat
  misc_feature (1)..(118): Homolog of NCBI NO: 15239136 NR Description: thioredoxin (clone GIF1) (pir||S58118)
  misc_feature (1)..(29): Homolog of NCBI NO: 25405885 NR Description: protein F27F5.21 [imported] - Arabidopsis
  misc_feature (29)..(111): Homolog of NCBI NO: 25405885 NR Description: protein F27F5.21 [imported] - Arabidopsis
  misc_feature (1)..(118): Homolog of NCBI NO: 15219537 NR Description: thioredoxin, putative
  misc_feature (1)..(118): Homolog of NCBI NO: 1388084 NR Description: thioredoxin h
MAGEGEVIACHTLEVWNEKVKDANESKKLIVIDFTASWCPPCRFIAPVFAEMAKKFTNVVFFKIDVDELQAVAQEFKVEAMPTFVFMKEGNIIDRVVGAAKDEINEKLMKHGGLVASA

SEQ ID NO: 26634 - protein, 67 aa, Arabidopsis thaliana
  peptide (1)..(67): Ceres Seq. ID no. 12339187
  misc_feature (1)..(66): Homolog of NCBI NO: 21617968 NR Description: thioredoxin [Arabidopsis thaliana]
  misc_feature (1)..(67): Homolog of NCBI NO: 11135265 NR Description: Thioredoxin H-type 2 (TRX-H-2)
  misc_feature (1)..(60): Homolog of NCBI NO: 15230385 NR Description: thioredoxin h; protein id: At3g51030.1, supported
  misc_feature (1)..(66): Homolog of NCBI NO: 11135129 NR Description: Thioredoxin H-type (TRX-H)
  misc_feature (1)..(66): Homolog of NCBI NO: 11494247 NR Description: thioredoxin-h-like protein 1 [Brassica oleracea
  misc_feature (1)..(66): Homolog of NCBI NO: 11135277 NR Description: Thioredoxin H-type 1 (TRX-H-1) (Pollen coat
  misc_feature (1)..(67): Homolog of NCBI NO: 15239136 NR Description: thioredoxin (clone GIF1) (pir||S58118)
  misc_feature (1)..(60): Homolog of NCBI NO: 25405885 NR Description: protein F27F5.21 [imported] - Arabidopsis
  misc_feature (1)..(67): Homolog of NCBI NO: 15219537 NR Description: thioredoxin, putative
  misc_feature (1)..(67): Homolog of NCBI NO: 1388084 NR Description: thioredoxin h
MAKKFTNVVFFKIDVDELQAVAQEFKVEAMPTFVFMKEGNIIDRVVGAAKDEINEKLMKHGGLVASA

SEQ ID NO: 26635 - DNA, 1799 bp, Arabidopsis thaliana
  misc_feature (1)..(1799): Ceres Seq. ID no. 12326657
  misc_feature: MA Experiment ID: 108594 Result: Up-regulated in Transcription
  misc_feature: MA Experiment 108594 PARAMETER Experiment Name: At_Ler-rhl_Root_cDNA_P Parameter: Plant Line Value: null
  misc_feature: MA Experiment ID: 108595 Result: Up-regulated in Transcription
  misc_feature: MA Experiment 108595 PARAMETER Experiment Name: At_Ler-pi_Ovule_cDNA_P Parameter: Plant Line Value: null
  misc_feature: MA Experiment ID: 20000166 Result: Down-regulated in Transcription
  misc_feature: MA Experiment 20000166 PARAMETER Experiment Name: At_100uM_ABA_P Parameter: Age (day) Value: 14
  misc_feature: MA Experiment 20000166 PARAMETER Experiment Name: At_100uM_ABA_P Parameter: Organism Value: A. thaliana
  misc_feature: MA Experiment 20000166 PARAMETER Experiment Name: At_100uM_ABA_P Parameter: Plant Line Value: WS
  misc_feature: MA Experiment 20000166 PARAMETER Experiment Name: At_100uM_ABA_P Parameter: Timepoint (hr) Value: 1
  misc_feature: MA Experiment 20000166 PARAMETER Experiment Name: At_100uM_ABA_P Parameter: Tissue Value: Aerial
  misc_feature: MA Experiment 20000166 PARAMETER Experiment Name: At_100uM_ABA_P Parameter: Treatment Value: 100uM ABA vs. No Treatment
  misc_feature: MA Experiment ID: 20000184 Result: Down-regulated in Transcription
  misc_feature: MA Experiment 20000184 PARAMETER Experiment Name: At_Shoots__P Parameter: Age (day) Value: 7
  misc_feature: MA Experiment 20000184 PARAMETER Experiment Name: At_Shoots__P Parameter: Tissue Value: Shoots vs. Whole Plant
  misc_feature: MA Experiment ID: 20000214 Result: Down-regulated in Transcription
  misc_feature: MA Experiment 20000214 PARAMETER Experiment Name: At_4deg_Cold_P Parameter: Timepoint (hr) Value: 6
  misc_feature: MA Experiment ID: 20000234 Result: Up-regulated in Transcription
  misc_feature: MA Experiment 20000234 PARAMETER Experiment Name: At_Siliques_P Parameter: Age (day) Value: 21
  misc_feature: MA Experiment 20000234 PARAMETER Experiment Name: At_Siliques_P Parameter: Organism Value: A. thaliana
  misc_feature: MA Experiment 20000234 PARAMETER Experiment Name: At_Siliques_P Parameter: Plant Line Value: WS
  misc_feature: MA Experiment 20000234 PARAMETER Experiment Name: At_Siliques_P Parameter: Tissue Value: Less Than 5mm Siliques vs. Whole Plant
  misc_feature: MA Experiment ID: 20000264 Result: Up-regulated in Transcription
  misc_feature: MA Experiment 20000264 PARAMETER Experiment Name: At_Open_Flower_P Parameter: Age (day) Value: 21
  misc_feature: MA Experiment 20000264 PARAMETER Experiment Name: At_Open_Flower_P Parameter: Plant Line Value: WS
  misc_feature: MA Experiment 20000264 PARAMETER Experiment Name: At_Open_Flower_P Parameter: Tissue Value: Open Flower vs. Whole Plant
  misc_feature: MA Experiment ID: 20000265 Result: Up-regulated in Transcription
  misc_feature: MA Experiment 20000265 PARAMETER Experiment Name: At_Open_Flower_P Parameter: Age (day) Value: 21
  misc_feature: MA Experiment 20000265 PARAMETER Experiment Name: At_Open_Flower_P Parameter: Plant Line Value: WS
  misc_feature: MA Experiment 20000265 PARAMETER Experiment Name: At_Open_Flower_P Parameter: Tissue Value: Closed Flower vs. Whole Plant
  misc_feature: MA Experiment ID: 20000268 Result: Down-regulated in Transcription
  misc_feature: MA Experiment 20000268 PARAMETER Experiment Name: At_100mM_NaCl__P Parameter: Age (day) Value: 14
  misc_feature: MA Experiment 20000268 PARAMETER Experiment Name: At_100mM_NaCl__P Parameter: Organism Value: A. thaliana
  misc_feature: MA Experiment 20000268 PARAMETER Experiment Name: At_100mM_NaCl__P Parameter: Plant Line Value: WS
  misc_feature: MA Experiment 20000268 PARAMETER Experiment Name: At_100mM_NaCl__P Parameter: Timepoint (hr) Value: 6
  misc_feature: MA Experiment 20000268 PARAMETER Experiment Name: At_100mM_NaCl__P Parameter: Tissue Value: Whole Plant
  misc_feature: MA Experiment 20000268 PARAMETER Experiment Name: At_100mM_NaCl__P Parameter: Treatment Value: 100mM NaCl vs. No Treatment
  misc_feature: MA Experiment ID: 20000269 Result: Up-regulated in Transcription
  misc_feature: MA Experiment 20000269 PARAMETER Experiment Name: At_1mM_KNO3_L-vs-H_Roots_P Parameter: Age (day) Value: 7,10,12
  misc_feature: MA Experiment 20000269 PARAMETER Experiment Name: At_1mM_KNO3_L-vs-H_Roots_P Parameter: Organism Value: A. thaliana
  misc_feature: MA Experiment 20000269 PARAMETER Experiment Name: At_1mM_KNO3_L-vs-H_Roots_P Parameter: Plant Line Value: WS
  misc_feature: MA Experiment 20000269 PARAMETER Experiment Name: At_1mM_KNO3_L-vs-H_Roots_P Parameter: Timepoint (day) Value: 7,10,12
  misc_feature: MA Experiment 20000269 PARAMETER Experiment Name: At_1mM_KNO3_L-vs-H_Roots_P Parameter: Tissue Value: Roots
  misc_feature: MA Experiment 20000269 PARAMETER Experiment Name: At_1mM_KNO3_L-vs-H_Roots_P Parameter: Treatment Value: 1mM KNO3 vs. 50mM KNO3
  misc_feature: MA Experiment ID: 20000286 Result: Up-regulated in Transcription
  misc_feature: MA Experiment 20000286 PARAMETER Experiment Name: At_Open_Flower_P Parameter: Age (day) Value: 21
  misc_feature: MA Experiment 20000286 PARAMETER Experiment Name: At_Open_Flower_P Parameter: Plant Line Value: WS
  misc_feature: MA Experiment 20000286 PARAMETER Experiment Name: At_Open_Flower_P Parameter: Tissue Value: Half Open vs. Whole Plant
  misc_feature: MA Experiment ID: 20000436 Result: Down-regulated in Transcription
  misc_feature: MA Experiment 20000436 PARAMETER Experiment Name: At_Drought_P Parameter: Age (day) Value: 7
  misc_feature: MA Experiment 20000436 PARAMETER Experiment Name: At_Drought_P Parameter: Organism Value: A. thaliana
  misc_feature: MA Experiment 20000436 PARAMETER Experiment Name: At_Drought_P Parameter: Plant Line Value: WS
  misc_feature: MA Experiment 20000436 PARAMETER Experiment Name: At_Drought_P Parameter: Timepoint (hr) Value: 12
  misc_feature: MA Experiment 20000436 PARAMETER Experiment Name: At_Drought_P Parameter: Tissue Value: Whole Plant
  misc_feature: MA Experiment 20000436 PARAMETER Experiment Name: At_Drought_P Parameter: Treatment Value: Drought vs. No Drought
  misc_feature: MA Experiment ID: 20000438 Result: Down-regulated in Transcription
  misc_feature: MA Experiment 20000438 PARAMETER Experiment Name: At_Shoots__P Parameter: Age (day) Value: 14
  misc_feature: MA Experiment 20000438 PARAMETER Experiment Name: At_Shoots__P Parameter: Tissue Value: Shoots vs. Whole Plant
  misc_feature: MA Experiment ID: 20000439 Result: Up-regulated in Transcription
  misc_feature: MA Experiment 20000439 PARAMETER Experiment Name: At_Roots__P Parameter: Age (day) Value: 14 vs. 21
  misc_feature: MA Experiment 20000439 PARAMETER Experiment Name: At_Roots__P Parameter: Organism Value: A. thaliana
  misc_feature: MA Experiment 20000439 PARAMETER Experiment Name: At_Roots__P Parameter: Tissue Value: Roots vs. Whole Plant
  misc_feature: MA Experiment ID: 20000453 Result: Up-regulated in Transcription
  misc_feature: MA Experiment 20000453 PARAMETER Experiment Name: At_100uM_ABA_P Parameter: Age (day) Value: 15
  misc_feature: MA Experiment 20000453 PARAMETER Experiment Name: At_100uM_ABA_P Parameter: Organism Value: A. thaliana
  misc_feature: MA Experiment 20000453 PARAMETER Experiment Name: At_100uM_ABA_P Parameter: Plant Line Value: WS
  misc_feature: MA Experiment 20000453 PARAMETER Experiment Name: At_100uM_ABA_P Parameter: Timepoint (hr) Value: 24
  misc_feature: MA Experiment 20000453 PARAMETER Experiment Name: At_100uM_ABA_P Parameter: Tissue Value: Aerial
  misc_feature: MA Experiment 20000453 PARAMETER Experiment Name: At_100uM_ABA_P Parameter: Treatment Value: 100uM ABA vs. No Treatment
  misc_feature: MA Experiment ID: 20000573 Result: Up-regulated in Transcription
  misc_feature: MA Experiment 20000573 PARAMETER Experiment Name: At_100uM_ABA_Mutants__P Parameter: Organism Value: A. thaliana
  misc_feature: MA Experiment 20000573 PARAMETER Experiment Name: At_100uM_ABA_Mutants__P Parameter: Plant Line Value: CS22 vs. Ler wt
  misc_feature: MA Experiment 20000573 PARAMETER Experiment Name: At_100uM_ABA_Mutants__P Parameter: Timepoint (hr) Value: N/A
  misc_feature: MA Experiment 20000573 PARAMETER Experiment Name: At_100uM_ABA_Mutants__P Parameter: Tissue Value: Whole Plant
  misc_feature: MA Experiment 20000573 PARAMETER Experiment Name: At_100uM_ABA_Mutants__P Parameter: Treatment Value: None
  misc_feature: MA Experiment ID: 20000574 Result: Up-regulated in Transcription
  misc_feature: MA Experiment 20000574 PARAMETER Experiment Name: At_100uM_ABA_Mutants__P Parameter: Organism Value: A. thaliana
  misc_feature: MA Experiment 20000574 PARAMETER Experiment Name: At_100uM_ABA_Mutants__P Parameter: Plant Line Value: CS23 vs. Ler wt
  misc_feature: MA Experiment 20000574 PARAMETER Experiment Name: At_100uM_ABA_Mutants__P Parameter: Timepoint (hr) Value: N/A
  misc_feature: MA Experiment 20000574 PARAMETER Experiment Name: At_100uM_ABA_Mutants__P Parameter: Tissue Value: Whole Plant
  misc_feature: MA Experiment 20000574 PARAMETER Experiment Name: At_100uM_ABA_Mutants__P Parameter: Treatment Value: None
  misc_feature: MA Experiment ID: 20000794 Result: Up-regulated in Transcription
  misc_feature: MA Experiment 20000794 PARAMETER Experiment Name: At_Petals_P Parameter: Age (day) Value: 23-25 days
  misc_feature: MA Experiment 20000794 PARAMETER Experiment Name: At_Petals_P Parameter: Plant Line Value: WS
  misc_feature: MA Experiment 20000794 PARAMETER Experiment Name: At_Petals_P Parameter: Tissue Value: Petals vs. Whole plant
  misc_feature: MA Experiment ID: 20001554 Result: Down-regulated in Transcription
  misc_feature: MA Experiment 20001554 PARAMETER Experiment Name: At_Drought_Soil_Dry_P Parameter: Age (day) Value: 21
  misc_feature: MA Experiment 20001554 PARAMETER Experiment Name: At_Drought_Soil_Dry_P Parameter: Organism Value: A. thaliana
  misc_feature: MA Experiment 20001554 PARAMETER Experiment Name: At_Drought_Soil_Dry_P Parameter: Plant Line Value: WS
  misc_feature: MA Experiment 20001554 PARAMETER Experiment Name: At_Drought_Soil_Dry_P Parameter: Post Timepoint (hr) Value: None
  misc_feature: MA Experiment 20001554 PARAMETER Experiment Name: At_Drought_Soil_Dry_P Parameter: Post-Treatment Value: None
  misc_feature: MA Experiment 20001554 PARAMETER Experiment Name: At_Drought_Soil_Dry_P Parameter: Timepoint (day) Value: 7
  misc_feature: MA Experiment 20001554 PARAMETER Experiment Name: At_Drought_Soil_Dry_P Parameter: Treatment Value: Drought vs. No Drought
  misc_feature: MA Experiment ID: 20001557 Result: Up-regulated in Transcription
  misc_feature: MA Experiment 20001557 PARAMETER Experiment Name: At_Drought_Soil_Dry_P Parameter: Age (day) Value: 27
  misc_feature: MA Experiment 20001557 PARAMETER Experiment Name: At_Drought_Soil_Dry_P Parameter: Organism Value: A. thaliana
  misc_feature: MA Experiment 20001557 PARAMETER Experiment Name: At_Drought_Soil_Dry_P Parameter: Plant Line Value: WS
  misc_feature: MA Experiment 20001557 PARAMETER Experiment Name: At_Drought_Soil_Dry_P Parameter: Post Timepoint (hr) Value: 3
  misc_feature: MA Experiment 20001557 PARAMETER Experiment Name: At_Drought_Soil_Dry_P Parameter: Post-Treatment Value: Re-Water vs. No Drought
  misc_feature: MA Experiment 20001557 PARAMETER Experiment Name: At_Drought_Soil_Dry_P Parameter: Timepoint (day) Value: 13
  misc_feature: MA Experiment 20001557 PARAMETER Experiment Name: At_Drought_Soil_Dry_P Parameter: Treatment Value: Drought vs. No Drought
  misc_feature: MA Experiment ID: 20001558 Result: Up-regulated in Transcription
  misc_feature: MA Experiment 20001558 PARAMETER Experiment Name: At_Drought_Soil_Dry_P Parameter: Age (day) Value: 27
  misc_feature: MA Experiment 20001558 PARAMETER Experiment Name: At_Drought_Soil_Dry_P Parameter: Organism Value: A. thaliana
  misc_feature: MA Experiment 20001558 PARAMETER Experiment Name: At_Drought_Soil_Dry_P Parameter: Plant Line Value: WS
  misc_feature: MA Experiment 20001558 PARAMETER Experiment Name: At_Drought_Soil_Dry_P Parameter: Post Timepoint (hr) Value: 6
  misc_feature: MA Experiment 20001558 PARAMETER Experiment Name: At_Drought_Soil_Dry_P Parameter: Post-Treatment Value: Re-Water vs. No Drought
  misc_feature: MA Experiment 20001558 PARAMETER Experiment Name: At_Drought_Soil_Dry_P Parameter: Timepoint (day) Value: 13
  misc_feature: MA Experiment 20001558 PARAMETER Experiment Name: At_Drought_Soil_Dry_P Parameter: Treatment Value: Drought vs. No Drought
  misc_feature: MA Experiment ID: 20001560 Result: Up-regulated in Transcription
  misc_feature: MA Experiment 20001560 PARAMETER Experiment Name: At_Drought_Soil_Dry_P Parameter: Age (day) Value: 28
  misc_feature: MA Experiment 20001560 PARAMETER Experiment Name: At_Drought_Soil_Dry_P Parameter: Organism Value: A. thaliana
  misc_feature: MA Experiment 20001560 PARAMETER Experiment Name: At_Drought_Soil_Dry_P Parameter: Plant Line Value: WS
  misc_feature: MA Experiment 20001560 PARAMETER Experiment Name: At_Drought_Soil_Dry_P Parameter: Post Timepoint (hr) Value: None
  misc_feature: MA Experiment 20001560 PARAMETER Experiment Name: At_Drought_Soil_Dry_P Parameter: Post-Treatment Value: None
  misc_feature: MA Experiment 20001560 PARAMETER Experiment Name: At_Drought_Soil_Dry_P Parameter: Timepoint (day) Value: 14
  misc_feature: MA Experiment 20001560 PARAMETER Experiment Name: At_Drought_Soil_Dry_P Parameter: Treatment Value: Drought vs. No Drought
  misc_feature: MA Experiment ID: 20001757 Result: Up-regulated in Transcription
  misc_feature: MA Experiment 20001757 PARAMETER Experiment Name: At_50mM_NH4NO3_L-to-H_P Parameter: Timepoint (hr) Value: 6
  misc_feature: MA Experiment 20001757 PARAMETER Experiment Name: At_50mM_NH4NO3_L-to-H_P Parameter: Tissue Value: Leaf
  misc_feature: MA Experiment 20001757 PARAMETER Experiment Name: At_50mM_NH4NO3_L-to-H_P Parameter: Treatment Value: 50mM NH4NO3 vs 100mM Mannitol
  misc_feature: MA Experiment ID: 20001906 Result: Up-regulated in Transcription
  misc_feature: MA Experiment 20001906 PARAMETER Experiment Name: At_Drought_Reproduction_P Parameter: Age (day) Value: 35
  misc_feature: MA Experiment 20001906 PARAMETER Experiment Name: At_Drought_Reproduction_P Parameter: Organism Value: A. thaliana
  misc_feature: MA Experiment 20001906 PARAMETER Experiment Name: At_Drought_Reproduction_P Parameter: Plant Line Value: WS
  misc_feature: MA Experiment 20001906 PARAMETER Experiment Name: At_Drought_Reproduction_P Parameter: Timepoint (day) Value: 5
  misc_feature: MA Experiment 20001906 PARAMETER Experiment Name: At_Drought_Reproduction_P Parameter: Tissue Value: Siliques
  misc_feature: MA Experiment 20001906 PARAMETER Experiment Name: At_Drought_Reproduction_P Parameter: Treatment Value: Drought vs. No Drought
acatctatctctttctctctctttccttgcaaattttcagctctcaaagagttaagagttagagagagagaggatggccattagggaaatcaaagatgtagagaggggtgaaatagtgaataaggtagaagatcttgggaaaccatttttgactcatgaagatgatgaaaaagagagtgagaataatgaatcatatttgatggttctcttcagtacttttgttgctgtctgtggctcctttgagtttggctcttgtgttggatactcagcgcctactcagtcatctataagacaagatctcaatctctcccttgcagagttctccatgtttggatccatcttaactatcggtgcaatgcttggtgctgttatgagtgggaaaatttcagatttctccggccgaaaaggggcaatgaggacatcagcttgcttctgcattacaggttggctcgctgtcttcttcaccaagggggcattgttacttgatgtaggaaggttctttacaggatatggaattggagttttttcttatgtggtccctgtgtacattgctgagatatctcccaagaatctccgaggtggactcacaacactgaaccaactcatgattgtgatcggctcatcggtttctttcttgatcggatctctcatttcttggaaaactcttgccctaaccggacttgctccctgcattgttttgctctttggcttgtgcttcatacccgaatctcctcgatggctggcaaaagcaggccatgagaaagagtttcgcgtagccctgcaaaagctgcgaggaaaagatgcagatatcacaaatgaagcagacggtattcaagtctcgattcaagctctagagattcttccaaaagcaagaatccaagaccttgtgtccaagaaatatggtcgatctgtcatcattggtgtttccctgatggtattccaacagtttgttggaatcaatgggatcggattctacgcaagtgaaacgtttgtaaaagccggatttacctctgggaaactaggaacaatcgctatcgcttgtgttcaggtgccaataactgttcttggaacaatcttgatagataaatctggacgaaggccactaattatgatttcagctggtggtatcttcttgggatgcatactcacaggcacatctttcttactcaagggacagagcttgttgcttgaatgggtcccttccttagccgttggaggtgtacttatctatgtagctgctttctccatcggaatgggacctgttccttgggtgataatgtctgagatatttccgataaacgtaaagggaatcgcaggaagcttagtggtactagtgaattggtctggtgcttgggctgtttcttacactttcaacttcctcatgagctggagctctccaggtacattctatttgtactcggcttttgcagctgcgacgataatatttgtggcgaagatggtgccagagacgaaagggaagacactggaagagatccaagcttgtattcgaagagaaacataagaagaaagatacaatcaatgttatgggaatgttatcaaatgaaaagactcgaactattcccgttggtgagctcaaagtggagtagagtaaaaattatcgccgggagataacgttgaaagtccgatgatgaggcataagggttttgcatgaatgttatgagaataggtttacttttatgtatttgttcacgttttaagttttcatcaaataggtttttgattggtatacagtatgtggaatattaatagaatggagtggcagatttcatattcaatca

SEQ ID NO: 26636 - protein, 482 aa, Arabidopsis thaliana
  peptide (1)..(482): Ceres Seq. ID no. 12326658
  misc_feature (47)..(478): Pfam Name: Sugar (and other) transporter Pfam Description: Sugar (and other) transporter
  misc_feature (47)..(478): Pfam Name: Sugar (and other) transporter Pfam Description: Sugar (and other) transporter
  misc_feature (378)..(478): Homolog of NCBI NO: 25405762 NR Description: hypothetical protein T22H22.15 [imported] -
  misc_feature (1)..(326): Homolog of NCBI NO: 25405762 NR Description: hypothetical protein T22H22.15 [imported] -
  misc_feature (33)..(478): Homolog of NCBI NO: 30695810 NR Description: sugar transporter, putative [Arabidopsis thaliana]
  misc_feature (43)..(478): Homolog of NCBI NO: 21536914 NR Description: putative sugar transporter [Arabidopsis thaliana]
  misc_feature (43)..(478): Homolog of NCBI NO: 18407508 NR Description: putative sugar transporter
  misc_feature (378)..(478): Homolog of NCBI NO: 25405762 NR Description: hypothetical protein T22H22.15 [imported] -
  misc_feature (33)..(478): Homolog of NCBI NO: 30695810 NR Description: sugar transporter, putative [Arabidopsis thaliana]
  misc_feature (43)..(478): Homolog of NCBI NO: 18407508 NR Description: putative sugar transporter
  misc_feature (1)..(482): Homolog of NCBI NO: 18419741 NR Description: sugar transporter - like protein
  misc_feature (1)..(482): Homolog of NCBI NO: 21592787 NR Description: sugar transporter-like protein [Arabidopsis
  misc_feature (7)..(478): Homolog of NCBI NO: 23504385 NR Description: putative sugar transporter [Lycopersicon
  misc_feature (11)..(476): Homolog of NCBI NO: 30679397 NR Description: sugar transporter family [Arabidopsis thaliana]
  misc_feature (15)..(476): Homolog of NCBI NO: 6729025 NR Description: putative sugar transporter [Arabidopsis thaliana]
  misc_feature (43)..(478): Homolog of NCBI NO: 21536914 NR Description: putative sugar transporter [Arabidopsis thaliana]
  misc_feature (1)..(326): Homolog of NCBI NO: 25405762 NR Description: hypothetical protein T22H22.15 [imported] -
  misc_feature (15)..(476): Homolog of NCBI NO: 6729025 NR Description: putative sugar transporter [Arabidopsis thaliana]
  misc_feature (11)..(476): Homolog of NCBI NO: 30679397 NR Description: sugar transporter family [Arabidopsis thaliana]
  misc_feature (7)..(478): Homolog of NCBI NO: 23504385 NR Description: putative sugar transporter [Lycopersicon
  misc_feature (1)..(482): Homolog of NCBI NO: 21592787 NR Description: sugar transporter-like protein [Arabidopsis
  misc_feature (1)..(482): Homolog of NCBI NO: 18419741 NR Description: sugar transporter - like protein
MAIREIKDVERGEIVNKVEDLGKPFLTHEDDEKESENNESYLMVLFSTFVAVCGSFEFGSCVGYSAPTQSSIRQDLNLSLAEFSMFGSILTIGAMLGAVMSGKISDFSGRKGAMRTSACFCITGWLAVFFTKGALLLDVGRFFTGYGIGVFSYVVPVYIAEISPKNLRGGLTTLNQLMIVIGSSVSFLIGSLISWKTLALTGLAPCIVLLFGLCFIPESPRWLAKAGHEKEFRVALQKLRGKDADITNEADGIQVSIQALEILPKARIQDLVSKKYGRSVIIGVSLMVFQQFVGINGIGFYASETFVKAGFTSGKLGTIAIACVQVPITVLGTILIDKSGRRPLIMISAGGIFLGCILTGTSFLLKGQSLLLEWVPSLAVGGVLIYVAAFSIGMGPVPWVIMSEIFPINVKGIAGSLVVLVNWSGAWAVSYTFNFLMSWSSPGTFYLYSAFAAATIIFVAKMVPETKGKTLEEIQACIRRET

SEQ ID NO: 26637 - protein, 440 aa, Arabidopsis thaliana
  peptide (1)..(440): Ceres Seq. ID no. 12326659
  misc_feature (5)..(436): Pfam Name: Sugar (and other) transporter Pfam Description: Sugar (and other) transporter
  misc_feature (5)..(436): Pfam Name: Sugar (and other) transporter Pfam Description: Sugar (and other) transporter
  misc_feature (336)..(436): Homolog of NCBI NO: 25405762 NR Description: hypothetical protein T22H22.15 [imported] -
  misc_feature (1)..(284): Homolog of NCBI NO: 25405762 NR Description: hypothetical protein T22H22.15 [imported] -
  misc_feature (1)..(436): Homolog of NCBI NO: 30695810 NR Description: sugar transporter, putative [Arabidopsis thaliana]
  misc_feature (1)..(436): Homolog of NCBI NO: 21536914 NR Description: putative sugar transporter [Arabidopsis thaliana]
  misc_feature (1)..(436): Homolog of NCBI NO: 18407508 NR Description: putative sugar transporter
  misc_feature (336)..(436): Homolog of NCBI NO: 25405762 NR Description: hypothetical protein T22H22.15 [imported] -
  misc_feature (1)..(436): Homolog of NCBI NO: 30695810 NR Description: sugar transporter, putative [Arabidopsis thaliana]
  misc_feature (1)..(436): Homolog of NCBI NO: 18407508 NR Description: putative sugar transporter
  misc_feature (1)..(440): Homolog of NCBI NO: 18419741 NR Description: sugar transporter - like protein
  misc_feature (1)..(440): Homolog of NCBI NO: 21592787 NR Description: sugar transporter-like protein [Arabidopsis
  misc_feature (1)..(436): Homolog of NCBI NO: 23504385 NR Description: putative sugar transporter [Lycopersicon
  misc_feature (1)..(434): Homolog of NCBI NO: 30679397 NR Description: sugar transporter family [Arabidopsis thaliana]
  misc_feature (1)..(434): Homolog of NCBI NO: 6729025 NR Description: putative sugar transporter [Arabidopsis thaliana]
  misc_feature (1)..(436): Homolog of NCBI NO: 21536914 NR Description: putative sugar transporter [Arabidopsis thaliana]
  misc_feature (1)..(284): Homolog of NCBI NO: 25405762 NR Description: hypothetical protein T22H22.15 [imported] -
  misc_feature (1)..(434): Homolog of NCBI NO: 6729025 NR Description: putative sugar transporter [Arabidopsis thaliana]
  misc_feature (1)..(434): Homolog of NCBI NO: 30679397 NR Description: sugar transporter family [Arabidopsis thaliana]
  misc_feature (1)..(436): Homolog of NCBI NO: 23504385 NR Description: putative sugar transporter [Lycopersicon
  misc_feature (1)..(440): Homolog of NCBI NO: 21592787 NR Description: sugar transporter-like protein [Arabidopsis
  misc_feature (1)..(440): Homolog of NCBI NO: 18419741 NR Description: sugar transporter - like protein
MVLFSTFVAVCGSFEFGSCVGYSAPTQSSIRQDLNLSLAEFSMFGSILTIGAMLGAVMSGKISDFSGRKGAMRTSACFCITGWLAVFFTKGALLLDVGRFFTGYGIGVFSYVVPVYIAEISPKNLRGGLTTLNQLMIVIGSSVSFLIGSLISWKTLALTGLAPCIVLLFGLCFIPESPRWLAKAGHEKEFRVALQKLRGKDADITNEADGIQVSIQALEILPKARIQDLVSKKYGRSVIIGVSLMVFQQFVGINGIGFYASETFVKAGFTSGKLGTIAIACVQVPITVLGTILIDKSGRRPLIMISAGGIFLGCILTGTSFLLKGQSLLLEWVPSLAVGGVLIYVAAFSIGMGPVPWVIMSEIFPINVKGIAGSLVVLVNWSGAWAVSYTFNFLMSWSSPGTFYLYSAFAAATIIFVAKMVPETKGKTLEEIQACIRRET

SEQ ID NO: 26638 - protein, 398 aa, Arabidopsis thaliana
  peptide (1)..(398): Ceres Seq. ID no. 12326660
  misc_feature (1)..(394): Pfam Name: Sugar (and other) transporter Pfam Description: Sugar (and other) transporter
  misc_feature (1)..(394): Pfam Name: Sugar (and other) transporter Pfam Description: Sugar (and other) transporter
  misc_feature (294)..(394): Homolog of NCBI NO: 25405762 NR Description: hypothetical protein T22H22.15 [imported] -
  misc_feature (1)..(242): Homolog of NCBI NO: 25405762 NR Description: hypothetical protein T22H22.15 [imported] -
  misc_feature (1)..(394): Homolog of NCBI NO: 30695810 NR Description: sugar transporter, putative [Arabidopsis thaliana]
  misc_feature (1)..(394): Homolog of NCBI NO: 21536914 NR Description: putative sugar transporter [Arabidopsis thaliana]
  misc_feature (1)..(394): Homolog of NCBI NO: 18407508 NR Description: putative sugar transporter
  misc_feature (294)..(394): Homolog of NCBI NO: 25405762 NR Description: hypothetical protein T22H22.15 [imported] -
  misc_feature (1)..(394): Homolog of NCBI NO: 30695810 NR Description: sugar transporter, putative [Arabidopsis thaliana]
  misc_feature (1)..(394): Homolog of NCBI NO: 18407508 NR Description: putative sugar transporter
  misc_feature (1)..(398): Homolog of NCBI NO: 18419741 NR Description: sugar transporter - like protein
  misc_feature (1)..(398): Homolog of NCBI NO: 21592787 NR Description: sugar transporter-like protein [Arabidopsis
  misc_feature (1)..(394): Homolog of NCBI NO: 23504385 NR Description: putative sugar transporter [Lycopersicon
  misc_feature (1)..(392): Homolog of NCBI NO: 30679397 NR Description: sugar transporter family [Arabidopsis thaliana]
  misc_feature (1)..(392): Homolog of NCBI NO: 6729025 NR Description: putative sugar transporter [Arabidopsis thaliana]
  misc_feature (1)..(394): Homolog of NCBI NO: 21536914 NR Description: putative sugar transporter [Arabidopsis thaliana]
  misc_feature (1)..(242): Homolog of NCBI NO: 25405762 NR Description: hypothetical protein T22H22.15 [imported] -
  misc_feature (1)..(392): Homolog of NCBI NO: 6729025 NR Description: putative sugar transporter [Arabidopsis thaliana]
  misc_feature (1)..(392): Homolog of NCBI NO: 30679397 NR Description: sugar transporter family [Arabidopsis thaliana]
  misc_feature (1)..(394): Homolog of NCBI NO: 23504385 NR Description: putative sugar transporter [Lycopersicon
  misc_feature (1)..(398): Homolog of NCBI NO: 21592787 NR Description: sugar transporter-like protein [Arabidopsis
  misc_feature (1)..(398): Homolog of NCBI NO: 18419741 NR Description: sugar transporter - like protein
MFGSILTIGAMLGAVMSGKISDFSGRKGAMRTSACFCITGWLAVFFTKGALLLDVGRFFTGYGIGVFSYVVPVYIAEISPKNLRGGLTTLNQLMIVIGSSVSFLIGSLISWKTLALTGLAPCIVLLFGLCFIPESPRWLAKAGHEKEFRVALQKLRGKDADITNEADGIQVSIQALEILPKARIQDLVSKKYGRSVIIGVSLMVFQQFVGINGIGFYASETFVKAGFTSGKLGTIAIACVQVPITVLGTILIDKSGRRPLIMISAGGIFLGCILTGTSFLLKGQSLLLEWVPSLAVGGVLIYVAAFSIGMGPVPWVIMSEIFPINVKGIAGSLVVLVNWSGAWAVSYTFNFLMSWSSPGTFYLYSAFAAATIIFVAKMVPETKGKTLEEIQACIRRET

SEQ ID NO: 26639 - DNA, 959 bp, Arabidopsis thaliana
  misc_feature (1)..(959): Ceres Seq. ID no. 12335926
  misc_feature: MA Experiment ID: 108462 Result: Up-regulated in Transcription
  misc_feature: MA Experiment 108462 PARAMETER Experiment Name: At_Germinating_Seeds_cDNA_P Parameter: Age (day) Value: 2 vs. 0
  misc_feature: MA Experiment 108462 PARAMETER Experiment Name: At_Germinating_Seeds_cDNA_P Parameter: Tissue Value: Germinating Seeds
  misc_feature: MA Experiment ID: 108463 Result: Up-regulated in Transcription
  misc_feature: MA Experiment 108463 PARAMETER Experiment Name: At_Germinating_Seeds_cDNA_P Parameter: Age (day) Value: 3 vs. 0
  misc_feature: MA Experiment 108463 PARAMETER Experiment Name: At_Germinating_Seeds_cDNA_P Parameter: Tissue Value: Germinating Seeds
  misc_feature: MA Experiment ID: 108464 Result: Up-regulated in Transcription
  misc_feature: MA Experiment 108464 PARAMETER Experiment Name: At_Germinating_Seeds_cDNA_P Parameter: Age (day) Value: 4 vs. 0
  misc_feature: MA Experiment 108464 PARAMETER Experiment Name: At_Germinating_Seeds_cDNA_P Parameter: Tissue Value: Germinating Seeds
  misc_feature: MA Experiment ID: 108488 Result: Down-regulated in Transcription
  misc_feature: MA Experiment ID: 108573 Result: Up-regulated in Transcription
  misc_feature: MA Experiment 108573 PARAMETER Experiment Name: At_Drought_cDNA_P Parameter: Timepoint (hr) Value: 6
  misc_feature: MA Experiment 108573 PARAMETER Experiment Name: At_Drought_cDNA_P Parameter: Tissue Value: Aerial
  misc_feature: MA Experiment 108573 PARAMETER Experiment Name: At_Drought_cDNA_P Parameter: Treatment Value: Drought vs. No Drought
  misc_feature: MA Experiment ID: 108585 Result: Up-regulated in Transcription
  misc_feature: MA Experiment 108585 PARAMETER Experiment Name: At_5mM_NaNP_cDNA_P Parameter: Timepoint (hr) Value: 6
  misc_feature: MA Experiment 108585 PARAMETER Experiment Name: At_5mM_NaNP_cDNA_P Parameter: Tissue Value: Aerial
  misc_feature: MA Experiment 108585 PARAMETER Experiment Name: At_5mM_NaNP_cDNA_P Parameter: Treatment Value: null
  misc_feature: MA Experiment ID: 108595 Result: Down-regulated in Transcription
  misc_feature: MA Experiment 108595 PARAMETER Experiment Name: At_Ler-pi_Ovule_cDNA_P Parameter: Plant Line Value: null
  misc_feature: MA Experiment ID: 108607 Result: Up-regulated in Transcription
  misc_feature: MA Experiment 108607 PARAMETER Experiment Name: At_100uM_ABA_cDNA_P Parameter: Timepoint (hr) Value: 4
  misc_feature: MA Experiment 108607 PARAMETER Experiment Name: At_100uM_ABA_cDNA_P Parameter: Tissue Value: Aerial
  misc_feature: MA Experiment 108607 PARAMETER Experiment Name: At_100uM_ABA_cDNA_P Parameter: Treatment Value: 100uM ABA vs. No Treatment
  misc_feature: MA Experiment ID: 108668 Result: Up-regulated in Transcription
  misc_feature: MA Experiment 108668 PARAMETER Experiment Name: At_2mM_SA_cDNA_P Parameter: Plant Line Value: WS
  misc_feature: MA Experiment 108668 PARAMETER Experiment Name: At_2mM_SA_cDNA_P Parameter: Timepoint (hr) Value: 6
  misc_feature: MA Experiment 108668 PARAMETER Experiment Name: At_2mM_SA_cDNA_P Parameter: Treatment Value: 2mM SA vs. No Treatment
  misc_feature: MA Experiment ID: 20000347 Result: Up-regulated in Transcription
  misc_feature: MA Experiment 20000347 PARAMETER Experiment Name: At_2mM_SA_Sub_P Parameter: Age (day) Value: 14
  misc_feature: MA Experiment 20000347 PARAMETER Experiment Name: At_2mM_SA_Sub_P Parameter: Organism Value: A. thaliana
  misc_feature: MA Experiment 20000347 PARAMETER Experiment Name: At_2mM_SA_Sub_P Parameter: Plant Line Value: WS
  misc_feature: MA Experiment 20000347 PARAMETER Experiment Name: At_2mM_SA_Sub_P Parameter: Timepoint (hr) Value: 6
  misc_feature: MA Experiment 20000347 PARAMETER Experiment Name: At_2mM_SA_Sub_P Parameter: Tissue Value: Aerial
  misc_feature: MA Experiment 20000347 PARAMETER Experiment Name: At_2mM_SA_Sub_P Parameter: Treatment Value: 2mM SA vs. No Treatment
  misc_feature: MA Experiment ID: 20000440 Result: Up-regulated in Transcription
  misc_feature: MA Experiment 20000440 PARAMETER Experiment Name: At_Closed-Flower__Sub_P Parameter: Tissue Value: Closed Flower vs. Whole Plant
ttttctcatttcttaaccacgtcgtcgacacaacaaaccgatcgtgttacgtctctctctctctcagtctctcatcaccgacgaagatcacggctcttttctctgtttaatcggcggaatctctcgtctttttttttttttttttcttccggtagatcgatccagctccgagatcaacaaccatgaatcctgaatatgactatttgttcaagcttttgctcattggtgattctggtgttggaaagtcgtgcttgcttctaaggtttgctgatgattcttacctggatagctacatcagcaccattggtgtcgactttaaaatccgaacagtcgaacaagatggaaagaccatcaaactccagatttgggatacggcaggccaggaacgtttcagaacgattactagcagttactacagaggagctcatggaattattgtgacttatgatgtaacagatctagaaagcttcaacaacgtcaagcaatggctaaatgaaatcgaccgctatgcaagtgagaatgttaacaagctactggttgggaacaagtgtgatctcacatcacagaaagttgtatccactgagacagctaaggctttcgctgatgaacttgggatcccattcttggaaacaagtgctaagaatgctaccaatgtcgaagaagctttcatggccatgactcctgcaatcaagaccagaatggcgagccaacctgcaggaggatctaagccaccaacggtccagatccgaggacaacccgttaaccagcaatcaggctgctgctcctcttaattcgctttggtaacacttaaccatattatgtcattcgtttgcatgtaagaaatctgaacaacgttgcttcttaaatcttttgtatttggtttttcaatttttcacttgtgtccaaaagcttttaaattctttgtaatggtacttggattattaataaacttctttagc

SEQ ID NO: 26640 - protein, 202 aa, Arabidopsis thaliana
  peptide (1)..(202): Ceres Seq. ID no. 12335927
  misc_feature (10)..(171): Pfam Name: Ras family Pfam Description: Ras family
  misc_feature (1)..(202): Homolog of NCBI NO: 14140133 NR Description: putative GTP-binding protein [Oryza sativa]
  misc_feature (1)..(202): Homolog of NCBI NO: 1053063 NR Description: small GTP-binding protein
  misc_feature (1)..(202): Homolog of NCBI NO: 1616614 NR Description: small GTP-binding protein [Nicotiana
  misc_feature (1)..(202): Homolog of NCBI NO: 303750 NR Description: GTP-binding protein [Pisum sativum]
  misc_feature (1)..(202): Homolog of NCBI NO: 4586580 NR Description: rab-type small GTP-binding protein [Cicer
  misc_feature (1)..(202): Homolog of NCBI NO: 1370166 NR Description: RAB1C [Lotus japonicus]
  misc_feature (6)..(202): Homolog of NCBI NO: 7438375 NR Description: GTP-binding protein - Arabidopsis thaliana
  misc_feature (1)..(202): Homolog of NCBI NO: 18422766 NR Description: ras-related small GTP-binding protein-like
  misc_feature (1)..(202): Homolog of NCBI NO: 16974365 NR Description: AT4g17530/dl4800c [Arabidopsis thaliana]
  misc_feature (1)..(202): Homolog of NCBI NO: 15236555 NR Description: ras-related small GTP-binding protein RAB1c
MNPEYDYLFKLLLIGDSGVGKSCLLLRFADDSYLDSYISTIGVDFKIRTVEQDGKTIKLQIWDTAGQERFRTITSSYYRGAHGIIVTYDVTDLESFNNVKQWLNEIDRYASENVNKLLVGNKCDLTSQKVVSTETAKAFADELGIPFLETSAKNATNVEEAFMAMTPAIKTRMASQPAGGSKPPTVQIRGQPVNQQSGCCSS

SEQ ID NO: 26641 - DNA, 1336 bp, Arabidopsis thaliana
  misc_feature (1)..(1336): Ceres Seq. ID no. 12422528
  misc_feature: MA Experiment ID: 108434 Result: Up-regulated in Transcription
  misc_feature: MA Experiment 108434 PARAMETER Experiment Name: At_Root_Tips_cDNA_P Parameter: Tissue Value: Root Tips
  misc_feature: MA Experiment ID: 108577 Result: Down-regulated in Transcription
  misc_feature: MA Experiment 108577 PARAMETER Experiment Name: At_42deg_Heat_cDNA_P Parameter: Temperature (deg C) Value: 42 vs. 22
  misc_feature: MA Experiment 108577 PARAMETER Experiment Name: At_42deg_Heat_cDNA_P Parameter: Timepoint (hr) Value: 6
  misc_feature: MA Experiment 108577 PARAMETER Experiment Name: At_42deg_Heat_cDNA_P Parameter: Tissue Value: Aerial
  misc_feature: MA Experiment ID: 108595 Result: Down-regulated in Transcription
  misc_feature: MA Experiment 108595 PARAMETER Experiment Name: At_Ler-pi_Ovule_cDNA_P Parameter: Plant Line Value: null
  misc_feature: MA Experiment ID: 20000111 Result: Down-regulated in Transcription
  misc_feature: MA Experiment 20000111 PARAMETER Experiment Name: At_42deg_Heat_cDNA_P Parameter: Temperature (deg C) Value: 42 vs. 22
  misc_feature: MA Experiment 20000111 PARAMETER Experiment Name: At_42deg_Heat_cDNA_P Parameter: Timepoint (hr) Value: 6
  misc_feature: MA Experiment 20000111 PARAMETER Experiment Name: At_42deg_Heat_cDNA_P Parameter: Tissue Value: Aerial
  misc_feature: MA Experiment ID: 20000112 Result: Down-regulated in Transcription
  misc_feature: MA Experiment 20000112 PARAMETER Experiment Name: At_42deg_Heat_cDNA_P Parameter: Temperature (deg C) Value: 42 vs. 22
  misc_feature: MA Experiment 20000112 PARAMETER Experiment Name: At_42deg_Heat_cDNA_P Parameter: Timepoint (hr) Value: 2
  misc_feature: MA Experiment 20000112 PARAMETER Experiment Name: At_42deg_Heat_cDNA_P Parameter: Tissue Value: Aerial
  misc_feature: MA Experiment ID: 20000113 Result: Down-regulated in Transcription
  misc_feature: MA Experiment 20000113 PARAMETER Experiment Name: At_42deg_Heat_cDNA_P Parameter: Temperature (deg C) Value: 42 vs. 22
  misc_feature: MA Experiment 20000113 PARAMETER Experiment Name: At_42deg_Heat_cDNA_P Parameter: Timepoint (hr) Value: 8
  misc_feature: MA Experiment 20000113 PARAMETER Experiment Name: At_42deg_Heat_cDNA_P Parameter: Tissue Value: Aerial
  misc_feature: MA Experiment ID: 20000173 Result: Down-regulated in Transcription
  misc_feature: MA Experiment 20000173 PARAMETER Experiment Name: At_42deg_Heat_P Parameter: Age (day) Value: 14
  misc_feature: MA Experiment 20000173 PARAMETER Experiment Name: At_42deg_Heat_P Parameter: Organism Value: A. thaliana
  misc_feature: MA Experiment 20000173 PARAMETER Experiment Name: At_42deg_Heat_P Parameter: Plant Line Value: WS
  misc_feature: MA Experiment 20000173 PARAMETER Experiment Name: At_42deg_Heat_P Parameter: Temperature (deg C) Value: 42 vs. 22
  misc_feature: MA Experiment 20000173 PARAMETER Experiment Name: At_42deg_Heat_P Parameter: Timepoint (hr) Value: 6
  misc_feature: MA Experiment 20000173 PARAMETER Experiment Name: At_42deg_Heat_P Parameter: Tissue Value: Aerial
  misc_feature: MA Experiment ID: 20000184 Result: Up-regulated in Transcription
  misc_feature: MA Experiment 20000184 PARAMETER Experiment Name: At_Shoots__P Parameter: Age (day) Value: 7
  misc_feature: MA Experiment 20000184 PARAMETER Experiment Name: At_Shoots__P Parameter: Tissue Value: Shoots vs. Whole Plant
  misc_feature: MA Experiment ID: 20001905 Result: Down-regulated in Transcription
  misc_feature: MA Experiment 20001905 PARAMETER Experiment Name: At_Drought_Reproduction_P Parameter: Age (day) Value: 40
  misc_feature: MA Experiment 20001905 PARAMETER Experiment Name: At_Drought_Reproduction_P Parameter: Organism Value: A. thaliana
  misc_feature: MA Experiment 20001905 PARAMETER Experiment Name: At_Drought_Reproduction_P Parameter: Plant Line Value: WS
  misc_feature: MA Experiment 20001905 PARAMETER Experiment Name: At_Drought_Reproduction_P Parameter: Timepoint (day) Value: 10
  misc_feature: MA Experiment 20001905 PARAMETER Experiment Name: At_Drought_Reproduction_P Parameter: Tissue Value: Rosettes
  misc_feature: MA Experiment 20001905 PARAMETER Experiment Name: At_Drought_Reproduction_P Parameter: Treatment Value: Drought vs. No Drought
aattaggttaggtggtcacgtttgttcatctctctcttatatatttgtttaaaggcttcgtctttgttcatttgcttttgttgatctcattacttgttcatcaatggcaagtctttgtttccaatctccttccaaacccatttcctatttccaacccaaatccaatccatcgccaccgttattcgccaaagtctccgtctttcgatgcagagcttccgtacaaaccctcgtcgccgttgagccggagccagttttcgtctccgtcaagacttttgcgccagccaccgtcgctaatttgggaccagggtttgatttcttaggatgtgccgtcgatggtctcggagaccatgtgactctccgtgtagatccctctgtacgagccggtgaggtctcaatctcggagatcaccggaaccacaacaaaactcagcacgaaccctctccggaactgcgccggaatcgctgctattgctacgatgaagatgttagggatcagatcggttggtttatcattagatttgcataaaggtcttcctttaggtagcggtttaggttctagtgcagctagtgccgccgcagctgctgtggcggttaatgagatctttggccggaaattagggagtgatcaattggtattagccggtttagaatcggaagcgaaagtctccggttatcacgctgataatatcgcaccagcgatcatgggtggattcgttttgattagaaactacgaaccacttgatttgaaaccattgaggttcccatctgataaagatctcttctttgttctagtaagccctgactttgaagctccaactaagaaaatgagagctgcattgcctacagagattccaatggttcatcatgtttggaacagtagccaagcagctgctttagtcgctgctgtgttagaaggtgacgcagtgatgcttgggaaggcattgtcgtcggataagattgtggagccgactagagcgccgttgattccgggaatggaagctgtgaagaaggcggctttagaagctggagcatttggatgtactattagcggagctggaccaacagcggttgcggtgattgattcggaggagaagggtcaagtcattggagagaagatggtggaagcgttttggaaagttggtcatttgaaatctgttgcttctgtgaagaagcttgataatgttggtgctaggcttgtcaacagcgtctccagatgatctttgtgtgctgtttgattatgttaagattggaactgtttgattatgttaagattggaaccaatcttgctctgtactgtaatttctagatgataataaagttctttgttttctacacct

SEQ ID NO: 26642 - protein, 370 aa, Arabidopsis thaliana
  peptide (1)..(370): Ceres Seq. ID no. 12422529
  misc_feature (44)..(365): Homolog of NCBI NO: 15838815 NR Description: homoserine kinase [Xylella fastidiosa 9a5c]
  misc_feature (44)..(365): Homolog of NCBI NO: 22997478 NR Description: hypothetical protein [Xylella fastidiosa Ann-1]
  misc_feature (55)..(365): Homolog of NCBI NO: 21231249 NR Description: homoserine kinase
  misc_feature (55)..(365): Homolog of NCBI NO: 21242565 NR Description: homoserine kinase [Xanthomonas axonopodis pv.
  misc_feature (55)..(346): Homolog of NCBI NO: 14521243 NR Description: HOMOSERINE KINASE (HK). [Pyrococcus abyssi]
  misc_feature (53)..(369): Homolog of NCBI NO: 21674844 NR Description: homoserine kinase [Chlorobium tepidum TLS]
  misc_feature (53)..(365): Homolog of NCBI NO: 23136657 NR Description: hypothetical protein [Cytophaga hutchinsonii]
  misc_feature (1)..(370): Homolog of NCBI NO: 4927412 NR Description: homoserine kinase [Arabidopsis thaliana]
  misc_feature (1)..(370): Homolog of NCBI NO: 39104572 NR Description: putative homoserine kinase HSK [Arabidopsis
  misc_feature (1)..(370): Homolog of NCBI NO: 15227800 NR Description: 3-hydroxy-3-methylglutaryl-coenzyme A reductase 2
MASLCFQSPSKPISYFQPKSNPSPPLFAKVSVFRCRASVQTLVAVEPEPVFVSVKTFAPATVANLGPGFDFLGCAVDGLGDHVTLRVDPSVRAGEVSISEITGTTTKLSTNPLRNCAGIAAIATMKMLGIRSVGLSLDLHKGLPLGSGLGSSAASAAAAAVAVNEIFGRKLGSDQLVLAGLESEAKVSGYHADNIAPAIMGGFVLIRNYEPLDLKPLRFPSDKDLFFVLVSPDFEAPTKKMRAALPTEIPMVHHVWNSSQAAALVAAVLEGDAVMLGKALSSDKIVEPTRAPLIPGMEAVKKAALEAGAFGCTISGAGPTAVAVIDSEEKGQVIGEKMVEAFWKVGHLKSVASVKKLDNVGARLVNSVSR

SEQ ID NO: 26643 - protein, 246 aa, Arabidopsis thaliana
  peptide (1)..(246): Ceres Seq. ID no. 12422530
  misc_feature (1)..(241): Homolog of NCBI NO: 15838815 NR Description: homoserine kinase [Xylella fastidiosa 9a5c]
  misc_feature (1)..(241): Homolog of NCBI NO: 22997478 NR Description: hypothetical protein [Xylella fastidiosa Ann-1]
  misc_feature (1)..(241): Homolog of NCBI NO: 21231249 NR Description: homoserine kinase
  misc_feature (1)..(241): Homolog of NCBI NO: 21242565 NR Description: homoserine kinase [Xanthomonas axonopodis pv.
  misc_feature (1)..(222): Homolog of NCBI NO: 14521243 NR Description: HOMOSERINE KINASE (HK). [Pyrococcus abyssi]
  misc_feature (1)..(245): Homolog of NCBI NO: 21674844 NR Description: homoserine kinase [Chlorobium tepidum TLS]
  misc_feature (1)..(241): Homolog of NCBI NO: 23136657 NR Description: hypothetical protein [Cytophaga hutchinsonii]
  misc_feature (1)..(246): Homolog of NCBI NO: 4927412 NR Description: homoserine kinase [Arabidopsis thaliana]
  misc_feature (1)..(246): Homolog of NCBI NO: 39104572 NR Description: putative homoserine kinase HSK [Arabidopsis
  misc_feature (1)..(246): Homolog of NCBI NO: 15227800 NR Description: 3-hydroxy-3-methylglutaryl-coenzyme A reductase 2
MKMLGIRSVGLSLDLHKGLPLGSGLGSSAASAAAAAVAVNEIFGRKLGSDQLVLAGLESEAKVSGYHADNIAPAIMGGFVLIRNYEPLDLKPLRFPSDKDLFFVLVSPDFEAPTKKMRAALPTEIPMVHHVWNSSQAAALVAAVLEGDAVMLGKALSSDKIVEPTRAPLIPGMEAVKKAALEAGAFGCTISGAGPTAVAVIDSEEKGQVIGEKMVEAFWKVGHLKSVASVKKLDNVGARLVNSVSR

SEQ ID NO: 26644 - protein, 244 aa, Arabidopsis thaliana
  peptide (1)..(244): Ceres Seq. ID no. 12422531
  misc_feature (1)..(243): Homolog of NCBI NO: 21674844 NR Description: homoserine kinase [Chlorobium tepidum TLS]
  misc_feature (1)..(239): Homolog of NCBI NO: 23136657 NR Description: hypothetical protein [Cytophaga hutchinsonii]
  misc_feature (1)..(244): Homolog of NCBI NO: 4927412 NR Description: homoserine kinase [Arabidopsis thaliana]
  misc_feature (1)..(244): Homolog of NCBI NO: 39104572 NR Description: putative homoserine kinase HSK [Arabidopsis
  misc_feature (1)..(244): Homolog of NCBI NO: 15227800 NR Description: 3-hydroxy-3-methylglutaryl-coenzyme A reductase 2
  misc_feature (1)..(239): Homolog of NCBI NO: 15838815 NR Description: homoserine kinase [Xylella fastidiosa 9a5c]
  misc_feature (1)..(239): Homolog of NCBI NO: 22997478 NR Description: hypothetical protein [Xylella fastidiosa Ann-1]
  misc_feature (1)..(239): Homolog of NCBI NO: 21231249 NR Description: homoserine kinase
  misc_feature (1)..(239): Homolog of NCBI NO: 21242565 NR Description: homoserine kinase [Xanthomonas axonopodis pv.
  misc_feature (1)..(220): Homolog of NCBI NO: 14521243 NR Description: HOMOSERINE KINASE (HK). [Pyrococcus abyssi]
MLGIRSVGLSLDLHKGLPLGSGLGSSAASAAAAAVAVNEIFGRKLGSDQLVLAGLESEAKVSGYHADNIAPAIMGGFVLIRNYEPLDLKPLRFPSDKDLFFVLVSPDFEAPTKKMRAALPTEIPMVHHVWNSSQAAALVAAVLEGDAVMLGKALSSDKIVEPTRAPLIPGMEAVKKAALEAGAFGCTISGAGPTAVAVIDSEEKGQVIGEKMVEAFWKVGHLKSVASVKKLDNVGARLVNSVSR

SEQ ID NO: 26645 - DNA, 925 bp, Arabidopsis thaliana
  misc_feature (1)..(925): Ceres Seq. ID no. 12577207
  misc_feature: MA Experiment ID: 108434 Result: Up-regulated in Transcription
  misc_feature: MA Experiment 108434 PARAMETER Experiment Name: At_Root_Tips_cDNA_P Parameter: Tissue Value: Root Tips
  misc_feature: MA Experiment ID: 108463 Result: Down-regulated in Transcription
  misc_feature: MA Experiment 108463 PARAMETER Experiment Name: At_Germinating_Seeds_cDNA_P Parameter: Age (day) Value: 3 vs. 0
  misc_feature: MA Experiment 108463 PARAMETER Experiment Name: At_Germinating_Seeds_cDNA_P Parameter: Tissue Value: Germinating Seeds
  misc_feature: MA Experiment ID: 108464 Result: Down-regulated in Transcription
  misc_feature: MA Experiment 108464 PARAMETER Experiment Name: At_Germinating_Seeds_cDNA_P Parameter: Age (day) Value: 4 vs. 0
  misc_feature: MA Experiment 108464 PARAMETER Experiment Name: At_Germinating_Seeds_cDNA_P Parameter: Tissue Value: Germinating Seeds
  misc_feature: MA Experiment ID: 108573 Result: Down-regulated in Transcription
  misc_feature: MA Experiment 108573 PARAMETER Experiment Name: At_Drought_cDNA_P Parameter: Timepoint (hr) Value: 6
  misc_feature: MA Experiment 108573 PARAMETER Experiment Name: At_Drought_cDNA_P Parameter: Tissue Value: Aerial
  misc_feature: MA Experiment 108573 PARAMETER Experiment Name: At_Drought_cDNA_P Parameter: Treatment Value: Drought vs. No Drought
  misc_feature: MA Experiment ID: 20000086 Result: Up-regulated in Transcription
  misc_feature: MA Experiment 20000086 PARAMETER Experiment Name: At_100uM_ABA_Mutants_cDNA_P Parameter: Plant Line Value: CS22
  misc_feature: MA Experiment 20000086 PARAMETER Experiment Name: At_100uM_ABA_Mutants_cDNA_P Parameter: Timepoint (hr) Value: 6
  misc_feature: MA Experiment 20000086 PARAMETER Experiment Name: At_100uM_ABA_Mutants_cDNA_P Parameter: Tissue Value: Aerial
  misc_feature: MA Experiment 20000086 PARAMETER Experiment Name: At_100uM_ABA_Mutants_cDNA_P Parameter: Treatment Value: 100uM ABA vs. No Treatment
  misc_feature: MA Experiment ID: 20000088 Result: Up-regulated in Transcription
  misc_feature: MA Experiment 20000088 PARAMETER Experiment Name: At_100uM_ABA_Mutants_cDNA_P Parameter: Plant Line Value: Landsberg
  misc_feature: MA Experiment 20000088 PARAMETER Experiment Name: At_100uM_ABA_Mutants_cDNA_P Parameter: Timepoint (hr) Value: 6
  misc_feature: MA Experiment 20000088 PARAMETER Experiment Name: At_100uM_ABA_Mutants_cDNA_P Parameter: Tissue Value: Aerial
  misc_feature: MA Experiment 20000088 PARAMETER Experiment Name: At_100uM_ABA_Mutants_cDNA_P Parameter: Treatment Value: 100uM ABA vs. No Treatment
  misc_feature: MA Experiment ID: 20000089 Result: Up-regulated in Transcription
  misc_feature: MA Experiment ID: 20000090 Result: Up-regulated in Transcription
  misc_feature: MA Experiment ID: 20000227 Result: Up-regulated in Transcription
  misc_feature: MA Experiment 20000227 PARAMETER Experiment Name: At_Root-Tips-vs-Tops_P Parameter: Tissue Value: Root Tips vs. Root Tops
  misc_feature: MA Experiment ID: 20001905 Result: Down-regulated in Transcription
  misc_feature: MA Experiment 20001905 PARAMETER Experiment Name: At_Drought_Reproduction_P Parameter: Age (day) Value: 40
  misc_feature: MA Experiment 20001905 PARAMETER Experiment Name: At_Drought_Reproduction_P Parameter: Organism Value: A. thaliana
  misc_feature: MA Experiment 20001905 PARAMETER Experiment Name: At_Drought_Reproduction_P Parameter: Plant Line Value: WS
  misc_feature: MA Experiment 20001905 PARAMETER Experiment Name: At_Drought_Reproduction_P Parameter: Timepoint (day) Value: 10
  misc_feature: MA Experiment 20001905 PARAMETER Experiment Name: At_Drought_Reproduction_P Parameter: Tissue Value: Rosettes
  misc_feature: MA Experiment 20001905 PARAMETER Experiment Name: At_Drought_Reproduction_P Parameter: Treatment Value: Drought vs. No Drought
ctattgagtctttagggtctctctgtgtttgcaaatctgacgccgagtattttgctaaagcagcagccagtcgggacagtgaaatggcgactgaagatgtgcaagatcccagaatcgctaagattgcctcttccattagagtcatccccgacttccctaaaccaggaatcatgtttcaggacataacgacgcttcttctcgacactgaggcctttaaggatactattgctttgtttgttgatagatacaaagataaaggcatatctgttgttgcaggtgttgaagctagaggtttcatttttggccctcctattgcgttggctattggtgccaaatttgttcccatgaggaagcccaagaagctacctgggaaggttatttcggaggagtattcgttggagtatggaacagatacgattgagatgcacgtaggtgcagtagagcctggtgagcgtgctattattattgatgacctcattgccacgggtgggactctcgctgctgcaatccgactacttgaacgagtaggagtgaagattgttgaatgtgcttgcgtaattgagttaccagagcttaagggaaaggagaaactaggagagacgtcgctatttgttcttgtaaagtcggctgcttaacaagaaactggaagagaaggttattggatcgagtgttgatgctatttttcatgtatggtgagacattttgcgtgggatttgatccttgttgtttcaacttatcataattggttcagactagaaaatggcatttgaatgtcaggattcgattgcagtttcctattgttccacttaaaatccccgattaataaggtgttatgggttttatttatagaatcaagttgtaatagtagactccaacaggggctaaagtcttggtaacgcaattcttcttttaagtttcgcagccc

SEQ ID NO: 26646 - protein, 210 aa, Arabidopsis thaliana
  peptide (1)..(210): Ceres Seq. ID no. 12577208
  misc_feature (28)..(207): Homolog of NCBI NO: 15234553 NR Description: putative adenine phosphoribosyltransferase
  misc_feature (31)..(207): Homolog of NCBI NO: 15235709 NR Description: adenine phosphoribosyltransferase (EC 2.4.2.7) -
  misc_feature (31)..(208): Homolog of NCBI NO: 33354190 NR Description: putative adenine phosphoribosyl transferase
  misc_feature (35)..(208): Homolog of NCBI NO: 2499932 NR Description: Adenine phosphoribosyltransferase 1 (APRT)
  misc_feature (35)..(208): Homolog of NCBI NO: 9711921 NR Description: Adenine phosphoribosyltransferase [Hordeum
  misc_feature (20)..(210): Homolog of NCBI NO: 32492063 NR Description: adenine phosphoribosyltransferase [Brassica napus]
  misc_feature (121)..(210): Homolog of NCBI NO: 25286872 NR Description: protein F17L21.24 [imported] - Arabidopsis
  misc_feature (28)..(122): Homolog of NCBI NO: 25286872 NR Description: protein F17L21.24 [imported] - Arabidopsis
  misc_feature (28)..(210): Homolog of NCBI NO: 30689934 NR Description: adenine phosphoribosyltransferase 1, APRT
  misc_feature (17)..(210): Homolog of NCBI NO: 18396344 NR Description: adenine phosphoribosyltransferase 1, APRT
IESLGSLCVCKSDAEYFAKAAASRDSEMATEDVQDPRIAKIASSIRVIPDFPKPGIMFQDITTLLLDTEAFKDTIALFVDRYKDKGISVVAGVEARGFIFGPPIALAIGAKFVPMRKPKKLPGKVISEEYSLEYGTDTIEMHVGAVEPGERAIIIDDLIATGGTLAAAIRLLERVGVKIVECACVIELPELKGKEKLGETSLFVLVKSAA

SEQ ID NO: 26647 - protein, 183 aa, Arabidopsis thaliana
  peptide (1)..(183): Ceres Seq. ID no. 12577209
  misc_feature (1)..(180): Homolog of NCBI NO: 15234553 NR Description: putative adenine phosphoribosyltransferase
  misc_feature (4)..(180): Homolog of NCBI NO: 15235709 NR Description: adenine phosphoribosyltransferase (EC 2.4.2.7) -
  misc_feature (4)..(181): Homolog of NCBI NO: 33354190 NR Description: putative adenine phosphoribosyl transferase
  misc_feature (8)..(181): Homolog of NCBI NO: 2499932 NR Description: Adenine phosphoribosyltransferase 1 (APRT)
  misc_feature (8)..(181): Homolog of NCBI NO: 9711921 NR Description: Adenine phosphoribosyltransferase [Hordeum
  misc_feature (1)..(183): Homolog of NCBI NO: 32492063 NR Description: adenine phosphoribosyltransferase [Brassica napus]
  misc_feature (94)..(183): Homolog of NCBI NO: 25286872 NR Description: protein F17L21.24 [imported] - Arabidopsis
  misc_feature (1)..(95): Homolog of NCBI NO: 25286872 NR Description: protein F17L21.24 [imported] - Arabidopsis
  misc_feature (1)..(183): Homolog of NCBI NO: 30689934 NR Description: adenine phosphoribosyltransferase 1, APRT
  misc_feature (1)..(183): Homolog of NCBI NO: 18396344 NR Description: adenine phosphoribosyltransferase 1, APRT
MATEDVQDPRIAKIASSIRVIPDFPKPGIMFQDITTLLLDTEAFKDTIALFVDRYKDKGISVVAGVEARGFIFGPPIALAIGAKFVPMRKPKKLPGKVISEEYSLEYGTDTIEMHVGAVEPGERAIIIDDLIATGGTLAAAIRLLERVGVKIVECACVIELPELKGKEKLGETSLFVLVKSAA

SEQ ID NO: 26648 - protein, 154 aa, Arabidopsis thaliana
  peptide (1)..(154): Ceres Seq. ID no. 12577210
  misc_feature (1)..(151): Homolog of NCBI NO: 15234553 NR Description: putative adenine phosphoribosyltransferase
  misc_feature (1)..(151): Homolog of NCBI NO: 15235709 NR Description: adenine phosphoribosyltransferase (EC 2.4.2.7) -
  misc_feature (1)..(152): Homolog of NCBI NO: 33354190 NR Description: putative adenine phosphoribosyl transferase
  misc_feature (1)..(152): Homolog of NCBI NO: 2499932 NR Description: Adenine phosphoribosyltransferase 1 (APRT)
  misc_feature (1)..(152): Homolog of NCBI NO: 9711921 NR Description: Adenine phosphoribosyltransferase [Hordeum
  misc_feature (1)..(154): Homolog of NCBI NO: 32492063 NR Description: adenine phosphoribosyltransferase [Brassica napus]
  misc_feature (65)..(154): Homolog of NCBI NO: 25286872 NR Description: protein F17L21.24 [imported] - Arabidopsis
  misc_feature (1)..(66): Homolog of NCBI NO: 25286872 NR Description: protein F17L21.24 [imported] - Arabidopsis
  misc_feature (1)..(154): Homolog of NCBI NO: 30689934 NR Description: adenine phosphoribosyltransferase 1, APRT
  misc_feature (1)..(154): Homolog of NCBI NO: 18396344 NR Description: adenine phosphoribosyltransferase 1, APRT
MFQDITTLLLDTEAFKDTIALFVDRYKDKGISVVAGVEARGFIFGPPIALAIGAKFVPMRKPKKLPGKVISEEYSLEYGTDTIEMHVGAVEPGERAIIIDDLIATGGTLAAAIRLLERVGVKIVECACVIELPELKGKEKLGETSLFVLVKSAA

SEQ ID NO: 26649 - DNA, 1294 bp, Arabidopsis thaliana
  misc_feature (1)..(1294): Ceres Seq. ID no. 13653831
  misc_feature: MA Experiment ID: 108434 Result: Up-regulated in Transcription
  misc_feature: MA Experiment 108434 PARAMETER Experiment Name: At_Root_Tips_cDNA_P Parameter: Tissue Value: Root Tips
  misc_feature: MA Experiment ID: 108461 Result: Up-regulated in Transcription
  misc_feature: MA Experiment 108461 PARAMETER Experiment Name: At_Germinating_Seeds_cDNA_P Parameter: Age (day) Value: 1 vs. 0
  misc_feature: MA Experiment 108461 PARAMETER Experiment Name: At_Germinating_Seeds_cDNA_P Parameter: Tissue Value: Germinating Seeds
  misc_feature: MA Experiment ID: 108462 Result: Up-regulated in Transcription
  misc_feature: MA Experiment 108462 PARAMETER Experiment Name: At_Germinating_Seeds_cDNA_P Parameter: Age (day) Value: 2 vs. 0
  misc_feature: MA Experiment 108462 PARAMETER Experiment Name: At_Germinating_Seeds_cDNA_P Parameter: Tissue Value: Germinating Seeds
  misc_feature: MA Experiment ID: 108464 Result: Up-regulated in Transcription
  misc_feature: MA Experiment 108464 PARAMETER Experiment Name: At_Germinating_Seeds_cDNA_P Parameter: Age (day) Value: 4 vs. 0
  misc_feature: MA Experiment 108464 PARAMETER Experiment Name: At_Germinating_Seeds_cDNA_P Parameter: Tissue Value: Germinating Seeds
  misc_feature: MA Experiment ID: 108577 Result: Down-regulated in Transcription
  misc_feature: MA Experiment 108577 PARAMETER Experiment Name: At_42deg_Heat_cDNA_P Parameter: Temperature (deg C) Value: 42 vs. 22
  misc_feature: MA Experiment 108577 PARAMETER Experiment Name: At_42deg_Heat_cDNA_P Parameter: Timepoint (hr) Value: 6
  misc_feature: MA Experiment 108577 PARAMETER Experiment Name: At_42deg_Heat_cDNA_P Parameter: Tissue Value: Aerial
  misc_feature: MA Experiment ID: 108595 Result: Down-regulated in Transcription
  misc_feature: MA Experiment 108595 PARAMETER Experiment Name: At_Ler-pi_Ovule_cDNA_P Parameter: Plant Line Value: null
  misc_feature: MA Experiment ID: 20000087 Result: Down-regulated in Transcription
  misc_feature: MA Experiment 20000087 PARAMETER Experiment Name: At_100uM_ABA_Mutants_cDNA_P Parameter: Plant Line Value: WS
  misc_feature: MA Experiment 20000087 PARAMETER Experiment Name: At_100uM_ABA_Mutants_cDNA_P Parameter: Timepoint (hr) Value: 6
  misc_feature: MA Experiment 20000087 PARAMETER Experiment Name: At_100uM_ABA_Mutants_cDNA_P Parameter: Tissue Value: Aerial
  misc_feature: MA Experiment 20000087 PARAMETER Experiment Name: At_100uM_ABA_Mutants_cDNA_P Parameter: Treatment Value: 100uM ABA vs. No Treatment
  misc_feature: MA Experiment ID: 20000111 Result: Down-regulated in Transcription
  misc_feature: MA Experiment 20000111 PARAMETER Experiment Name: At_42deg_Heat_cDNA_P Parameter: Temperature (deg C) Value: 42 vs. 22
  misc_feature: MA Experiment 20000111 PARAMETER Experiment Name: At_42deg_Heat_cDNA_P Parameter: Timepoint (hr) Value: 6
  misc_feature: MA Experiment 20000111 PARAMETER Experiment Name: At_42deg_Heat_cDNA_P Parameter: Tissue Value: Aerial
  misc_feature: MA Experiment ID: 20000113 Result: Down-regulated in Transcription
  misc_feature: MA Experiment 20000113 PARAMETER Experiment Name: At_42deg_Heat_cDNA_P Parameter: Temperature (deg C) Value: 42 vs. 22
  misc_feature: MA Experiment 20000113 PARAMETER Experiment Name: At_42deg_Heat_cDNA_P Parameter: Timepoint (hr) Value: 8
  misc_feature: MA Experiment 20000113 PARAMETER Experiment Name: At_42deg_Heat_cDNA_P Parameter: Tissue Value: Aerial
  misc_feature: MA Experiment ID: 20000173 Result: Down-regulated in Transcription
  misc_feature: MA Experiment 20000173 PARAMETER Experiment Name: At_42deg_Heat_P Parameter: Age (day) Value: 14
  misc_feature: MA Experiment 20000173 PARAMETER Experiment Name: At_42deg_Heat_P Parameter: Organism Value: A. thaliana
  misc_feature: MA Experiment 20000173 PARAMETER Experiment Name: At_42deg_Heat_P Parameter: Plant Line Value: WS
  misc_feature: MA Experiment 20000173 PARAMETER Experiment Name: At_42deg_Heat_P Parameter: Temperature (deg C) Value: 42 vs. 22
  misc_feature: MA Experiment 20000173 PARAMETER Experiment Name: At_42deg_Heat_P Parameter: Timepoint (hr) Value: 6
  misc_feature: MA Experiment 20000173 PARAMETER Experiment Name: At_42deg_Heat_P Parameter: Tissue Value: Aerial
  misc_feature: MA Experiment ID: 20000180 Result: Up-regulated in Transcription
  misc_feature: MA Experiment 20000180 PARAMETER Experiment Name: At_Germinating_Seeds_P Parameter: Age (hr) Value: 24 vs. 0
  misc_feature: MA Experiment 20000180 PARAMETER Experiment Name: At_Germinating_Seeds_P Parameter: Tissue Value: Germinating Seeds
  misc_feature: MA Experiment ID: 20000227 Result: Up-regulated in Transcription
  misc_feature: MA Experiment 20000227 PARAMETER Experiment Name: At_Root-Tips-vs-Tops_P Parameter: Tissue Value: Root Tips vs. Root Tops
  misc_feature: MA Experiment ID: 20000267 Result: Down-regulated in Transcription
  misc_feature: MA Experiment 20000267 PARAMETER Experiment Name: At_Drought_P Parameter: Age (day) Value: 7
  misc_feature: MA Experiment 20000267 PARAMETER Experiment Name: At_Drought_P Parameter: Organism Value: A. thaliana
  misc_feature: MA Experiment 20000267 PARAMETER Experiment Name: At_Drought_P Parameter: Plant Line Value: WS
  misc_feature: MA Experiment 20000267 PARAMETER Experiment Name: At_Drought_P Parameter: Timepoint (hr) Value: 6
  misc_feature: MA Experiment 20000267 PARAMETER Experiment Name: At_Drought_P Parameter: Tissue Value: Whole Plant
  misc_feature: MA Experiment 20000267 PARAMETER Experiment Name: At_Drought_P Parameter: Treatment Value: Drought vs. No Drought
  misc_feature: MA Experiment ID: 20000436 Result: Down-regulated in Transcription
  misc_feature: MA Experiment 20000436 PARAMETER Experiment Name: At_Drought_P Parameter: Age (day) Value: 7
  misc_feature: MA Experiment 20000436 PARAMETER Experiment Name: At_Drought_P Parameter: Organism Value: A. thaliana
  misc_feature: MA Experiment 20000436 PARAMETER Experiment Name: At_Drought_P Parameter: Plant Line Value: WS
  misc_feature: MA Experiment 20000436 PARAMETER Experiment Name: At_Drought_P Parameter: Timepoint (hr) Value: 12
  misc_feature: MA Experiment 20000436 PARAMETER Experiment Name: At_Drought_P Parameter: Tissue Value: Whole Plant
  misc_feature: MA Experiment 20000436 PARAMETER Experiment Name: At_Drought_P Parameter: Treatment Value: Drought vs. No Drought
  misc_feature: MA Experiment ID: 20000437 Result: Down-regulated in Transcription
  misc_feature: MA Experiment 20000437 PARAMETER Experiment Name: At_Drought_P Parameter: Age (day) Value: 8
  misc_feature: MA Experiment 20000437 PARAMETER Experiment Name: At_Drought_P Parameter: Organism Value: A. thaliana
  misc_feature: MA Experiment 20000437 PARAMETER Experiment Name: At_Drought_P Parameter: Plant Line Value: WS
  misc_feature: MA Experiment 20000437 PARAMETER Experiment Name: At_Drought_P Parameter: Timepoint (hr) Value: 24
  misc_feature: MA Experiment 20000437 PARAMETER Experiment Name: At_Drought_P Parameter: Tissue Value: Whole Plant
  misc_feature: MA Experiment 20000437 PARAMETER Experiment Name: At_Drought_P Parameter: Treatment Value: Drought vs. No Drought
  misc_feature: MA Experiment ID: 20001247 Result: Up-regulated in Transcription
  misc_feature: MA Experiment 20001247 PARAMETER Experiment Name: At_Far-red-induction_P Parameter: Age (day) Value: 7
  misc_feature: MA Experiment 20001247 PARAMETER Experiment Name: At_Far-red-induction_P Parameter: Light Value: Far-red vs. White
  misc_feature: MA Experiment 20001247 PARAMETER Experiment Name: At_Far-red-induction_P Parameter: Organism Value: A. thaliana
  misc_feature: MA Experiment 20001247 PARAMETER Experiment Name: At_Far-red-induction_P Parameter: Plant Line Value: Columbia
  misc_feature: MA Experiment 20001247 PARAMETER Experiment Name: At_Far-red-induction_P Parameter: Timepoint (hr) Value: 1
  misc_feature: MA Experiment 20001247 PARAMETER Experiment Name: At_Far-red-induction_P Parameter: Tissue Value: Whole Plant
  misc_feature: MA Experiment ID: 20001248 Result: Up-regulated in Transcription
  misc_feature: MA Experiment 20001248 PARAMETER Experiment Name: At_Far-red-induction_P Parameter: Age (day) Value: 7
  misc_feature: MA Experiment 20001248 PARAMETER Experiment Name: At_Far-red-induction_P Parameter: Light Value: Far-red vs. White
  misc_feature: MA Experiment 20001248 PARAMETER Experiment Name: At_Far-red-induction_P Parameter: Organism Value: A. thaliana
  misc_feature: MA Experiment 20001248 PARAMETER Experiment Name: At_Far-red-induction_P Parameter: Plant Line Value: Columbia
  misc_feature: MA Experiment 20001248 PARAMETER Experiment Name: At_Far-red-induction_P Parameter: Timepoint (hr) Value: 4
  misc_feature: MA Experiment 20001248 PARAMETER Experiment Name: At_Far-red-induction_P Parameter: Tissue Value: Whole Plant
  misc_feature: MA Experiment ID: 20001450 Result: Up-regulated in Transcription
  misc_feature: MA Experiment 20001450 PARAMETER Experiment Name: At_Far-red-induction_P Parameter: Age (day) Value: 7
  misc_feature: MA Experiment 20001450 PARAMETER Experiment Name: At_Far-red-induction_P Parameter: Light Value: Far-red vs. White
  misc_feature: MA Experiment 20001450 PARAMETER Experiment Name: At_Far-red-induction_P Parameter: Organism Value: A. thaliana
  misc_feature: MA Experiment 20001450 PARAMETER Experiment Name: At_Far-red-induction_P Parameter: Plant Line Value: Columbia
  misc_feature: MA Experiment 20001450 PARAMETER Experiment Name: At_Far-red-induction_P Parameter: Timepoint (hr) Value: 8
  misc_feature: MA Experiment 20001450 PARAMETER Experiment Name: At_Far-red-induction_P Parameter: Tissue Value: Whole Plant
  misc_feature: MA Experiment ID: 20001451 Result: Up-regulated in Transcription
  misc_feature: MA Experiment 20001451 PARAMETER Experiment Name: At_Far-red-induction_P Parameter: Age (day) Value: 7
  misc_feature: MA Experiment 20001451 PARAMETER Experiment Name: At_Far-red-induction_P Parameter: Light Value: Far-red vs. White
  misc_feature: MA Experiment 20001451 PARAMETER Experiment Name: At_Far-red-induction_P Parameter: Organism Value: A. thaliana
  misc_feature: MA Experiment 20001451 PARAMETER Experiment Name: At_Far-red-induction_P Parameter: Plant Line Value: Columbia
  misc_feature: MA Experiment 20001451 PARAMETER Experiment Name: At_Far-red-induction_P Parameter: Timepoint (hr) Value: 24
  misc_feature: MA Experiment 20001451 PARAMETER Experiment Name: At_Far-red-induction_P Parameter: Tissue Value: Whole Plant
  misc_feature: MA Experiment ID: 20001554 Result: Down-regulated in Transcription
  misc_feature: MA Experiment 20001554 PARAMETER Experiment Name: At_Drought_Soil_Dry_P Parameter: Age (day) Value: 21
  misc_feature: MA Experiment 20001554 PARAMETER Experiment Name: At_Drought_Soil_Dry_P Parameter: Organism Value: A. thaliana
  misc_feature: MA Experiment 20001554 PARAMETER Experiment Name: At_Drought_Soil_Dry_P Parameter: Plant Line Value: WS
  misc_feature: MA Experiment 20001554 PARAMETER Experiment Name: At_Drought_Soil_Dry_P Parameter: Post Timepoint (hr) Value: None
  misc_feature: MA Experiment 20001554 PARAMETER Experiment Name: At_Drought_Soil_Dry_P Parameter: Post-Treatment Value: None
  misc_feature: MA Experiment 20001554 PARAMETER Experiment Name: At_Drought_Soil_Dry_P Parameter: Timepoint (day) Value: 7
  misc_feature: MA Experiment 20001554 PARAMETER Experiment Name: At_Drought_Soil_Dry_P Parameter: Treatment Value: Drought vs. No Drought
  misc_feature: MA Experiment ID: 20001555 Result: Down-regulated in Transcription
  misc_feature: MA Experiment 20001555 PARAMETER Experiment Name: At_Drought_Soil_Dry_P Parameter: Age (day) Value: 24
  misc_feature: MA Experiment 20001555 PARAMETER Experiment Name: At_Drought_Soil_Dry_P Parameter: Organism Value: A. thaliana
  misc_feature: MA Experiment 20001555 PARAMETER Experiment Name: At_Drought_Soil_Dry_P Parameter: Plant Line Value: WS
  misc_feature: MA Experiment 20001555 PARAMETER Experiment Name: At_Drought_Soil_Dry_P Parameter: Post Timepoint (hr) Value: None
  misc_feature: MA Experiment 20001555 PARAMETER Experiment Name: At_Drought_Soil_Dry_P Parameter: Post-Treatment Value: None
  misc_feature: MA Experiment 20001555 PARAMETER Experiment Name: At_Drought_Soil_Dry_P Parameter: Timepoint (day) Value: 10
  misc_feature: MA Experiment 20001555 PARAMETER Experiment Name: At_Drought_Soil_Dry_P Parameter: Treatment Value: Drought vs. No Drought
  misc_feature: MA Experiment ID: 20001560 Result: Up-regulated in Transcription
  misc_feature: MA Experiment 20001560 PARAMETER Experiment Name: At_Drought_Soil_Dry_P Parameter: Age (day) Value: 28
  misc_feature: MA Experiment 20001560 PARAMETER Experiment Name: At_Drought_Soil_Dry_P Parameter: Organism Value: A. thaliana
  misc_feature: MA Experiment 20001560 PARAMETER Experiment Name: At_Drought_Soil_Dry_P Parameter: Plant Line Value: WS
  misc_feature: MA Experiment 20001560 PARAMETER Experiment Name: At_Drought_Soil_Dry_P Parameter: Post Timepoint (hr) Value: None
  misc_feature: MA Experiment 20001560 PARAMETER Experiment Name: At_Drought_Soil_Dry_P Parameter: Post-Treatment Value: None
  misc_feature: MA Experiment 20001560 PARAMETER Experiment Name: At_Drought_Soil_Dry_P Parameter: Timepoint (day) Value: 14
  misc_feature: MA Experiment 20001560 PARAMETER Experiment Name: At_Drought_Soil_Dry_P Parameter: Treatment Value: Drought vs. No Drought
  misc_feature: MA Experiment ID: 20001904 Result: Down-regulated in Transcription
  misc_feature: MA Experiment 20001904 PARAMETER Experiment Name: At_Drought_Reproduction_P Parameter: Age (day) Value: 37
  misc_feature: MA Experiment 20001904 PARAMETER Experiment Name: At_Drought_Reproduction_P Parameter: Organism Value: A. thaliana
  misc_feature: MA Experiment 20001904 PARAMETER Experiment Name: At_Drought_Reproduction_P Parameter: Plant Line Value: WS
  misc_feature: MA Experiment 20001904 PARAMETER Experiment Name: At_Drought_Reproduction_P Parameter: Timepoint (day) Value: 7
  misc_feature: MA Experiment 20001904 PARAMETER Experiment Name: At_Drought_Reproduction_P Parameter: Tissue Value: Rosettes
  misc_feature: MA Experiment 20001904 PARAMETER Experiment Name: At_Drought_Reproduction_P Parameter: Treatment Value: Drought vs. No Drought
  misc_feature: MA Experiment ID: 20001905 Result: Down-regulated in Transcription
  misc_feature: MA Experiment 20001905 PARAMETER Experiment Name: At_Drought_Reproduction_P Parameter: Age (day) Value: 40
  misc_feature: MA Experiment 20001905 PARAMETER Experiment Name: At_Drought_Reproduction_P Parameter: Organism Value: A. thaliana
  misc_feature: MA Experiment 20001905 PARAMETER Experiment Name: At_Drought_Reproduction_P Parameter: Plant Line Value: WS
  misc_feature: MA Experiment 20001905 PARAMETER Experiment Name: At_Drought_Reproduction_P Parameter: Timepoint (day) Value: 10
  misc_feature: MA Experiment 20001905 PARAMETER Experiment Name: At_Drought_Reproduction_P Parameter: Tissue Value: Rosettes
  misc_feature: MA Experiment 20001905 PARAMETER Experiment Name: At_Drought_Reproduction_P Parameter: Treatment Value: Drought vs. No Drought
  misc_feature: MA Experiment ID: 20001911 Result: Down-regulated in Transcription
  misc_feature: MA Experiment 20001911 PARAMETER Experiment Name: At_Drought_Reproduction_P Parameter: Age (day) Value: 40
  misc_feature: MA Experiment 20001911 PARAMETER Experiment Name: At_Drought_Reproduction_P Parameter: Organism Value: A. thaliana
  misc_feature: MA Experiment 20001911 PARAMETER Experiment Name: At_Drought_Reproduction_P Parameter: Plant Line Value: WS
  misc_feature: MA Experiment 20001911 PARAMETER Experiment Name: At_Drought_Reproduction_P Parameter: Timepoint (day) Value: 10
  misc_feature: MA Experiment 20001911 PARAMETER Experiment Name: At_Drought_Reproduction_P Parameter: Tissue Value: Flowers
  misc_feature: MA Experiment 20001911 PARAMETER Experiment Name: At_Drought_Reproduction_P Parameter: Treatment Value: Drought vs. No Drought
cttcttccccaccactccgattcatctttatcctctctctcatctcgtccgttgttgcataagtgctatggatctcgcgtcgaatcttggtgggaagatcgataaatccgatgttctcaccgccgtcgaaaagtatgagcaatatcatgtcttccatggaggaaacgaggaagagagaaaagccaattatactgacatggttaataagtactatgaccttgctactagcttttatgagtacggatggggagaatccttccattttgcacaaagatggaaaggagaatcgcttcgagagagtattaagcgacacgagcactttcttgctcttcagcttggcatccaaccaggacaaaaggtactggatgtaggatgtggaattggtggaccgttgagggaaattgcaagattcagcaattcagttgttaccgggctcaacaataacgaataccagatcaccagaggcaaggaactaaaccgacttgcaggtgtcgacaagacatgtaactttgtcaaggctgacttcatgaagatgccattcccggaaaacagtttcgatgcagtttatgcaatagaagcaacttgccatgcacctgatgcgtatggatgctacaaagagatctacagagtgctaaagcctgggcaatgttttgctgcctatgagtggtgtatgactgatgcatttgaccctgataacgccgaacatcagaaaataaagggagagatagagattggagatggtcttcctgacattaggctgactacaaaatgcctcgaagctctgaagcaggccggttttgaagtgatatgggaaaaggatctggccaaggactcgccggtcccatggtacttacctcttgacaaaaatcatttctcactcagtagcttccgccttacagctgttggacgattcataaccaaaaacatggtcaagatccttgaatacataagacttgcacctcaaggaagccaaagggtctcaaatttcctggagcaggctgcggaaggattagtcgacggtggaaggagagagattttcacgccaatgtatttcttcttggcccggaagccagagtaagcggatgagagatggcgatggtcatcgtaggtcgaatgaagtgacaaaatttctcaatttgcagtcttattttctatgtttatcggatttgttgcagagtttcttattcaccaactatattttggatgttcgtaacatgtcacgtgttgttcatgtgcactctgcctgaaatctgaatcatgtgcacatgcccaaaatatcttggaatctttcttt

SEQ ID NO: 26650 - protein, 358 aa, Arabidopsis thaliana
  peptide (1)..(358): Ceres Seq. ID no. 13653832
  misc_feature (73)..(274): Pfam Name: ubiE/COQ5 methyltransferase family Pfam Description: ubiE/COQ5 methyltransferase family
  misc_feature (24)..(357): Homolog of NCBI NO: 3603295 NR Description: S-adenosyl-methionine
  misc_feature (22)..(357): Homolog of NCBI NO: 3560531 NR Description: cycloartenol-C24-methyltransferase [Oryza sativa
  misc_feature (22)..(357): Homolog of NCBI NO: 7443715 NR Description: sterol 24-C-methyltransferase (EC 2.1.1.41) -
  misc_feature (22)..(357): Homolog of NCBI NO: 34393309 NR Description: cycloartenol-C24-methyltransferase
  misc_feature (22)..(357): Homolog of NCBI NO: 3560474 NR Description: S-adenosyl-methionine-sterol-C- methyltransferase
  misc_feature (22)..(357): Homolog of NCBI NO: 7443716 NR Description: sterol 24-C-methyltransferase (EC 2.1.1.41)
  misc_feature (22)..(357): Homolog of NCBI NO: 7443719 NR Description: sterol 24-C-methyltransferase (EC 2.1.1.41) -
  misc_feature (20)..(358): Homolog of NCBI NO: 7443720 NR Description: probable sterol 24-C-methyltransferase (EC
  misc_feature (23)..(358): Homolog of NCBI NO: 21434843 NR Description: cephalopod [Arabidopsis thaliana]
  misc_feature (23)..(358): Homolog of NCBI NO: 15240691 NR Description: 24-sterol C-methyltransferase [Arabidopsis
FFPTTPIHLYPLSHLVRCCISAMDLASNLGGKIDKSDVLTAVEKYEQYHVFHGGNEEERKANYTDMVNKYYDLATSFYEYGWGESFHFAQRWKGESLRESIKRHEHFLALQLGIQPGQKVLDVGCGIGGPLREIARFSNSVVTGLNNNEYQITRGKELNRLAGVDKTCNFVKADFMKMPFPENSFDAVYAIEATCHAPDAYGCYKEIYRVLKPGQCFAAYEWCMTDAFDPDNAEHQKIKGEIEIGDGLPDIRLTTKCLEALKQAGFEVIWEKDLAKDSPVPWYLPLDKNHFSLSSFRLTAVGRFITKNMVKILEYIRLAPQGSQRVSNFLEQAAEGLVDGGRREIFTPMYFFLARKPE

SEQ ID NO: 26651 - protein, 336 aa, Arabidopsis thaliana
  peptide (1)..(336): Ceres Seq. ID no. 13653833
  misc_feature (51)..(252): Pfam Name: ubiE/COQ5 methyltransferase family Pfam Description: ubiE/COQ5 methyltransferase family
  misc_feature (2)..(335): Homolog of NCBI NO: 3603295 NR Description: S-adenosyl-methionine
  misc_feature (1)..(335): Homolog of NCBI NO: 3560531 NR Description: cycloartenol-C24-methyltransferase [Oryza sativa
  misc_feature (1)..(335): Homolog of NCBI NO: 7443715 NR Description: sterol 24-C-methyltransferase (EC 2.1.1.41) -
  misc_feature (1)..(335): Homolog of NCBI NO: 34393309 NR Description: cycloartenol-C24-methyltransferase
  misc_feature (1)..(335): Homolog of NCBI NO: 3560474 NR Description: S-adenosyl-methionine-sterol-C- methyltransferase
  misc_feature (1)..(335): Homolog of NCBI NO: 7443716 NR Description: sterol 24-C-methyltransferase (EC 2.1.1.41)
  misc_feature (1)..(335): Homolog of NCBI NO: 7443719 NR Description: sterol 24-C-methyltransferase (EC 2.1.1.41) -
  misc_feature (1)..(336): Homolog of NCBI NO: 7443720 NR Description: probable sterol 24-C-methyltransferase (EC
  misc_feature (1)..(336): Homolog of NCBI NO: 21434843 NR Description: cephalopod [Arabidopsis thaliana]
  misc_feature (1)..(336): Homolog of NCBI NO: 15240691 NR Description: 24-sterol C-methyltransferase [Arabidopsis
MDLASNLGGKIDKSDVLTAVEKYEQYHVFHGGNEEERKANYTDMVNKYYDLATSFYEYGWGESFHFAQRWKGESLRESIKRHEHFLALQLGIQPGQKVLDVGCGIGGPLREIARFSNSVVTGLNNNEYQITRGKELNRLAGVDKTCNFVKADFMKMPFPENSFDAVYAIEATCHAPDAYGCYKEIYRVLKPGQCFAAYEWCMTDAFDPDNAEHQKIKGEIEIGDGLPDIRLTTKCLEALKQAGFEVIWEKDLAKDSPVPWYLPLDKNHFSLSSFRLTAVGRFITKNMVKILEYIRLAPQGSQRVSNFLEQAAEGLVDGGRREIFTPMYFFLARKPE

SEQ ID NO: 26652 - protein, 293 aa, Arabidopsis thaliana
  peptide (1)..(293): Ceres Seq. ID no. 13653834
  misc_feature (8)..(209): Pfam Name: ubiE/COQ5 methyltransferase family Pfam Description: ubiE/COQ5 methyltransferase family
  misc_feature (1)..(292): Homolog of NCBI NO: 3603295 NR Description: S-adenosyl-methionine
  misc_feature (1)..(292): Homolog of NCBI NO: 3560531 NR Description: cycloartenol-C24-methyltransferase [Oryza sativa
  misc_feature (1)..(292): Homolog of NCBI NO: 7443715 NR Description: sterol 24-C-methyltransferase (EC 2.1.1.41) -
  misc_feature (1)..(292): Homolog of NCBI NO: 34393309 NR Description: cycloartenol-C24-methyltransferase
  misc_feature (1)..(292): Homolog of NCBI NO: 3560474 NR Description: S-adenosyl-methionine-sterol-C- methyltransferase
  misc_feature (1)..(292): Homolog of NCBI NO: 7443716 NR Description: sterol 24-C-methyltransferase (EC 2.1.1.41)
  misc_feature (1)..(292): Homolog of NCBI NO: 7443719 NR Description: sterol 24-C-methyltransferase (EC 2.1.1.41) -
  misc_feature (1)..(293): Homolog of NCBI NO: 7443720 NR Description: probable sterol 24-C-methyltransferase (EC
  misc_feature (1)..(293): Homolog of NCBI NO: 21434843 NR Description: cephalopod [Arabidopsis thaliana]
  misc_feature (1)..(293): Homolog of NCBI NO: 15240691 NR Description: 24-sterol C-methyltransferase [Arabidopsis
MVNKYYDLATSFYEYGWGESFHFAQRWKGESLRESIKRHEHFLALQLGIQPGQKVLDVGCGIGGPLREIARFSNSVVTGLNNNEYQITRGKELNRLAGVDKTCNFVKADFMKMPFPENSFDAVYAIEATCHAPDAYGCYKEIYRVLKPGQCFAAYEWCMTDAFDPDNAEHQKIKGEIEIGDGLPDIRLTTKCLEALKQAGFEVIWEKDLAKDSPVPWYLPLDKNHFSLSSFRLTAVGRFITKNMVKILEYIRLAPQGSQRVSNFLEQAAEGLVDGGRREIFTPMYFFLARKPE

SEQ ID NO: 26653 - DNA, 1215 bp, Arabidopsis thaliana
  misc_feature (1)..(1215): Ceres Seq. ID no. 12394462
  misc_feature: MA Experiment ID: 108434 Result: Down-regulated in Transcription
  misc_feature: MA Experiment 108434 PARAMETER Experiment Name: At_Root_Tips_cDNA_P Parameter: Tissue Value: Root Tips
  misc_feature: MA Experiment ID: 108461 Result: Up-regulated in Transcription
  misc_feature: MA Experiment 108461 PARAMETER Experiment Name: At_Germinating_Seeds_cDNA_P Parameter: Age (day) Value: 1 vs. 0
  misc_feature: MA Experiment 108461 PARAMETER Experiment Name: At_Germinating_Seeds_cDNA_P Parameter: Tissue Value: Germinating Seeds
  misc_feature: MA Experiment ID: 108561 Result: Up-regulated in Transcription
  misc_feature: MA Experiment 108561 PARAMETER Experiment Name: At_100uM_ABA_cDNA_P Parameter: Timepoint (hr) Value: 6
  misc_feature: MA Experiment 108561 PARAMETER Experiment Name: At_100uM_ABA_cDNA_P Parameter: Tissue Value: Aerial
  misc_feature: MA Experiment 108561 PARAMETER Experiment Name: At_100uM_ABA_cDNA_P Parameter: Treatment Value: 100uM ABA vs. No Treatment
  misc_feature: MA Experiment ID: 108574 Result: Up-regulated in Transcription
  misc_feature: MA Experiment 108574 PARAMETER Experiment Name: At_Wounding__cDNA_P Parameter: Timepoint (hr) Value: 1
  misc_feature: MA Experiment 108574 PARAMETER Experiment Name: At_Wounding__cDNA_P Parameter: Tissue Value: Aerial
  misc_feature: MA Experiment 108574 PARAMETER Experiment Name: At_Wounding__cDNA_P Parameter: Treatment Value: Wounding vs. No Wounding
  misc_feature: MA Experiment ID: 108605 Result: Up-regulated in Transcription
  misc_feature: MA Experiment 108605 PARAMETER Experiment Name: At_100uM_ABA_cDNA_P Parameter: Timepoint (hr) Value: 6
  misc_feature: MA Experiment 108605 PARAMETER Experiment Name: At_100uM_ABA_cDNA_P Parameter: Tissue Value: Aerial
  misc_feature: MA Experiment 108605 PARAMETER Experiment Name: At_100uM_ABA_cDNA_P Parameter: Treatment Value: 100uM ABA vs. No Treatment
  misc_feature: MA Experiment ID: 108607 Result: Up-regulated in Transcription
  misc_feature: MA Experiment 108607 PARAMETER Experiment Name: At_100uM_ABA_cDNA_P Parameter: Timepoint (hr) Value: 4
  misc_feature: MA Experiment 108607 PARAMETER Experiment Name: At_100uM_ABA_cDNA_P Parameter: Tissue Value: Aerial
  misc_feature: MA Experiment 108607 PARAMETER Experiment Name: At_100uM_ABA_cDNA_P Parameter: Treatment Value: 100uM ABA vs. No Treatment
  misc_feature: MA Experiment ID: 20000069 Result: Up-regulated in Transcription
  misc_feature: MA Experiment 20000069 PARAMETER Experiment Name: At_100uM_ABA_Mutants_cDNA_P Parameter: Plant Line Value: CS23
  misc_feature: MA Experiment 20000069 PARAMETER Experiment Name: At_100uM_ABA_Mutants_cDNA_P Parameter: Timepoint (hr) Value: 6
  misc_feature: MA Experiment 20000069 PARAMETER Experiment Name: At_100uM_ABA_Mutants_cDNA_P Parameter: Tissue Value: Aerial
  misc_feature: MA Experiment 20000069 PARAMETER Experiment Name: At_100uM_ABA_Mutants_cDNA_P Parameter: Treatment Value: 100uM ABA vs. No Treatment
  misc_feature: MA Experiment ID: 20000071 Result: Up-regulated in Transcription
  misc_feature: MA Experiment 20000071 PARAMETER Experiment Name: At_100uM_ABA_Mutants_cDNA_P Parameter: Plant Line Value: CS8104
  misc_feature: MA Experiment 20000071 PARAMETER Experiment Name: At_100uM_ABA_Mutants_cDNA_P Parameter: Timepoint (hr) Value: 6
  misc_feature: MA Experiment 20000071 PARAMETER Experiment Name: At_100uM_ABA_Mutants_cDNA_P Parameter: Tissue Value: Aerial
  misc_feature: MA Experiment 20000071 PARAMETER Experiment Name: At_100uM_ABA_Mutants_cDNA_P Parameter: Treatment Value: 100uM ABA vs. No Treatment
  misc_feature: MA Experiment ID: 20000072 Result: Up-regulated in Transcription
  misc_feature: MA Experiment 20000072 PARAMETER Experiment Name: At_100uM_ABA_Mutants_cDNA_P Parameter: Plant Line Value: CS8105
  misc_feature: MA Experiment 20000072 PARAMETER Experiment Name: At_100uM_ABA_Mutants_cDNA_P Parameter: Timepoint (hr) Value: 6
  misc_feature: MA Experiment 20000072 PARAMETER Experiment Name: At_100uM_ABA_Mutants_cDNA_P Parameter: Tissue Value: Aerial
  misc_feature: MA Experiment 20000072 PARAMETER Experiment Name: At_100uM_ABA_Mutants_cDNA_P Parameter: Treatment Value: 100uM ABA vs. No Treatment
  misc_feature: MA Experiment ID: 20000117 Result: Up-regulated in Transcription
  misc_feature: MA Experiment 20000117 PARAMETER Experiment Name: At_100uM_ABA_Mutants_cDNA_P Parameter: Plant Line Value: Columbia
  misc_feature: MA Experiment 20000117 PARAMETER Experiment Name: At_100uM_ABA_Mutants_cDNA_P Parameter: Timepoint (hr) Value: 6
  misc_feature: MA Experiment 20000117 PARAMETER Experiment Name: At_100uM_ABA_Mutants_cDNA_P Parameter: Tissue Value: Aerial
  misc_feature: MA Experiment 20000117 PARAMETER Experiment Name: At_100uM_ABA_Mutants_cDNA_P Parameter: Treatment Value: 100uM ABA vs. No Treatment
  misc_feature: MA Experiment ID: 20000180 Result: Up-regulated in Transcription
  misc_feature: MA Experiment 20000180 PARAMETER Experiment Name: At_Germinating_Seeds_P Parameter: Age (hr) Value: 24 vs. 0
  misc_feature: MA Experiment 20000180 PARAMETER Experiment Name: At_Germinating_Seeds_P Parameter: Tissue Value: Germinating Seeds
  misc_feature: MA Experiment ID: 20000185 Result: Up-regulated in Transcription
  misc_feature: MA Experiment 20000185 PARAMETER Experiment Name: At_Roots__P Parameter: Age (day) Value: 7 vs. 21
  misc_feature: MA Experiment 20000185 PARAMETER Experiment Name: At_Roots__P Parameter: Organism Value: A. thaliana
  misc_feature: MA Experiment 20000185 PARAMETER Experiment Name: At_Roots__P Parameter: Tissue Value: Roots vs. Whole Plant
  misc_feature: MA Experiment ID: 20000211 Result: Up-regulated in Transcription
  misc_feature: MA Experiment 20000211 PARAMETER Experiment Name: At_0.001percent_MeJA__P Parameter: Age (day) Value: 14
  misc_feature: MA Experiment 20000211 PARAMETER Experiment Name: At_0.001percent_MeJA__P Parameter: Organism Value: A. thaliana
  misc_feature: MA Experiment 20000211 PARAMETER Experiment Name: At_0.001percent_MeJA__P Parameter: Plant Line Value: WS
  misc_feature: MA Experiment 20000211 PARAMETER Experiment Name: At_0.001percent_MeJA__P Parameter: Timepoint (hr) Value: 1
  misc_feature: MA Experiment 20000211 PARAMETER Experiment Name: At_0.001percent_MeJA__P Parameter: Tissue Value: Aerial
  misc_feature: MA Experiment 20000211 PARAMETER Experiment Name: At_0.001percent_MeJA__P Parameter: Treatment Value: 0.001percent MeJA vs. No Treatment
  misc_feature: MA Experiment ID: 20000439 Result: Up-regulated in Transcription
  misc_feature: MA Experiment 20000439 PARAMETER Experiment Name: At_Roots__P Parameter: Age (day) Value: 14 vs. 21
  misc_feature: MA Experiment 20000439 PARAMETER Experiment Name: At_Roots__P Parameter: Organism Value: A. thaliana
  misc_feature: MA Experiment 20000439 PARAMETER Experiment Name: At_Roots__P Parameter: Tissue Value: Roots vs. Whole Plant
  misc_feature: MA Experiment ID: 20000495 Result: Down-regulated in Transcription
  misc_feature: MA Experiment 20000495 PARAMETER Experiment Name: At_Guard_Cells_P Parameter: Harvest Date Value: 8/2/2002
  misc_feature: MA Experiment 20000495 PARAMETER Experiment Name: At_Guard_Cells_P Parameter: Organism Value: A. thaliana
  misc_feature: MA Experiment 20000495 PARAMETER Experiment Name: At_Guard_Cells_P Parameter: Tissue Value: Guard Cells vs. Leaves
  misc_feature: MA Experiment ID: 20000527 Result: Down-regulated in Transcription
  misc_feature: MA Experiment 20000527 PARAMETER Experiment Name: At_10percent_PEG_P Parameter: Age (day) Value: 20
  misc_feature: MA Experiment 20000527 PARAMETER Experiment Name: At_10percent_PEG_P Parameter: Organism Value: A. thaliana
  misc_feature: MA Experiment 20000527 PARAMETER Experiment Name: At_10percent_PEG_P Parameter: Plant Line Value: WS
  misc_feature: MA Experiment 20000527 PARAMETER Experiment Name: At_10percent_PEG_P Parameter: Timepoint (day) Value: 20
  misc_feature: MA Experiment 20000527 PARAMETER Experiment Name: At_10percent_PEG_P Parameter: Tissue Value: Whole Plant
  misc_feature: MA Experiment 20000527 PARAMETER Experiment Name: At_10percent_PEG_P Parameter: Treatment Value: 10percent PEG vs. No Treatment
  misc_feature: MA Experiment ID: 20001248 Result: Down-regulated in Transcription
  misc_feature: MA Experiment 20001248 PARAMETER Experiment Name: At_Far-red-induction_P Parameter: Age (day) Value: 7
  misc_feature: MA Experiment 20001248 PARAMETER Experiment Name: At_Far-red-induction_P Parameter: Light Value: Far-red vs. White
  misc_feature: MA Experiment 20001248 PARAMETER Experiment Name: At_Far-red-induction_P Parameter: Organism Value: A. thaliana
  misc_feature: MA Experiment 20001248 PARAMETER Experiment Name: At_Far-red-induction_P Parameter: Plant Line Value: Columbia
  misc_feature: MA Experiment 20001248 PARAMETER Experiment Name: At_Far-red-induction_P Parameter: Timepoint (hr) Value: 4
  misc_feature: MA Experiment 20001248 PARAMETER Experiment Name: At_Far-red-induction_P Parameter: Tissue Value: Whole Plant
aaaacggctctaaattgaaaacaaaagaagagagagagagagagacgaagaaacagagagattctctcgaaaatggccaccattagagtaccaaacgaagttccttctccagctcaggattctgaaactctcaaacaagctattcgcggatggggaacagatgagaaggcgattatacgagttttagggcaaagagaccagagccagagaaggaagattagagaaagttttagagagatttatggcaaagatcttatcgatgttctatcctccgaactgtctggtgatttcatgaaagctgtggtttcgtggacgtatgatccagcagagagagacgcaaggcttgtgaacaagattttgaacaaggagaagaagaagaaaagcttagagaatttgaaggttatagtagagatctcttgcacgacttccccaaaccatttgattgctgtgaggaaagcttattgttcactctttgactcttctcttgaagaacacattgcttcttctctgccttttcctcttgcaaagttactggtgacattggcaagtacattcagatatgacaaagataggactgatgcagaagtagctactattgaggcggctatgctacgtgaagccatagagaagaaacaattagatcatgaccatgtcctgtacatattaggaacgcgtagtatctatcagctcagagaaacttttgttgcttacaagaagaattatggggtcacaattgataaggatgttgatggatgtccaggagatgctgatctgagaagtctattgaaggtggcaatcttttgtattgatactcctgagaaacactttgcaaaggtggtaagagattcgattgagggttttggaacagatgaggattcgttgacgagggcgattgtgacgcgtgcagagatcgatttgatgaaagtaagaggagagtatttcaacatgtataatacaagcatggacaatgctattactggtgatatttctggagactacaaggacttcattatcaccttacttggatccaaaatctgatcgttctttcgtttctttgtcagttgttatattcttggctttgcttgtgacttgtataatcaatcaatacattgtattccaactccagtttgaattgtttaaaaaataatcaaatttctcttgattcttgcatttttgaatcaaagcaaatctatgtttaattttgttttcaaaatt

SEQ ID NO: 26654 - protein, 321 aa, Arabidopsis thaliana
  peptide (1)..(321): Ceres Seq. ID no. 12394463
  misc_feature (85)..(157): Pfam Name: Annexin Pfam Description: Annexin
  misc_feature (1)..(318): Homolog of NCBI NO: 15238320 NR Description: annexin
  misc_feature (1)..(320): Homolog of NCBI NO: 7441507 NR Description: annexin P35 - maize
  misc_feature (1)..(318): Homolog of NCBI NO: 3928134 NR Description: annexin P38 [Capsicum annuum]
  misc_feature (1)..(318): Homolog of NCBI NO: 4580920 NR Description: vacuole-associated annexin VCaB42 [Nicotiana
  misc_feature (1)..(320): Homolog of NCBI NO: 7441506 NR Description: annexin P33 - maize
  misc_feature (1)..(320): Homolog of NCBI NO: 6272285 NR Description: annexin p33 [Zea mays]
  misc_feature (1)..(320): Homolog of NCBI NO: 21264397 NR Description: Annexin-like protein RJ4
  misc_feature (1)..(318): Homolog of NCBI NO: 22326753 NR Description: annexin-like protein; protein id: At5g12380.1
  misc_feature (1)..(321): Homolog of NCBI NO: 6503082 NR Description: AnnAt3 [Arabidopsis thaliana]
  misc_feature (1)..(321): Homolog of NCBI NO: 15224947 NR Description: putative annexin
MATIRVPNEVPSPAQDSETLKQAIRGWGTDEKAIIRVLGQRDQSQRRKIRESFREIYGKDLIDVLSSELSGDFMKAVVSWTYDPAERDARLVNKILNKEKKKKSLENLKVIVEISCTTSPNHLIAVRKAYCSLFDSSLEEHIASSLPFPLAKLLVTLASTFRYDKDRTDAEVATIEAAMLREAIEKKQLDHDHVLYILGTRSIYQLRETFVAYKKNYGVTIDKDVDGCPGDADLRSLLKVAIFCIDTPEKHFAKVVRDSIEGFGTDEDSLTRAIVTRAEIDLMKVRGEYFNMYNTSMDNAITGDISGDYKDFIITLLGSKI

SEQ ID NO: 26655 - protein, 248 aa, Arabidopsis thaliana
  peptide (1)..(248): Ceres Seq. ID no. 12394464
  misc_feature (12)..(84): Pfam Name: Annexin Pfam Description: Annexin
  misc_feature (1)..(245): Homolog of NCBI NO: 15238320 NR Description: annexin
  misc_feature (1)..(247): Homolog of NCBI NO: 7441507 NR Description: annexin P35 - maize
  misc_feature (1)..(245): Homolog of NCBI NO: 3928134 NR Description: annexin P38 [Capsicum annuum]
  misc_feature (1)..(245): Homolog of NCBI NO: 4580920 NR Description: vacuole-associated annexin VCaB42 [Nicotiana
  misc_feature (1)..(247): Homolog of NCBI NO: 7441506 NR Description: annexin P33 - maize
  misc_feature (1)..(247): Homolog of NCBI NO: 6272285 NR Description: annexin p33 [Zea mays]
  misc_feature (1)..(247): Homolog of NCBI NO: 21264397 NR Description: Annexin-like protein RJ4
  misc_feature (1)..(245): Homolog of NCBI NO: 22326753 NR Description: annexin-like protein; protein id: At5g12380.1
  misc_feature (1)..(248): Homolog of NCBI NO: 6503082 NR Description: AnnAt3 [Arabidopsis thaliana]
  misc_feature (1)..(248): Homolog of NCBI NO: 15224947 NR Description: putative annexin
MKAVVSWTYDPAERDARLVNKILNKEKKKKSLENLKVIVEISCTTSPNHLIAVRKAYCSLFDSSLEEHIASSLPFPLAKLLVTLASTFRYDKDRTDAEVATIEAAMLREAIEKKQLDHDHVLYILGTRSIYQLRETFVAYKKNYGVTIDKDVDGCPGDADLRSLLKVAIFCIDTPEKHFAKVVRDSIEGFGTDEDSLTRAIVTRAEIDLMKVRGEYFNMYNTSMDNAITGDISGDYKDFIITLLGSKI

SEQ ID NO: 26656 - DNA, 1124 bp, Arabidopsis thaliana
  misc_feature (1)..(1124): Ceres Seq. ID no. 12370210
  misc_feature: MA Experiment ID: 108434 Result: Down-regulated in Transcription
  misc_feature: MA Experiment 108434 PARAMETER Experiment Name: At_Root_Tips_cDNA_P Parameter: Tissue Value: Root Tips
  misc_feature: MA Experiment ID: 108488 Result: Down-regulated in Transcription
  misc_feature: MA Experiment ID: 108573 Result: Up-regulated in Transcription
  misc_feature: MA Experiment 108573 PARAMETER Experiment Name: At_Drought_cDNA_P Parameter: Timepoint (hr) Value: 6
  misc_feature: MA Experiment 108573 PARAMETER Experiment Name: At_Drought_cDNA_P Parameter: Tissue Value: Aerial
  misc_feature: MA Experiment 108573 PARAMETER Experiment Name: At_Drought_cDNA_P Parameter: Treatment Value: Drought vs. No Drought
  misc_feature: MA Experiment ID: 108594 Result: Down-regulated in Transcription
  misc_feature: MA Experiment 108594 PARAMETER Experiment Name: At_Ler-rhl_Root_cDNA_P Parameter: Plant Line Value: null
  misc_feature: MA Experiment ID: 108595 Result: Down-regulated in Transcription
  misc_feature: MA Experiment 108595 PARAMETER Experiment Name: At_Ler-pi_Ovule_cDNA_P Parameter: Plant Line Value: null
  misc_feature: MA Experiment ID: 108668 Result: Up-regulated in Transcription
  misc_feature: MA Experiment 108668 PARAMETER Experiment Name: At_2mM_SA_cDNA_P Parameter: Plant Line Value: WS
  misc_feature: MA Experiment 108668 PARAMETER Experiment Name: At_2mM_SA_cDNA_P Parameter: Timepoint (hr) Value: 6
  misc_feature: MA Experiment 108668 PARAMETER Experiment Name: At_2mM_SA_cDNA_P Parameter: Treatment Value: 2mM SA vs. No Treatment
  misc_feature: MA Experiment ID: 20000182 Result: Up-regulated in Transcription
  misc_feature: MA Experiment 20000182 PARAMETER Experiment Name: At_2mM_SA_P Parameter: Age (day) Value: 14
  misc_feature: MA Experiment 20000182 PARAMETER Experiment Name: At_2mM_SA_P Parameter: Organism Value: A. thaliana
  misc_feature: MA Experiment 20000182 PARAMETER Experiment Name: At_2mM_SA_P Parameter: Plant Line Value: WS
  misc_feature: MA Experiment 20000182 PARAMETER Experiment Name: At_2mM_SA_P Parameter: Timepoint (hr) Value: 6
  misc_feature: MA Experiment 20000182 PARAMETER Experiment Name: At_2mM_SA_P Parameter: Tissue Value: Aerial
  misc_feature: MA Experiment 20000182 PARAMETER Experiment Name: At_2mM_SA_P Parameter: Treatment Value: 2mM SA vs. No Treatment
  misc_feature: MA Experiment ID: 20000185 Result: Down-regulated in Transcription
  misc_feature: MA Experiment 20000185 PARAMETER Experiment Name: At_Roots__P Parameter: Age (day) Value: 7 vs. 21
  misc_feature: MA Experiment 20000185 PARAMETER Experiment Name: At_Roots__P Parameter: Organism Value: A. thaliana
  misc_feature: MA Experiment 20000185 PARAMETER Experiment Name: At_Roots__P Parameter: Tissue Value: Roots vs. Whole Plant
  misc_feature: MA Experiment ID: 20000227 Result: Down-regulated in Transcription
  misc_feature: MA Experiment 20000227 PARAMETER Experiment Name: At_Root-Tips-vs-Tops_P Parameter: Tissue Value: Root Tips vs. Root Tops
  misc_feature: MA Experiment ID: 20000439 Result: Down-regulated in Transcription
  misc_feature: MA Experiment 20000439 PARAMETER Experiment Name: At_Roots__P Parameter: Age (day) Value: 14 vs. 21
  misc_feature: MA Experiment 20000439 PARAMETER Experiment Name: At_Roots__P Parameter: Organism Value: A. thaliana
  misc_feature: MA Experiment 20000439 PARAMETER Experiment Name: At_Roots__P Parameter: Tissue Value: Roots vs. Whole Plant
  misc_feature: MA Experiment ID: 20000495 Result: Down-regulated in Transcription
  misc_feature: MA Experiment 20000495 PARAMETER Experiment Name: At_Guard_Cells_P Parameter: Harvest Date Value: 8/2/2002
  misc_feature: MA Experiment 20000495 PARAMETER Experiment Name: At_Guard_Cells_P Parameter: Organism Value: A. thaliana
  misc_feature: MA Experiment 20000495 PARAMETER Experiment Name: At_Guard_Cells_P Parameter: Tissue Value: Guard Cells vs. Leaves
  misc_feature: MA Experiment ID: 20001247 Result: Down-regulated in Transcription
  misc_feature: MA Experiment 20001247 PARAMETER Experiment Name: At_Far-red-induction_P Parameter: Age (day) Value: 7
  misc_feature: MA Experiment 20001247 PARAMETER Experiment Name: At_Far-red-induction_P Parameter: Light Value: Far-red vs. White
  misc_feature: MA Experiment 20001247 PARAMETER Experiment Name: At_Far-red-induction_P Parameter: Organism Value: A. thaliana
  misc_feature: MA Experiment 20001247 PARAMETER Experiment Name: At_Far-red-induction_P Parameter: Plant Line Value: Columbia
  misc_feature: MA Experiment 20001247 PARAMETER Experiment Name: At_Far-red-induction_P Parameter: Timepoint (hr) Value: 1
  misc_feature: MA Experiment 20001247 PARAMETER Experiment Name: At_Far-red-induction_P Parameter: Tissue Value: Whole Plant
atatcacaagttctctctacttttctccgaattttaccacccaatcaaaacgcttctctcttcttctacttcttcacttctctctccttcaacaaaattttctacctttgtttcttctctcagatttcataaagaaaagatttaatctttcattggaatctgtgagtaacagaggataagcgaatatgggttcaatctctttatccaattctatgcccataactcgacttccactacttacatcactctatcatcaaagcttccttccgatttcttcttcatctttctctcttcttcctctctctaatcgtcgtcgctcctccactttttcaccgtcaatcaccgtctctgccttcttcgctgctcctgccagcgttaataataataactctgttccggcaaaaaatggaggttacacagttggggatttcatgactccgagacagaatttgcacgttgttaagccctctacgtcggtcgatgatgcgttggaacttctggttgagaagaaagtcacgggattgcctgtaattgacgataattggacactggttggtgttgtttctgattacgatttgcttgcattggactccatctctggtcgcagtcaaaatgatacaaacttgttccctgatgtcgacagtacctggaaaacgtttaacgaactacagaaactgatcagtaagacatatggaaaagttgttggagacttgatgacaccgtctcctctcgttgtccgtgattctaccaatttagaagatgcagccaggttgcttctggaaacaaagttccgaagattacccgttgttgatgctgatggaaaactgattgggatccttacaaggggaaacgttgtaagggctgcgctgcagatcaaacgggaaaccgagaactctacatagctaggaagcagcagtgatggagcagatctgaatctgccatagttaatagcgaaatctatttattccattgatataagtatatatgtaaccattctctgtcaattttcggttttcagaagcaatttttgttactttaggagtaacatttctcagactcggaactgaagacaaatggtatatttgatacatatatgtttattgtagcacaggtctactcttatc

SEQ ID NO: 26657 - protein, 238 aa, Arabidopsis thaliana
  peptide (1)..(238): Ceres Seq. ID no. 12370211
  misc_feature (83)..(136): Pfam Name: CBS domain Pfam Description: CBS domain
  misc_feature (1)..(238): Homolog of NCBI NO: 18418376 NR Description: putative protein
  misc_feature (78)..(229): Homolog of NCBI NO: 24251259 NR Description: unknown protein [Synechococcus sp. PCC 7942]
  misc_feature (78)..(226): Homolog of NCBI NO: 23127710 NR Description: hypothetical protein [Nostoc punctiforme]
  misc_feature (78)..(226): Homolog of NCBI NO: 17231305 NR Description: hypothetical protein [Nostoc sp. PCC 7120]
  misc_feature (78)..(226): Homolog of NCBI NO: 16331252 NR Description: IMP dehydrogenase [Synechocystis sp. PCC 6803]
  misc_feature (92)..(226): Homolog of NCBI NO: 23040753 NR Description: hypothetical protein [Trichodesmium erythraeum
  misc_feature (54)..(235): Homolog of NCBI NO: 34015153 NR Description: putative CBS domain containing protein
  misc_feature (9)..(237): Homolog of NCBI NO: 15234564 NR Description: putative protein; protein id: At4g36910.1
  misc_feature (156)..(217): Homolog of NCBI NO: 7486280 NR Description: hypothetical protein F28A23.120 - Arabidopsis
  misc_feature (1)..(138): Homolog of NCBI NO: 7486280 NR Description: hypothetical protein F28A23.120 - Arabidopsis
MGSISLSNSMPITRLPLLTSLYHQSFLPISSSSFSLLPLSNRRRSSTFSPSITVSAFFAAPASVNNNNSVPAKNGGYTVGDFMTPRQNLHVVKPSTSVDDALELLVEKKVTGLPVIDDNWTLVGVVSDYDLLALDSISGRSQNDTNLFPDVDSTWKTFNELQKLISKTYGKVVGDLMTPSPLVVRDSTNLEDAARLLLETKFRRLPVVDADGKLIGILTRGNVVRAALQIKRETENST

SEQ ID NO: 26658 - protein, 229 aa, Arabidopsis thaliana
  peptide (1)..(229): Ceres Seq. ID no. 12370212
  misc_feature (74)..(127): Pfam Name: CBS domain Pfam Description: CBS domain
  misc_feature (69)..(220): Homolog of NCBI NO: 24251259 NR Description: unknown protein [Synechococcus sp. PCC 7942]
  misc_feature (69)..(217): Homolog of NCBI NO: 23127710 NR Description: hypothetical protein [Nostoc punctiforme]
  misc_feature (69)..(217): Homolog of NCBI NO: 17231305 NR Description: hypothetical protein [Nostoc sp. PCC 7120]
  misc_feature (69)..(217): Homolog of NCBI NO: 16331252 NR Description: IMP dehydrogenase [Synechocystis sp. PCC 6803]
  misc_feature (83)..(217): Homolog of NCBI NO: 23040753 NR Description: hypothetical protein [Trichodesmium erythraeum
  misc_feature (45)..(226): Homolog of NCBI NO: 34015153 NR Description: putative CBS domain containing protein
  misc_feature (1)..(228): Homolog of NCBI NO: 15234564 NR Description: putative protein; protein id: At4g36910.1
  misc_feature (147)..(208): Homolog of NCBI NO: 7486280 NR Description: hypothetical protein F28A23.120 - Arabidopsis
  misc_feature (1)..(129): Homolog of NCBI NO: 7486280 NR Description: hypothetical protein F28A23.120 - Arabidopsis
  misc_feature (1)..(229): Homolog of NCBI NO: 18418376 NR Description: putative protein
MPITRLPLLTSLYHQSFLPISSSSFSLLPLSNRRRSSTFSPSITVSAFFAAPASVNNNNSVPAKNGGYTVGDFMTPRQNLHVVKPSTSVDDALELLVEKKVTGLPVIDDNWTLVGVVSDYDLLALDSISGRSQNDTNLFPDVDSTWKTFNELQKLISKTYGKVVGDLMTPSPLVVRDSTNLEDAARLLLETKFRRLPVVDADGKLIGILTRGNVVRAALQIKRETENST

SEQ ID NO: 26659 - protein, 156 aa, Arabidopsis thaliana
  peptide (1)..(156): Ceres Seq. ID no. 12370213
  misc_feature (1)..(54): Pfam Name: CBS domain Pfam Description: CBS domain
  misc_feature (1)..(147): Homolog of NCBI NO: 24251259 NR Description: unknown protein [Synechococcus sp. PCC 7942]
  misc_feature (1)..(144): Homolog of NCBI NO: 23127710 NR Description: hypothetical protein [Nostoc punctiforme]
  misc_feature (1)..(144): Homolog of NCBI NO: 17231305 NR Description: hypothetical protein [Nostoc sp. PCC 7120]
  misc_feature (1)..(144): Homolog of NCBI NO: 16331252 NR Description: IMP dehydrogenase [Synechocystis sp. PCC 6803]
  misc_feature (10)..(144): Homolog of NCBI NO: 23040753 NR Description: hypothetical protein [Trichodesmium erythraeum
  misc_feature (1)..(153): Homolog of NCBI NO: 34015153 NR Description: putative CBS domain containing protein
  misc_feature (1)..(155): Homolog of NCBI NO: 15234564 NR Description: putative protein; protein id: At4g36910.1
  misc_feature (74)..(135): Homolog of NCBI NO: 7486280 NR Description: hypothetical protein F28A23.120 - Arabidopsis
  misc_feature (1)..(56): Homolog of NCBI NO: 7486280 NR Description: hypothetical protein F28A23.120 - Arabidopsis
  misc_feature (1)..(156): Homolog of NCBI NO: 18418376 NR Description: putative protein
MTPRQNLHVVKPSTSVDDALELLVEKKVTGLPVIDDNWTLVGVVSDYDLLALDSISGRSQNDTNLFPDVDSTWKTFNELQKLISKTYGKVVGDLMTPSPLVVRDSTNLEDAARLLLETKFRRLPVVDADGKLIGILTRGNVVRAALQIKRETENST

SEQ ID NO: 26660 - DNA, 653 bp, Arabidopsis thaliana
  misc_feature (1)..(653): Ceres Seq. ID no. 12394324
  misc_feature: MA Experiment ID: 108434 Result: Up-regulated in Transcription
  misc_feature: MA Experiment 108434 PARAMETER Experiment Name: At_Root_Tips_cDNA_P Parameter: Tissue Value: Root Tips
  misc_feature: MA Experiment ID: 20000180 Result: Up-regulated in Transcription
  misc_feature: MA Experiment 20000180 PARAMETER Experiment Name: At_Germinating_Seeds_P Parameter: Age (hr) Value: 24 vs. 0
  misc_feature: MA Experiment 20000180 PARAMETER Experiment Name: At_Germinating_Seeds_P Parameter: Tissue Value: Germinating Seeds
  misc_feature: MA Experiment ID: 20000235 Result: Up-regulated in Transcription
  misc_feature: MA Experiment 20000235 PARAMETER Experiment Name: At_Siliques_P Parameter: Age (day) Value: 21
  misc_feature: MA Experiment 20000235 PARAMETER Experiment Name: At_Siliques_P Parameter: Organism Value: A. thaliana
  misc_feature: MA Experiment 20000235 PARAMETER Experiment Name: At_Siliques_P Parameter: Plant Line Value: WS
  misc_feature: MA Experiment 20000235 PARAMETER Experiment Name: At_Siliques_P Parameter: Tissue Value: 5-10mm Siliques vs. Whole Plant
accgagccatttcttctgtaagcggatttcatcagcattcagcagccagacgaaacttttaacgatctaccatcgaaccaggatacttcttcattaccatggcaacaagaaatgctttgagaattgtgtctcgtaggttctctagtggcaaagttcttagcgaagaggagagagccgctgagaatgttttcattaagaaaatggagcaggagaagcttcagaagttagctcgacagggtcctggagaacaagcagcagggtcagcaagcgaagcaaaggttgctggtgcaacagcatctgcatcagctgagtcgggcccaaaggtgtcagaagacaagaacagaaactatgcggttgtggcaggtgtggttgctattgtcggttcgattggttggtacttgaaagcaggtggaaagaagcagccagaggtccaagagtaaagagatagattgattgatggacttgtgatgagtgaataaaacagggagtagcattactcattcctcccttgtgagacactttggaatcaaatcttacgttgctgctactctctttgagtcttttcttttgtttttgttacttgacacagtttttttttgtttccggtttgttgacatttagtttctcaatctaaactccagagacttatttcc

SEQ ID NO: 26661 - protein, 113 aa, Arabidopsis thaliana
  peptide (1)..(113): Ceres Seq. ID no. 12394325
  misc_feature (3)..(111): Homolog of NCBI NO: 5821432 NR Description: F1F0-ATPase inhibitor protein
  misc_feature (1)..(113): Homolog of NCBI NO: 21592886 NR Description: F1F0-ATPase inhibitor protein [Arabidopsis
  misc_feature (1)..(113): Homolog of NCBI NO: 18401511 NR Description: expressed protein
MATRNALRIVSRRFSSGKVLSEEERAAENVFIKKMEQEKLQKLARQGPGEQAAGSASEAKVAGATASASAESGPKVSEDKNRNYAVVAGVVAIVGSIGWYLKAGGKKQPEVQE

SEQ ID NO: 26662 - protein, 79 aa, Arabidopsis thaliana
  peptide (1)..(79): Ceres Seq. ID no. 12394326
  misc_feature (1)..(77): Homolog of NCBI NO: 5821432 NR Description: F1F0-ATPase inhibitor protein
  misc_feature (1)..(79): Homolog of NCBI NO: 21592886 NR Description: F1F0-ATPase inhibitor protein [Arabidopsis
  misc_feature (1)..(79): Homolog of NCBI NO: 18401511 NR Description: expressed protein
MEQEKLQKLARQGPGEQAAGSASEAKVAGATASASAESGPKVSEDKNRNYAVVAGVVAIVGSIGWYLKAGGKKQPEVQE

SEQ ID NO: 26663 - DNA, 631 bp, Arabidopsis thaliana
  misc_feature (1)..(631): Ceres Seq. ID no. 12323401
  misc_feature: MA Experiment ID: 108434 Result: Up-regulated in Transcription
  misc_feature: MA Experiment 108434 PARAMETER Experiment Name: At_Root_Tips_cDNA_P Parameter: Tissue Value: Root Tips
  misc_feature: MA Experiment ID: 108435 Result: Up-regulated in Transcription
  misc_feature: MA Experiment 108435 PARAMETER Experiment Name: At_stm_Mutants_cDNA_P Parameter: Plant Line Value: wt Landsburg vs stm
  misc_feature: MA Experiment 108435 PARAMETER Experiment Name: At_stm_Mutants_cDNA_P Parameter: Tissue Value: Shoot Apical Meristem Region
  misc_feature: MA Experiment ID: 108573 Result: Down-regulated in Transcription
  misc_feature: MA Experiment 108573 PARAMETER Experiment Name: At_Drought_cDNA_P Parameter: Timepoint (hr) Value: 6
  misc_feature: MA Experiment 108573 PARAMETER Experiment Name: At_Drought_cDNA_P Parameter: Tissue Value: Aerial
  misc_feature: MA Experiment 108573 PARAMETER Experiment Name: At_Drought_cDNA_P Parameter: Treatment Value: Drought vs. No Drought
  misc_feature: MA Experiment ID: 108577 Result: Down-regulated in Transcription
  misc_feature: MA Experiment 108577 PARAMETER Experiment Name: At_42deg_Heat_cDNA_P Parameter: Temperature (deg C) Value: 42 vs. 22
  misc_feature: MA Experiment 108577 PARAMETER Experiment Name: At_42deg_Heat_cDNA_P Parameter: Timepoint (hr) Value: 6
  misc_feature: MA Experiment 108577 PARAMETER Experiment Name: At_42deg_Heat_cDNA_P Parameter: Tissue Value: Aerial
  misc_feature: MA Experiment ID: 108585 Result: Down-regulated in Transcription
  misc_feature: MA Experiment 108585 PARAMETER Experiment Name: At_5mM_NaNP_cDNA_P Parameter: Timepoint (hr) Value: 6
  misc_feature: MA Experiment 108585 PARAMETER Experiment Name: At_5mM_NaNP_cDNA_P Parameter: Tissue Value: Aerial
  misc_feature: MA Experiment 108585 PARAMETER Experiment Name: At_5mM_NaNP_cDNA_P Parameter: Treatment Value: null
  misc_feature: MA Experiment ID: 20000093 Result: Down-regulated in Transcription
  misc_feature: MA Experiment 20000093 PARAMETER Experiment Name: At_42deg_Heat_cDNA_P Parameter: Temperature (deg C) Value: 42 vs. 22
  misc_feature: MA Experiment 20000093 PARAMETER Experiment Name: At_42deg_Heat_cDNA_P Parameter: Timepoint (hr) Value: 0.5
  misc_feature: MA Experiment 20000093 PARAMETER Experiment Name: At_42deg_Heat_cDNA_P Parameter: Tissue Value: Aerial
  misc_feature: MA Experiment ID: 20000111 Result: Down-regulated in Transcription
  misc_feature: MA Experiment 20000111 PARAMETER Experiment Name: At_42deg_Heat_cDNA_P Parameter: Temperature (deg C) Value: 42 vs. 22
  misc_feature: MA Experiment 20000111 PARAMETER Experiment Name: At_42deg_Heat_cDNA_P Parameter: Timepoint (hr) Value: 6
  misc_feature: MA Experiment 20000111 PARAMETER Experiment Name: At_42deg_Heat_cDNA_P Parameter: Tissue Value: Aerial
  misc_feature: MA Experiment ID: 20000112 Result: Down-regulated in Transcription
  misc_feature: MA Experiment 20000112 PARAMETER Experiment Name: At_42deg_Heat_cDNA_P Parameter: Temperature (deg C) Value: 42 vs. 22
  misc_feature: MA Experiment 20000112 PARAMETER Experiment Name: At_42deg_Heat_cDNA_P Parameter: Timepoint (hr) Value: 2
  misc_feature: MA Experiment 20000112 PARAMETER Experiment Name: At_42deg_Heat_cDNA_P Parameter: Tissue Value: Aerial
  misc_feature: MA Experiment ID: 20000113 Result: Down-regulated in Transcription
  misc_feature: MA Experiment 20000113 PARAMETER Experiment Name: At_42deg_Heat_cDNA_P Parameter: Temperature (deg C) Value: 42 vs. 22
  misc_feature: MA Experiment 20000113 PARAMETER Experiment Name: At_42deg_Heat_cDNA_P Parameter: Timepoint (hr) Value: 8
  misc_feature: MA Experiment 20000113 PARAMETER Experiment Name: At_42deg_Heat_cDNA_P Parameter: Tissue Value: Aerial
  misc_feature: MA Experiment ID: 20000117 Result: Down-regulated in Transcription
  misc_feature: MA Experiment 20000117 PARAMETER Experiment Name: At_100uM_ABA_Mutants_cDNA_P Parameter: Plant Line Value: Columbia
  misc_feature: MA Experiment 20000117 PARAMETER Experiment Name: At_100uM_ABA_Mutants_cDNA_P Parameter: Timepoint (hr) Value: 6
  misc_feature: MA Experiment 20000117 PARAMETER Experiment Name: At_100uM_ABA_Mutants_cDNA_P Parameter: Tissue Value: Aerial
  misc_feature: MA Experiment 20000117 PARAMETER Experiment Name: At_100uM_ABA_Mutants_cDNA_P Parameter: Treatment Value: 100uM ABA vs. No Treatment
  misc_feature: MA Experiment ID: 20000144 Result: Down-regulated in Transcription
  misc_feature: MA Experiment 20000144 PARAMETER Experiment Name: At_42deg_Heat_cDNA_P Parameter: Temperature (deg C) Value: 42 vs. 22
  misc_feature: MA Experiment 20000144 PARAMETER Experiment Name: At_42deg_Heat_cDNA_P Parameter: Timepoint (hr) Value: 1
  misc_feature: MA Experiment 20000144 PARAMETER Experiment Name: At_42deg_Heat_cDNA_P Parameter: Tissue Value: Aerial
  misc_feature: MA Experiment ID: 20000171 Result: Down-regulated in Transcription
  misc_feature: MA Experiment 20000171 PARAMETER Experiment Name: At_42deg_Heat_P Parameter: Age (day) Value: 14
  misc_feature: MA Experiment 20000171 PARAMETER Experiment Name: At_42deg_Heat_P Parameter: Organism Value: A. thaliana
  misc_feature: MA Experiment 20000171 PARAMETER Experiment Name: At_42deg_Heat_P Parameter: Plant Line Value: WS
  misc_feature: MA Experiment 20000171 PARAMETER Experiment Name: At_42deg_Heat_P Parameter: Temperature (deg C) Value: 42 vs. 22
  misc_feature: MA Experiment 20000171 PARAMETER Experiment Name: At_42deg_Heat_P Parameter: Timepoint (hr) Value: 1
  misc_feature: MA Experiment 20000171 PARAMETER Experiment Name: At_42deg_Heat_P Parameter: Tissue Value: Aerial
  misc_feature: MA Experiment ID: 20000173 Result: Down-regulated in Transcription
  misc_feature: MA Experiment 20000173 PARAMETER Experiment Name: At_42deg_Heat_P Parameter: Age (day) Value: 14
  misc_feature: MA Experiment 20000173 PARAMETER Experiment Name: At_42deg_Heat_P Parameter: Organism Value: A. thaliana
  misc_feature: MA Experiment 20000173 PARAMETER Experiment Name: At_42deg_Heat_P Parameter: Plant Line Value: WS
  misc_feature: MA Experiment 20000173 PARAMETER Experiment Name: At_42deg_Heat_P Parameter: Temperature (deg C) Value: 42 vs. 22
  misc_feature: MA Experiment 20000173 PARAMETER Experiment Name: At_42deg_Heat_P Parameter: Timepoint (hr) Value: 6
  misc_feature: MA Experiment 20000173 PARAMETER Experiment Name: At_42deg_Heat_P Parameter: Tissue Value: Aerial
  misc_feature: MA Experiment ID: 20000179 Result: Up-regulated in Transcription
  misc_feature: MA Experiment 20000179 PARAMETER Experiment Name: At_Germinating_Seeds_P Parameter: Age (hr) Value: 6 vs. 0
  misc_feature: MA Experiment 20000179 PARAMETER Experiment Name: At_Germinating_Seeds_P Parameter: Tissue Value: Germinating Seeds
  misc_feature: MA Experiment ID: 20000180 Result: Up-regulated in Transcription
  misc_feature: MA Experiment 20000180 PARAMETER Experiment Name: At_Germinating_Seeds_P Parameter: Age (hr) Value: 24 vs. 0
  misc_feature: MA Experiment 20000180 PARAMETER Experiment Name: At_Germinating_Seeds_P Parameter: Tissue Value: Germinating Seeds
  misc_feature: MA Experiment ID: 20000224 Result: Up-regulated in Transcription
  misc_feature: MA Experiment ID: 20000227 Result: Up-regulated in Transcription
  misc_feature: MA Experiment 20000227 PARAMETER Experiment Name: At_Root-Tips-vs-Tops_P Parameter: Tissue Value: Root Tips vs. Root Tops
  misc_feature: MA Experiment ID: 20000451 Result: Up-regulated in Transcription
  misc_feature: MA Experiment 20000451 PARAMETER Experiment Name: At_CS6879_Shoots-Roots_P Parameter: Age (day) Value: 14
  misc_feature: MA Experiment 20000451 PARAMETER Experiment Name: At_CS6879_Shoots-Roots_P Parameter: Organism Value: A. thaliana
  misc_feature: MA Experiment 20000451 PARAMETER Experiment Name: At_CS6879_Shoots-Roots_P Parameter: Plant Line Value: CS6879 vs. WS
  misc_feature: MA Experiment 20000451 PARAMETER Experiment Name: At_CS6879_Shoots-Roots_P Parameter: Tissue Value: Roots
  misc_feature: MA Experiment ID: 20000452 Result: Up-regulated in Transcription
  misc_feature: MA Experiment 20000452 PARAMETER Experiment Name: At_CS6879_Shoots-Roots_P Parameter: Age (day) Value: 14
  misc_feature: MA Experiment 20000452 PARAMETER Experiment Name: At_CS6879_Shoots-Roots_P Parameter: Organism Value: A. thaliana
  misc_feature: MA Experiment 20000452 PARAMETER Experiment Name: At_CS6879_Shoots-Roots_P Parameter: Plant Line Value: CS6879 vs. WS
  misc_feature: MA Experiment 20000452 PARAMETER Experiment Name: At_CS6879_Shoots-Roots_P Parameter: Tissue Value: Shoots
  misc_feature: MA Experiment ID: 20000573 Result: Down-regulated in Transcription
  misc_feature: MA Experiment 20000573 PARAMETER Experiment Name: At_100uM_ABA_Mutants__P Parameter: Organism Value: A. thaliana
  misc_feature: MA Experiment 20000573 PARAMETER Experiment Name: At_100uM_ABA_Mutants__P Parameter: Plant Line Value: CS22 vs. Ler wt
  misc_feature: MA Experiment 20000573 PARAMETER Experiment Name: At_100uM_ABA_Mutants__P Parameter: Timepoint (hr) Value: N/A
  misc_feature: MA Experiment 20000573 PARAMETER Experiment Name: At_100uM_ABA_Mutants__P Parameter: Tissue Value: Whole Plant
  misc_feature: MA Experiment 20000573 PARAMETER Experiment Name: At_100uM_ABA_Mutants__P Parameter: Treatment Value: None
  misc_feature: MA Experiment ID: 20000794 Result: Down-regulated in Transcription
  misc_feature: MA Experiment 20000794 PARAMETER Experiment Name: At_Petals_P Parameter: Age (day) Value: 23-25 days
  misc_feature: MA Experiment 20000794 PARAMETER Experiment Name: At_Petals_P Parameter: Plant Line Value: WS
  misc_feature: MA Experiment 20000794 PARAMETER Experiment Name: At_Petals_P Parameter: Tissue Value: Petals vs. Whole plant
  misc_feature: MA Experiment ID: 20001450 Result: Down-regulated in Transcription
  misc_feature: MA Experiment 20001450 PARAMETER Experiment Name: At_Far-red-induction_P Parameter: Age (day) Value: 7
  misc_feature: MA Experiment 20001450 PARAMETER Experiment Name: At_Far-red-induction_P Parameter: Light Value: Far-red vs. White
  misc_feature: MA Experiment 20001450 PARAMETER Experiment Name: At_Far-red-induction_P Parameter: Organism Value: A. thaliana
  misc_feature: MA Experiment 20001450 PARAMETER Experiment Name: At_Far-red-induction_P Parameter: Plant Line Value: Columbia
  misc_feature: MA Experiment 20001450 PARAMETER Experiment Name: At_Far-red-induction_P Parameter: Timepoint (hr) Value: 8
  misc_feature: MA Experiment 20001450 PARAMETER Experiment Name: At_Far-red-induction_P Parameter: Tissue Value: Whole Plant
  misc_feature: MA Experiment ID: 20001451 Result: Down-regulated in Transcription
  misc_feature: MA Experiment 20001451 PARAMETER Experiment Name: At_Far-red-induction_P Parameter: Age (day) Value: 7
  misc_feature: MA Experiment 20001451 PARAMETER Experiment Name: At_Far-red-induction_P Parameter: Light Value: Far-red vs. White
  misc_feature: MA Experiment 20001451 PARAMETER Experiment Name: At_Far-red-induction_P Parameter: Organism Value: A. thaliana
  misc_feature: MA Experiment 20001451 PARAMETER Experiment Name: At_Far-red-induction_P Parameter: Plant Line Value: Columbia
  misc_feature: MA Experiment 20001451 PARAMETER Experiment Name: At_Far-red-induction_P Parameter: Timepoint (hr) Value: 24
  misc_feature: MA Experiment 20001451 PARAMETER Experiment Name: At_Far-red-induction_P Parameter: Tissue Value: Whole Plant
  misc_feature: MA Experiment ID: 20001554 Result: Down-regulated in Transcription
  misc_feature: MA Experiment 20001554 PARAMETER Experiment Name: At_Drought_Soil_Dry_P Parameter: Age (day) Value: 21
  misc_feature: MA Experiment 20001554 PARAMETER Experiment Name: At_Drought_Soil_Dry_P Parameter: Organism Value: A. thaliana
  misc_feature: MA Experiment 20001554 PARAMETER Experiment Name: At_Drought_Soil_Dry_P Parameter: Plant Line Value: WS
  misc_feature: MA Experiment 20001554 PARAMETER Experiment Name: At_Drought_Soil_Dry_P Parameter: Post Timepoint (hr) Value: None
  misc_feature: MA Experiment 20001554 PARAMETER Experiment Name: At_Drought_Soil_Dry_P Parameter: Post-Treatment Value: None
  misc_feature: MA Experiment 20001554 PARAMETER Experiment Name: At_Drought_Soil_Dry_P Parameter: Timepoint (day) Value: 7
  misc_feature: MA Experiment 20001554 PARAMETER Experiment Name: At_Drought_Soil_Dry_P Parameter: Treatment Value: Drought vs. No Drought
  misc_feature: MA Experiment ID: 20001555 Result: Down-regulated in Transcription
  misc_feature: MA Experiment 20001555 PARAMETER Experiment Name: At_Drought_Soil_Dry_P Parameter: Age (day) Value: 24
  misc_feature: MA Experiment 20001555 PARAMETER Experiment Name: At_Drought_Soil_Dry_P Parameter: Organism Value: A. thaliana
  misc_feature: MA Experiment 20001555 PARAMETER Experiment Name: At_Drought_Soil_Dry_P Parameter: Plant Line Value: WS
  misc_feature: MA Experiment 20001555 PARAMETER Experiment Name: At_Drought_Soil_Dry_P Parameter: Post Timepoint (hr) Value: None
  misc_feature: MA Experiment 20001555 PARAMETER Experiment Name: At_Drought_Soil_Dry_P Parameter: Post-Treatment Value: None
  misc_feature: MA Experiment 20001555 PARAMETER Experiment Name: At_Drought_Soil_Dry_P Parameter: Timepoint (day) Value: 10
  misc_feature: MA Experiment 20001555 PARAMETER Experiment Name: At_Drought_Soil_Dry_P Parameter: Treatment Value: Drought vs. No Drought
  misc_feature: MA Experiment ID: 20001556 Result: Down-regulated in Transcription
  misc_feature: MA Experiment 20001556 PARAMETER Experiment Name: At_Drought_Soil_Dry_P Parameter: Age (day) Value: 26
  misc_feature: MA Experiment 20001556 PARAMETER Experiment Name: At_Drought_Soil_Dry_P Parameter: Organism Value: A. thaliana
  misc_feature: MA Experiment 20001556 PARAMETER Experiment Name: At_Drought_Soil_Dry_P Parameter: Plant Line Value: WS
  misc_feature: MA Experiment 20001556 PARAMETER Experiment Name: At_Drought_Soil_Dry_P Parameter: Post Timepoint (hr) Value: None
  misc_feature: MA Experiment 20001556 PARAMETER Experiment Name: At_Drought_Soil_Dry_P Parameter: Post-Treatment Value: None
  misc_feature: MA Experiment 20001556 PARAMETER Experiment Name: At_Drought_Soil_Dry_P Parameter: Timepoint (day) Value: 12
  misc_feature: MA Experiment 20001556 PARAMETER Experiment Name: At_Drought_Soil_Dry_P Parameter: Treatment Value: Drought vs. No Drought
  misc_feature: MA Experiment ID: 20001557 Result: Down-regulated in Transcription
  misc_feature: MA Experiment 20001557 PARAMETER Experiment Name: At_Drought_Soil_Dry_P Parameter: Age (day) Value: 27
  misc_feature: MA Experiment 20001557 PARAMETER Experiment Name: At_Drought_Soil_Dry_P Parameter: Organism Value: A. thaliana
  misc_feature: MA Experiment 20001557 PARAMETER Experiment Name: At_Drought_Soil_Dry_P Parameter: Plant Line Value: WS
  misc_feature: MA Experiment 20001557 PARAMETER Experiment Name: At_Drought_Soil_Dry_P Parameter: Post Timepoint (hr) Value: 3
  misc_feature: MA Experiment 20001557 PARAMETER Experiment Name: At_Drought_Soil_Dry_P Parameter: Post-Treatment Value: Re-Water vs. No Drought
  misc_feature: MA Experiment 20001557 PARAMETER Experiment Name: At_Drought_Soil_Dry_P Parameter: Timepoint (day) Value: 13
  misc_feature: MA Experiment 20001557 PARAMETER Experiment Name: At_Drought_Soil_Dry_P Parameter: Treatment Value: Drought vs. No Drought
  misc_feature: MA Experiment ID: 20001559 Result: Down-regulated in Transcription
  misc_feature: MA Experiment 20001559 PARAMETER Experiment Name: At_Drought_Soil_Dry_P Parameter: Age (day) Value: 28
  misc_feature: MA Experiment 20001559 PARAMETER Experiment Name: At_Drought_Soil_Dry_P Parameter: Organism Value: A. thaliana
  misc_feature: MA Experiment 20001559 PARAMETER Experiment Name: At_Drought_Soil_Dry_P Parameter: Plant Line Value: WS
  misc_feature: MA Experiment 20001559 PARAMETER Experiment Name: At_Drought_Soil_Dry_P Parameter: Post Timepoint (hr) Value: 29
  misc_feature: MA Experiment 20001559 PARAMETER Experiment Name: At_Drought_Soil_Dry_P Parameter: Post-Treatment Value: Re-Water vs. No Drought
  misc_feature: MA Experiment 20001559 PARAMETER Experiment Name: At_Drought_Soil_Dry_P Parameter: Timepoint (day) Value: 14
  misc_feature: MA Experiment 20001559 PARAMETER Experiment Name: At_Drought_Soil_Dry_P Parameter: Treatment Value: Drought vs. No Drought
  misc_feature: MA Experiment ID: 20001560 Result: Up-regulated in Transcription
  misc_feature: MA Experiment 20001560 PARAMETER Experiment Name: At_Drought_Soil_Dry_P Parameter: Age (day) Value: 28
  misc_feature: MA Experiment 20001560 PARAMETER Experiment Name: At_Drought_Soil_Dry_P Parameter: Organism Value: A. thaliana
  misc_feature: MA Experiment 20001560 PARAMETER Experiment Name: At_Drought_Soil_Dry_P Parameter: Plant Line Value: WS
  misc_feature: MA Experiment 20001560 PARAMETER Experiment Name: At_Drought_Soil_Dry_P Parameter: Post Timepoint (hr) Value: None
  misc_feature: MA Experiment 20001560 PARAMETER Experiment Name: At_Drought_Soil_Dry_P Parameter: Post-Treatment Value: None
  misc_feature: MA Experiment 20001560 PARAMETER Experiment Name: At_Drought_Soil_Dry_P Parameter: Timepoint (day) Value: 14
  misc_feature: MA Experiment 20001560 PARAMETER Experiment Name: At_Drought_Soil_Dry_P Parameter: Treatment Value: Drought vs. No Drought
  misc_feature: Phenotype: ROSETTE LEAVES Curled-Curled 4
  misc_feature: Phenotype: ROSETTE LEAVES Shape-Lanceolate
  misc_feature: Phenotype: WHOLE PLANT Color-Dark Green
  misc_feature: Phenotype: INFLORESCENCE Flowering Time-Late Flowering
  misc_feature: Phenotype: FERTILITY Fertility-Sterile
  misc_feature: Phenotype: ROSETTE LEAVES Curled-Curled 4
  misc_feature: Phenotype: WHOLE PLANT Color-Dark Green
  misc_feature: Phenotype: INFLORESCENCE Flowering Time-Late Flowering
  misc_feature: Phenotype: FERTILITY Fertility-Sterile
  misc_feature: Phenotype: ROSETTE LEAVES Shape-Oval
  misc_feature: Phenotype: WHOLE PLANT Color-Dark Green
  misc_feature: Phenotype: FERTILITY Fertility-Reduced
  misc_feature: Phenotype: ROSETTE LEAVES Curled-Curled 3
  misc_feature: Phenotype: WHOLE PLANT Color-Dark Green
  misc_feature: Phenotype: WHOLE PLANT Size-Small
  misc_feature: Phenotype: INFLORESCENCE Flowering Time-Late Flowering
  misc_feature: Phenotype: FERTILITY Fertility-Sterile
aaacagtatcaaatcaaaaccatcacagcaaaaataactcactccctagaaaagtttgaaaatggcgaaggcagataagaaaccagcggagaagaaaccggcagagaaaactccggcagccgaaccagcagcagcggcagagaagaaaccaaaagccggaaagaaactccccaaggaaccagccgtcgccggagacaagaagaagaagagatcaaagaagaacgttgagacatacaagatctacatcttcaaggtgttgaagcaagttcatccagacatcggaatctcaagcaaagccatgggaatcatgaacagtttcatcaacgatatctttgagaagcttgctggtgagtcttcgaagcttgcaaggtacaacaagaagccgacgattacttccagggagattcagactgcggttagacttgtgttgcccggtgagttggcgaaacatgctgtgtctgaagggactaaggcggttacgaagtttacaagttcttagatttggaatgtggttttgtaatggtggagaagtagtagtaaaatgtgaaatagggtttatgcttttgggtatctttgaaggttatgtaatttgggaattagggtttttatttatggcacggctatgaaatcc

SEQ ID NO: 26664 - protein, 145 aa, Arabidopsis thaliana
  peptide (1)..(145): Ceres Seq. ID no. 12323402
  misc_feature (26)..(144): Pfam Name: Core histone H2A/H2B/H3/H4 Pfam Description: Core histone H2A/H2B/H3/H4
  misc_feature (3)..(145): Homolog of NCBI NO: 21617908 NR Description: histone H2B [Arabidopsis thaliana]
  misc_feature (3)..(145): Homolog of NCBI NO: 15223016 NR Description: histone H2B
  misc_feature (3)..(145): Homolog of NCBI NO: 15226943 NR Description: putative histone H2B
  misc_feature (3)..(145): Homolog of NCBI NO: 15238563 NR Description: histone H2B - like protein
  misc_feature (3)..(145): Homolog of NCBI NO: 15231304 NR Description: histone H2B; protein id: At3g45980.1, supported
  misc_feature (3)..(145): Homolog of NCBI NO: 15231313 NR Description: histone H2B -like protein
  misc_feature (3)..(145): Homolog of NCBI NO: 7387726 NR Description: Histone H2B
  misc_feature (7)..(145): Homolog of NCBI NO: 7439754 NR Description: histone H2B-3 - tomato (fragment)
  misc_feature (1)..(145): Homolog of NCBI NO: 1617013 NR Description: histone H2B like protein [Arabidopsis thaliana]
  misc_feature (1)..(145): Homolog of NCBI NO: 15237148 NR Description: histone H2B like protein (emb|CAA69025.1)
MAKADKKPAEKKPAEKTPAAEPAAAAEKKPKAGKKLPKEPAVAGDKKKKRSKKNVETYKIYIFKVLKQVHPDIGISSKAMGIMNSFINDIFEKLAGESSKLARYNKKPTITSREIQTAVRLVLPGELAKHAVSEGTKAVTKFTSS

SEQ ID NO: 26665 - DNA, 617 bp, Arabidopsis thaliana
  misc_feature (1)..(617): Ceres Seq. ID no. 12394321
  misc_feature: MA Experiment ID: 108462 Result: Down-regulated in Transcription
  misc_feature: MA Experiment 108462 PARAMETER Experiment Name: At_Germinating_Seeds_cDNA_P Parameter: Age (day) Value: 2 vs. 0
  misc_feature: MA Experiment 108462 PARAMETER Experiment Name: At_Germinating_Seeds_cDNA_P Parameter: Tissue Value: Germinating Seeds
  misc_feature: MA Experiment ID: 108463 Result: Down-regulated in Transcription
  misc_feature: MA Experiment 108463 PARAMETER Experiment Name: At_Germinating_Seeds_cDNA_P Parameter: Age (day) Value: 3 vs. 0
  misc_feature: MA Experiment 108463 PARAMETER Experiment Name: At_Germinating_Seeds_cDNA_P Parameter: Tissue Value: Germinating Seeds
  misc_feature: MA Experiment ID: 108464 Result: Down-regulated in Transcription
  misc_feature: MA Experiment 108464 PARAMETER Experiment Name: At_Germinating_Seeds_cDNA_P Parameter: Age (day) Value: 4 vs. 0
  misc_feature: MA Experiment 108464 PARAMETER Experiment Name: At_Germinating_Seeds_cDNA_P Parameter: Tissue Value: Germinating Seeds
  misc_feature: MA Experiment ID: 20000794 Result: Up-regulated in Transcription
  misc_feature: MA Experiment 20000794 PARAMETER Experiment Name: At_Petals_P Parameter: Age (day) Value: 23-25 days
  misc_feature: MA Experiment 20000794 PARAMETER Experiment Name: At_Petals_P Parameter: Plant Line Value: WS
  misc_feature: MA Experiment 20000794 PARAMETER Experiment Name: At_Petals_P Parameter: Tissue Value: Petals vs. Whole plant
tttacgcattctccgtcattcggttaatttgcatcgatcgttagggttttatcgagagagcgatttctcaaatcgacttcaatggctgacgacgattacaacgaagtcgatgacttgggatatgaagatgagccagcagagcctgagatcgaagaaggagtagaggaagatgctgatatcaaggagaacgatgatgttaatgttgaccctttggaaacagaagataaggttgaaacagaacctgtgcaacgcccacgtaaaacctctaagtttatgactaagtatgaacgtgcacgtatcctcggcactcgtgctttgcagattagcatgaatgctcctgttatggttgagctggagggtgagactgatccacttgagattgcgatgaaagagcttaggcaaaggaagattccatttaccattagacgttatctacctgatatgagttacgaggaatggggagttgatgaactgatcgtcgaagactcgtggaaacgtcaagtcggtggtgattgataaaatctggcctatgtgttttgcaaagctttctgctcttgtatggattatgaacttacgatatagtcgcatgtagaacttcttcatttgtcctattctcc

SEQ ID NO: 26666 - protein, 144 aa, Arabidopsis thaliana
  peptide (1)..(144): Ceres Seq. ID no. 12394322
  misc_feature (63)..(116): Pfam Name: RNA polymerase Rpb6 Pfam Description: RNA polymerase Rpb6
  misc_feature (1)..(135): Homolog of NCBI NO: 11527390 NR Description: DNA directed RNA polymerase II polypeptide F
  misc_feature (1)..(135): Homolog of NCBI NO: 13786166 NR Description: polymerase II [Rattus norvegicus]
  misc_feature (1)..(135): Homolog of NCBI NO: 6522686 NR Description: RNA polymerase common subunit RPB6 [Gallus gallus]
  misc_feature (1)..(136): Homolog of NCBI NO: 17864588 NR Description: RNA polymerase II 18kD subunit CG1163-PA
  misc_feature (3)..(137): Homolog of NCBI NO: 39597419 NR Description: Hypothetical protein CBG03063 [Caenorhabditis
  misc_feature (1)..(137): Homolog of NCBI NO: 17531543 NR Description: Dna-directed RNA polymerase Iib [Caenorhabditis
  misc_feature (1)..(143): Homolog of NCBI NO: 4960150 NR Description: DNA-directed RNA polymerase IIa [Nicotiana
  misc_feature (1)..(143): Homolog of NCBI NO: 22093730 NR Description: putative DNA-directed RNA polymerase Iib
  misc_feature (1)..(144): Homolog of NCBI NO: 15242235 NR Description: DNA-directed RNA polymerase II subunit-like
  misc_feature (1)..(144): Homolog of NCBI NO: 15224039 NR Description: putative DNA-directed RNA polymerase II subunit
MADDDYNEVDDLGYEDEPAEPEIEEGVEEDADIKENDDVNVDPLETEDKVETEPVQRPRKTSKFMTKYERARILGTRALQISMNAPVMVELEGETDPLEIAMKELRQRKIPFTIRRYLPDMSYEEWGVDELIVEDSWKRQVGGD

SEQ ID NO: 26667 - protein, 80 aa, Arabidopsis thaliana
  peptide (1)..(80): Ceres Seq. ID no. 12394323
  misc_feature (1)..(52): Pfam Name: RNA polymerase Rpb6 Pfam Description: RNA polymerase Rpb6
  misc_feature (1)..(71): Homolog of NCBI NO: 11527390 NR Description: DNA directed RNA polymerase II polypeptide F
  misc_feature (1)..(71): Homolog of NCBI NO: 13786166 NR Description: polymerase II [Rattus norvegicus]
  misc_feature (1)..(71): Homolog of NCBI NO: 6522686 NR Description: RNA polymerase common subunit RPB6 [Gallus gallus]
  misc_feature (1)..(72): Homolog of NCBI NO: 17864588 NR Description: RNA polymerase II 18kD subunit CG1163-PA
  misc_feature (1)..(73): Homolog of NCBI NO: 39597419 NR Description: Hypothetical protein CBG03063 [Caenorhabditis
  misc_feature (1)..(73): Homolog of NCBI NO: 17531543 NR Description: Dna-directed RNA polymerase Iib [Caenorhabditis
  misc_feature (1)..(79): Homolog of NCBI NO: 4960150 NR Description: DNA-directed RNA polymerase IIa [Nicotiana
  misc_feature (1)..(79): Homolog of NCBI NO: 22093730 NR Description: putative DNA-directed RNA polymerase Iib
  misc_feature (1)..(80): Homolog of NCBI NO: 15242235 NR Description: DNA-directed RNA polymerase II subunit-like
  misc_feature (1)..(80): Homolog of NCBI NO: 15224039 NR Description: putative DNA-directed RNA polymerase II subunit
MTKYERARILGTRALQISMNAPVMVELEGETDPLEIAMKELRQRKIPFTIRRYLPDMSYEEWGVDELIVEDSWKRQVGGD

SEQ ID NO: 26668 - DNA, 614 bp, Arabidopsis thaliana
  misc_feature (1)..(614): Ceres Seq. ID no. 12322193
  misc_feature: MA Experiment ID: 108433 Result: Up-regulated in Transcription
  misc_feature: MA Experiment 108433 PARAMETER Experiment Name: At_rhl_Mutant2_cDNA_P Parameter: Age (day) Value: 7
  misc_feature: MA Experiment 108433 PARAMETER Experiment Name: At_rhl_Mutant2_cDNA_P Parameter: Organism Value: A. thaliana
  misc_feature: MA Experiment 108433 PARAMETER Experiment Name: At_rhl_Mutant2_cDNA_P Parameter: Plant Line Value: rhl Mutant vs. wt landsburg
  misc_feature: MA Experiment 108433 PARAMETER Experiment Name: At_rhl_Mutant2_cDNA_P Parameter: Tissue Value: Roots
  misc_feature: MA Experiment ID: 108488 Result: Down-regulated in Transcription
  misc_feature: MA Experiment ID: 108595 Result: Up-regulated in Transcription
  misc_feature: MA Experiment 108595 PARAMETER Experiment Name: At_Ler-pi_Ovule_cDNA_P Parameter: Plant Line Value: null
  misc_feature: MA Experiment ID: 20000069 Result: Up-regulated in Transcription
  misc_feature: MA Experiment 20000069 PARAMETER Experiment Name: At_100uM_ABA_Mutants_cDNA_P Parameter: Plant Line Value: CS23
  misc_feature: MA Experiment 20000069 PARAMETER Experiment Name: At_100uM_ABA_Mutants_cDNA_P Parameter: Timepoint (hr) Value: 6
  misc_feature: MA Experiment 20000069 PARAMETER Experiment Name: At_100uM_ABA_Mutants_cDNA_P Parameter: Tissue Value: Aerial
  misc_feature: MA Experiment 20000069 PARAMETER Experiment Name: At_100uM_ABA_Mutants_cDNA_P Parameter: Treatment Value: 100uM ABA vs. No Treatment
  misc_feature: MA Experiment ID: 20000070 Result: Up-regulated in Transcription
  misc_feature: MA Experiment 20000070 PARAMETER Experiment Name: At_100uM_ABA_Mutants_cDNA_P Parameter: Plant Line Value: CS24
  misc_feature: MA Experiment 20000070 PARAMETER Experiment Name: At_100uM_ABA_Mutants_cDNA_P Parameter: Timepoint (hr) Value: 6
  misc_feature: MA Experiment 20000070 PARAMETER Experiment Name: At_100uM_ABA_Mutants_cDNA_P Parameter: Tissue Value: Aerial
  misc_feature: MA Experiment 20000070 PARAMETER Experiment Name: At_100uM_ABA_Mutants_cDNA_P Parameter: Treatment Value: 100uM ABA vs. No Treatment
  misc_feature: MA Experiment ID: 20000071 Result: Up-regulated in Transcription
  misc_feature: MA Experiment 20000071 PARAMETER Experiment Name: At_100uM_ABA_Mutants_cDNA_P Parameter: Plant Line Value: CS8104
  misc_feature: MA Experiment 20000071 PARAMETER Experiment Name: At_100uM_ABA_Mutants_cDNA_P Parameter: Timepoint (hr) Value: 6
  misc_feature: MA Experiment 20000071 PARAMETER Experiment Name: At_100uM_ABA_Mutants_cDNA_P Parameter: Tissue Value: Aerial
  misc_feature: MA Experiment 20000071 PARAMETER Experiment Name: At_100uM_ABA_Mutants_cDNA_P Parameter: Treatment Value: 100uM ABA vs. No Treatment
  misc_feature: MA Experiment ID: 20000072 Result: Up-regulated in Transcription
  misc_feature: MA Experiment 20000072 PARAMETER Experiment Name: At_100uM_ABA_Mutants_cDNA_P Parameter: Plant Line Value: CS8105
  misc_feature: MA Experiment 20000072 PARAMETER Experiment Name: At_100uM_ABA_Mutants_cDNA_P Parameter: Timepoint (hr) Value: 6
  misc_feature: MA Experiment 20000072 PARAMETER Experiment Name: At_100uM_ABA_Mutants_cDNA_P Parameter: Tissue Value: Aerial
  misc_feature: MA Experiment 20000072 PARAMETER Experiment Name: At_100uM_ABA_Mutants_cDNA_P Parameter: Treatment Value: 100uM ABA vs. No Treatment
  misc_feature: MA Experiment ID: 20000086 Result: Up-regulated in Transcription
  misc_feature: MA Experiment 20000086 PARAMETER Experiment Name: At_100uM_ABA_Mutants_cDNA_P Parameter: Plant Line Value: CS22
  misc_feature: MA Experiment 20000086 PARAMETER Experiment Name: At_100uM_ABA_Mutants_cDNA_P Parameter: Timepoint (hr) Value: 6
  misc_feature: MA Experiment 20000086 PARAMETER Experiment Name: At_100uM_ABA_Mutants_cDNA_P Parameter: Tissue Value: Aerial
  misc_feature: MA Experiment 20000086 PARAMETER Experiment Name: At_100uM_ABA_Mutants_cDNA_P Parameter: Treatment Value: 100uM ABA vs. No Treatment
  misc_feature: MA Experiment ID: 20000087 Result: Up-regulated in Transcription
  misc_feature: MA Experiment 20000087 PARAMETER Experiment Name: At_100uM_ABA_Mutants_cDNA_P Parameter: Plant Line Value: WS
  misc_feature: MA Experiment 20000087 PARAMETER Experiment Name: At_100uM_ABA_Mutants_cDNA_P Parameter: Timepoint (hr) Value: 6
  misc_feature: MA Experiment 20000087 PARAMETER Experiment Name: At_100uM_ABA_Mutants_cDNA_P Parameter: Tissue Value: Aerial
  misc_feature: MA Experiment 20000087 PARAMETER Experiment Name: At_100uM_ABA_Mutants_cDNA_P Parameter: Treatment Value: 100uM ABA vs. No Treatment
  misc_feature: MA Experiment ID: 20000088 Result: Up-regulated in Transcription
  misc_feature: MA Experiment 20000088 PARAMETER Experiment Name: At_100uM_ABA_Mutants_cDNA_P Parameter: Plant Line Value: Landsberg
  misc_feature: MA Experiment 20000088 PARAMETER Experiment Name: At_100uM_ABA_Mutants_cDNA_P Parameter: Timepoint (hr) Value: 6
  misc_feature: MA Experiment 20000088 PARAMETER Experiment Name: At_100uM_ABA_Mutants_cDNA_P Parameter: Tissue Value: Aerial
  misc_feature: MA Experiment 20000088 PARAMETER Experiment Name: At_100uM_ABA_Mutants_cDNA_P Parameter: Treatment Value: 100uM ABA vs. No Treatment
  misc_feature: MA Experiment ID: 20000089 Result: Up-regulated in Transcription
  misc_feature: MA Experiment ID: 20000090 Result: Up-regulated in Transcription
  misc_feature: MA Experiment ID: 20000117 Result: Up-regulated in Transcription
  misc_feature: MA Experiment 20000117 PARAMETER Experiment Name: At_100uM_ABA_Mutants_cDNA_P Parameter: Plant Line Value: Columbia
  misc_feature: MA Experiment 20000117 PARAMETER Experiment Name: At_100uM_ABA_Mutants_cDNA_P Parameter: Timepoint (hr) Value: 6
  misc_feature: MA Experiment 20000117 PARAMETER Experiment Name: At_100uM_ABA_Mutants_cDNA_P Parameter: Tissue Value: Aerial
  misc_feature: MA Experiment 20000117 PARAMETER Experiment Name: At_100uM_ABA_Mutants_cDNA_P Parameter: Treatment Value: 100uM ABA vs. No Treatment
  misc_feature: MA Experiment ID: 20000184 Result: Down-regulated in Transcription
  misc_feature: MA Experiment 20000184 PARAMETER Experiment Name: At_Shoots__P Parameter: Age (day) Value: 7
  misc_feature: MA Experiment 20000184 PARAMETER Experiment Name: At_Shoots__P Parameter: Tissue Value: Shoots vs. Whole Plant
  misc_feature: MA Experiment ID: 20000185 Result: Down-regulated in Transcription
  misc_feature: MA Experiment 20000185 PARAMETER Experiment Name: At_Roots__P Parameter: Age (day) Value: 7 vs. 21
  misc_feature: MA Experiment 20000185 PARAMETER Experiment Name: At_Roots__P Parameter: Organism Value: A. thaliana
  misc_feature: MA Experiment 20000185 PARAMETER Experiment Name: At_Roots__P Parameter: Tissue Value: Roots vs. Whole Plant
  misc_feature: MA Experiment ID: 20000235 Result: Down-regulated in Transcription
  misc_feature: MA Experiment 20000235 PARAMETER Experiment Name: At_Siliques_P Parameter: Age (day) Value: 21
  misc_feature: MA Experiment 20000235 PARAMETER Experiment Name: At_Siliques_P Parameter: Organism Value: A. thaliana
  misc_feature: MA Experiment 20000235 PARAMETER Experiment Name: At_Siliques_P Parameter: Plant Line Value: WS
  misc_feature: MA Experiment 20000235 PARAMETER Experiment Name: At_Siliques_P Parameter: Tissue Value: 5-10mm Siliques vs. Whole Plant
  misc_feature: MA Experiment ID: 20000437 Result: Up-regulated in Transcription
  misc_feature: MA Experiment 20000437 PARAMETER Experiment Name: At_Drought_P Parameter: Age (day) Value: 8
  misc_feature: MA Experiment 20000437 PARAMETER Experiment Name: At_Drought_P Parameter: Organism Value: A. thaliana
  misc_feature: MA Experiment 20000437 PARAMETER Experiment Name: At_Drought_P Parameter: Plant Line Value: WS
  misc_feature: MA Experiment 20000437 PARAMETER Experiment Name: At_Drought_P Parameter: Timepoint (hr) Value: 24
  misc_feature: MA Experiment 20000437 PARAMETER Experiment Name: At_Drought_P Parameter: Tissue Value: Whole Plant
  misc_feature: MA Experiment 20000437 PARAMETER Experiment Name: At_Drought_P Parameter: Treatment Value: Drought vs. No Drought
  misc_feature: MA Experiment ID: 20000438 Result: Down-regulated in Transcription
  misc_feature: MA Experiment 20000438 PARAMETER Experiment Name: At_Shoots__P Parameter: Age (day) Value: 14
  misc_feature: MA Experiment 20000438 PARAMETER Experiment Name: At_Shoots__P Parameter: Tissue Value: Shoots vs. Whole Plant
  misc_feature: MA Experiment ID: 20001247 Result: Down-regulated in Transcription
  misc_feature: MA Experiment 20001247 PARAMETER Experiment Name: At_Far-red-induction_P Parameter: Age (day) Value: 7
  misc_feature: MA Experiment 20001247 PARAMETER Experiment Name: At_Far-red-induction_P Parameter: Light Value: Far-red vs. White
  misc_feature: MA Experiment 20001247 PARAMETER Experiment Name: At_Far-red-induction_P Parameter: Organism Value: A. thaliana
  misc_feature: MA Experiment 20001247 PARAMETER Experiment Name: At_Far-red-induction_P Parameter: Plant Line Value: Columbia
  misc_feature: MA Experiment 20001247 PARAMETER Experiment Name: At_Far-red-induction_P Parameter: Timepoint (hr) Value: 1
  misc_feature: MA Experiment 20001247 PARAMETER Experiment Name: At_Far-red-induction_P Parameter: Tissue Value: Whole Plant
attctttggagttacccaatttcgacgttgaacacaaacccttgcttctctcttctctgtttctctctcgcagcgaaaaatcatggcgattagctccttcaagcatgaacatcctcttgaaaagagacaagctgaagcagcacgtatcagggagaagtatccagacagaataccagtcattgtcgaaagagccgagaagagtgatgtcccggatattgataggaaaaagtacttggtcccagctgatttgactgttggccagtttgtttatgttgtacggaagcggatcaagctcagtcccgagaaagccatcttcatttttgtcaagaacattctaccaccaactgcggcaataatgtctgcaatttatgaagagcacaaagacgaagacgggtttctatacatgagttacagtggtgagaacacgttcgggatcttcttctaatgcgcttggaatatgtggatgcatcagattatcaatgtacagtctgtctatttctctgcttgtctctagttttcatgacattggacgaagcttttgaaacttgcatgctatgttattaacatgataaggtcttccgttcatggtgttaatttggctttatgctacactc

SEQ ID NO: 26669 - protein, 120 aa, Arabidopsis thaliana
  peptide (1)..(120): Ceres Seq. ID no. 12322194
  misc_feature (14)..(117): Pfam Name: Microtubule associated protein 1A/1B, light chain 3 Pfam Description: Microtubule associated protein 1A/1B, light
  misc_feature (1)..(117): Homolog of NCBI NO: 21615419 NR Description: microtubule associated protein [Cicer arietinum]
  misc_feature (1)..(120): Homolog of NCBI NO: 7446944 NR Description: hypothetical protein F8K4.23 - Arabidopsis
  misc_feature (1)..(117): Homolog of NCBI NO: 32401365 NR Description: autophagy [Triticum aestivum]
  misc_feature (1)..(117): Homolog of NCBI NO: 34595981 NR Description: microtubule-associated protein 1 light chain 3
  misc_feature (1)..(117): Homolog of NCBI NO: 33146967 NR Description: putative microtubule associated protein
  misc_feature (1)..(118): Homolog of NCBI NO: 38344173 NR Description: OSJNBa0053K19.12 [Oryza sativa (japonica
  misc_feature (1)..(118): Homolog of NCBI NO: 15220686 NR Description: symbiosis-related protein, putative
  misc_feature (1)..(119): Homolog of NCBI NO: 40253647 NR Description: putative microtubial binding protein
  misc_feature (1)..(120): Homolog of NCBI NO: 21592920 NR Description: putative microtubule-associated protein
  misc_feature (1)..(120): Homolog of NCBI NO: 15224577 NR Description: putative microtubule-associated protein
MAISSFKHEHPLEKRQAEAARIREKYPDRIPVIVERAEKSDVPDIDRKKYLVPADLTVGQFVYVVRKRIKLSPEKAIFIFVKNILPPTAAIMSAIYEEHKDEDGFLYMSYSGENTFGIFF

SEQ ID NO: 26670 - protein, 82 aa, Arabidopsis thaliana
  peptide (1)..(82): Ceres Seq. ID no. 12322195
SLELPNFDVEHKPLLLSSLFLSRSEKSWRLAPSSMNILLKRDKLKQHVSGRSIQTEYQSLSKEPRRVMSRILIGKSTWSQLI

SEQ ID NO: 26671 - DNA, 985 bp, Arabidopsis thaliana
  misc_feature (1)..(985): Ceres Seq. ID no. 12489648
  misc_feature: MA Experiment ID: 108434 Result: Up-regulated in Transcription
  misc_feature: MA Experiment 108434 PARAMETER Experiment Name: At_Root_Tips_cDNA_P Parameter: Tissue Value: Root Tips
  misc_feature: MA Experiment ID: 108462 Result: Down-regulated in Transcription
  misc_feature: MA Experiment 108462 PARAMETER Experiment Name: At_Germinating_Seeds_cDNA_P Parameter: Age (day) Value: 2 vs. 0
  misc_feature: MA Experiment 108462 PARAMETER Experiment Name: At_Germinating_Seeds_cDNA_P Parameter: Tissue Value: Germinating Seeds
  misc_feature: MA Experiment ID: 108463 Result: Down-regulated in Transcription
  misc_feature: MA Experiment 108463 PARAMETER Experiment Name: At_Germinating_Seeds_cDNA_P Parameter: Age (day) Value: 3 vs. 0
  misc_feature: MA Experiment 108463 PARAMETER Experiment Name: At_Germinating_Seeds_cDNA_P Parameter: Tissue Value: Germinating Seeds
  misc_feature: MA Experiment ID: 108464 Result: Down-regulated in Transcription
  misc_feature: MA Experiment 108464 PARAMETER Experiment Name: At_Germinating_Seeds_cDNA_P Parameter: Age (day) Value: 4 vs. 0
  misc_feature: MA Experiment 108464 PARAMETER Experiment Name: At_Germinating_Seeds_cDNA_P Parameter: Tissue Value: Germinating Seeds
  misc_feature: MA Experiment ID: 108488 Result: Up-regulated in Transcription
  misc_feature: MA Experiment ID: 20000113 Result: Up-regulated in Transcription
  misc_feature: MA Experiment 20000113 PARAMETER Experiment Name: At_42deg_Heat_cDNA_P Parameter: Temperature (deg C) Value: 42 vs. 22
  misc_feature: MA Experiment 20000113 PARAMETER Experiment Name: At_42deg_Heat_cDNA_P Parameter: Timepoint (hr) Value: 8
  misc_feature: MA Experiment 20000113 PARAMETER Experiment Name: At_42deg_Heat_cDNA_P Parameter: Tissue Value: Aerial
aagaaagccctaaaatttaattagggtttcagtgtcttcaaattcacctatcctcagcctcaactctctcctctatccactctcagccggaaaatttttccttgattcattacgacagagagaaccatgccggcgaaacagaggaccccgaaggtcaacagaaaccctgatctgatcaggggtgttggtaaatactcgagatcccagatgtaccataagagaggtttgtgggctatcaaggccaaaaatggaggcgttttcccacgtcacgacgctaaatctaaggttgatgctccggtggagaagccaccgaagttctatccagctgaagatgttaagaaacctctccccaacaggcgcacggcaaaaccaaccaagctcagagctagcattactccaggtacagtgttgattatccttgctggtaggttcaagggaaagagagttgtcttccttaagcagcttgcctctggtttgcttcttgtgactggaccattcaagatcaatggtgttcctttgagacgtgttaaccaggcctatgtgattggcacttccacaaaggttgacatttctggagtcaccctcgataaattcgatgataagtactttggcaaggttgctgagaagaaaaagaagaagacagaaggagagttctttgaggctgagaaagaggagaagaaggagatcccacaggtgaagaaagatgaccagaaagctgtggatgcagctttgatcaaagccattgaagcagttccagagttgaagacttaccttggcgcaaggttttcattgaaacaaggaatgaagccccatgagcttgttttctagatttcattactttttttctgaggtctctagagtatctgtctcctgaagtgttttaccttctaaatggttgttttgttcttgttcactgaacacatacaatttttggcttatacattctctgttcttacgtatggataaactatcgatcctgtttttg

SEQ ID NO: 26672 - protein, 233 aa, Arabidopsis thaliana; identical to SEQ ID NO: 22783
  peptide (1)..(233): Ceres Seq. ID no. 12489649
  misc_feature (126)..(233): Pfam Name: Ribosomal protein L6e Pfam Description: Ribosomal protein L6e
  misc_feature (1)..(233): Homolog of NCBI NO: 15221126 NR Description: putative 60S ribosomal protein L6
  misc_feature (4)..(61): Homolog of NCBI NO: 18088374 NR Description: Similar to ribosomal protein L6 [Homo sapiens]
  misc_feature (58)..(233): Homolog of NCBI NO: 18088374 NR Description: Similar to ribosomal protein L6 [Homo sapiens]
  misc_feature (49)..(233): Homolog of NCBI NO: 6012952 NR Description: 60S ribosomal protein L6 (YL 16 like) [Cyanophora
  misc_feature (16)..(233): Homolog of NCBI NO: 38344818 NR Description: OSJNBb0022F23.11 [Oryza sativa (japonica
  misc_feature (1)..(233): Homolog of NCBI NO: 7208784 NR Description: 60S ribosomal protein L6 [Cicer arietinum]
  misc_feature (3)..(233): Homolog of NCBI NO: 464621 NR Description: 60S RIBOSOMAL PROTEIN L6 (YL16-LIKE)
  misc_feature (1)..(233): Homolog of NCBI NO: 21593910 NR Description: 60S ribosomal protein L6, putative [Arabidopsis
  misc_feature (1)..(233): Homolog of NCBI NO: 15221798 NR Description: 60S ribosomal protein L6, putative
  misc_feature (1)..(233): Homolog of NCBI NO: 15221127 NR Description: putative 60S ribosomal protein L6

SEQ ID NO: 26673 - protein, 206 aa, Arabidopsis thaliana; identical to SEQ ID NO: 22784
  peptide (1)..(206): Ceres Seq. ID no. 12489650
  misc_feature (99)..(206): Pfam Name: Ribosomal protein L6e Pfam Description: Ribosomal protein L6e
  misc_feature (1)..(34): Homolog of NCBI NO: 18088374 NR Description: Similar to ribosomal protein L6 [Homo sapiens]
  misc_feature (31)..(206): Homolog of NCBI NO: 18088374 NR Description: Similar to ribosomal protein L6 [Homo sapiens]
  misc_feature (22)..(206): Homolog of NCBI NO: 6012952 NR Description: 60S ribosomal protein L6 (YL 16 like) [Cyanophora
  misc_feature (1)..(206): Homolog of NCBI NO: 38344818 NR Description: OSJNBb0022F23.11 [Oryza sativa (japonica
  misc_feature (1)..(206): Homolog of NCBI NO: 7208784 NR Description: 60S ribosomal protein L6 [Cicer arietinum]
  misc_feature (1)..(206): Homolog of NCBI NO: 464621 NR Description: 60S RIBOSOMAL PROTEIN L6 (YL16-LIKE)
  misc_feature (1)..(206): Homolog of NCBI NO: 21593910 NR Description: 60S ribosomal protein L6, putative [Arabidopsis
  misc_feature (1)..(206): Homolog of NCBI NO: 15221798 NR Description: 60S ribosomal protein L6, putative
  misc_feature (1)..(206): Homolog of NCBI NO: 15221127 NR Description: putative 60S ribosomal protein L6
  misc_feature (1)..(206): Homolog of NCBI NO: 15221126 NR Description: putative 60S ribosomal protein L6

SEQ ID NO: 26674 - DNA, 1401 bp, Arabidopsis thaliana
  misc_feature (1)..(1401): Ceres Seq. ID no. 12422631
  misc_feature: MA Experiment ID: 108434 Result: Up-regulated in Transcription
  misc_feature: MA Experiment 108434 PARAMETER Experiment Name: At_Root_Tips_cDNA_P Parameter: Tissue Value: Root Tips
  misc_feature: MA Experiment ID: 108573 Result: Up-regulated in Transcription
  misc_feature: MA Experiment 108573 PARAMETER Experiment Name: At_Drought_cDNA_P Parameter: Timepoint (hr) Value: 6
  misc_feature: MA Experiment 108573 PARAMETER Experiment Name: At_Drought_cDNA_P Parameter: Tissue Value: Aerial
  misc_feature: MA Experiment 108573 PARAMETER Experiment Name: At_Drought_cDNA_P Parameter: Treatment Value: Drought vs. No Drought
  misc_feature: MA Experiment ID: 108668 Result: Down-regulated in Transcription
  misc_feature: MA Experiment 108668 PARAMETER Experiment Name: At_2mM_SA_cDNA_P Parameter: Plant Line Value: WS
  misc_feature: MA Experiment 108668 PARAMETER Experiment Name: At_2mM_SA_cDNA_P Parameter: Timepoint (hr) Value: 6
  misc_feature: MA Experiment 108668 PARAMETER Experiment Name: At_2mM_SA_cDNA_P Parameter: Treatment Value: 2mM SA vs. No Treatment
  misc_feature: MA Experiment ID: 20000090 Result: Down-regulated in Transcription
  misc_feature: MA Experiment ID: 20000180 Result: Down-regulated in Transcription
  misc_feature: MA Experiment 20000180 PARAMETER Experiment Name: At_Germinating_Seeds_P Parameter: Age (hr) Value: 24 vs. 0
  misc_feature: MA Experiment 20000180 PARAMETER Experiment Name: At_Germinating_Seeds_P Parameter: Tissue Value: Germinating Seeds
  misc_feature: MA Experiment ID: 20000235 Result: Up-regulated in Transcription
  misc_feature: MA Experiment 20000235 PARAMETER Experiment Name: At_Siliques_P Parameter: Age (day) Value: 21
  misc_feature: MA Experiment 20000235 PARAMETER Experiment Name: At_Siliques_P Parameter: Organism Value: A. thaliana
  misc_feature: MA Experiment 20000235 PARAMETER Experiment Name: At_Siliques_P Parameter: Plant Line Value: WS
  misc_feature: MA Experiment 20000235 PARAMETER Experiment Name: At_Siliques_P Parameter: Tissue Value: 5-10mm Siliques vs. Whole Plant
  misc_feature: MA Experiment ID: 20000438 Result: Up-regulated in Transcription
  misc_feature: MA Experiment 20000438 PARAMETER Experiment Name: At_Shoots__P Parameter: Age (day) Value: 14
  misc_feature: MA Experiment 20000438 PARAMETER Experiment Name: At_Shoots__P Parameter: Tissue Value: Shoots vs. Whole Plant
  misc_feature: MA Experiment ID: 20000794 Result: Up-regulated in Transcription
  misc_feature: MA Experiment 20000794 PARAMETER Experiment Name: At_Petals_P Parameter: Age (day) Value: 23-25 days
  misc_feature: MA Experiment 20000794 PARAMETER Experiment Name: At_Petals_P Parameter: Plant Line Value: WS
  misc_feature: MA Experiment 20000794 PARAMETER Experiment Name: At_Petals_P Parameter: Tissue Value: Petals vs. Whole plant
  misc_feature: MA Experiment ID: 20001905 Result: Up-regulated in Transcription
  misc_feature: MA Experiment 20001905 PARAMETER Experiment Name: At_Drought_Reproduction_P Parameter: Age (day) Value: 40
  misc_feature: MA Experiment 20001905 PARAMETER Experiment Name: At_Drought_Reproduction_P Parameter: Organism Value: A. thaliana
  misc_feature: MA Experiment 20001905 PARAMETER Experiment Name: At_Drought_Reproduction_P Parameter: Plant Line Value: WS
  misc_feature: MA Experiment 20001905 PARAMETER Experiment Name: At_Drought_Reproduction_P Parameter: Timepoint (day) Value: 10
  misc_feature: MA Experiment 20001905 PARAMETER Experiment Name: At_Drought_Reproduction_P Parameter: Tissue Value: Rosettes
  misc_feature: MA Experiment 20001905 PARAMETER Experiment Name: At_Drought_Reproduction_P Parameter: Treatment Value: Drought vs. No Drought
ctcgataagaagacattagggtgagaattgagttttatcgaacaagatggatttcgtgaacaatcttgataccgacacgttgctatcaattctctcttgtctagatgatccatcagatattgtccgtgccagtgctgtctcacgctcctggcgacaatttgtggttaagtatagtctctccaagaatctatgcttgaagttgttccatcagctatctaatgtggatcatataattgaaacaagtaatgatagaaatggagagtcatctgaagctgggtcaagcagtctcatggatacaaggctacttgaaaaagagcaccgggcttttgccttgttggctagagggtgcatgtcttcacctattgaaagctgtatagctgatgccattagagcttccagtactgataattacccagtagaaagcatcttaaacacactcgagaagagagatcggattggtcgaaccccttcttattggtcgagtactgggcaacacaaaactacggtgcccgaatcacttctttacaagttgattggtgatttgtgtctcattactgaagtcagcatccatcctttccaagcttattttcagcgcggtcatccgatatactcttcacattatgttcgtttccggttgggtcacgaaaaggacaattcacctcactacaacaattcacaggataaaaaaggtgagccaggaaagagttcaattgaaagcaactatgtatggacttacacttcacaagagttttcgatggctcaggaaaatcgattgcagagctttcagcttccagaacctgttctttgcattggtgggtatctgctagtcgagtttctaggtcgagttcagacacaagaaatggatggccaatactatatatgcgtgtcacatgtcaaagtggagggaagatctctagcaaaatcatttcgagttgagaatgtggatgacaatggaaagtttggattgaaggtgttgagttacaatgatccgaaaaaaatggaggagatggatgcagaggccgggcaggacatggatgcagaggcgggccaaagtcagctgagaaaccttgaacagctcttgaatttgttgcacaggcatcctctcgatgttgtcgactatgtttggcctgatgagtcagacgacgagtatgctgaatcagaagatgaggctgagccttagtcactgaattactactattcccagttatttcttctttttggttttaattttaaagaatctttaggtgttttttgtcatcttttgtgagcgtttttaaaagcttgtactccagccatcgttgttaaacattgtgtgtgttacagaccttaacagaaagttaacagccattttgggctctctcttatctgtcggtgattccagagaatcaaagcagtctttcg

SEQ ID NO: 26675 - protein, 377 aa, Arabidopsis thaliana
  peptide (1)..(377): Ceres Seq. ID no. 12422632
  misc_feature (4)..(50): Pfam Name: F-box domain Pfam Description: F-box domain
  misc_feature (230)..(287): Homolog of NCBI NO: 28850404 NR Description: hypothetical protein [Dictyostelium discoideum]
  misc_feature (117)..(209): Homolog of NCBI NO: 28850404 NR Description: hypothetical protein [Dictyostelium discoideum]
  misc_feature (231)..(297): Homolog of NCBI NO: 18308222 NR Description: unknown protein [Oryza sativa]
  misc_feature (133)..(377): Homolog of NCBI NO: 28393062 NR Description: putative F-box protein [Arabidopsis thaliana]
  misc_feature (279)..(377): Homolog of NCBI NO: 7452420 NR Description: hypothetical protein A_TM018A10.10 - Arabidopsis
  misc_feature (1)..(216): Homolog of NCBI NO: 7452420 NR Description: hypothetical protein A_TM018A10.10 - Arabidopsis
  misc_feature (1)..(377): Homolog of NCBI NO: 18411435 NR Description: F-box protein family
MDFVNNLDTDTLLSILSCLDDPSDIVRASAVSRSWRQFVVKYSLSKNLCLKLFHQLSNVDHIIETSNDRNGESSEAGSSSLMDTRLLEKEHRAFALLARGCMSSPIESCIADAIRASSTDNYPVESILNTLEKRDRIGRTPSYWSSTGQHKTTVPESLLYKLIGDLCLITEVSIHPFQAYFQRGHPIYSSHYVRFRLGHEKDNSPHYNNSQDKKGEPGKSSIESNYVWTYTSQEFSMAQENRLQSFQLPEPVLCIGGYLLVEFLGRVQTQEMDGQYYICVSHVKVEGRSLAKSFRVENVDDNGKFGLKVLSYNDPKKMEEMDAEAGQDMDAEAGQSQLRNLEQLLNLLHRHPLDVVDYVWPDESDDEYAESEDEAEP

SEQ ID NO: 26676 - protein, 296 aa, Arabidopsis thaliana
  peptide (1)..(296): Ceres Seq. ID no. 12422633
  misc_feature (149)..(206): Homolog of NCBI NO: 28850404 NR Description: hypothetical protein [Dictyostelium discoideum]
  misc_feature (36)..(128): Homolog of NCBI NO: 28850404 NR Description: hypothetical protein [Dictyostelium discoideum]
  misc_feature (150)..(216): Homolog of NCBI NO: 18308222 NR Description: unknown protein [Oryza sativa]
  misc_feature (52)..(296): Homolog of NCBI NO: 28393062 NR Description: putative F-box protein [Arabidopsis thaliana]
  misc_feature (198)..(296): Homolog of NCBI NO: 7452420 NR Description: hypothetical protein A_TM018A10.10 - Arabidopsis
  misc_feature (1)..(135): Homolog of NCBI NO: 7452420 NR Description: hypothetical protein A_TM018A10.10 - Arabidopsis
  misc_feature (1)..(296): Homolog of NCBI NO: 18411435 NR Description: F-box protein family
MDTRLLEKEHRAFALLARGCMSSPIESCIADAIRASSTDNYPVESILNTLEKRDRIGRTPSYWSSTGQHKTTVPESLLYKLIGDLCLITEVSIHPFQAYFQRGHPIYSSHYVRFRLGHEKDNSPHYNNSQDKKGEPGKSSIESNYVWTYTSQEFSMAQENRLQSFQLPEPVLCIGGYLLVEFLGRVQTQEMDGQYYICVSHVKVEGRSLAKSFRVENVDDNGKFGLKVLSYNDPKKMEEMDAEAGQDMDAEAGQSQLRNLEQLLNLLHRHPLDVVDYVWPDESDDEYAESEDEAEP

SEQ ID NO: 26677 - protein, 276 aa, Arabidopsis thaliana
  peptide (1)..(276): Ceres Seq. ID no. 12422634
  misc_feature (129)..(186): Homolog of NCBI NO: 28850404 NR Description: hypothetical protein [Dictyostelium discoideum]
  misc_feature (16)..(108): Homolog of NCBI NO: 28850404 NR Description: hypothetical protein [Dictyostelium discoideum]
  misc_feature (130)..(196): Homolog of NCBI NO: 18308222 NR Description: unknown protein [Oryza sativa]
  misc_feature (32)..(276): Homolog of NCBI NO: 28393062 NR Description: putative F-box protein [Arabidopsis thaliana]
  misc_feature (178)..(276): Homolog of NCBI NO: 7452420 NR Description: hypothetical protein A_TM018A10.10 - Arabidopsis
  misc_feature (1)..(115): Homolog of NCBI NO: 7452420 NR Description: hypothetical protein A_TM018A10.10 - Arabidopsis
  misc_feature (1)..(276): Homolog of NCBI NO: 18411435 NR Description: F-box protein family
MSSPIESCIADAIRASSTDNYPVESILNTLEKRDRIGRTPSYWSSTGQHKTTVPESLLYKLIGDLCLITEVSIHPFQAYFQRGHPIYSSHYVRFRLGHEKDNSPHYNNSQDKKGEPGKSSIESNYVWTYTSQEFSMAQENRLQSFQLPEPVLCIGGYLLVEFLGRVQTQEMDGQYYICVSHVKVEGRSLAKSFRVENVDDNGKFGLKVLSYNDPKKMEEMDAEAGQDMDAEAGQSQLRNLEQLLNLLHRHPLDVVDYVWPDESDDEYAESEDEAEP

SEQ ID NO: 26678 - DNA, 1259 bp, Arabidopsis thaliana
  misc_feature (1)..(1259): Ceres Seq. ID no. 12324060
  misc_feature: MA Experiment ID: 108461 Result: Up-regulated in Transcription
  misc_feature: MA Experiment 108461 PARAMETER Experiment Name: At_Germinating_Seeds_cDNA_P Parameter: Age (day) Value: 1 vs. 0
  misc_feature: MA Experiment 108461 PARAMETER Experiment Name: At_Germinating_Seeds_cDNA_P Parameter: Tissue Value: Germinating Seeds
  misc_feature: MA Experiment ID: 108462 Result: Up-regulated in Transcription
  misc_feature: MA Experiment 108462 PARAMETER Experiment Name: At_Germinating_Seeds_cDNA_P Parameter: Age (day) Value: 2 vs. 0
  misc_feature: MA Experiment 108462 PARAMETER Experiment Name: At_Germinating_Seeds_cDNA_P Parameter: Tissue Value: Germinating Seeds
  misc_feature: MA Experiment ID: 108463 Result: Up-regulated in Transcription
  misc_feature: MA Experiment 108463 PARAMETER Experiment Name: At_Germinating_Seeds_cDNA_P Parameter: Age (day) Value: 3 vs. 0
  misc_feature: MA Experiment 108463 PARAMETER Experiment Name: At_Germinating_Seeds_cDNA_P Parameter: Tissue Value: Germinating Seeds
  misc_feature: MA Experiment ID: 108488 Result: Down-regulated in Transcription
  misc_feature: MA Experiment ID: 108579 Result: Up-regulated in Transcription
  misc_feature: MA Experiment 108579 PARAMETER Experiment Name: At_4deg_Cold_cDNA_P Parameter: Temperature (deg C) Value: 4 vs. 22
  misc_feature: MA Experiment 108579 PARAMETER Experiment Name: At_4deg_Cold_cDNA_P Parameter: Timepoint (hr) Value: 6
  misc_feature: MA Experiment 108579 PARAMETER Experiment Name: At_4deg_Cold_cDNA_P Parameter: Tissue Value: Aerial
  misc_feature: MA Experiment ID: 20000069 Result: Down-regulated in Transcription
  misc_feature: MA Experiment 20000069 PARAMETER Experiment Name: At_100uM_ABA_Mutants_cDNA_P Parameter: Plant Line Value: CS23
  misc_feature: MA Experiment 20000069 PARAMETER Experiment Name: At_100uM_ABA_Mutants_cDNA_P Parameter: Timepoint (hr) Value: 6
  misc_feature: MA Experiment 20000069 PARAMETER Experiment Name: At_100uM_ABA_Mutants_cDNA_P Parameter: Tissue Value: Aerial
  misc_feature: MA Experiment 20000069 PARAMETER Experiment Name: At_100uM_ABA_Mutants_cDNA_P Parameter: Treatment Value: 100uM ABA vs. No Treatment
  misc_feature: MA Experiment ID: 20000086 Result: Down-regulated in Transcription
  misc_feature: MA Experiment 20000086 PARAMETER Experiment Name: At_100uM_ABA_Mutants_cDNA_P Parameter: Plant Line Value: CS22
  misc_feature: MA Experiment 20000086 PARAMETER Experiment Name: At_100uM_ABA_Mutants_cDNA_P Parameter: Timepoint (hr) Value: 6
  misc_feature: MA Experiment 20000086 PARAMETER Experiment Name: At_100uM_ABA_Mutants_cDNA_P Parameter: Tissue Value: Aerial
  misc_feature: MA Experiment 20000086 PARAMETER Experiment Name: At_100uM_ABA_Mutants_cDNA_P Parameter: Treatment Value: 100uM ABA vs. No Treatment
  misc_feature: MA Experiment ID: 20000087 Result: Down-regulated in Transcription
  misc_feature: MA Experiment 20000087 PARAMETER Experiment Name: At_100uM_ABA_Mutants_cDNA_P Parameter: Plant Line Value: WS
  misc_feature: MA Experiment 20000087 PARAMETER Experiment Name: At_100uM_ABA_Mutants_cDNA_P Parameter: Timepoint (hr) Value: 6
  misc_feature: MA Experiment 20000087 PARAMETER Experiment Name: At_100uM_ABA_Mutants_cDNA_P Parameter: Tissue Value: Aerial
  misc_feature: MA Experiment 20000087 PARAMETER Experiment Name: At_100uM_ABA_Mutants_cDNA_P Parameter: Treatment Value: 100uM ABA vs. No Treatment
  misc_feature: MA Experiment ID: 20000089 Result: Down-regulated in Transcription
  misc_feature: MA Experiment ID: 20000090 Result: Down-regulated in Transcription
  misc_feature: MA Experiment ID: 20000180 Result: Up-regulated in Transcription
  misc_feature: MA Experiment 20000180 PARAMETER Experiment Name: At_Germinating_Seeds_P Parameter: Age (hr) Value: 24 vs. 0
  misc_feature: MA Experiment 20000180 PARAMETER Experiment Name: At_Germinating_Seeds_P Parameter: Tissue Value: Germinating Seeds
  misc_feature: MA Experiment ID: 20000185 Result: Up-regulated in Transcription
  misc_feature: MA Experiment 20000185 PARAMETER Experiment Name: At_Roots__P Parameter: Age (day) Value: 7 vs. 21
  misc_feature: MA Experiment 20000185 PARAMETER Experiment Name: At_Roots__P Parameter: Organism Value: A. thaliana
  misc_feature: MA Experiment 20000185 PARAMETER Experiment Name: At_Roots__P Parameter: Tissue Value: Roots vs. Whole Plant
  misc_feature: MA Experiment ID: 20000265 Result: Down-regulated in Transcription
  misc_feature: MA Experiment 20000265 PARAMETER Experiment Name: At_Open_Flower_P Parameter: Age (day) Value: 21
  misc_feature: MA Experiment 20000265 PARAMETER Experiment Name: At_Open_Flower_P Parameter: Plant Line Value: WS
  misc_feature: MA Experiment 20000265 PARAMETER Experiment Name: At_Open_Flower_P Parameter: Tissue Value: Closed Flower vs. Whole Plant
  misc_feature: MA Experiment ID: 20000286 Result: Down-regulated in Transcription
  misc_feature: MA Experiment 20000286 PARAMETER Experiment Name: At_Open_Flower_P Parameter: Age (day) Value: 21
  misc_feature: MA Experiment 20000286 PARAMETER Experiment Name: At_Open_Flower_P Parameter: Plant Line Value: WS
  misc_feature: MA Experiment 20000286 PARAMETER Experiment Name: At_Open_Flower_P Parameter: Tissue Value: Half Open vs. Whole Plant
  misc_feature: MA Experiment ID: 20000439 Result: Up-regulated in Transcription
  misc_feature: MA Experiment 20000439 PARAMETER Experiment Name: At_Roots__P Parameter: Age (day) Value: 14 vs. 21
  misc_feature: MA Experiment 20000439 PARAMETER Experiment Name: At_Roots__P Parameter: Organism Value: A. thaliana
  misc_feature: MA Experiment 20000439 PARAMETER Experiment Name: At_Roots__P Parameter: Tissue Value: Roots vs. Whole Plant
  misc_feature: MA Experiment ID: 20000495 Result: Down-regulated in Transcription
  misc_feature: MA Experiment 20000495 PARAMETER Experiment Name: At_Guard_Cells_P Parameter: Harvest Date Value: 8/2/2002
  misc_feature: MA Experiment 20000495 PARAMETER Experiment Name: At_Guard_Cells_P Parameter: Organism Value: A. thaliana
  misc_feature: MA Experiment 20000495 PARAMETER Experiment Name: At_Guard_Cells_P Parameter: Tissue Value: Guard Cells vs. Leaves
  misc_feature: MA Experiment ID: 20000496 Result: Down-regulated in Transcription
  misc_feature: MA Experiment 20000496 PARAMETER Experiment Name: At_Guard_Cells_P Parameter: Harvest Date Value: 7/19/2002
  misc_feature: MA Experiment 20000496 PARAMETER Experiment Name: At_Guard_Cells_P Parameter: Organism Value: Canola
  misc_feature: MA Experiment 20000496 PARAMETER Experiment Name: At_Guard_Cells_P Parameter: Tissue Value: Guard Cells vs. Leaves
  misc_feature: MA Experiment ID: 20000527 Result: Down-regulated in Transcription
  misc_feature: MA Experiment 20000527 PARAMETER Experiment Name: At_10percent_PEG_P Parameter: Age (day) Value: 20
  misc_feature: MA Experiment 20000527 PARAMETER Experiment Name: At_10percent_PEG_P Parameter: Organism Value: A. thaliana
  misc_feature: MA Experiment 20000527 PARAMETER Experiment Name: At_10percent_PEG_P Parameter: Plant Line Value: WS
  misc_feature: MA Experiment 20000527 PARAMETER Experiment Name: At_10percent_PEG_P Parameter: Timepoint (day) Value: 20
  misc_feature: MA Experiment 20000527 PARAMETER Experiment Name: At_10percent_PEG_P Parameter: Tissue Value: Whole Plant
  misc_feature: MA Experiment 20000527 PARAMETER Experiment Name: At_10percent_PEG_P Parameter: Treatment Value: 10percent PEG vs. No Treatment
  misc_feature: MA Experiment ID: 20000573 Result: Down-regulated in Transcription
  misc_feature: MA Experiment 20000573 PARAMETER Experiment Name: At_100uM_ABA_Mutants__P Parameter: Organism Value: A. thaliana
  misc_feature: MA Experiment 20000573 PARAMETER Experiment Name: At_100uM_ABA_Mutants__P Parameter: Plant Line Value: CS22 vs. Ler wt
  misc_feature: MA Experiment 20000573 PARAMETER Experiment Name: At_100uM_ABA_Mutants__P Parameter: Timepoint (hr) Value: N/A
  misc_feature: MA Experiment 20000573 PARAMETER Experiment Name: At_100uM_ABA_Mutants__P Parameter: Tissue Value: Whole Plant
  misc_feature: MA Experiment 20000573 PARAMETER Experiment Name: At_100uM_ABA_Mutants__P Parameter: Treatment Value: None
  misc_feature: MA Experiment ID: 20000574 Result: Down-regulated in Transcription
  misc_feature: MA Experiment 20000574 PARAMETER Experiment Name: At_100uM_ABA_Mutants__P Parameter: Organism Value: A. thaliana
  misc_feature: MA Experiment 20000574 PARAMETER Experiment Name: At_100uM_ABA_Mutants__P Parameter: Plant Line Value: CS23 vs. Ler wt
  misc_feature: MA Experiment 20000574 PARAMETER Experiment Name: At_100uM_ABA_Mutants__P Parameter: Timepoint (hr) Value: N/A
  misc_feature: MA Experiment 20000574 PARAMETER Experiment Name: At_100uM_ABA_Mutants__P Parameter: Tissue Value: Whole Plant
  misc_feature: MA Experiment 20000574 PARAMETER Experiment Name: At_100uM_ABA_Mutants__P Parameter: Treatment Value: None
  misc_feature: MA Experiment ID: 20000794 Result: Down-regulated in Transcription
  misc_feature: MA Experiment 20000794 PARAMETER Experiment Name: At_Petals_P Parameter: Age (day) Value: 23-25 days
  misc_feature: MA Experiment 20000794 PARAMETER Experiment Name: At_Petals_P Parameter: Plant Line Value: WS
  misc_feature: MA Experiment 20000794 PARAMETER Experiment Name: At_Petals_P Parameter: Tissue Value: Petals vs. Whole plant
  misc_feature: MA Experiment ID: 20001248 Result: Down-regulated in Transcription
  misc_feature: MA Experiment 20001248 PARAMETER Experiment Name: At_Far-red-induction_P Parameter: Age (day) Value: 7
  misc_feature: MA Experiment 20001248 PARAMETER Experiment Name: At_Far-red-induction_P Parameter: Light Value: Far-red vs. White
  misc_feature: MA Experiment 20001248 PARAMETER Experiment Name: At_Far-red-induction_P Parameter: Organism Value: A. thaliana
  misc_feature: MA Experiment 20001248 PARAMETER Experiment Name: At_Far-red-induction_P Parameter: Plant Line Value: Columbia
  misc_feature: MA Experiment 20001248 PARAMETER Experiment Name: At_Far-red-induction_P Parameter: Timepoint (hr) Value: 4
  misc_feature: MA Experiment 20001248 PARAMETER Experiment Name: At_Far-red-induction_P Parameter: Tissue Value: Whole Plant
  misc_feature: MA Experiment ID: 20001556 Result: Down-regulated in Transcription
  misc_feature: MA Experiment 20001556 PARAMETER Experiment Name: At_Drought_Soil_Dry_P Parameter: Age (day) Value: 26
  misc_feature: MA Experiment 20001556 PARAMETER Experiment Name: At_Drought_Soil_Dry_P Parameter: Organism Value: A. thaliana
  misc_feature: MA Experiment 20001556 PARAMETER Experiment Name: At_Drought_Soil_Dry_P Parameter: Plant Line Value: WS
  misc_feature: MA Experiment 20001556 PARAMETER Experiment Name: At_Drought_Soil_Dry_P Parameter: Post Timepoint (hr) Value: None
  misc_feature: MA Experiment 20001556 PARAMETER Experiment Name: At_Drought_Soil_Dry_P Parameter: Post-Treatment Value: None
  misc_feature: MA Experiment 20001556 PARAMETER Experiment Name: At_Drought_Soil_Dry_P Parameter: Timepoint (day) Value: 12
  misc_feature: MA Experiment 20001556 PARAMETER Experiment Name: At_Drought_Soil_Dry_P Parameter: Treatment Value: Drought vs. No Drought
  misc_feature: MA Experiment ID: 20001557 Result: Down-regulated in Transcription
  misc_feature: MA Experiment 20001557 PARAMETER Experiment Name: At_Drought_Soil_Dry_P Parameter: Age (day) Value: 27
  misc_feature: MA Experiment 20001557 PARAMETER Experiment Name: At_Drought_Soil_Dry_P Parameter: Organism Value: A. thaliana
  misc_feature: MA Experiment 20001557 PARAMETER Experiment Name: At_Drought_Soil_Dry_P Parameter: Plant Line Value: WS
  misc_feature: MA Experiment 20001557 PARAMETER Experiment Name: At_Drought_Soil_Dry_P Parameter: Post Timepoint (hr) Value: 3
  misc_feature: MA Experiment 20001557 PARAMETER Experiment Name: At_Drought_Soil_Dry_P Parameter: Post-Treatment Value: Re-Water vs. No Drought
  misc_feature: MA Experiment 20001557 PARAMETER Experiment Name: At_Drought_Soil_Dry_P Parameter: Timepoint (day) Value: 13
  misc_feature: MA Experiment 20001557 PARAMETER Experiment Name: At_Drought_Soil_Dry_P Parameter: Treatment Value: Drought vs. No Drought
  misc_feature: MA Experiment ID: 20001558 Result: Down-regulated in Transcription
  misc_feature: MA Experiment 20001558 PARAMETER Experiment Name: At_Drought_Soil_Dry_P Parameter: Age (day) Value: 27
  misc_feature: MA Experiment 20001558 PARAMETER Experiment Name: At_Drought_Soil_Dry_P Parameter: Organism Value: A. thaliana
  misc_feature: MA Experiment 20001558 PARAMETER Experiment Name: At_Drought_Soil_Dry_P Parameter: Plant Line Value: WS
  misc_feature: MA Experiment 20001558 PARAMETER Experiment Name: At_Drought_Soil_Dry_P Parameter: Post Timepoint (hr) Value: 6
  misc_feature: MA Experiment 20001558 PARAMETER Experiment Name: At_Drought_Soil_Dry_P Parameter: Post-Treatment Value: Re-Water vs. No Drought
  misc_feature: MA Experiment 20001558 PARAMETER Experiment Name: At_Drought_Soil_Dry_P Parameter: Timepoint (day) Value: 13
  misc_feature: MA Experiment 20001558 PARAMETER Experiment Name: At_Drought_Soil_Dry_P Parameter: Treatment Value: Drought vs. No Drought
  misc_feature: MA Experiment ID: 20001560 Result: Down-regulated in Transcription
  misc_feature: MA Experiment 20001560 PARAMETER Experiment Name: At_Drought_Soil_Dry_P Parameter: Age (day) Value: 28
  misc_feature: MA Experiment 20001560 PARAMETER Experiment Name: At_Drought_Soil_Dry_P Parameter: Organism Value: A. thaliana
  misc_feature: MA Experiment 20001560 PARAMETER Experiment Name: At_Drought_Soil_Dry_P Parameter: Plant Line Value: WS
  misc_feature: MA Experiment 20001560 PARAMETER Experiment Name: At_Drought_Soil_Dry_P Parameter: Post Timepoint (hr) Value: None
  misc_feature: MA Experiment 20001560 PARAMETER Experiment Name: At_Drought_Soil_Dry_P Parameter: Post-Treatment Value: None
  misc_feature: MA Experiment 20001560 PARAMETER Experiment Name: At_Drought_Soil_Dry_P Parameter: Timepoint (day) Value: 14
  misc_feature: MA Experiment 20001560 PARAMETER Experiment Name: At_Drought_Soil_Dry_P Parameter: Treatment Value: Drought vs. No Drought
gtgtctcatctttcctctcctcttccatcgcttagtcgcctctctcttcgttgttgcagctctcttcctgctcacgatatggagacaaaaccaagtcaaggcctttacccacttcaccgttgcaaaaccatacatctggtgagacatgctcaagggattcacaatgttgaaggagagaagaaccataaggcttacttatctgaggatctctttgatgcacatcttacacctcttggatggcaacaagttgataatttacacaagcatgttaaggcaagtggtatttccaatagaattgagttggtagttgtatctcctctgctcaggtaatatacttaacttcttattgatatgatcttaacgctattgcttggattcttgcttgagaatagtcatcttgagttaaacgtccttattgatttgtgttatgccatttcgttctttgataagcagtatcaataacacatctcatctcttcacttttgtctttgttttaggactttgcaaacagcggtcggaacttttggtggggaaggttacaaagatggtgttaatacacctctgcttatgaccgcaggtgctggaaacagcgatcgtcctgctatatcaagcttaaattgtccaccattcattgcggttgaatcctgccgagaacatttggtatgtttactattctaccttttgcatgaatagcattttcttgagatgaaaacttttgcaatgttcttggttcagggtgttcatccttgtgacagaagaagcaatgtcaccaagtaccgcgaattattccctgcgattgatttttcattgatagaaactgataaagatgtcttgtggaagcctgacgttagagaggaggatcaagatattgcggccagaggcgtgaagttctttaactggttgagtacaaggaaagaaaaagagattgcggttgtaactcatagtgggttcttgtatcaaacattaaactcatttggaaacgattgtgatccatctgtgaaaaacgagatttctaaaaaatttgtcaactgtgaactccgttcatttgttcttgtagataaatgcatgagcagttcggatcctccaatgaccaactatcccggaacaatacttaccggagaagatgcttctagtgatattgctgatcagaagtagttatatgtattatgttaatcttatatgaatctcaaagctgtatatttctatacaatggaatagaaaatggagttagacgtaactattttatttaacgttaccgt

SEQ ID NO: 26679 - protein, 149 aa, Arabidopsis thaliana
  peptide (1)..(149): Ceres Seq. ID no. 12324061
  misc_feature (11)..(119): Pfam Name: Phosphoglycerate mutase family Pfam Description: Phosphoglycerate mutase family
  misc_feature (11)..(149): Homolog of NCBI NO: 15217922 NR Description: unknown protein; protein id: At1g58280.1
  misc_feature (11)..(149): Homolog of NCBI NO: 25372930 NR Description: hypothetical protein ZW10
  misc_feature (11)..(149): Homolog of NCBI NO: 25372931 NR Description: hypothetical protein F19C14.10 [imported] -
  misc_feature (1)..(149): Homolog of NCBI NO: 30696245 NR Description: expressed protein [Arabidopsis thaliana]
MKTFAMFLVQGVHPCDRRSNVTKYRELFPAIDFSLIETDKDVLWKPDVREEDQDIAARGVKFFNWLSTRKEKEIAVVTHSGFLYQTLNSFGNDCDPSVKNEISKKFVNCELRSFVLVDKCMSSSDPPMTNYPGTILTGEDASSDIADQK

SEQ ID NO: 26680 - protein, 144 aa, Arabidopsis thaliana
  peptide (1)..(144): Ceres Seq. ID no. 12324062
  misc_feature (6)..(114): Pfam Name: Phosphoglycerate mutase family Pfam Description: Phosphoglycerate mutase family
  misc_feature (6)..(144): Homolog of NCBI NO: 15217922 NR Description: unknown protein; protein id: At1g58280.1
  misc_feature (6)..(144): Homolog of NCBI NO: 25372930 NR Description: hypothetical protein ZW10
  misc_feature (6)..(144): Homolog of NCBI NO: 25372931 NR Description: hypothetical protein F19C14.10 [imported] -
  misc_feature (1)..(144): Homolog of NCBI NO: 30696245 NR Description: expressed protein [Arabidopsis thaliana]
MFLVQGVHPCDRRSNVTKYRELFPAIDFSLIETDKDVLWKPDVREEDQDIAARGVKFFNWLSTRKEKEIAVVTHSGFLYQTLNSFGNDCDPSVKNEISKKFVNCELRSFVLVDKCMSSSDPPMTNYPGTILTGEDASSDIADQK

SEQ ID NO: 26681 - protein, 109 aa, Arabidopsis thaliana
  peptide (1)..(109): Ceres Seq. ID no. 12324063
  misc_feature (42)..(109): Pfam Name: Phosphoglycerate mutase family Pfam Description: Phosphoglycerate mutase family
  misc_feature (27)..(109): Homolog of NCBI NO: 15217922 NR Description: unknown protein; protein id: At1g58280.1
  misc_feature (4)..(109): Homolog of NCBI NO: 25372930 NR Description: hypothetical protein ZW10
  misc_feature (1)..(109): Homolog of NCBI NO: 25372931 NR Description: hypothetical protein F19C14.10 [imported] -
  misc_feature (1)..(109): Homolog of NCBI NO: 30696245 NR Description: expressed protein [Arabidopsis thaliana]
VSHLSSPLPSLSRLSLRCCSSLPAHDMETKPSQGLYPLHRCKTIHLVRHAQGIHNVEGEKNHKAYLSEDLFDAHLTPLGWQQVDNLHKHVKASGISNRIELVVVSPLLR

SEQ ID NO: 26682 - DNA, 949 bp, Arabidopsis thaliana
  misc_feature (1)..(949): Ceres Seq. ID no. 12331519
  misc_feature: MA Experiment ID: 108434 Result: Down-regulated in Transcription
  misc_feature: MA Experiment 108434 PARAMETER Experiment Name: At_Root_Tips_cDNA_P Parameter: Tissue Value: Root Tips
  misc_feature: MA Experiment ID: 108461 Result: Up-regulated in Transcription
  misc_feature: MA Experiment 108461 PARAMETER Experiment Name: At_Germinating_Seeds_cDNA_P Parameter: Age (day) Value: 1 vs. 0
  misc_feature: MA Experiment 108461 PARAMETER Experiment Name: At_Germinating_Seeds_cDNA_P Parameter: Tissue Value: Germinating Seeds
  misc_feature: MA Experiment ID: 108462 Result: Up-regulated in Transcription
  misc_feature: MA Experiment 108462 PARAMETER Experiment Name: At_Germinating_Seeds_cDNA_P Parameter: Age (day) Value: 2 vs. 0
  misc_feature: MA Experiment 108462 PARAMETER Experiment Name: At_Germinating_Seeds_cDNA_P Parameter: Tissue Value: Germinating Seeds
  misc_feature: MA Experiment ID: 108463 Result: Up-regulated in Transcription
  misc_feature: MA Experiment 108463 PARAMETER Experiment Name: At_Germinating_Seeds_cDNA_P Parameter: Age (day) Value: 3 vs. 0
  misc_feature: MA Experiment 108463 PARAMETER Experiment Name: At_Germinating_Seeds_cDNA_P Parameter: Tissue Value: Germinating Seeds
  misc_feature: MA Experiment ID: 108464 Result: Up-regulated in Transcription
  misc_feature: MA Experiment 108464 PARAMETER Experiment Name: At_Germinating_Seeds_cDNA_P Parameter: Age (day) Value: 4 vs. 0
  misc_feature: MA Experiment 108464 PARAMETER Experiment Name: At_Germinating_Seeds_cDNA_P Parameter: Tissue Value: Germinating Seeds
  misc_feature: MA Experiment ID: 108569 Result: Up-regulated in Transcription
  misc_feature: MA Experiment 108569 PARAMETER Experiment Name: At_0.001%_MeJA__cDNA_P Parameter: Timepoint (hr) Value: 6
  misc_feature: MA Experiment 108569 PARAMETER Experiment Name: At_0.001%_MeJA__cDNA_P Parameter: Tissue Value: Aerial
  misc_feature: MA Experiment 108569 PARAMETER Experiment Name: At_0.001%_MeJA__cDNA_P Parameter: Treatment Value: 0.001% MeJA vs. No Treatment
  misc_feature: MA Experiment ID: 108572 Result: Up-regulated in Transcription
  misc_feature: MA Experiment 108572 PARAMETER Experiment Name: At_Drought_cDNA_P Parameter: Timepoint (hr) Value: 1
  misc_feature: MA Experiment 108572 PARAMETER Experiment Name: At_Drought_cDNA_P Parameter: Tissue Value: Aerial
  misc_feature: MA Experiment 108572 PARAMETER Experiment Name: At_Drought_cDNA_P Parameter: Treatment Value: Drought vs. No Drought
  misc_feature: MA Experiment ID: 108573 Result: Up-regulated in Transcription
  misc_feature: MA Experiment 108573 PARAMETER Experiment Name: At_Drought_cDNA_P Parameter: Timepoint (hr) Value: 6
  misc_feature: MA Experiment 108573 PARAMETER Experiment Name: At_Drought_cDNA_P Parameter: Tissue Value: Aerial
  misc_feature: MA Experiment 108573 PARAMETER Experiment Name: At_Drought_cDNA_P Parameter: Treatment Value: Drought vs. No Drought
  misc_feature: MA Experiment ID: 108574 Result: Up-regulated in Transcription
  misc_feature: MA Experiment 108574 PARAMETER Experiment Name: At_Wounding__cDNA_P Parameter: Timepoint (hr) Value: 1
  misc_feature: MA Experiment 108574 PARAMETER Experiment Name: At_Wounding__cDNA_P Parameter: Tissue Value: Aerial
  misc_feature: MA Experiment 108574 PARAMETER Experiment Name: At_Wounding__cDNA_P Parameter: Treatment Value: Wounding vs. No Wounding
  misc_feature: MA Experiment ID: 108585 Result: Up-regulated in Transcription
  misc_feature: MA Experiment 108585 PARAMETER Experiment Name: At_5mM_NaNP_cDNA_P Parameter: Timepoint (hr) Value: 6
  misc_feature: MA Experiment 108585 PARAMETER Experiment Name: At_5mM_NaNP_cDNA_P Parameter: Tissue Value: Aerial
  misc_feature: MA Experiment 108585 PARAMETER Experiment Name: At_5mM_NaNP_cDNA_P Parameter: Treatment Value: null
  misc_feature: MA Experiment ID: 108595 Result: Up-regulated in Transcription
  misc_feature: MA Experiment 108595 PARAMETER Experiment Name: At_Ler-pi_Ovule_cDNA_P Parameter: Plant Line Value: null
  misc_feature: MA Experiment ID: 108667 Result: Up-regulated in Transcription
  misc_feature: MA Experiment 108667 PARAMETER Experiment Name: At_2mM_SA_cDNA_P Parameter: Plant Line Value: WS
  misc_feature: MA Experiment 108667 PARAMETER Experiment Name: At_2mM_SA_cDNA_P Parameter: Timepoint (hr) Value: 1
  misc_feature: MA Experiment 108667 PARAMETER Experiment Name: At_2mM_SA_cDNA_P Parameter: Treatment Value: 2mM SA vs. No Treatment
  misc_feature: MA Experiment ID: 108668 Result: Up-regulated in Transcription
  misc_feature: MA Experiment 108668 PARAMETER Experiment Name: At_2mM_SA_cDNA_P Parameter: Plant Line Value: WS
  misc_feature: MA Experiment 108668 PARAMETER Experiment Name: At_2mM_SA_cDNA_P Parameter: Timepoint (hr) Value: 6
  misc_feature: MA Experiment 108668 PARAMETER Experiment Name: At_2mM_SA_cDNA_P Parameter: Treatment Value: 2mM SA vs. No Treatment
  misc_feature: MA Experiment ID: 20000071 Result: Up-regulated in Transcription
  misc_feature: MA Experiment 20000071 PARAMETER Experiment Name: At_100uM_ABA_Mutants_cDNA_P Parameter: Plant Line Value: CS8104
  misc_feature: MA Experiment 20000071 PARAMETER Experiment Name: At_100uM_ABA_Mutants_cDNA_P Parameter: Timepoint (hr) Value: 6
  misc_feature: MA Experiment 20000071 PARAMETER Experiment Name: At_100uM_ABA_Mutants_cDNA_P Parameter: Tissue Value: Aerial
  misc_feature: MA Experiment 20000071 PARAMETER Experiment Name: At_100uM_ABA_Mutants_cDNA_P Parameter: Treatment Value: 100uM ABA vs. No Treatment
  misc_feature: MA Experiment ID: 20000072 Result: Up-regulated in Transcription
  misc_feature: MA Experiment 20000072 PARAMETER Experiment Name: At_100uM_ABA_Mutants_cDNA_P Parameter: Plant Line Value: CS8105
  misc_feature: MA Experiment 20000072 PARAMETER Experiment Name: At_100uM_ABA_Mutants_cDNA_P Parameter: Timepoint (hr) Value: 6
  misc_feature: MA Experiment 20000072 PARAMETER Experiment Name: At_100uM_ABA_Mutants_cDNA_P Parameter: Tissue Value: Aerial
  misc_feature: MA Experiment 20000072 PARAMETER Experiment Name: At_100uM_ABA_Mutants_cDNA_P Parameter: Treatment Value: 100uM ABA vs. No Treatment
  misc_feature: MA Experiment ID: 20000111 Result: Down-regulated in Transcription
  misc_feature: MA Experiment 20000111 PARAMETER Experiment Name: At_42deg_Heat_cDNA_P Parameter: Temperature (deg C) Value: 42 vs. 22
  misc_feature: MA Experiment 20000111 PARAMETER Experiment Name: At_42deg_Heat_cDNA_P Parameter: Timepoint (hr) Value: 6
  misc_feature: MA Experiment 20000111 PARAMETER Experiment Name: At_42deg_Heat_cDNA_P Parameter: Tissue Value: Aerial
  misc_feature: MA Experiment ID: 20000112 Result: Down-regulated in Transcription
  misc_feature: MA Experiment 20000112 PARAMETER Experiment Name: At_42deg_Heat_cDNA_P Parameter: Temperature (deg C) Value: 42 vs. 22
  misc_feature: MA Experiment 20000112 PARAMETER Experiment Name: At_42deg_Heat_cDNA_P Parameter: Timepoint (hr) Value: 2
  misc_feature: MA Experiment 20000112 PARAMETER Experiment Name: At_42deg_Heat_cDNA_P Parameter: Tissue Value: Aerial
  misc_feature: MA Experiment ID: 20000113 Result: Down-regulated in Transcription
  misc_feature: MA Experiment 20000113 PARAMETER Experiment Name: At_42deg_Heat_cDNA_P Parameter: Temperature (deg C) Value: 42 vs. 22
  misc_feature: MA Experiment 20000113 PARAMETER Experiment Name: At_42deg_Heat_cDNA_P Parameter: Timepoint (hr) Value: 8
  misc_feature: MA Experiment 20000113 PARAMETER Experiment Name: At_42deg_Heat_cDNA_P Parameter: Tissue Value: Aerial
  misc_feature: MA Experiment ID: 20000144 Result: Down-regulated in Transcription
  misc_feature: MA Experiment 20000144 PARAMETER Experiment Name: At_42deg_Heat_cDNA_P Parameter: Temperature (deg C) Value: 42 vs. 22
  misc_feature: MA Experiment 20000144 PARAMETER Experiment Name: At_42deg_Heat_cDNA_P Parameter: Timepoint (hr) Value: 1
  misc_feature: MA Experiment 20000144 PARAMETER Experiment Name: At_42deg_Heat_cDNA_P Parameter: Tissue Value: Aerial
  misc_feature: MA Experiment ID: 20000224 Result: Up-regulated in Transcription
  misc_feature: MA Experiment ID: 20000307 Result: Up-regulated in Transcription
  misc_feature: MA Experiment 20000307 PARAMETER Experiment Name: At_Germinating_Seeds_Sub_P Parameter: Age (hr) Value: 24 vs. 0
  misc_feature: MA Experiment 20000307 PARAMETER Experiment Name: At_Germinating_Seeds_Sub_P Parameter: Organism Value: A. thaliana
  misc_feature: MA Experiment 20000307 PARAMETER Experiment Name: At_Germinating_Seeds_Sub_P Parameter: Plant Line Value: WS
  misc_feature: MA Experiment 20000307 PARAMETER Experiment Name: At_Germinating_Seeds_Sub_P Parameter: Tissue Value: Germinating Seeds
  misc_feature: MA Experiment ID: 20000328 Result: Down-regulated in Transcription
  misc_feature: MA Experiment 20000328 PARAMETER Experiment Name: At_42deg_Heat_Sub_P Parameter: Age (day) Value: 14
  misc_feature: MA Experiment 20000328 PARAMETER Experiment Name: At_42deg_Heat_Sub_P Parameter: Organism Value: A. thaliana
  misc_feature: MA Experiment 20000328 PARAMETER Experiment Name: At_42deg_Heat_Sub_P Parameter: Plant Line Value: WS
  misc_feature: MA Experiment 20000328 PARAMETER Experiment Name: At_42deg_Heat_Sub_P Parameter: Temperature (deg C) Value: 42 vs. 22
  misc_feature: MA Experiment 20000328 PARAMETER Experiment Name: At_42deg_Heat_Sub_P Parameter: Timepoint (hr) Value: 6
  misc_feature: MA Experiment 20000328 PARAMETER Experiment Name: At_42deg_Heat_Sub_P Parameter: Tissue Value: Aerial
  misc_feature: MA Experiment ID: 20000346 Result: Up-regulated in Transcription
  misc_feature: MA Experiment 20000346 PARAMETER Experiment Name: At_2mM_SA_Sub_P Parameter: Age (day) Value: 14
  misc_feature: MA Experiment 20000346 PARAMETER Experiment Name: At_2mM_SA_Sub_P Parameter: Organism Value: A. thaliana
  misc_feature: MA Experiment 20000346 PARAMETER Experiment Name: At_2mM_SA_Sub_P Parameter: Plant Line Value: WS
  misc_feature: MA Experiment 20000346 PARAMETER Experiment Name: At_2mM_SA_Sub_P Parameter: Timepoint (hr) Value: 1
  misc_feature: MA Experiment 20000346 PARAMETER Experiment Name: At_2mM_SA_Sub_P Parameter: Tissue Value: Aerial
  misc_feature: MA Experiment 20000346 PARAMETER Experiment Name: At_2mM_SA_Sub_P Parameter: Treatment Value: 2mM SA vs. No Treatment
  misc_feature: MA Experiment ID: 20000347 Result: Up-regulated in Transcription
  misc_feature: MA Experiment 20000347 PARAMETER Experiment Name: At_2mM_SA_Sub_P Parameter: Age (day) Value: 14
  misc_feature: MA Experiment 20000347 PARAMETER Experiment Name: At_2mM_SA_Sub_P Parameter: Organism Value: A. thaliana
  misc_feature: MA Experiment 20000347 PARAMETER Experiment Name: At_2mM_SA_Sub_P Parameter: Plant Line Value: WS
  misc_feature: MA Experiment 20000347 PARAMETER Experiment Name: At_2mM_SA_Sub_P Parameter: Timepoint (hr) Value: 6
  misc_feature: MA Experiment 20000347 PARAMETER Experiment Name: At_2mM_SA_Sub_P Parameter: Tissue Value: Aerial
  misc_feature: MA Experiment 20000347 PARAMETER Experiment Name: At_2mM_SA_Sub_P Parameter: Treatment Value: 2mM SA vs. No Treatment
  misc_feature: MA Experiment ID: 20000348 Result: Up-regulated in Transcription
  misc_feature: MA Experiment 20000348 PARAMETER Experiment Name: At_100uM_ABA_Sub_P Parameter: Age (day) Value: 14
  misc_feature: MA Experiment 20000348 PARAMETER Experiment Name: At_100uM_ABA_Sub_P Parameter: Organism Value: A. thaliana
  misc_feature: MA Experiment 20000348 PARAMETER Experiment Name: At_100uM_ABA_Sub_P Parameter: Plant Line Value: WS
  misc_feature: MA Experiment 20000348 PARAMETER Experiment Name: At_100uM_ABA_Sub_P Parameter: Timepoint (hr) Value: 1
  misc_feature: MA Experiment 20000348 PARAMETER Experiment Name: At_100uM_ABA_Sub_P Parameter: Tissue Value: Aerial
  misc_feature: MA Experiment 20000348 PARAMETER Experiment Name: At_100uM_ABA_Sub_P Parameter: Treatment Value: 100uM ABA vs. No Treatment
  misc_feature: MA Experiment ID: 20000355 Result: Down-regulated in Transcription
  misc_feature: MA Experiment 20000355 PARAMETER Experiment Name: At_Siliques_Sub_P Parameter: Age (day) Value: 21
  misc_feature: MA Experiment 20000355 PARAMETER Experiment Name: At_Siliques_Sub_P Parameter: Organism Value: A. thaliana
  misc_feature: MA Experiment 20000355 PARAMETER Experiment Name: At_Siliques_Sub_P Parameter: Plant Line Value: WS
  misc_feature: MA Experiment 20000355 PARAMETER Experiment Name: At_Siliques_Sub_P Parameter: Tissue Value: Less Than 5mm Siliques vs. Whole Plant
  misc_feature: MA Experiment ID: 20000440 Result: Down-regulated in Transcription
  misc_feature: MA Experiment 20000440 PARAMETER Experiment Name: At_Closed-Flower__Sub_P Parameter: Tissue Value: Closed Flower vs. Whole Plant
  misc_feature: MA Experiment ID: 20000634 Result: Up-regulated in Transcription
  misc_feature: MA Experiment 20000634 PARAMETER Experiment Name: At_10percent_PEG_Sub_P Parameter: Age (day) Value: 12
  misc_feature: MA Experiment 20000634 PARAMETER Experiment Name: At_10percent_PEG_Sub_P Parameter: Organism Value: A. thaliana
  misc_feature: MA Experiment 20000634 PARAMETER Experiment Name: At_10percent_PEG_Sub_P Parameter: Plant Line Value: WS
  misc_feature: MA Experiment 20000634 PARAMETER Experiment Name: At_10percent_PEG_Sub_P Parameter: Timepoint (day) Value: 12
  misc_feature: MA Experiment 20000634 PARAMETER Experiment Name: At_10percent_PEG_Sub_P Parameter: Tissue Value: Whole Plant
  misc_feature: MA Experiment 20000634 PARAMETER Experiment Name: At_10percent_PEG_Sub_P Parameter: Treatment Value: 10% PEG vs. No Treatment
attaaaaccaaagatcaatctcttcttaatagtcaatcatatatcaaaaaatttaaactcttcttgatcaatggcttcttcttctgctgctatgtctcttgaatccatctctatgacaactctcaacaatctctctcgtaatcatcaatctcaccgcagttctcttcttggtttctcaagatctttccaaaaccttggaatctcatctaacggtccagatttctcctcccgatcaagatctactacttccaagaacctcaacgttactcgagctttcttctggaattggggcaagaagaccgaaaactccagaccaagtaagatccaagaactaaacgtgtatgagctcaacgaaggagatagaaacagtccagcagttcttaaactcggcaagaaaccaacagagctttgtctcggagatcttgttccatttaccaacaaactctacaccggcgatctcaagaaacgcgtgggaatcacggcaggtctctgcgttttgatccaacacgttcctgaaaagagcggtgacagattcgaagctagttacagcttctactttggtgactatggtcacttgtctgtacaaggacaatacttgacttatgaagacacgttcctcgctgtcactggtggctctggaatctttgaaggtgcgtacggacaggttaagcttcgtcagcttgtgtatccgacaaaactgttctacactttttaccttaaagggttagctaatgatttaccgctggagcttactggaacggcggttacgccgtcgaaggatgtgaaaccggcaccggaagctaaggcgatggagcctagtggagttataagtaactttactaattaagtaattagctgtttaatagttgttttgttttgtaatagaatattttgatgagttgtgtgaggttagttaatgatgtgttgagggaataaagtatttattttg

SEQ ID NO: 26683 - protein, 258 aa, Arabidopsis thaliana
  peptide (1)..(258): Ceres Seq. ID no. 12331520
  misc_feature (78)..(258): Pfam Name: Allene oxide cyclase Pfam Description: Allene oxide cyclase
  misc_feature (1)..(258): Homolog of NCBI NO: 40644130 NR Description: allene oxide cyclase [Nicotiana tabacum]
  misc_feature (1)..(258): Homolog of NCBI NO: 16416376 NR Description: mangrin [Bruguiera sexangula]
  misc_feature (52)..(258): Homolog of NCBI NO: 21727906 NR Description: allene oxide cyclase [Oryza sativa (japonica
  misc_feature (1)..(258): Homolog of NCBI NO: 40644132 NR Description: allene oxide cyclase [Medicago truncatula]
  misc_feature (82)..(258): Homolog of NCBI NO: 25518012 NR Description: T6J4.4 protein - Arabidopsis thaliana
  misc_feature (5)..(258): Homolog of NCBI NO: 15320414 NR Description: ERD12 protein [Arabidopsis thaliana]
  misc_feature (1)..(258): Homolog of NCBI NO: 15230874 NR Description: hypothetical protein; protein id: At3g25760.1
  misc_feature (4)..(258): Homolog of NCBI NO: 18404656 NR Description: expressed protein
  misc_feature (1)..(258): Homolog of NCBI NO: 15222241 NR Description: allene oxide cyclase, putative
  misc_feature (1)..(258): Homolog of NCBI NO: 18404658 NR Description: expressed protein
MASSSAAMSLESISMTTLNNLSRNHQSHRSSLLGFSRSFQNLGISSNGPDFSSRSRSTTSKNLNVTRAFFWNWGKKTENSRPSKIQELNVYELNEGDRNSPAVLKLGKKPTELCLGDLVPFTNKLYTGDLKKRVGITAGLCVLIQHVPEKSGDRFEASYSFYFGDYGHLSVQGQYLTYEDTFLAVTGGSGIFEGAYGQVKLRQLVYPTKLFYTFYLKGLANDLPLELTGTAVTPSKDVKPAPEAKAMEPSGVISNFTN

SEQ ID NO: 26684 - protein, 251 aa, Arabidopsis thaliana
  peptide (1)..(251): Ceres Seq. ID no. 12331521
  misc_feature (71)..(251): Pfam Name: Allene oxide cyclase Pfam Description: Allene oxide cyclase
  misc_feature (1)..(251): Homolog of NCBI NO: 40644130 NR Description: allene oxide cyclase [Nicotiana tabacum]
  misc_feature (1)..(251): Homolog of NCBI NO: 16416376 NR Description: mangrin [Bruguiera sexangula]
  misc_feature (45)..(251): Homolog of NCBI NO: 21727906 NR Description: allene oxide cyclase [Oryza sativa (japonica
  misc_feature (1)..(251): Homolog of NCBI NO: 40644132 NR Description: allene oxide cyclase [Medicago truncatula]
  misc_feature (75)..(251): Homolog of NCBI NO: 25518012 NR Description: T6J4.4 protein - Arabidopsis thaliana
  misc_feature (1)..(251): Homolog of NCBI NO: 15320414 NR Description: ERD12 protein [Arabidopsis thaliana]
  misc_feature (1)..(251): Homolog of NCBI NO: 15230874 NR Description: hypothetical protein; protein id: At3g25760.1
  misc_feature (1)..(251): Homolog of NCBI NO: 18404656 NR Description: expressed protein
  misc_feature (1)..(251): Homolog of NCBI NO: 15222241 NR Description: allene oxide cyclase, putative
  misc_feature (1)..(251): Homolog of NCBI NO: 18404658 NR Description: expressed protein
MSLESISMTTLNNLSRNHQSHRSSLLGFSRSFQNLGISSNGPDFSSRSRSTTSKNLNVTRAFFWNWGKKTENSRPSKIQELNVYELNEGDRNSPAVLKLGKKPTELCLGDLVPFTNKLYTGDLKKRVGITAGLCVLIQHVPEKSGDRFEASYSFYFGDYGHLSVQGQYLTYEDTFLAVTGGSGIFEGAYGQVKLRQLVYPTKLFYTFYLKGLANDLPLELTGTAVTPSKDVKPAPEAKAMEPSGVISNFTN

SEQ ID NO: 26685 - protein, 244 aa, Arabidopsis thaliana
  peptide (1)..(244): Ceres Seq. ID no. 12331522
  misc_feature (64)..(244): Pfam Name: Allene oxide cyclase Pfam Description: Allene oxide cyclase
  misc_feature (1)..(244): Homolog of NCBI NO: 40644130 NR Description: allene oxide cyclase [Nicotiana tabacum]
  misc_feature (1)..(244): Homolog of NCBI NO: 16416376 NR Description: mangrin [Bruguiera sexangula]
  misc_feature (38)..(244): Homolog of NCBI NO: 21727906 NR Description: allene oxide cyclase [Oryza sativa (japonica
  misc_feature (1)..(244): Homolog of NCBI NO: 40644132 NR Description: allene oxide cyclase [Medicago truncatula]
  misc_feature (68)..(244): Homolog of NCBI NO: 25518012 NR Description: T6J4.4 protein - Arabidopsis thaliana
  misc_feature (1)..(244): Homolog of NCBI NO: 15320414 NR Description: ERD12 protein [Arabidopsis thaliana]
  misc_feature (1)..(244): Homolog of NCBI NO: 15230874 NR Description: hypothetical protein; protein id: At3g25760.1
  misc_feature (1)..(244): Homolog of NCBI NO: 18404656 NR Description: expressed protein
  misc_feature (1)..(244): Homolog of NCBI NO: 15222241 NR Description: allene oxide cyclase, putative
  misc_feature (1)..(244): Homolog of NCBI NO: 18404658 NR Description: expressed protein
MTTLNNLSRNHQSHRSSLLGFSRSFQNLGISSNGPDFSSRSRSTTSKNLNVTRAFFWNWGKKTENSRPSKIQELNVYELNEGDRNSPAVLKLGKKPTELCLGDLVPFTNKLYTGDLKKRVGITAGLCVLIQHVPEKSGDRFEASYSFYFGDYGHLSVQGQYLTYEDTFLAVTGGSGIFEGAYGQVKLRQLVYPTKLFYTFYLKGLANDLPLELTGTAVTPSKDVKPAPEAKAMEPSGVISNFTN

SEQ ID NO: 26686 - DNA, 1238 bp, Arabidopsis thaliana
  misc_feature (1)..(1238): Ceres Seq. ID no. 12421213
  misc_feature: MA Experiment ID: 108434 Result: Down-regulated in Transcription
  misc_feature: MA Experiment 108434 PARAMETER Experiment Name: At_Root_Tips_cDNA_P Parameter: Tissue Value: Root Tips
  misc_feature: MA Experiment ID: 20000184 Result: Up-regulated in Transcription
  misc_feature: MA Experiment 20000184 PARAMETER Experiment Name: At_Shoots__P Parameter: Age (day) Value: 7
  misc_feature: MA Experiment 20000184 PARAMETER Experiment Name: At_Shoots__P Parameter: Tissue Value: Shoots vs. Whole Plant
  misc_feature: MA Experiment ID: 20000185 Result: Up-regulated in Transcription
  misc_feature: MA Experiment 20000185 PARAMETER Experiment Name: At_Roots__P Parameter: Age (day) Value: 7 vs. 21
  misc_feature: MA Experiment 20000185 PARAMETER Experiment Name: At_Roots__P Parameter: Organism Value: A. thaliana
  misc_feature: MA Experiment 20000185 PARAMETER Experiment Name: At_Roots__P Parameter: Tissue Value: Roots vs. Whole Plant
  misc_feature: MA Experiment ID: 20000224 Result: Down-regulated in Transcription
  misc_feature: MA Experiment ID: 20000265 Result: Down-regulated in Transcription
  misc_feature: MA Experiment 20000265 PARAMETER Experiment Name: At_Open_Flower_P Parameter: Age (day) Value: 21
  misc_feature: MA Experiment 20000265 PARAMETER Experiment Name: At_Open_Flower_P Parameter: Plant Line Value: WS
  misc_feature: MA Experiment 20000265 PARAMETER Experiment Name: At_Open_Flower_P Parameter: Tissue Value: Closed Flower vs. Whole Plant
  misc_feature: MA Experiment ID: 20000267 Result: Down-regulated in Transcription
  misc_feature: MA Experiment 20000267 PARAMETER Experiment Name: At_Drought_P Parameter: Age (day) Value: 7
  misc_feature: MA Experiment 20000267 PARAMETER Experiment Name: At_Drought_P Parameter: Organism Value: A. thaliana
  misc_feature: MA Experiment 20000267 PARAMETER Experiment Name: At_Drought_P Parameter: Plant Line Value: WS
  misc_feature: MA Experiment 20000267 PARAMETER Experiment Name: At_Drought_P Parameter: Timepoint (hr) Value: 6
  misc_feature: MA Experiment 20000267 PARAMETER Experiment Name: At_Drought_P Parameter: Tissue Value: Whole Plant
  misc_feature: MA Experiment 20000267 PARAMETER Experiment Name: At_Drought_P Parameter: Treatment Value: Drought vs. No Drought
  misc_feature: MA Experiment ID: 20000268 Result: Down-regulated in Transcription
  misc_feature: MA Experiment 20000268 PARAMETER Experiment Name: At_100mM_NaCl__P Parameter: Age (day) Value: 14
  misc_feature: MA Experiment 20000268 PARAMETER Experiment Name: At_100mM_NaCl__P Parameter: Organism Value: A. thaliana
  misc_feature: MA Experiment 20000268 PARAMETER Experiment Name: At_100mM_NaCl__P Parameter: Plant Line Value: WS
  misc_feature: MA Experiment 20000268 PARAMETER Experiment Name: At_100mM_NaCl__P Parameter: Timepoint (hr) Value: 6
  misc_feature: MA Experiment 20000268 PARAMETER Experiment Name: At_100mM_NaCl__P Parameter: Tissue Value: Whole Plant
  misc_feature: MA Experiment 20000268 PARAMETER Experiment Name: At_100mM_NaCl__P Parameter: Treatment Value: 100mM NaCl vs. No Treatment
  misc_feature: MA Experiment ID: 20000436 Result: Down-regulated in Transcription
  misc_feature: MA Experiment 20000436 PARAMETER Experiment Name: At_Drought_P Parameter: Age (day) Value: 7
  misc_feature: MA Experiment 20000436 PARAMETER Experiment Name: At_Drought_P Parameter: Organism Value: A. thaliana
  misc_feature: MA Experiment 20000436 PARAMETER Experiment Name: At_Drought_P Parameter: Plant Line Value: WS
  misc_feature: MA Experiment 20000436 PARAMETER Experiment Name: At_Drought_P Parameter: Timepoint (hr) Value: 12
  misc_feature: MA Experiment 20000436 PARAMETER Experiment Name: At_Drought_P Parameter: Tissue Value: Whole Plant
  misc_feature: MA Experiment 20000436 PARAMETER Experiment Name: At_Drought_P Parameter: Treatment Value: Drought vs. No Drought
  misc_feature: MA Experiment ID: 20000437 Result: Down-regulated in Transcription
  misc_feature: MA Experiment 20000437 PARAMETER Experiment Name: At_Drought_P Parameter: Age (day) Value: 8
  misc_feature: MA Experiment 20000437 PARAMETER Experiment Name: At_Drought_P Parameter: Organism Value: A. thaliana
  misc_feature: MA Experiment 20000437 PARAMETER Experiment Name: At_Drought_P Parameter: Plant Line Value: WS
  misc_feature: MA Experiment 20000437 PARAMETER Experiment Name: At_Drought_P Parameter: Timepoint (hr) Value: 24
  misc_feature: MA Experiment 20000437 PARAMETER Experiment Name: At_Drought_P Parameter: Tissue Value: Whole Plant
  misc_feature: MA Experiment 20000437 PARAMETER Experiment Name: At_Drought_P Parameter: Treatment Value: Drought vs. No Drought
  misc_feature: MA Experiment ID: 20000439 Result: Up-regulated in Transcription
  misc_feature: MA Experiment 20000439 PARAMETER Experiment Name: At_Roots__P Parameter: Age (day) Value: 14 vs. 21
  misc_feature: MA Experiment 20000439 PARAMETER Experiment Name: At_Roots__P Parameter: Organism Value: A. thaliana
  misc_feature: MA Experiment 20000439 PARAMETER Experiment Name: At_Roots__P Parameter: Tissue Value: Roots vs. Whole Plant
acaacaaacacaacttctacaagactcaaatagtttctatttaattactaaaaagaaaaatgggtcgtggttacaatttgctattcgttctagtaacgtttttagtattggttgcagctgtaaccgcacaagggaaccgtggctcaaacagcggtggtggtcgaagaccacatgttgggttttatgggaatagatgccgaaacgtagagtctattgtgagatctgtagttcagtctcatgtccggtctatcccggctaatgcacctggaattttgcgaatgcatttccacgattgctttgtccatggctgcgatggctcggttctcctcgctggtaacacctcagagagaaccgcagttccgaaccgttcattgagagggttcgaagttattgaagaagctaaggctcggcttgagaaggcttgtcctcgtaccgtttcttgtgctgatattctcacccttgcagcccgagacgccgtcgttttgaccggtggacaacgctgggaagtgcccttgggacgtctcgacggccgaatctcgcaagcctcagacgtgaacttgcccggaccaagcgactccgttgctaagcagaagcaagacttcgctgctaaaactctcaacacattagacctcgtgactcttgttggcggacacacaataggaactgctggctgcggtctagtaaggggaaggttcgttaacttcaacggcacaggacaacctgacccatcaatcgacccgagttttgtgccgctgattctggctcagtgccctcaaaatggaggcacccgagtggagttagacgagggaagtgttgacaagtttgacacatcgttcctaaggaaggtgacgtcaagtcgcgtggttctccaatccgatctagtcctatggaaggatcccgagacccgagccatcattgaacgtttattaggattacgccgaccatccttgaggttcggaaccgagttcgggaagtcgatggtcaaaatgagtctcatagaagttaagactggatcagatggggagattcgtcgggtttgttccgccatcaactaagatttaaaaaaacacaaatgtgagctttgtttttcatttatgaattcgttaattaataatcacttgttttaaataaaagcttgctacagcattttgtggtcgatggttacgttttgattttcaagtgtaagattgtacttgtaaacaaaaaatgtattatataaaagtgttatttgtttctcc

SEQ ID NO: 26687 - protein, 331 aa, Arabidopsis thaliana
  peptide (1)..(331): Ceres Seq. ID no. 12421214
  misc_feature (53)..(292): Pfam Name: Peroxidase Pfam Description: Peroxidase
  misc_feature (8)..(331): Homolog of NCBI NO: 15237615 NR Description: peroxidase, putative
  misc_feature (8)..(331): Homolog of NCBI NO: 21592403 NR Description: peroxidase [Arabidopsis thaliana]
  misc_feature (9)..(331): Homolog of NCBI NO: 18558997 NR Description: bacterial-induced peroxidase [Gossypium hirsutum]
  misc_feature (4)..(331): Homolog of NCBI NO: 1232069 NR Description: cationic peroxidase [Stylosanthes humilis]
  misc_feature (34)..(331): Homolog of NCBI NO: 17066703 NR Description: peroxidase [Capsicum annuum]
  misc_feature (34)..(331): Homolog of NCBI NO: 5381255 NR Description: peroxidase [Nicotiana tabacum]
  misc_feature (6)..(331): Homolog of NCBI NO: 129808 NR Description: Cationic peroxidase 2 precursor (PNPC2)
  misc_feature (5)..(331): Homolog of NCBI NO: 7433065 NR Description: peroxidase (EC 1.11.1.7) precursor,
  misc_feature (6)..(331): Homolog of NCBI NO: 15237614 NR Description: peroxidase, putative
  misc_feature (1)..(331): Homolog of NCBI NO: 15237613 NR Description: peroxidase, putative
MGRGYNLLFVLVTFLVLVAAVTAQGNRGSNSGGGRRPHVGFYGNRCRNVESIVRSVVQSHVRSIPANAPGILRMHFHDCFVHGCDGSVLLAGNTSERTAVPNRSLRGFEVIEEAKARLEKACPRTVSCADILTLAARDAVVLTGGQRWEVPLGRLDGRISQASDVNLPGPSDSVAKQKQDFAAKTLNTLDLVTLVGGHTIGTAGCGLVRGRFVNFNGTGQPDPSIDPSFVPLILAQCPQNGGTRVELDEGSVDKFDTSFLRKVTSSRVVLQSDLVLWKDPETRAIIERLLGLRRPSLRFGTEFGKSMVKMSLIEVKTGSDGEIRRVCSAIN

SEQ ID NO: 26688 - protein, 258 aa, Arabidopsis thaliana
  peptide (1)..(258): Ceres Seq. ID no. 12421215
  misc_feature (1)..(219): Pfam Name: Peroxidase Pfam Description: Peroxidase
  misc_feature (1)..(258): Homolog of NCBI NO: 15237613 NR Description: peroxidase, putative
  misc_feature (1)..(258): Homolog of NCBI NO: 15237615 NR Description: peroxidase, putative
  misc_feature (1)..(258): Homolog of NCBI NO: 21592403 NR Description: peroxidase [Arabidopsis thaliana]
  misc_feature (1)..(258): Homolog of NCBI NO: 18558997 NR Description: bacterial-induced peroxidase [Gossypium hirsutum]
  misc_feature (1)..(258): Homolog of NCBI NO: 1232069 NR Description: cationic peroxidase [Stylosanthes humilis]
  misc_feature (1)..(258): Homolog of NCBI NO: 17066703 NR Description: peroxidase [Capsicum annuum]
  misc_feature (1)..(258): Homolog of NCBI NO: 5381255 NR Description: peroxidase [Nicotiana tabacum]
  misc_feature (1)..(258): Homolog of NCBI NO: 129808 NR Description: Cationic peroxidase 2 precursor (PNPC2)
  misc_feature (1)..(258): Homolog of NCBI NO: 7433065 NR Description: peroxidase (EC 1.11.1.7) precursor,
  misc_feature (1)..(258): Homolog of NCBI NO: 15237614 NR Description: peroxidase, putative
MHFHDCFVHGCDGSVLLAGNTSERTAVPNRSLRGFEVIEEAKARLEKACPRTVSCADILTLAARDAVVLTGGQRWEVPLGRLDGRISQASDVNLPGPSDSVAKQKQDFAAKTLNTLDLVTLVGGHTIGTAGCGLVRGRFVNFNGTGQPDPSIDPSFVPLILAQCPQNGGTRVELDEGSVDKFDTSFLRKVTSSRVVLQSDLVLWKDPETRAIIERLLGLRRPSLRFGTEFGKSMVKMSLIEVKTGSDGEIRRVCSAIN

SEQ ID NO: 26689 - DNA, 1167 bp, Arabidopsis thaliana
  misc_feature (1)..(1167): Ceres Seq. ID no. 12324113
  misc_feature: MA Experiment ID: 108435 Result: Down-regulated in Transcription
  misc_feature: MA Experiment 108435 PARAMETER Experiment Name: At_stm_Mutants_cDNA_P Parameter: Plant Line Value: wt Landsburg vs stm
  misc_feature: MA Experiment 108435 PARAMETER Experiment Name: At_stm_Mutants_cDNA_P Parameter: Tissue Value: Shoot Apical Meristem Region
  misc_feature: MA Experiment ID: 108463 Result: Up-regulated in Transcription
  misc_feature: MA Experiment 108463 PARAMETER Experiment Name: At_Germinating_Seeds_cDNA_P Parameter: Age (day) Value: 3 vs. 0
  misc_feature: MA Experiment 108463 PARAMETER Experiment Name: At_Germinating_Seeds_cDNA_P Parameter: Tissue Value: Germinating Seeds
  misc_feature: MA Experiment ID: 108464 Result: Up-regulated in Transcription
  misc_feature: MA Experiment 108464 PARAMETER Experiment Name: At_Germinating_Seeds_cDNA_P Parameter: Age (day) Value: 4 vs. 0
  misc_feature: MA Experiment 108464 PARAMETER Experiment Name: At_Germinating_Seeds_cDNA_P Parameter: Tissue Value: Germinating Seeds
  misc_feature: MA Experiment ID: 108488 Result: Up-regulated in Transcription
  misc_feature: MA Experiment ID: 108501 Result: Down-regulated in Transcription
  misc_feature: MA Experiment 108501 PARAMETER Experiment Name: At_ap2_floral_buds_cDNA_P Parameter: Plant Line Value: ap2 (Ler.)
  misc_feature: MA Experiment 108501 PARAMETER Experiment Name: At_ap2_floral_buds_cDNA_P Parameter: Tissue Value: Closed Flower
  misc_feature: MA Experiment ID: 108573 Result: Up-regulated in Transcription
  misc_feature: MA Experiment 108573 PARAMETER Experiment Name: At_Drought_cDNA_P Parameter: Timepoint (hr) Value: 6
  misc_feature: MA Experiment 108573 PARAMETER Experiment Name: At_Drought_cDNA_P Parameter: Tissue Value: Aerial
  misc_feature: MA Experiment 108573 PARAMETER Experiment Name: At_Drought_cDNA_P Parameter: Treatment Value: Drought vs. No Drought
  misc_feature: MA Experiment ID: 108595 Result: Down-regulated in Transcription
  misc_feature: MA Experiment 108595 PARAMETER Experiment Name: At_Ler-pi_Ovule_cDNA_P Parameter: Plant Line Value: null
  misc_feature: MA Experiment ID: 20000069 Result: Down-regulated in Transcription
  misc_feature: MA Experiment 20000069 PARAMETER Experiment Name: At_100uM_ABA_Mutants_cDNA_P Parameter: Plant Line Value: CS23
  misc_feature: MA Experiment 20000069 PARAMETER Experiment Name: At_100uM_ABA_Mutants_cDNA_P Parameter: Timepoint (hr) Value: 6
  misc_feature: MA Experiment 20000069 PARAMETER Experiment Name: At_100uM_ABA_Mutants_cDNA_P Parameter: Tissue Value: Aerial
  misc_feature: MA Experiment 20000069 PARAMETER Experiment Name: At_100uM_ABA_Mutants_cDNA_P Parameter: Treatment Value: 100uM ABA vs. No Treatment
  misc_feature: MA Experiment ID: 20000070 Result: Down-regulated in Transcription
  misc_feature: MA Experiment 20000070 PARAMETER Experiment Name: At_100uM_ABA_Mutants_cDNA_P Parameter: Plant Line Value: CS24
  misc_feature: MA Experiment 20000070 PARAMETER Experiment Name: At_100uM_ABA_Mutants_cDNA_P Parameter: Timepoint (hr) Value: 6
  misc_feature: MA Experiment 20000070 PARAMETER Experiment Name: At_100uM_ABA_Mutants_cDNA_P Parameter: Tissue Value: Aerial
  misc_feature: MA Experiment 20000070 PARAMETER Experiment Name: At_100uM_ABA_Mutants_cDNA_P Parameter: Treatment Value: 100uM ABA vs. No Treatment
  misc_feature: MA Experiment ID: 20000071 Result: Down-regulated in Transcription
  misc_feature: MA Experiment 20000071 PARAMETER Experiment Name: At_100uM_ABA_Mutants_cDNA_P Parameter: Plant Line Value: CS8104
  misc_feature: MA Experiment 20000071 PARAMETER Experiment Name: At_100uM_ABA_Mutants_cDNA_P Parameter: Timepoint (hr) Value: 6
  misc_feature: MA Experiment 20000071 PARAMETER Experiment Name: At_100uM_ABA_Mutants_cDNA_P Parameter: Tissue Value: Aerial
  misc_feature: MA Experiment 20000071 PARAMETER Experiment Name: At_100uM_ABA_Mutants_cDNA_P Parameter: Treatment Value: 100uM ABA vs. No Treatment
  misc_feature: MA Experiment ID: 20000072 Result: Down-regulated in Transcription
  misc_feature: MA Experiment 20000072 PARAMETER Experiment Name: At_100uM_ABA_Mutants_cDNA_P Parameter: Plant Line Value: CS8105
  misc_feature: MA Experiment 20000072 PARAMETER Experiment Name: At_100uM_ABA_Mutants_cDNA_P Parameter: Timepoint (hr) Value: 6
  misc_feature: MA Experiment 20000072 PARAMETER Experiment Name: At_100uM_ABA_Mutants_cDNA_P Parameter: Tissue Value: Aerial
  misc_feature: MA Experiment 20000072 PARAMETER Experiment Name: At_100uM_ABA_Mutants_cDNA_P Parameter: Treatment Value: 100uM ABA vs. No Treatment
  misc_feature: MA Experiment ID: 20000086 Result: Down-regulated in Transcription
  misc_feature: MA Experiment 20000086 PARAMETER Experiment Name: At_100uM_ABA_Mutants_cDNA_P Parameter: Plant Line Value: CS22
  misc_feature: MA Experiment 20000086 PARAMETER Experiment Name: At_100uM_ABA_Mutants_cDNA_P Parameter: Timepoint (hr) Value: 6
  misc_feature: MA Experiment 20000086 PARAMETER Experiment Name: At_100uM_ABA_Mutants_cDNA_P Parameter: Tissue Value: Aerial
  misc_feature: MA Experiment 20000086 PARAMETER Experiment Name: At_100uM_ABA_Mutants_cDNA_P Parameter: Treatment Value: 100uM ABA vs. No Treatment
  misc_feature: MA Experiment ID: 20000087 Result: Down-regulated in Transcription
  misc_feature: MA Experiment 20000087 PARAMETER Experiment Name: At_100uM_ABA_Mutants_cDNA_P Parameter: Plant Line Value: WS
  misc_feature: MA Experiment 20000087 PARAMETER Experiment Name: At_100uM_ABA_Mutants_cDNA_P Parameter: Timepoint (hr) Value: 6
  misc_feature: MA Experiment 20000087 PARAMETER Experiment Name: At_100uM_ABA_Mutants_cDNA_P Parameter: Tissue Value: Aerial
  misc_feature: MA Experiment 20000087 PARAMETER Experiment Name: At_100uM_ABA_Mutants_cDNA_P Parameter: Treatment Value: 100uM ABA vs. No Treatment
  misc_feature: MA Experiment ID: 20000089 Result: Down-regulated in Transcription
  misc_feature: MA Experiment ID: 20000113 Result: Up-regulated in Transcription
  misc_feature: MA Experiment 20000113 PARAMETER Experiment Name: At_42deg_Heat_cDNA_P Parameter: Temperature (deg C) Value: 42 vs. 22
  misc_feature: MA Experiment 20000113 PARAMETER Experiment Name: At_42deg_Heat_cDNA_P Parameter: Timepoint (hr) Value: 8
  misc_feature: MA Experiment 20000113 PARAMETER Experiment Name: At_42deg_Heat_cDNA_P Parameter: Tissue Value: Aerial
  misc_feature: MA Experiment ID: 20000117 Result: Down-regulated in Transcription
  misc_feature: MA Experiment 20000117 PARAMETER Experiment Name: At_100uM_ABA_Mutants_cDNA_P Parameter: Plant Line Value: Columbia
  misc_feature: MA Experiment 20000117 PARAMETER Experiment Name: At_100uM_ABA_Mutants_cDNA_P Parameter: Timepoint (hr) Value: 6
  misc_feature: MA Experiment 20000117 PARAMETER Experiment Name: At_100uM_ABA_Mutants_cDNA_P Parameter: Tissue Value: Aerial
  misc_feature: MA Experiment 20000117 PARAMETER Experiment Name: At_100uM_ABA_Mutants_cDNA_P Parameter: Treatment Value: 100uM ABA vs. No Treatment
  misc_feature: MA Experiment ID: 20000184 Result: Up-regulated in Transcription
  misc_feature: MA Experiment 20000184 PARAMETER Experiment Name: At_Shoots__P Parameter: Age (day) Value: 7
  misc_feature: MA Experiment 20000184 PARAMETER Experiment Name: At_Shoots__P Parameter: Tissue Value: Shoots vs. Whole Plant
  misc_feature: MA Experiment ID: 20000185 Result: Down-regulated in Transcription
  misc_feature: MA Experiment 20000185 PARAMETER Experiment Name: At_Roots__P Parameter: Age (day) Value: 7 vs. 21
  misc_feature: MA Experiment 20000185 PARAMETER Experiment Name: At_Roots__P Parameter: Organism Value: A. thaliana
  misc_feature: MA Experiment 20000185 PARAMETER Experiment Name: At_Roots__P Parameter: Tissue Value: Roots vs. Whole Plant
  misc_feature: MA Experiment ID: 20000265 Result: Up-regulated in Transcription
  misc_feature: MA Experiment 20000265 PARAMETER Experiment Name: At_Open_Flower_P Parameter: Age (day) Value: 21
  misc_feature: MA Experiment 20000265 PARAMETER Experiment Name: At_Open_Flower_P Parameter: Plant Line Value: WS
  misc_feature: MA Experiment 20000265 PARAMETER Experiment Name: At_Open_Flower_P Parameter: Tissue Value: Closed Flower vs. Whole Plant
  misc_feature: MA Experiment ID: 20000438 Result: Up-regulated in Transcription
  misc_feature: MA Experiment 20000438 PARAMETER Experiment Name: At_Shoots__P Parameter: Age (day) Value: 14
  misc_feature: MA Experiment 20000438 PARAMETER Experiment Name: At_Shoots__P Parameter: Tissue Value: Shoots vs. Whole Plant
  misc_feature: MA Experiment ID: 20000439 Result: Down-regulated in Transcription
  misc_feature: MA Experiment 20000439 PARAMETER Experiment Name: At_Roots__P Parameter: Age (day) Value: 14 vs. 21
  misc_feature: MA Experiment 20000439 PARAMETER Experiment Name: At_Roots__P Parameter: Organism Value: A. thaliana
  misc_feature: MA Experiment 20000439 PARAMETER Experiment Name: At_Roots__P Parameter: Tissue Value: Roots vs. Whole Plant
  misc_feature: MA Experiment ID: 20000495 Result: Down-regulated in Transcription
  misc_feature: MA Experiment 20000495 PARAMETER Experiment Name: At_Guard_Cells_P Parameter: Harvest Date Value: 8/2/2002
  misc_feature: MA Experiment 20000495 PARAMETER Experiment Name: At_Guard_Cells_P Parameter: Organism Value: A. thaliana
  misc_feature: MA Experiment 20000495 PARAMETER Experiment Name: At_Guard_Cells_P Parameter: Tissue Value: Guard Cells vs. Leaves
  misc_feature: MA Experiment ID: 20001248 Result: Down-regulated in Transcription
  misc_feature: MA Experiment 20001248 PARAMETER Experiment Name: At_Far-red-induction_P Parameter: Age (day) Value: 7
  misc_feature: MA Experiment 20001248 PARAMETER Experiment Name: At_Far-red-induction_P Parameter: Light Value: Far-red vs. White
  misc_feature: MA Experiment 20001248 PARAMETER Experiment Name: At_Far-red-induction_P Parameter: Organism Value: A. thaliana
  misc_feature: MA Experiment 20001248 PARAMETER Experiment Name: At_Far-red-induction_P Parameter: Plant Line Value: Columbia
  misc_feature: MA Experiment 20001248 PARAMETER Experiment Name: At_Far-red-induction_P Parameter: Timepoint (hr) Value: 4
  misc_feature: MA Experiment 20001248 PARAMETER Experiment Name: At_Far-red-induction_P Parameter: Tissue Value: Whole Plant
  misc_feature: MA Experiment ID: 20001450 Result: Down-regulated in Transcription
  misc_feature: MA Experiment 20001450 PARAMETER Experiment Name: At_Far-red-induction_P Parameter: Age (day) Value: 7
  misc_feature: MA Experiment 20001450 PARAMETER Experiment Name: At_Far-red-induction_P Parameter: Light Value: Far-red vs. White
  misc_feature: MA Experiment 20001450 PARAMETER Experiment Name: At_Far-red-induction_P Parameter: Organism Value: A. thaliana
  misc_feature: MA Experiment 20001450 PARAMETER Experiment Name: At_Far-red-induction_P Parameter: Plant Line Value: Columbia
  misc_feature: MA Experiment 20001450 PARAMETER Experiment Name: At_Far-red-induction_P Parameter: Timepoint (hr) Value: 8
  misc_feature: MA Experiment 20001450 PARAMETER Experiment Name: At_Far-red-induction_P Parameter: Tissue Value: Whole Plant
  misc_feature: MA Experiment ID: 20001451 Result: Down-regulated in Transcription
  misc_feature: MA Experiment 20001451 PARAMETER Experiment Name: At_Far-red-induction_P Parameter: Age (day) Value: 7
  misc_feature: MA Experiment 20001451 PARAMETER Experiment Name: At_Far-red-induction_P Parameter: Light Value: Far-red vs. White
  misc_feature: MA Experiment 20001451 PARAMETER Experiment Name: At_Far-red-induction_P Parameter: Organism Value: A. thaliana
  misc_feature: MA Experiment 20001451 PARAMETER Experiment Name: At_Far-red-induction_P Parameter: Plant Line Value: Columbia
  misc_feature: MA Experiment 20001451 PARAMETER Experiment Name: At_Far-red-induction_P Parameter: Timepoint (hr) Value: 24
  misc_feature: MA Experiment 20001451 PARAMETER Experiment Name: At_Far-red-induction_P Parameter: Tissue Value: Whole Plant
  misc_feature: MA Experiment ID: 20001557 Result: Down-regulated in Transcription
  misc_feature: MA Experiment 20001557 PARAMETER Experiment Name: At_Drought_Soil_Dry_P Parameter: Age (day) Value: 27
  misc_feature: MA Experiment 20001557 PARAMETER Experiment Name: At_Drought_Soil_Dry_P Parameter: Organism Value: A. thaliana
  misc_feature: MA Experiment 20001557 PARAMETER Experiment Name: At_Drought_Soil_Dry_P Parameter: Plant Line Value: WS
  misc_feature: MA Experiment 20001557 PARAMETER Experiment Name: At_Drought_Soil_Dry_P Parameter: Post Timepoint (hr) Value: 3
  misc_feature: MA Experiment 20001557 PARAMETER Experiment Name: At_Drought_Soil_Dry_P Parameter: Post-Treatment Value: Re-Water vs. No Drought
  misc_feature: MA Experiment 20001557 PARAMETER Experiment Name: At_Drought_Soil_Dry_P Parameter: Timepoint (day) Value: 13
  misc_feature: MA Experiment 20001557 PARAMETER Experiment Name: At_Drought_Soil_Dry_P Parameter: Treatment Value: Drought vs. No Drought
  misc_feature: MA Experiment ID: 20001757 Result: Up-regulated in Transcription
  misc_feature: MA Experiment 20001757 PARAMETER Experiment Name: At_50mM_NH4NO3_L-to-H_P Parameter: Timepoint (hr) Value: 6
  misc_feature: MA Experiment 20001757 PARAMETER Experiment Name: At_50mM_NH4NO3_L-to-H_P Parameter: Tissue Value: Leaf
  misc_feature: MA Experiment 20001757 PARAMETER Experiment Name: At_50mM_NH4NO3_L-to-H_P Parameter: Treatment Value: 50mM NH4NO3 vs 100mM Mannitol
  misc_feature: MA Experiment ID: 20001905 Result: Down-regulated in Transcription
  misc_feature: MA Experiment 20001905 PARAMETER Experiment Name: At_Drought_Reproduction_P Parameter: Age (day) Value: 40
  misc_feature: MA Experiment 20001905 PARAMETER Experiment Name: At_Drought_Reproduction_P Parameter: Organism Value: A. thaliana
  misc_feature: MA Experiment 20001905 PARAMETER Experiment Name: At_Drought_Reproduction_P Parameter: Plant Line Value: WS
  misc_feature: MA Experiment 20001905 PARAMETER Experiment Name: At_Drought_Reproduction_P Parameter: Timepoint (day) Value: 10
  misc_feature: MA Experiment 20001905 PARAMETER Experiment Name: At_Drought_Reproduction_P Parameter: Tissue Value: Rosettes
  misc_feature: MA Experiment 20001905 PARAMETER Experiment Name: At_Drought_Reproduction_P Parameter: Treatment Value: Drought vs. No Drought
caattccgccgagtaagtagtaaccacatttttctcgctttgccgtcttctccggcgattttcagacactaattttctctccggttgttgcaatcatattttctgtcggaagatattgaaatcagaaaccgggaaaaatgacttcgtttcttagtttctccgccatttcagctcatccacctactttttccggcgcttcatttcgtcctcgctctttctctccccgattgttcaagtcttgtgttaagtgcacttatgctgaagctggattaagcagcgcttcatggtcagcccctattgacattgtggcagatgtcaaatccgaaagggttgtagttcttggtgggaatggtttcgttggctcagctatctgcaaagcagcaatctccaatggtattgaggttgtgagtgttagcaggtcaggtcgtcctaacttcgaagattcatggttggatcaggttacatgggttactggtgatgttttctatttgaattgggatgaagtacttcttggtgctactgctgtagtttcaaccattggtggttttggaaatgaagaacagatgaaaagaatcaatggtgaagctaacgttaccgctgtgaatgctgctaaggattttggggtccctaagttcgtcttgatcacggttcacgattacaatcttccgccatttattctctccaacggatatttcactggaaaacgtaacgcggaggcagaacttctttccaagtatcccacctcaggagttgtgctaagacccggtttcatatacgggaaacgaaaagtgaacggaatcgaggtcccgcttgatctagtcggggagccactagacaagatctatgattcagcagagaggttcattagaccattgaggtctctccctgcatctgatctcatcttggctccaccggttaacgtcgatgatttagcacttgctgtgatcaacgctgttaaagatgacgacttctttggcattttcactattgagcagatcaaagaagcagctgcaaaaatgagagcgtgaagagtctttagatagataccaaggagtggttattggtttgtataattgtatgcgaaaagtattaataattacatgaatagctctccctttgtcaaattgtaatgtatatcatttgtaaacgtatatattatttacttct

SEQ ID NO: 26690 - protein, 296 aa, Arabidopsis thaliana
  peptide (1)..(296): Ceres Seq. ID no. 12324114
  misc_feature (127)..(272): Homolog of NCBI NO: 8744993 NR Description: hypothetical protein P1295.07 [Leishmania major]
  misc_feature (64)..(227): Homolog of NCBI NO: 23037289 NR Description: hypothetical protein [Oenococcus oeni MCW]
  misc_feature (64)..(221): Homolog of NCBI NO: 29375050 NR Description: conserved hypothetical protein [Enterococcus
  misc_feature (143)..(287): Homolog of NCBI NO: 11346175 NR Description: hypothetical protein F1N13_50 - Arabidopsis
  misc_feature (62)..(288): Homolog of NCBI NO: 10129651 NR Description: putative protein [Arabidopsis thaliana]
  misc_feature (61)..(287): Homolog of NCBI NO: 21592373 NR Description: unknown [Arabidopsis thaliana]
  misc_feature (61)..(287): Homolog of NCBI NO: 18417824 NR Description: putative protein
  misc_feature (62)..(288): Homolog of NCBI NO: 18416362 NR Description: putative protein
  misc_feature (15)..(295): Homolog of NCBI NO: 38346147 NR Description: OSJNBb0118P14.7 [Oryza sativa (japonica
  misc_feature (1)..(296): Homolog of NCBI NO: 18398333 NR Description: expressed protein
MTSFLSFSAISAHPPTFSGASFRPRSFSPRLFKSCVKCTYAEAGLSSASWSAPIDIVADVKSERVVVLGGNGFVGSAICKAAISNGIEVVSVSRSGRPNFEDSWLDQVTWVTGDVFYLNWDEVLLGATAVVSTIGGFGNEEQMKRINGEANVTAVNAAKDFGVPKFVLITVHDYNLPPFILSNGYFTGKRNAEAELLSKYPTSGVVLRPGFIYGKRKVNGIEVPLDLVGEPLDKIYDSAERFIRPLRSLPASDLILAPPVNVDDLALAVINAVKDDDFFGIFTIEQIKEAAAKMRA

SEQ ID NO: 26691 - protein, 154 aa, Arabidopsis thaliana
  peptide (1)..(154): Ceres Seq. ID no. 12324115
  misc_feature (1)..(130): Homolog of NCBI NO: 8744993 NR Description: hypothetical protein P1295.07 [Leishmania major]
  misc_feature (1)..(85): Homolog of NCBI NO: 23037289 NR Description: hypothetical protein [Oenococcus oeni MCW]
  misc_feature (1)..(79): Homolog of NCBI NO: 29375050 NR Description: conserved hypothetical protein [Enterococcus
  misc_feature (1)..(145): Homolog of NCBI NO: 11346175 NR Description: hypothetical protein F1N13_50 - Arabidopsis
  misc_feature (1)..(146): Homolog of NCBI NO: 10129651 NR Description: putative protein [Arabidopsis thaliana]
  misc_feature (1)..(145): Homolog of NCBI NO: 21592373 NR Description: unknown [Arabidopsis thaliana]
  misc_feature (1)..(145): Homolog of NCBI NO: 18417824 NR Description: putative protein
  misc_feature (1)..(146): Homolog of NCBI NO: 18416362 NR Description: putative protein
  misc_feature (1)..(153): Homolog of NCBI NO: 38346147 NR Description: OSJNBb0118P14.7 [Oryza sativa (japonica
  misc_feature (1)..(154): Homolog of NCBI NO: 18398333 NR Description: expressed protein
MKRINGEANVTAVNAAKDFGVPKFVLITVHDYNLPPFILSNGYFTGKRNAEAELLSKYPTSGVVLRPGFIYGKRKVNGIEVPLDLVGEPLDKIYDSAERFIRPLRSLPASDLILAPPVNVDDLALAVINAVKDDDFFGIFTIEQIKEAAAKMRA

SEQ ID NO: 26692 - DNA, 1094 bp, Arabidopsis thaliana
  misc_feature (1)..(1094): Ceres Seq. ID no. 12324109
  misc_feature: MA Experiment ID: 108501 Result: Down-regulated in Transcription
  misc_feature: MA Experiment 108501 PARAMETER Experiment Name: At_ap2_floral_buds_cDNA_P Parameter: Plant Line Value: ap2 (Ler.)
  misc_feature: MA Experiment 108501 PARAMETER Experiment Name: At_ap2_floral_buds_cDNA_P Parameter: Tissue Value: Closed Flower
  misc_feature: MA Experiment ID: 108595 Result: Up-regulated in Transcription
  misc_feature: MA Experiment 108595 PARAMETER Experiment Name: At_Ler-pi_Ovule_cDNA_P Parameter: Plant Line Value: null
  misc_feature: MA Experiment ID: 20000265 Result: Up-regulated in Transcription
  misc_feature: MA Experiment 20000265 PARAMETER Experiment Name: At_Open_Flower_P Parameter: Age (day) Value: 21
  misc_feature: MA Experiment 20000265 PARAMETER Experiment Name: At_Open_Flower_P Parameter: Plant Line Value: WS
  misc_feature: MA Experiment 20000265 PARAMETER Experiment Name: At_Open_Flower_P Parameter: Tissue Value: Closed Flower vs. Whole Plant
  misc_feature: MA Experiment ID: 20000286 Result: Up-regulated in Transcription
  misc_feature: MA Experiment 20000286 PARAMETER Experiment Name: At_Open_Flower_P Parameter: Age (day) Value: 21
  misc_feature: MA Experiment 20000286 PARAMETER Experiment Name: At_Open_Flower_P Parameter: Plant Line Value: WS
  misc_feature: MA Experiment 20000286 PARAMETER Experiment Name: At_Open_Flower_P Parameter: Tissue Value: Half Open vs. Whole Plant
  misc_feature: MA Experiment ID: 20001910 Result: Down-regulated in Transcription
  misc_feature: MA Experiment 20001910 PARAMETER Experiment Name: At_Drought_Reproduction_P Parameter: Age (day) Value: 37
  misc_feature: MA Experiment 20001910 PARAMETER Experiment Name: At_Drought_Reproduction_P Parameter: Organism Value: A. thaliana
  misc_feature: MA Experiment 20001910 PARAMETER Experiment Name: At_Drought_Reproduction_P Parameter: Plant Line Value: WS
  misc_feature: MA Experiment 20001910 PARAMETER Experiment Name: At_Drought_Reproduction_P Parameter: Timepoint (day) Value: 7
  misc_feature: MA Experiment 20001910 PARAMETER Experiment Name: At_Drought_Reproduction_P Parameter: Tissue Value: Flowers
  misc_feature: MA Experiment 20001910 PARAMETER Experiment Name: At_Drought_Reproduction_P Parameter: Treatment Value: Drought vs. No Drought
aatccaacttttatctacggtccctgaaaccatctctttgtcttttggcatatttccctccttaagtcaactatctctttgtctctatatcatctttctctcggacactctctttggatcgtcattttctctctatcgactaaattttaagagtggaatgggtatatttcctggatttggtggcttgatcaaccagaacactcaagagcctcctaaggctgagaatgtgaaatctaagtcaaggtcagaaataaaaaatactgatcacgaagagagagatgagatgaaggagcaactaaaactttggagacatgcagagaagaaagaacaatgggaagatgtccctgctaaggtgaaggtggaaacagaagatggtctttgccatgtggacatggtatttacattaggattgcctcctcaagcagcctacgacgttttgactaatcccgacaaccaatcatactcaagaataattaaccaacgccacgaacttctggataacgtatcaagaaaagtgttgacggataatggatcgagccagacggtggaggcagagaaagctgtggcctagaagtttctttcatggtcgggaactatcccgataagtctagatttcgtcgaaaaccgtaaaaatctttctgcagtatatatgaaaaggaaaatgatgttcatgaaaagttttgagggtagttggaaagtggagccaatatacgtagattcaaaacgtttgtgcaagcaaatgaagccaaaaagtcgagaagaataccataaatgtagtggtggacaaggaaagattgcgtcgaaggtgaaaatgaaccagacctttcagccttcttttccttttaatctgccaccgctttcttggtacatccgtgatatcaccatcaagattactaaggctctgatacaagatcttcaagatatgggcgccaagctccgaggcgtttgaaatgccctcaaacattcgataggtttctaaatcactatagtataaatccgaagaggacaaatactaatctttataatcacttcattcatcttaacaagtgtattctttataccgaataaaaaaaatgagtatcgtgttaaatgtt

SEQ ID NO: 26693 - protein, 189 aa, Arabidopsis thaliana
  peptide (1)..(189): Ceres Seq. ID no. 12324110
  misc_feature (50)..(189): Homolog of NCBI NO: 8778583 NR Description: F28C11.19 [Arabidopsis thaliana]
  misc_feature (53)..(189): Homolog of NCBI NO: 15220821 NR Description: hypothetical protein; protein id: At1g23660.1
  misc_feature (53)..(189): Homolog of NCBI NO: 15220845 NR Description: putative OBP32pep protein; protein id:
  misc_feature (53)..(189): Homolog of NCBI NO: 15220799 NR Description: putative OBP32pep protein; protein id:
  misc_feature (53)..(189): Homolog of NCBI NO: 25373395 NR Description: hypothetical protein F5O8.22 - Arabidopsis
  misc_feature (169)..(189): Homolog of NCBI NO: 8778583 NR Description: F28C11.19 [Arabidopsis thaliana]
  misc_feature (5)..(165): Homolog of NCBI NO: 8778583 NR Description: F28C11.19 [Arabidopsis thaliana]
  misc_feature (53)..(189): Homolog of NCBI NO: 25373400 NR Description: hypothetical protein F5O8.7 [imported] -
  misc_feature (53)..(189): Homolog of NCBI NO: 15220802 NR Description: putative OBP32pep protein; protein id:
  misc_feature (53)..(189): Homolog of NCBI NO: 15220781 NR Description: OBP32pep protein, putative; protein id:
IQLLSTVPETISLSFGIFPSLSQLSLCLYIIFLSDTLFGSSFSLYRLNFKSGMGIFPGFGGLINQNTQEPPKAENVKSKSRSEIKNTDHEERDEMKEQLKLWRHAEKKEQWEDVPAKVKVETEDGLCHVDMVFTLGLPPQAAYDVLTNPDNQSYSRIINQRHELLDNVSRKVLTDNGSSQTVEAEKAVA

SEQ ID NO: 26694 - protein, 137 aa, Arabidopsis thaliana
  peptide (1)..(137): Ceres Seq. ID no. 12324111
  misc_feature (1)..(137): Homolog of NCBI NO: 8778583 NR Description: F28C11.19 [Arabidopsis thaliana]
  misc_feature (1)..(137): Homolog of NCBI NO: 15220821 NR Description: hypothetical protein; protein id: At1g23660.1
  misc_feature (1)..(137): Homolog of NCBI NO: 15220845 NR Description: putative OBP32pep protein; protein id:
  misc_feature (1)..(137): Homolog of NCBI NO: 15220799 NR Description: putative OBP32pep protein; protein id:
  misc_feature (1)..(137): Homolog of NCBI NO: 25373395 NR Description: hypothetical protein F5O8.22 - Arabidopsis
  misc_feature (117)..(137): Homolog of NCBI NO: 8778583 NR Description: F28C11.19 [Arabidopsis thaliana]
  misc_feature (1)..(113): Homolog of NCBI NO: 8778583 NR Description: F28C11.19 [Arabidopsis thaliana]
  misc_feature (1)..(137): Homolog of NCBI NO: 25373400 NR Description: hypothetical protein F5O8.7 [imported] -
  misc_feature (1)..(137): Homolog of NCBI NO: 15220802 NR Description: putative OBP32pep protein; protein id:
  misc_feature (1)..(137): Homolog of NCBI NO: 15220781 NR Description: OBP32pep protein, putative; protein id:
MGIFPGFGGLINQNTQEPPKAENVKSKSRSEIKNTDHEERDEMKEQLKLWRHAEKKEQWEDVPAKVKVETEDGLCHVDMVFTLGLPPQAAYDVLTNPDNQSYSRIINQRHELLDNVSRKVLTDNGSSQTVEAEKAVA

SEQ ID NO: 26695 - protein, 99 aa, Arabidopsis thaliana
  peptide (1)..(99): Ceres Seq. ID no. 12324112
  misc_feature (1)..(80): Pfam Name: Domain of unknown function DUF220 Pfam Description: Domain of unknown function DUF220
  misc_feature (1)..(97): Homolog of NCBI NO: 8778583 NR Description: F28C11.19 [Arabidopsis thaliana]
  misc_feature (1)..(97): Homolog of NCBI NO: 8778583 NR Description: F28C11.19 [Arabidopsis thaliana]
  misc_feature (1)..(99): Homolog of NCBI NO: 15220821 NR Description: hypothetical protein; protein id: At1g23660.1
  misc_feature (1)..(97): Homolog of NCBI NO: 15220845 NR Description: putative OBP32pep protein; protein id:
  misc_feature (1)..(97): Homolog of NCBI NO: 15220799 NR Description: putative OBP32pep protein; protein id:
  misc_feature (1)..(99): Homolog of NCBI NO: 25373395 NR Description: hypothetical protein F5O8.22 - Arabidopsis
  misc_feature (1)..(97): Homolog of NCBI NO: 8778583 NR Description: F28C11.19 [Arabidopsis thaliana]
  misc_feature (15)..(99): Homolog of NCBI NO: 25373400 NR Description: hypothetical protein F5O8.7 [imported] -
  misc_feature (1)..(99): Homolog of NCBI NO: 15220802 NR Description: putative OBP32pep protein; protein id:
  misc_feature (1)..(99): Homolog of NCBI NO: 15220781 NR Description: OBP32pep protein, putative; protein id:
MKRKMMFMKSFEGSWKVEPIYVDSKRLCKQMKPKSREEYHKCSGGQGKIASKVKMNQTFQPSFPFNLPPLSWYIRDITIKITKALIQDLQDMGAKLRGV

SEQ ID NO: 26696 - DNA, 1334 bp, Arabidopsis thaliana
  misc_feature (1)..(1334): Ceres Seq. ID no. 13487478
  misc_feature: MA Experiment ID: 108473 Result: Up-regulated in Transcription
  misc_feature: MA Experiment 108473 PARAMETER Experiment Name: At_Drought_Flowers_cDNA_P Parameter: Timepoint (hr) Value: 7 d
  misc_feature: MA Experiment 108473 PARAMETER Experiment Name: At_Drought_Flowers_cDNA_P Parameter: Tissue Value: Flower
  misc_feature: MA Experiment 108473 PARAMETER Experiment Name: At_Drought_Flowers_cDNA_P Parameter: Treatment Value: Drought vs. No Drought
  misc_feature: MA Experiment ID: 108489 Result: Up-regulated in Transcription
  misc_feature: MA Experiment ID: 108607 Result: Up-regulated in Transcription
  misc_feature: MA Experiment 108607 PARAMETER Experiment Name: At_100uM_ABA_cDNA_P Parameter: Timepoint (hr) Value: 4
  misc_feature: MA Experiment 108607 PARAMETER Experiment Name: At_100uM_ABA_cDNA_P Parameter: Tissue Value: Aerial
  misc_feature: MA Experiment 108607 PARAMETER Experiment Name: At_100uM_ABA_cDNA_P Parameter: Treatment Value: 100uM ABA vs. No Treatment
  misc_feature: MA Experiment ID: 20000069 Result: Up-regulated in Transcription
  misc_feature: MA Experiment 20000069 PARAMETER Experiment Name: At_100uM_ABA_Mutants_cDNA_P Parameter: Plant Line Value: CS23
  misc_feature: MA Experiment 20000069 PARAMETER Experiment Name: At_100uM_ABA_Mutants_cDNA_P Parameter: Timepoint (hr) Value: 6
  misc_feature: MA Experiment 20000069 PARAMETER Experiment Name: At_100uM_ABA_Mutants_cDNA_P Parameter: Tissue Value: Aerial
  misc_feature: MA Experiment 20000069 PARAMETER Experiment Name: At_100uM_ABA_Mutants_cDNA_P Parameter: Treatment Value: 100uM ABA vs. No Treatment
  misc_feature: MA Experiment ID: 20000070 Result: Up-regulated in Transcription
  misc_feature: MA Experiment 20000070 PARAMETER Experiment Name: At_100uM_ABA_Mutants_cDNA_P Parameter: Plant Line Value: CS24
  misc_feature: MA Experiment 20000070 PARAMETER Experiment Name: At_100uM_ABA_Mutants_cDNA_P Parameter: Timepoint (hr) Value: 6
  misc_feature: MA Experiment 20000070 PARAMETER Experiment Name: At_100uM_ABA_Mutants_cDNA_P Parameter: Tissue Value: Aerial
  misc_feature: MA Experiment 20000070 PARAMETER Experiment Name: At_100uM_ABA_Mutants_cDNA_P Parameter: Treatment Value: 100uM ABA vs. No Treatment
  misc_feature: MA Experiment ID: 20000071 Result: Up-regulated in Transcription
  misc_feature: MA Experiment 20000071 PARAMETER Experiment Name: At_100uM_ABA_Mutants_cDNA_P Parameter: Plant Line Value: CS8104
  misc_feature: MA Experiment 20000071 PARAMETER Experiment Name: At_100uM_ABA_Mutants_cDNA_P Parameter: Timepoint (hr) Value: 6
  misc_feature: MA Experiment 20000071 PARAMETER Experiment Name: At_100uM_ABA_Mutants_cDNA_P Parameter: Tissue Value: Aerial
  misc_feature: MA Experiment 20000071 PARAMETER Experiment Name: At_100uM_ABA_Mutants_cDNA_P Parameter: Treatment Value: 100uM ABA vs. No Treatment
  misc_feature: MA Experiment ID: 20000072 Result: Up-regulated in Transcription
  misc_feature: MA Experiment 20000072 PARAMETER Experiment Name: At_100uM_ABA_Mutants_cDNA_P Parameter: Plant Line Value: CS8105
  misc_feature: MA Experiment 20000072 PARAMETER Experiment Name: At_100uM_ABA_Mutants_cDNA_P Parameter: Timepoint (hr) Value: 6
  misc_feature: MA Experiment 20000072 PARAMETER Experiment Name: At_100uM_ABA_Mutants_cDNA_P Parameter: Tissue Value: Aerial
  misc_feature: MA Experiment 20000072 PARAMETER Experiment Name: At_100uM_ABA_Mutants_cDNA_P Parameter: Treatment Value: 100uM ABA vs. No Treatment
  misc_feature: MA Experiment ID: 20000088 Result: Up-regulated in Transcription
  misc_feature: MA Experiment 20000088 PARAMETER Experiment Name: At_100uM_ABA_Mutants_cDNA_P Parameter: Plant Line Value: Landsberg
  misc_feature: MA Experiment 20000088 PARAMETER Experiment Name: At_100uM_ABA_Mutants_cDNA_P Parameter: Timepoint (hr) Value: 6
  misc_feature: MA Experiment 20000088 PARAMETER Experiment Name: At_100uM_ABA_Mutants_cDNA_P Parameter: Tissue Value: Aerial
  misc_feature: MA Experiment 20000088 PARAMETER Experiment Name: At_100uM_ABA_Mutants_cDNA_P Parameter: Treatment Value: 100uM ABA vs. No Treatment
  misc_feature: MA Experiment ID: 20000093 Result: Up-regulated in Transcription
  misc_feature: MA Experiment 20000093 PARAMETER Experiment Name: At_42deg_Heat_cDNA_P Parameter: Temperature (deg C) Value: 42 vs. 22
  misc_feature: MA Experiment 20000093 PARAMETER Experiment Name: At_42deg_Heat_cDNA_P Parameter: Timepoint (hr) Value: 0.5
  misc_feature: MA Experiment 20000093 PARAMETER Experiment Name: At_42deg_Heat_cDNA_P Parameter: Tissue Value: Aerial
  misc_feature: MA Experiment ID: 20000113 Result: Up-regulated in Transcription
  misc_feature: MA Experiment 20000113 PARAMETER Experiment Name: At_42deg_Heat_cDNA_P Parameter: Temperature (deg C) Value: 42 vs. 22
  misc_feature: MA Experiment 20000113 PARAMETER Experiment Name: At_42deg_Heat_cDNA_P Parameter: Timepoint (hr) Value: 8
  misc_feature: MA Experiment 20000113 PARAMETER Experiment Name: At_42deg_Heat_cDNA_P Parameter: Tissue Value: Aerial
  misc_feature: MA Experiment ID: 20000117 Result: Up-regulated in Transcription
  misc_feature: MA Experiment 20000117 PARAMETER Experiment Name: At_100uM_ABA_Mutants_cDNA_P Parameter: Plant Line Value: Columbia
  misc_feature: MA Experiment 20000117 PARAMETER Experiment Name: At_100uM_ABA_Mutants_cDNA_P Parameter: Timepoint (hr) Value: 6
  misc_feature: MA Experiment 20000117 PARAMETER Experiment Name: At_100uM_ABA_Mutants_cDNA_P Parameter: Tissue Value: Aerial
  misc_feature: MA Experiment 20000117 PARAMETER Experiment Name: At_100uM_ABA_Mutants_cDNA_P Parameter: Treatment Value: 100uM ABA vs. No Treatment
  misc_feature: MA Experiment ID: 20000171 Result: Up-regulated in Transcription
  misc_feature: MA Experiment 20000171 PARAMETER Experiment Name: At_42deg_Heat_P Parameter: Age (day) Value: 14
  misc_feature: MA Experiment 20000171 PARAMETER Experiment Name: At_42deg_Heat_P Parameter: Organism Value: A. thaliana
  misc_feature: MA Experiment 20000171 PARAMETER Experiment Name: At_42deg_Heat_P Parameter: Plant Line Value: WS
  misc_feature: MA Experiment 20000171 PARAMETER Experiment Name: At_42deg_Heat_P Parameter: Temperature (deg C) Value: 42 vs. 22
  misc_feature: MA Experiment 20000171 PARAMETER Experiment Name: At_42deg_Heat_P Parameter: Timepoint (hr) Value: 1
  misc_feature: MA Experiment 20000171 PARAMETER Experiment Name: At_42deg_Heat_P Parameter: Tissue Value: Aerial
  misc_feature: MA Experiment ID: 20000184 Result: Down-regulated in Transcription
  misc_feature: MA Experiment 20000184 PARAMETER Experiment Name: At_Shoots__P Parameter: Age (day) Value: 7
  misc_feature: MA Experiment 20000184 PARAMETER Experiment Name: At_Shoots__P Parameter: Tissue Value: Shoots vs. Whole Plant
  misc_feature: MA Experiment ID: 20000224 Result: Down-regulated in Transcription
  misc_feature: MA Experiment ID: 20000436 Result: Up-regulated in Transcription
  misc_feature: MA Experiment 20000436 PARAMETER Experiment Name: At_Drought_P Parameter: Age (day) Value: 7
  misc_feature: MA Experiment 20000436 PARAMETER Experiment Name: At_Drought_P Parameter: Organism Value: A. thaliana
  misc_feature: MA Experiment 20000436 PARAMETER Experiment Name: At_Drought_P Parameter: Plant Line Value: WS
  misc_feature: MA Experiment 20000436 PARAMETER Experiment Name: At_Drought_P Parameter: Timepoint (hr) Value: 12
  misc_feature: MA Experiment 20000436 PARAMETER Experiment Name: At_Drought_P Parameter: Tissue Value: Whole Plant
  misc_feature: MA Experiment 20000436 PARAMETER Experiment Name: At_Drought_P Parameter: Treatment Value: Drought vs. No Drought
  misc_feature: MA Experiment ID: 20000437 Result: Up-regulated in Transcription
  misc_feature: MA Experiment 20000437 PARAMETER Experiment Name: At_Drought_P Parameter: Age (day) Value: 8
  misc_feature: MA Experiment 20000437 PARAMETER Experiment Name: At_Drought_P Parameter: Organism Value: A. thaliana
  misc_feature: MA Experiment 20000437 PARAMETER Experiment Name: At_Drought_P Parameter: Plant Line Value: WS
  misc_feature: MA Experiment 20000437 PARAMETER Experiment Name: At_Drought_P Parameter: Timepoint (hr) Value: 24
  misc_feature: MA Experiment 20000437 PARAMETER Experiment Name: At_Drought_P Parameter: Tissue Value: Whole Plant
  misc_feature: MA Experiment 20000437 PARAMETER Experiment Name: At_Drought_P Parameter: Treatment Value: Drought vs. No Drought
  misc_feature: MA Experiment ID: 20001906 Result: Up-regulated in Transcription
  misc_feature: MA Experiment 20001906 PARAMETER Experiment Name: At_Drought_Reproduction_P Parameter: Age (day) Value: 35
  misc_feature: MA Experiment 20001906 PARAMETER Experiment Name: At_Drought_Reproduction_P Parameter: Organism Value: A. thaliana
  misc_feature: MA Experiment 20001906 PARAMETER Experiment Name: At_Drought_Reproduction_P Parameter: Plant Line Value: WS
  misc_feature: MA Experiment 20001906 PARAMETER Experiment Name: At_Drought_Reproduction_P Parameter: Timepoint (day) Value: 5
  misc_feature: MA Experiment 20001906 PARAMETER Experiment Name: At_Drought_Reproduction_P Parameter: Tissue Value: Siliques
  misc_feature: MA Experiment 20001906 PARAMETER Experiment Name: At_Drought_Reproduction_P Parameter: Treatment Value: Drought vs. No Drought
  misc_feature: MA Experiment ID: 20001908 Result: Up-regulated in Transcription
  misc_feature: MA Experiment 20001908 PARAMETER Experiment Name: At_Drought_Reproduction_P Parameter: Age (day) Value: 40
  misc_feature: MA Experiment 20001908 PARAMETER Experiment Name: At_Drought_Reproduction_P Parameter: Organism Value: A. thaliana
  misc_feature: MA Experiment 20001908 PARAMETER Experiment Name: At_Drought_Reproduction_P Parameter: Plant Line Value: WS
  misc_feature: MA Experiment 20001908 PARAMETER Experiment Name: At_Drought_Reproduction_P Parameter: Timepoint (day) Value: 10
  misc_feature: MA Experiment 20001908 PARAMETER Experiment Name: At_Drought_Reproduction_P Parameter: Tissue Value: Siliques
  misc_feature: MA Experiment 20001908 PARAMETER Experiment Name: At_Drought_Reproduction_P Parameter: Treatment Value: Drought vs. No Drought
  misc_feature: MA Experiment ID: 20001911 Result: Up-regulated in Transcription
  misc_feature: MA Experiment 20001911 PARAMETER Experiment Name: At_Drought_Reproduction_P Parameter: Age (day) Value: 40
  misc_feature: MA Experiment 20001911 PARAMETER Experiment Name: At_Drought_Reproduction_P Parameter: Organism Value: A. thaliana
  misc_feature: MA Experiment 20001911 PARAMETER Experiment Name: At_Drought_Reproduction_P Parameter: Plant Line Value: WS
  misc_feature: MA Experiment 20001911 PARAMETER Experiment Name: At_Drought_Reproduction_P Parameter: Timepoint (day) Value: 10
  misc_feature: MA Experiment 20001911 PARAMETER Experiment Name: At_Drought_Reproduction_P Parameter: Tissue Value: Flowers
  misc_feature: MA Experiment 20001911 PARAMETER Experiment Name: At_Drought_Reproduction_P Parameter: Treatment Value: Drought vs. No Drought
attctcatatttacttttgatctcgtggtgttagaatcaaagaaaccgcttcaaggatggtgagtgaaggagcaacaagaaaagaacttaacctctgtttcgagaatatgaagatggaaggagttttgatctctgagtggaaagatatccctgtggagcttctcatgaagattttaaaccttgttgatgatcggactgtgatcattgcttcttgtatttgtagtggctggagagatgctgtttcccttggcctcactcgcctctccctctcttggtgcaagaagaatatgaacagtttggttctatctcttgctcccaaattcgtaaagcttcagactttagtactgcgacaggacaaaccgcagcttgaggacaacgcggtggaagccatagcaaatcactgtcatgagctacaagatttggacttaagcaaaagctcgaaaatcactgaccattccctatattcacttgctcgtggttgtactaacctgactaaactcaaccttagcggctgcacttcgttcagcgacactgctcttgcgcatttgacaagattttgcaggaagctcaaaattctgaatctttgtggttgtgttgaagctgtatctgacaatacattgcaggctattggagaaaactgcaatcagttgcagtcactaaacttgggatggtgtgagaatataagtgatgatggagttatgagtttagcttatggttgtcctgatttaagaactcttgatctttgtagctgtgttctaatcacagatgagagtgttgtggctttggcgaatcggtgcattcacttgaggtcattggggttatactactgcagaaacattacagacagagcaatgtactctttagctcagagcggagtcaagaacaaacacgagatgtggcgagcggtaaagaaaggaaaattcgatgaagaaggactaagaagccttaacattagtcaatgcacttacctaacaccttcagctgttcaagctgtctgtgatacattccctgctctccacacttgttcaggcagacattcacttgtcatgagcggttgtttgaatctacaatctgttcattgtgcttgtatccttcaagctcaccgcactcacaccgtttaccctcacccggcgcattgaaacggtgtgtgagccagagggtctactactctctagtatgtgtgtacatacatataaccatatggtgttaataaagcttctttgagttccttctttgtctttgatgcaatcttaagattttaacattacctagtcttgaaaatcttgtaatgaatcgcgaaatacttatttcttctaacaatttgtttaagttgc

SEQ ID NO: 26697 - protein, 360 aa, Arabidopsis thaliana
  peptide (1)..(360): Ceres Seq. ID no. 13487479
  misc_feature (66)..(269): Homolog of NCBI NO: 16306582 NR Description: F-box and leucine-rich repeat protein 2
  misc_feature (66)..(269): Homolog of NCBI NO: 6063090 NR Description: F-box protein FBL2 [Homo sapiens]
  misc_feature (66)..(269): Homolog of NCBI NO: 30519963 NR Description: F-box and leucine-rich repeat protein 2 [Mus
  misc_feature (66)..(269): Homolog of NCBI NO: 26336707 NR Description: unnamed protein product [Mus musculus]
  misc_feature (29)..(345): Homolog of NCBI NO: 31226369 NR Description: ENSANGP00000010053 [Anopheles gambiae]
  misc_feature (215)..(360): Homolog of NCBI NO: 26450797 NR Description: unknown protein [Arabidopsis thaliana]
  misc_feature (22)..(350): Homolog of NCBI NO: 34907434 NR Description: P0018C10.44 [Oryza sativa (japonica
  misc_feature (1)..(360): Homolog of NCBI NO: 21554029 NR Description: F-box protein AtFBL5 [Arabidopsis thaliana]
  misc_feature (1)..(360): Homolog of NCBI NO: 18394987 NR Description: F-box protein family [Arabidopsis thaliana]
  misc_feature (1)..(360): Homolog of NCBI NO: 18411319 NR Description: F-box protein family [Arabidopsis thaliana]
MVSEGATRKELNLCFENMKMEGVLISEWKDIPVELLMKILNLVDDRTVIIASCICSGWRDAVSLGLTRLSLSWCKKNMNSLVLSLAPKFVKLQTLVLRQDKPQLEDNAVEAIANHCHELQDLDLSKSSKITDHSLYSLARGCTNLTKLNLSGCTSFSDTALAHLTRFCRKLKILNLCGCVEAVSDNTLQAIGENCNQLQSLNLGWCENISDDGVMSLAYGCPDLRTLDLCSCVLITDESVVALANRCIHLRSLGLYYCRNITDRAMYSLAQSGVKNKHEMWRAVKKGKFDEEGLRSLNISQCTYLTPSAVQAVCDTFPALHTCSGRHSLVMSGCLNLQSVHCACILQAHRTHTVYPHPAH

SEQ ID NO: 26698 - protein, 343 aa, Arabidopsis thaliana
  peptide (1)..(343): Ceres Seq. ID no. 13487480
  misc_feature (49)..(252): Homolog of NCBI NO: 16306582 NR Description: F-box and leucine-rich repeat protein 2
  misc_feature (49)..(252): Homolog of NCBI NO: 6063090 NR Description: F-box protein FBL2 [Homo sapiens]
  misc_feature (49)..(252): Homolog of NCBI NO: 30519963 NR Description: F-box and leucine-rich repeat protein 2 [Mus
  misc_feature (49)..(252): Homolog of NCBI NO: 26336707 NR Description: unnamed protein product [Mus musculus]
  misc_feature (12)..(328): Homolog of NCBI NO: 31226369 NR Description: ENSANGP00000010053 [Anopheles gambiae]
  misc_feature (198)..(343): Homolog of NCBI NO: 26450797 NR Description: unknown protein [Arabidopsis thaliana]
  misc_feature (5)..(333): Homolog of NCBI NO: 34907434 NR Description: P0018C10.44 [Oryza sativa (japonica
  misc_feature (1)..(343): Homolog of NCBI NO: 21554029 NR Description: F-box protein AtFBL5 [Arabidopsis thaliana]
  misc_feature (1)..(343): Homolog of NCBI NO: 18394987 NR Description: F-box protein family [Arabidopsis thaliana]
  misc_feature (1)..(343): Homolog of NCBI NO: 18411319 NR Description: F-box protein family [Arabidopsis thaliana]
MKMEGVLISEWKDIPVELLMKILNLVDDRTVIIASCICSGWRDAVSLGLTRLSLSWCKKNMNSLVLSLAPKFVKLQTLVLRQDKPQLEDNAVEAIANHCHELQDLDLSKSSKITDHSLYSLARGCTNLTKLNLSGCTSFSDTALAHLTRFCRKLKILNLCGCVEAVSDNTLQAIGENCNQLQSLNLGWCENISDDGVMSLAYGCPDLRTLDLCSCVLITDESVVALANRCIHLRSLGLYYCRNITDRAMYSLAQSGVKNKHEMWRAVKKGKFDEEGLRSLNISQCTYLTPSAVQAVCDTFPALHTCSGRHSLVMSGCLNLQSVHCACILQAHRTHTVYPHPAH

SEQ ID NO: 26699 - protein, 341 aa, Arabidopsis thaliana
  peptide (1)..(341): Ceres Seq. ID no. 13487481
  misc_feature (47)..(250): Homolog of NCBI NO: 6063090 NR Description: F-box protein FBL2 [Homo sapiens]
  misc_feature (47)..(250): Homolog of NCBI NO: 30519963 NR Description: F-box and leucine-rich repeat protein 2 [Mus
  misc_feature (47)..(250): Homolog of NCBI NO: 26336707 NR Description: unnamed protein product [Mus musculus]
  misc_feature (10)..(326): Homolog of NCBI NO: 31226369 NR Description: ENSANGP00000010053 [Anopheles gambiae]
  misc_feature (196)..(341): Homolog of NCBI NO: 26450797 NR Description: unknown protein [Arabidopsis thaliana]
  misc_feature (3)..(331): Homolog of NCBI NO: 34907434 NR Description: P0018C10.44 [Oryza sativa (japonica
  misc_feature (1)..(341): Homolog of NCBI NO: 21554029 NR Description: F-box protein AtFBL5 [Arabidopsis thaliana]
  misc_feature (1)..(341): Homolog of NCBI NO: 18394987 NR Description: F-box protein family [Arabidopsis thaliana]
  misc_feature (1)..(341): Homolog of NCBI NO: 18411319 NR Description: F-box protein family [Arabidopsis thaliana]
  misc_feature (47)..(250): Homolog of NCBI NO: 16306582 NR Description: F-box and leucine-rich repeat protein 2
MEGVLISEWKDIPVELLMKILNLVDDRTVIIASCICSGWRDAVSLGLTRLSLSWCKKNMNSLVLSLAPKFVKLQTLVLRQDKPQLEDNAVEAIANHCHELQDLDLSKSSKITDHSLYSLARGCTNLTKLNLSGCTSFSDTALAHLTRFCRKLKILNLCGCVEAVSDNTLQAIGENCNQLQSLNLGWCENISDDGVMSLAYGCPDLRTLDLCSCVLITDESVVALANRCIHLRSLGLYYCRNITDRAMYSLAQSGVKNKHEMWRAVKKGKFDEEGLRSLNISQCTYLTPSAVQAVCDTFPALHTCSGRHSLVMSGCLNLQSVHCACILQAHRTHTVYPHPAH

SEQ ID NO: 26700 - DNA, 1875 bp, Arabidopsis thaliana
  misc_feature (1)..(1875): Ceres Seq. ID no. 12328067
  misc_feature: MA Experiment ID: 108573 Result: Up-regulated in Transcription
  misc_feature: MA Experiment 108573 PARAMETER Experiment Name: At_Drought_cDNA_P Parameter: Timepoint (hr) Value: 6
  misc_feature: MA Experiment 108573 PARAMETER Experiment Name: At_Drought_cDNA_P Parameter: Tissue Value: Aerial
  misc_feature: MA Experiment 108573 PARAMETER Experiment Name: At_Drought_cDNA_P Parameter: Treatment Value: Drought vs. No Drought
  misc_feature: MA Experiment ID: 108577 Result: Down-regulated in Transcription
  misc_feature: MA Experiment 108577 PARAMETER Experiment Name: At_42deg_Heat_cDNA_P Parameter: Temperature (deg C) Value: 42 vs. 22
  misc_feature: MA Experiment 108577 PARAMETER Experiment Name: At_42deg_Heat_cDNA_P Parameter: Timepoint (hr) Value: 6
  misc_feature: MA Experiment 108577 PARAMETER Experiment Name: At_42deg_Heat_cDNA_P Parameter: Tissue Value: Aerial
  misc_feature: MA Experiment ID: 108579 Result: Down-regulated in Transcription
  misc_feature: MA Experiment 108579 PARAMETER Experiment Name: At_4deg_Cold_cDNA_P Parameter: Temperature (deg C) Value: 4 vs. 22
  misc_feature: MA Experiment 108579 PARAMETER Experiment Name: At_4deg_Cold_cDNA_P Parameter: Timepoint (hr) Value: 6
  misc_feature: MA Experiment 108579 PARAMETER Experiment Name: At_4deg_Cold_cDNA_P Parameter: Tissue Value: Aerial
  misc_feature: MA Experiment ID: 108594 Result: Up-regulated in Transcription
  misc_feature: MA Experiment 108594 PARAMETER Experiment Name: At_Ler-rhl_Root_cDNA_P Parameter: Plant Line Value: null
  misc_feature: MA Experiment ID: 20000214 Result: Down-regulated in Transcription
  misc_feature: MA Experiment 20000214 PARAMETER Experiment Name: At_4deg_Cold_P Parameter: Timepoint (hr) Value: 6
  misc_feature: MA Experiment ID: 20000224 Result: Down-regulated in Transcription
  misc_feature: MA Experiment ID: 20001247 Result: Up-regulated in Transcription
  misc_feature: MA Experiment 20001247 PARAMETER Experiment Name: At_Far-red-induction_P Parameter: Age (day) Value: 7
  misc_feature: MA Experiment 20001247 PARAMETER Experiment Name: At_Far-red-induction_P Parameter: Light Value: Far-red vs. White
  misc_feature: MA Experiment 20001247 PARAMETER Experiment Name: At_Far-red-induction_P Parameter: Organism Value: A. thaliana
  misc_feature: MA Experiment 20001247 PARAMETER Experiment Name: At_Far-red-induction_P Parameter: Plant Line Value: Columbia
  misc_feature: MA Experiment 20001247 PARAMETER Experiment Name: At_Far-red-induction_P Parameter: Timepoint (hr) Value: 1
  misc_feature: MA Experiment 20001247 PARAMETER Experiment Name: At_Far-red-induction_P Parameter: Tissue Value: Whole Plant
  misc_feature: MA Experiment ID: 20001248 Result: Up-regulated in Transcription
  misc_feature: MA Experiment 20001248 PARAMETER Experiment Name: At_Far-red-induction_P Parameter: Age (day) Value: 7
  misc_feature: MA Experiment 20001248 PARAMETER Experiment Name: At_Far-red-induction_P Parameter: Light Value: Far-red vs. White
  misc_feature: MA Experiment 20001248 PARAMETER Experiment Name: At_Far-red-induction_P Parameter: Organism Value: A. thaliana
  misc_feature: MA Experiment 20001248 PARAMETER Experiment Name: At_Far-red-induction_P Parameter: Plant Line Value: Columbia
  misc_feature: MA Experiment 20001248 PARAMETER Experiment Name: At_Far-red-induction_P Parameter: Timepoint (hr) Value: 4
  misc_feature: MA Experiment 20001248 PARAMETER Experiment Name: At_Far-red-induction_P Parameter: Tissue Value: Whole Plant
  misc_feature: MA Experiment ID: 20001450 Result: Up-regulated in Transcription
  misc_feature: MA Experiment 20001450 PARAMETER Experiment Name: At_Far-red-induction_P Parameter: Age (day) Value: 7
  misc_feature: MA Experiment 20001450 PARAMETER Experiment Name: At_Far-red-induction_P Parameter: Light Value: Far-red vs. White
  misc_feature: MA Experiment 20001450 PARAMETER Experiment Name: At_Far-red-induction_P Parameter: Organism Value: A. thaliana
  misc_feature: MA Experiment 20001450 PARAMETER Experiment Name: At_Far-red-induction_P Parameter: Plant Line Value: Columbia
  misc_feature: MA Experiment 20001450 PARAMETER Experiment Name: At_Far-red-induction_P Parameter: Timepoint (hr) Value: 8
  misc_feature: MA Experiment 20001450 PARAMETER Experiment Name: At_Far-red-induction_P Parameter: Tissue Value: Whole Plant
  misc_feature: MA Experiment ID: 20001451 Result: Up-regulated in Transcription
  misc_feature: MA Experiment 20001451 PARAMETER Experiment Name: At_Far-red-induction_P Parameter: Age (day) Value: 7
  misc_feature: MA Experiment 20001451 PARAMETER Experiment Name: At_Far-red-induction_P Parameter: Light Value: Far-red vs. White
  misc_feature: MA Experiment 20001451 PARAMETER Experiment Name: At_Far-red-induction_P Parameter: Organism Value: A. thaliana
  misc_feature: MA Experiment 20001451 PARAMETER Experiment Name: At_Far-red-induction_P Parameter: Plant Line Value: Columbia
  misc_feature: MA Experiment 20001451 PARAMETER Experiment Name: At_Far-red-induction_P Parameter: Timepoint (hr) Value: 24
  misc_feature: MA Experiment 20001451 PARAMETER Experiment Name: At_Far-red-induction_P Parameter: Tissue Value: Whole Plant
attcctttttaacaatcttctgcattttcgaacttgctttgctgtgataaagttctctcctttcctttctaaaggaagaagaaaggctttatctctcaaaaccctcatccacaaaatcccctttaatccgctaatcagagggtttttctgtttttgtgttgcttcgttactacggttacattcttctcttccccttttgatttcaaaggtacgatctttatcctcaattgcgtttcgatcgtatctcaaattctcttcgatctctgacagaaagtttccaactttagtgaatcgcgaaattgggttcgtgttcttgctctgatttcggtgtaacccttcaatttcagaaccctcttgataccttaagaagaggcaatttgaagttttcttcacagatccgtcttagctctttctagagaatggcggatttgataccattttatctgaatattgtggcgtttctatgtactgttggagctattgctttggcgatatttcatatctacaggcatcttttgaattacacggaaccaacttatcagagatatattgtacgcattatcttcatggtcccggtttatgccttcatgtcattcttgtctcttgtgttacccaaaagctcgatatattttgattccatacgagaagtatatgaagcatgggttatctacaattttctatcgctgtgtttggcatgggttggaggcccaggatcagtagtgcttagtttgagtggtcgttctttaaagccatcatggtctcttatgacatgttgctttccgcctttaacactggacgggcgatttattcgacgatgcaagcagggttgtctgcaatttgtaattctgaagcctatcctagttgctgtcacacttgtgctttatgctaaagggaagtacaaggatggaaattttaaccctgatcaagcatatctctatcttaccatcatctataccatatcctacacagtggctttgtacgcacttgtgctgttttatatggcatgcagagatctacttcagccattcaatccagtcccaaagtttgtgatcataaagtctgtggtctttctaacctattggcagggtgttctcgttttccttgctgcaaaatctggattcataaagagtgcagaggcagcagctcattttcaaaattttataatatgtgtcgagatgctcattgctgcagcatgtcatttctatgcttttccatacaaggagtatgctggtgccaatgttgttggatctggcagtttctcaggaagcttatcacatgctgtaaaactaaatgacttttaccatgacactgttcaccagtttgctcctacctatcacgattatgtgctctataaccatcaagatggtggtgacgaggggacaaagaagtaccgatcgagaacctttgtgccaactggccaagagatggatgcaatgagaaaaaacaaacctgtgtatgcaaacaagatagatggtgtttcagtctcaagtagtctatcttcagaggcaagctcacctaaaagctccagcgtaacttctgatcctgcacgctctgatgctgtgaaatcttccttgctggtggatgcctcagattctcttgaaacaatgtatgatatgtcgctcattgacattgatctatctagtttccccagcaatgtcccatctgcaagtgaaagtgggcctagataggagcagagaaaatgtagaaatcaccattaacaggtacaaaacatgctcctaatagttgtattcagatgaatcttctgaggtgtgttcttagttggaagatgttgttagttggagacttgaggataaatgaaaaaagcttataaacccatttaccttttgtagctttatacaatgagtcttctactgc

SEQ ID NO: 26701 - protein, 422 aa, Arabidopsis thaliana
  peptide (1)..(422): Ceres Seq. ID no. 12328068
  misc_feature (5)..(281): Pfam Name: Domain of unknown function Pfam Description: Domain of unknown function
  misc_feature (20)..(308): Homolog of NCBI NO: 26341248 NR Description: unnamed protein product [Mus musculus]
  misc_feature (20)..(308): Homolog of NCBI NO: 7110635 NR Description: chromosome 22 open reading frame 5 [Homo sapiens]
  misc_feature (13)..(388): Homolog of NCBI NO: 34900750 NR Description: OJ1341_A08.33 [Oryza sativa (japonica
  misc_feature (13)..(400): Homolog of NCBI NO: 34897328 NR Description: putative organic solute transporter [Oryza
  misc_feature (1)..(77): Homolog of NCBI NO: 15230584 NR Description: unknown protein; protein id: At3g05940.1
  misc_feature (128)..(420): Homolog of NCBI NO: 15230584 NR Description: unknown protein; protein id: At3g05940.1
  misc_feature (1)..(420): Homolog of NCBI NO: 6671963 NR Description: unknown protein [Arabidopsis thaliana]
  misc_feature (1)..(81): Homolog of NCBI NO: 7485938 NR Description: hypothetical protein F21E10.13 - Arabidopsis
  misc_feature (81)..(422): Homolog of NCBI NO: 7485938 NR Description: hypothetical protein F21E10.13 - Arabidopsis
  misc_feature (1)..(422): Homolog of NCBI NO: 30690265 NR Description: expressed protein [Arabidopsis thaliana]
MADLIPFYLNIVAFLCTVGAIALAIFHIYRHLLNYTEPTYQRYIVRIIFMVPVYAFMSFLSLVLPKSSIYFDSIREVYEAWVIYNFLSLCLAWVGGPGSVVLSLSGRSLKPSWSLMTCCFPPLTLDGRFIRRCKQGCLQFVILKPILVAVTLVLYAKGKYKDGNFNPDQAYLYLTIIYTISYTVALYALVLFYMACRDLLQPFNPVPKFVIIKSVVFLTYWQGVLVFLAAKSGFIKSAEAAAHFQNFIICVEMLIAAACHFYAFPYKEYAGANVVGSGSFSGSLSHAVKLNDFYHDTVHQFAPTYHDYVLYNHQDGGDEGTKKYRSRTFVPTGQEMDAMRKNKPVYANKIDGVSVSSSLSSEASSPKSSSVTSDPARSDAVKSSLLVDASDSLETMYDMSLIDIDLSSFPSNVPSASESGPR

SEQ ID NO: 26702 - protein, 373 aa, Arabidopsis thaliana
  peptide (1)..(373): Ceres Seq. ID no. 12328069
  misc_feature (1)..(232): Pfam Name: Domain of unknown function Pfam Description: Domain of unknown function
  misc_feature (1)..(259): Homolog of NCBI NO: 26341248 NR Description: unnamed protein product [Mus musculus]
  misc_feature (1)..(259): Homolog of NCBI NO: 7110635 NR Description: chromosome 22 open reading frame 5 [Homo sapiens]
  misc_feature (1)..(339): Homolog of NCBI NO: 34900750 NR Description: OJ1341_A08.33 [Oryza sativa (japonica
  misc_feature (1)..(351): Homolog of NCBI NO: 34897328 NR Description: putative organic solute transporter [Oryza
  misc_feature (1)..(28): Homolog of NCBI NO: 15230584 NR Description: unknown protein; protein id: At3g05940.1
  misc_feature (79)..(371): Homolog of NCBI NO: 15230584 NR Description: unknown protein; protein id: At3g05940.1
  misc_feature (1)..(371): Homolog of NCBI NO: 6671963 NR Description: unknown protein [Arabidopsis thaliana]
  misc_feature (1)..(32): Homolog of NCBI NO: 7485938 NR Description: hypothetical protein F21E10.13 - Arabidopsis
  misc_feature (32)..(373): Homolog of NCBI NO: 7485938 NR Description: hypothetical protein F21E10.13 - Arabidopsis
  misc_feature (1)..(373): Homolog of NCBI NO: 30690265 NR Description: expressed protein [Arabidopsis thaliana]
MVPVYAFMSFLSLVLPKSSIYFDSIREVYEAWVIYNFLSLCLAWVGGPGSVVLSLSGRSLKPSWSLMTCCFPPLTLDGRFIRRCKQGCLQFVILKPILVAVTLVLYAKGKYKDGNFNPDQAYLYLTIIYTISYTVALYALVLFYMACRDLLQPFNPVPKFVIIKSVVFLTYWQGVLVFLAAKSGFIKSAEAAAHFQNFIICVEMLIAAACHFYAFPYKEYAGANVVGSGSFSGSLSHAVKLNDFYHDTVHQFAPTYHDYVLYNHQDGGDEGTKKYRSRTFVPTGQEMDAMRKNKPVYANKIDGVSVSSSLSSEASSPKSSSVTSDPARSDAVKSSLLVDASDSLETMYDMSLIDIDLSSFPSNVPSASESGPR

SEQ ID NO: 26703 - protein, 366 aa, Arabidopsis thaliana
  peptide (1)..(366): Ceres Seq. ID no. 12328070
  misc_feature (1)..(225): Pfam Name: Domain of unknown function Pfam Description: Domain of unknown function
  misc_feature (1)..(252): Homolog of NCBI NO: 26341248 NR Description: unnamed protein product [Mus musculus]
  misc_feature (1)..(252): Homolog of NCBI NO: 7110635 NR Description: chromosome 22 open reading frame 5 [Homo sapiens]
  misc_feature (1)..(332): Homolog of NCBI NO: 34900750 NR Description: OJ1341_A08.33 [Oryza sativa (japonica
  misc_feature (1)..(344): Homolog of NCBI NO: 34897328 NR Description: putative organic solute transporter [Oryza
  misc_feature (1)..(21): Homolog of NCBI NO: 15230584 NR Description: unknown protein; protein id: At3g05940.1
  misc_feature (72)..(364): Homolog of NCBI NO: 15230584 NR Description: unknown protein; protein id: At3g05940.1
  misc_feature (1)..(364): Homolog of NCBI NO: 6671963 NR Description: unknown protein [Arabidopsis thaliana]
  misc_feature (1)..(25): Homolog of NCBI NO: 7485938 NR Description: hypothetical protein F21E10.13 - Arabidopsis
  misc_feature (25)..(366): Homolog of NCBI NO: 7485938 NR Description: hypothetical protein F21E10.13 - Arabidopsis
  misc_feature (1)..(366): Homolog of NCBI NO: 30690265 NR Description: expressed protein [Arabidopsis thaliana]
MSFLSLVLPKSSIYFDSIREVYEAWVIYNFLSLCLAWVGGPGSVVLSLSGRSLKPSWSLMTCCFPPLTLDGRFIRRCKQGCLQFVILKPILVAVTLVLYAKGKYKDGNFNPDQAYLYLTIIYTISYTVALYALVLFYMACRDLLQPFNPVPKFVIIKSVVFLTYWQGVLVFLAAKSGFIKSAEAAAHFQNFIICVEMLIAAACHFYAFPYKEYAGANVVGSGSFSGSLSHAVKLNDFYHDTVHQFAPTYHDYVLYNHQDGGDEGTKKYRSRTFVPTGQEMDAMRKNKPVYANKIDGVSVSSSLSSEASSPKSSSVTSDPARSDAVKSSLLVDASDSLETMYDMSLIDIDLSSFPSNVPSASESGPR

SEQ ID NO: 26704 - DNA, 1214 bp, Arabidopsis thaliana
  misc_feature (1)..(1214): Ceres Seq. ID no. 12394983
  misc_feature: MA Experiment ID: 108433 Result: Down-regulated in Transcription
  misc_feature: MA Experiment 108433 PARAMETER Experiment Name: At_rhl_Mutant2_cDNA_P Parameter: Age (day) Value: 7
  misc_feature: MA Experiment 108433 PARAMETER Experiment Name: At_rhl_Mutant2_cDNA_P Parameter: Organism Value: A. thaliana
  misc_feature: MA Experiment 108433 PARAMETER Experiment Name: At_rhl_Mutant2_cDNA_P Parameter: Plant Line Value: rhl Mutant vs. wt landsburg
  misc_feature: MA Experiment 108433 PARAMETER Experiment Name: At_rhl_Mutant2_cDNA_P Parameter: Tissue Value: Roots
  misc_feature: MA Experiment ID: 108434 Result: Down-regulated in Transcription
  misc_feature: MA Experiment 108434 PARAMETER Experiment Name: At_Root_Tips_cDNA_P Parameter: Tissue Value: Root Tips
  misc_feature: MA Experiment ID: 108473 Result: Down-regulated in Transcription
  misc_feature: MA Experiment 108473 PARAMETER Experiment Name: At_Drought_Flowers_cDNA_P Parameter: Timepoint (hr) Value: 7 d
  misc_feature: MA Experiment 108473 PARAMETER Experiment Name: At_Drought_Flowers_cDNA_P Parameter: Tissue Value: Flower
  misc_feature: MA Experiment 108473 PARAMETER Experiment Name: At_Drought_Flowers_cDNA_P Parameter: Treatment Value: Drought vs. No Drought
  misc_feature: MA Experiment ID: 108488 Result: Down-regulated in Transcription
  misc_feature: MA Experiment ID: 108572 Result: Down-regulated in Transcription
  misc_feature: MA Experiment 108572 PARAMETER Experiment Name: At_Drought_cDNA_P Parameter: Timepoint (hr) Value: 1
  misc_feature: MA Experiment 108572 PARAMETER Experiment Name: At_Drought_cDNA_P Parameter: Tissue Value: Aerial
  misc_feature: MA Experiment 108572 PARAMETER Experiment Name: At_Drought_cDNA_P Parameter: Treatment Value: Drought vs. No Drought
  misc_feature: MA Experiment ID: 108577 Result: Down-regulated in Transcription
  misc_feature: MA Experiment 108577 PARAMETER Experiment Name: At_42deg_Heat_cDNA_P Parameter: Temperature (deg C) Value: 42 vs. 22
  misc_feature: MA Experiment 108577 PARAMETER Experiment Name: At_42deg_Heat_cDNA_P Parameter: Timepoint (hr) Value: 6
  misc_feature: MA Experiment 108577 PARAMETER Experiment Name: At_42deg_Heat_cDNA_P Parameter: Tissue Value: Aerial
  misc_feature: MA Experiment ID: 108595 Result: Up-regulated in Transcription
  misc_feature: MA Experiment 108595 PARAMETER Experiment Name: At_Ler-pi_Ovule_cDNA_P Parameter: Plant Line Value: null
  misc_feature: MA Experiment ID: 108667 Result: Up-regulated in Transcription
  misc_feature: MA Experiment 108667 PARAMETER Experiment Name: At_2mM_SA_cDNA_P Parameter: Plant Line Value: WS
  misc_feature: MA Experiment 108667 PARAMETER Experiment Name: At_2mM_SA_cDNA_P Parameter: Timepoint (hr) Value: 1
  misc_feature: MA Experiment 108667 PARAMETER Experiment Name: At_2mM_SA_cDNA_P Parameter: Treatment Value: 2mM SA vs. No Treatment
  misc_feature: MA Experiment ID: 20000030 Result: Down-regulated in Transcription
  misc_feature: MA Experiment 20000030 PARAMETER Experiment Name: At_CS6630_Roots_cDNA_P Parameter: Plant Line Value: CS6630 vs. WS
  misc_feature: MA Experiment 20000030 PARAMETER Experiment Name: At_CS6630_Roots_cDNA_P Parameter: Tissue Value: Roots
  misc_feature: MA Experiment ID: 20000068 Result: Down-regulated in Transcription
  misc_feature: MA Experiment ID: 20000069 Result: Down-regulated in Transcription
  misc_feature: MA Experiment 20000069 PARAMETER Experiment Name: At_100uM_ABA_Mutants_cDNA_P Parameter: Plant Line Value: CS23
  misc_feature: MA Experiment 20000069 PARAMETER Experiment Name: At_100uM_ABA_Mutants_cDNA_P Parameter: Timepoint (hr) Value: 6
  misc_feature: MA Experiment 20000069 PARAMETER Experiment Name: At_100uM_ABA_Mutants_cDNA_P Parameter: Tissue Value: Aerial
  misc_feature: MA Experiment 20000069 PARAMETER Experiment Name: At_100uM_ABA_Mutants_cDNA_P Parameter: Treatment Value: 100uM ABA vs. No Treatment
  misc_feature: MA Experiment ID: 20000089 Result: Down-regulated in Transcription
  misc_feature: MA Experiment ID: 20000090 Result: Down-regulated in Transcription
  misc_feature: MA Experiment ID: 20000113 Result: Up-regulated in Transcription
  misc_feature: MA Experiment 20000113 PARAMETER Experiment Name: At_42deg_Heat_cDNA_P Parameter: Temperature (deg C) Value: 42 vs. 22
  misc_feature: MA Experiment 20000113 PARAMETER Experiment Name: At_42deg_Heat_cDNA_P Parameter: Timepoint (hr) Value: 8
  misc_feature: MA Experiment 20000113 PARAMETER Experiment Name: At_42deg_Heat_cDNA_P Parameter: Tissue Value: Aerial
  misc_feature: MA Experiment ID: 20000180 Result: Down-regulated in Transcription
  misc_feature: MA Experiment 20000180 PARAMETER Experiment Name: At_Germinating_Seeds_P Parameter: Age (hr) Value: 24 vs. 0
  misc_feature: MA Experiment 20000180 PARAMETER Experiment Name: At_Germinating_Seeds_P Parameter: Tissue Value: Germinating Seeds
  misc_feature: MA Experiment ID: 20000268 Result: Down-regulated in Transcription
  misc_feature: MA Experiment 20000268 PARAMETER Experiment Name: At_100mM_NaCl__P Parameter: Age (day) Value: 14
  misc_feature: MA Experiment 20000268 PARAMETER Experiment Name: At_100mM_NaCl__P Parameter: Organism Value: A. thaliana
  misc_feature: MA Experiment 20000268 PARAMETER Experiment Name: At_100mM_NaCl__P Parameter: Plant Line Value: WS
  misc_feature: MA Experiment 20000268 PARAMETER Experiment Name: At_100mM_NaCl__P Parameter: Timepoint (hr) Value: 6
  misc_feature: MA Experiment 20000268 PARAMETER Experiment Name: At_100mM_NaCl__P Parameter: Tissue Value: Whole Plant
  misc_feature: MA Experiment 20000268 PARAMETER Experiment Name: At_100mM_NaCl__P Parameter: Treatment Value: 100mM NaCl vs. No Treatment
  misc_feature: MA Experiment ID: 20000308 Result: Down-regulated in Transcription
  misc_feature: MA Experiment 20000308 PARAMETER Experiment Name: At_100mM_NaCl__P Parameter: Age (day) Value: 17
  misc_feature: MA Experiment 20000308 PARAMETER Experiment Name: At_100mM_NaCl__P Parameter: Organism Value: A. thaliana
  misc_feature: MA Experiment 20000308 PARAMETER Experiment Name: At_100mM_NaCl__P Parameter: Plant Line Value: WS
  misc_feature: MA Experiment 20000308 PARAMETER Experiment Name: At_100mM_NaCl__P Parameter: Timepoint (hr) Value: 72
  misc_feature: MA Experiment 20000308 PARAMETER Experiment Name: At_100mM_NaCl__P Parameter: Tissue Value: Whole Plant
  misc_feature: MA Experiment 20000308 PARAMETER Experiment Name: At_100mM_NaCl__P Parameter: Treatment Value: 100mM NaCl vs. No Treatment
  misc_feature: MA Experiment ID: 20000437 Result: Down-regulated in Transcription
  misc_feature: MA Experiment 20000437 PARAMETER Experiment Name: At_Drought_P Parameter: Age (day) Value: 8
  misc_feature: MA Experiment 20000437 PARAMETER Experiment Name: At_Drought_P Parameter: Organism Value: A. thaliana
  misc_feature: MA Experiment 20000437 PARAMETER Experiment Name: At_Drought_P Parameter: Plant Line Value: WS
  misc_feature: MA Experiment 20000437 PARAMETER Experiment Name: At_Drought_P Parameter: Timepoint (hr) Value: 24
  misc_feature: MA Experiment 20000437 PARAMETER Experiment Name: At_Drought_P Parameter: Tissue Value: Whole Plant
  misc_feature: MA Experiment 20000437 PARAMETER Experiment Name: At_Drought_P Parameter: Treatment Value: Drought vs. No Drought
  misc_feature: MA Experiment ID: 20000439 Result: Down-regulated in Transcription
  misc_feature: MA Experiment 20000439 PARAMETER Experiment Name: At_Roots__P Parameter: Age (day) Value: 14 vs. 21
  misc_feature: MA Experiment 20000439 PARAMETER Experiment Name: At_Roots__P Parameter: Organism Value: A. thaliana
  misc_feature: MA Experiment 20000439 PARAMETER Experiment Name: At_Roots__P Parameter: Tissue Value: Roots vs. Whole Plant
  misc_feature: MA Experiment ID: 20000441 Result: Up-regulated in Transcription
  misc_feature: MA Experiment 20000441 PARAMETER Experiment Name: At_1uM_BR-BRZ__P Parameter: Tissue Value: Shoot Apices
  misc_feature: MA Experiment 20000441 PARAMETER Experiment Name: At_1uM_BR-BRZ__P Parameter: Treatment Value: 1uM BR vs. No Treatment
  misc_feature: MA Experiment ID: 20000443 Result: Up-regulated in Transcription
  misc_feature: MA Experiment 20000443 PARAMETER Experiment Name: At_1uM_BR-BRZ__P Parameter: Tissue Value: Shoot Apices
  misc_feature: MA Experiment 20000443 PARAMETER Experiment Name: At_1uM_BR-BRZ__P Parameter: Treatment Value: 1uM BRZ vs. No Treatment
  misc_feature: MA Experiment ID: 20000452 Result: Down-regulated in Transcription
  misc_feature: MA Experiment 20000452 PARAMETER Experiment Name: At_CS6879_Shoots-Roots_P Parameter: Age (day) Value: 14
  misc_feature: MA Experiment 20000452 PARAMETER Experiment Name: At_CS6879_Shoots-Roots_P Parameter: Organism Value: A. thaliana
  misc_feature: MA Experiment 20000452 PARAMETER Experiment Name: At_CS6879_Shoots-Roots_P Parameter: Plant Line Value: CS6879 vs. WS
  misc_feature: MA Experiment 20000452 PARAMETER Experiment Name: At_CS6879_Shoots-Roots_P Parameter: Tissue Value: Shoots
  misc_feature: MA Experiment ID: 20000460 Result: Up-regulated in Transcription
  misc_feature: MA Experiment 20000460 PARAMETER Experiment Name: At_10percent_PEG_P Parameter: Age (day) Value: 12
  misc_feature: MA Experiment 20000460 PARAMETER Experiment Name: At_10percent_PEG_P Parameter: Organism Value: A. thaliana
  misc_feature: MA Experiment 20000460 PARAMETER Experiment Name: At_10percent_PEG_P Parameter: Plant Line Value: WS
  misc_feature: MA Experiment 20000460 PARAMETER Experiment Name: At_10percent_PEG_P Parameter: Timepoint (day) Value: 12
  misc_feature: MA Experiment 20000460 PARAMETER Experiment Name: At_10percent_PEG_P Parameter: Tissue Value: Whole Plant
  misc_feature: MA Experiment 20000460 PARAMETER Experiment Name: At_10percent_PEG_P Parameter: Treatment Value: 10percent PEG vs. No Treatment
  misc_feature: MA Experiment ID: 20000527 Result: Up-regulated in Transcription
  misc_feature: MA Experiment 20000527 PARAMETER Experiment Name: At_10percent_PEG_P Parameter: Age (day) Value: 20
  misc_feature: MA Experiment 20000527 PARAMETER Experiment Name: At_10percent_PEG_P Parameter: Organism Value: A. thaliana
  misc_feature: MA Experiment 20000527 PARAMETER Experiment Name: At_10percent_PEG_P Parameter: Plant Line Value: WS
  misc_feature: MA Experiment 20000527 PARAMETER Experiment Name: At_10percent_PEG_P Parameter: Timepoint (day) Value: 20
  misc_feature: MA Experiment 20000527 PARAMETER Experiment Name: At_10percent_PEG_P Parameter: Tissue Value: Whole Plant
  misc_feature: MA Experiment 20000527 PARAMETER Experiment Name: At_10percent_PEG_P Parameter: Treatment Value: 10percent PEG vs. No Treatment
  misc_feature: MA Experiment ID: 20000606 Result: Up-regulated in Transcription
  misc_feature: MA Experiment 20000606 PARAMETER Experiment Name: At_CS8548_Mutant_P Parameter: Age (day) Value: 14
  misc_feature: MA Experiment 20000606 PARAMETER Experiment Name: At_CS8548_Mutant_P Parameter: Plant Line Value: CS8548 vs. wt
  misc_feature: MA Experiment 20000606 PARAMETER Experiment Name: At_CS8548_Mutant_P Parameter: Tissue Value: Whole Plant
  misc_feature: MA Experiment ID: 20000794 Result: Down-regulated in Transcription
  misc_feature: MA Experiment 20000794 PARAMETER Experiment Name: At_Petals_P Parameter: Age (day) Value: 23-25 days
  misc_feature: MA Experiment 20000794 PARAMETER Experiment Name: At_Petals_P Parameter: Plant Line Value: WS
  misc_feature: MA Experiment 20000794 PARAMETER Experiment Name: At_Petals_P Parameter: Tissue Value: Petals vs. Whole plant
  misc_feature: MA Experiment ID: 20001247 Result: Up-regulated in Transcription
  misc_feature: MA Experiment 20001247 PARAMETER Experiment Name: At_Far-red-induction_P Parameter: Age (day) Value: 7
  misc_feature: MA Experiment 20001247 PARAMETER Experiment Name: At_Far-red-induction_P Parameter: Light Value: Far-red vs. White
  misc_feature: MA Experiment 20001247 PARAMETER Experiment Name: At_Far-red-induction_P Parameter: Organism Value: A. thaliana
  misc_feature: MA Experiment 20001247 PARAMETER Experiment Name: At_Far-red-induction_P Parameter: Plant Line Value: Columbia
  misc_feature: MA Experiment 20001247 PARAMETER Experiment Name: At_Far-red-induction_P Parameter: Timepoint (hr) Value: 1
  misc_feature: MA Experiment 20001247 PARAMETER Experiment Name: At_Far-red-induction_P Parameter: Tissue Value: Whole Plant
  misc_feature: MA Experiment ID: 20001450 Result: Up-regulated in Transcription
  misc_feature: MA Experiment 20001450 PARAMETER Experiment Name: At_Far-red-induction_P Parameter: Age (day) Value: 7
  misc_feature: MA Experiment 20001450 PARAMETER Experiment Name: At_Far-red-induction_P Parameter: Light Value: Far-red vs. White
  misc_feature: MA Experiment 20001450 PARAMETER Experiment Name: At_Far-red-induction_P Parameter: Organism Value: A. thaliana
  misc_feature: MA Experiment 20001450 PARAMETER Experiment Name: At_Far-red-induction_P Parameter: Plant Line Value: Columbia
  misc_feature: MA Experiment 20001450 PARAMETER Experiment Name: At_Far-red-induction_P Parameter: Timepoint (hr) Value: 8
  misc_feature: MA Experiment 20001450 PARAMETER Experiment Name: At_Far-red-induction_P Parameter: Tissue Value: Whole Plant
  misc_feature: MA Experiment ID: 20001555 Result: Down-regulated in Transcription
  misc_feature: MA Experiment 20001555 PARAMETER Experiment Name: At_Drought_Soil_Dry_P Parameter: Age (day) Value: 24
  misc_feature: MA Experiment 20001555 PARAMETER Experiment Name: At_Drought_Soil_Dry_P Parameter: Organism Value: A. thaliana
  misc_feature: MA Experiment 20001555 PARAMETER Experiment Name: At_Drought_Soil_Dry_P Parameter: Plant Line Value: WS
  misc_feature: MA Experiment 20001555 PARAMETER Experiment Name: At_Drought_Soil_Dry_P Parameter: Post Timepoint (hr) Value: None
  misc_feature: MA Experiment 20001555 PARAMETER Experiment Name: At_Drought_Soil_Dry_P Parameter: Post-Treatment Value: None
  misc_feature: MA Experiment 20001555 PARAMETER Experiment Name: At_Drought_Soil_Dry_P Parameter: Timepoint (day) Value: 10
  misc_feature: MA Experiment 20001555 PARAMETER Experiment Name: At_Drought_Soil_Dry_P Parameter: Treatment Value: Drought vs. No Drought
  misc_feature: MA Experiment ID: 20001556 Result: Down-regulated in Transcription
  misc_feature: MA Experiment 20001556 PARAMETER Experiment Name: At_Drought_Soil_Dry_P Parameter: Age (day) Value: 26
  misc_feature: MA Experiment 20001556 PARAMETER Experiment Name: At_Drought_Soil_Dry_P Parameter: Organism Value: A. thaliana
  misc_feature: MA Experiment 20001556 PARAMETER Experiment Name: At_Drought_Soil_Dry_P Parameter: Plant Line Value: WS
  misc_feature: MA Experiment 20001556 PARAMETER Experiment Name: At_Drought_Soil_Dry_P Parameter: Post Timepoint (hr) Value: None
  misc_feature: MA Experiment 20001556 PARAMETER Experiment Name: At_Drought_Soil_Dry_P Parameter: Post-Treatment Value: None
  misc_feature: MA Experiment 20001556 PARAMETER Experiment Name: At_Drought_Soil_Dry_P Parameter: Timepoint (day) Value: 12
  misc_feature: MA Experiment 20001556 PARAMETER Experiment Name: At_Drought_Soil_Dry_P Parameter: Treatment Value: Drought vs. No Drought
  misc_feature: MA Experiment ID: 20001557 Result: Up-regulated in Transcription
  misc_feature: MA Experiment 20001557 PARAMETER Experiment Name: At_Drought_Soil_Dry_P Parameter: Age (day) Value: 27
  misc_feature: MA Experiment 20001557 PARAMETER Experiment Name: At_Drought_Soil_Dry_P Parameter: Organism Value: A. thaliana
  misc_feature: MA Experiment 20001557 PARAMETER Experiment Name: At_Drought_Soil_Dry_P Parameter: Plant Line Value: WS
  misc_feature: MA Experiment 20001557 PARAMETER Experiment Name: At_Drought_Soil_Dry_P Parameter: Post Timepoint (hr) Value: 3
  misc_feature: MA Experiment 20001557 PARAMETER Experiment Name: At_Drought_Soil_Dry_P Parameter: Post-Treatment Value: Re-Water vs. No Drought
  misc_feature: MA Experiment 20001557 PARAMETER Experiment Name: At_Drought_Soil_Dry_P Parameter: Timepoint (day) Value: 13
  misc_feature: MA Experiment 20001557 PARAMETER Experiment Name: At_Drought_Soil_Dry_P Parameter: Treatment Value: Drought vs. No Drought
  misc_feature: MA Experiment ID: 20001558 Result: Up-regulated in Transcription
  misc_feature: MA Experiment 20001558 PARAMETER Experiment Name: At_Drought_Soil_Dry_P Parameter: Age (day) Value: 27
  misc_feature: MA Experiment 20001558 PARAMETER Experiment Name: At_Drought_Soil_Dry_P Parameter: Organism Value: A. thaliana
  misc_feature: MA Experiment 20001558 PARAMETER Experiment Name: At_Drought_Soil_Dry_P Parameter: Plant Line Value: WS
  misc_feature: MA Experiment 20001558 PARAMETER Experiment Name: At_Drought_Soil_Dry_P Parameter: Post Timepoint (hr) Value: 6
  misc_feature: MA Experiment 20001558 PARAMETER Experiment Name: At_Drought_Soil_Dry_P Parameter: Post-Treatment Value: Re-Water vs. No Drought
  misc_feature: MA Experiment 20001558 PARAMETER Experiment Name: At_Drought_Soil_Dry_P Parameter: Timepoint (day) Value: 13
  misc_feature: MA Experiment 20001558 PARAMETER Experiment Name: At_Drought_Soil_Dry_P Parameter: Treatment Value: Drought vs. No Drought
  misc_feature: MA Experiment ID: 20001560 Result: Up-regulated in Transcription
  misc_feature: MA Experiment 20001560 PARAMETER Experiment Name: At_Drought_Soil_Dry_P Parameter: Age (day) Value: 28
  misc_feature: MA Experiment 20001560 PARAMETER Experiment Name: At_Drought_Soil_Dry_P Parameter: Organism Value: A. thaliana
  misc_feature: MA Experiment 20001560 PARAMETER Experiment Name: At_Drought_Soil_Dry_P Parameter: Plant Line Value: WS
  misc_feature: MA Experiment 20001560 PARAMETER Experiment Name: At_Drought_Soil_Dry_P Parameter: Post Timepoint (hr) Value: None
  misc_feature: MA Experiment 20001560 PARAMETER Experiment Name: At_Drought_Soil_Dry_P Parameter: Post-Treatment Value: None
  misc_feature: MA Experiment 20001560 PARAMETER Experiment Name: At_Drought_Soil_Dry_P Parameter: Timepoint (day) Value: 14
  misc_feature: MA Experiment 20001560 PARAMETER Experiment Name: At_Drought_Soil_Dry_P Parameter: Treatment Value: Drought vs. No Drought
  misc_feature: MA Experiment ID: 20001904 Result: Down-regulated in Transcription
  misc_feature: MA Experiment 20001904 PARAMETER Experiment Name: At_Drought_Reproduction_P Parameter: Age (day) Value: 37
  misc_feature: MA Experiment 20001904 PARAMETER Experiment Name: At_Drought_Reproduction_P Parameter: Organism Value: A. thaliana
  misc_feature: MA Experiment 20001904 PARAMETER Experiment Name: At_Drought_Reproduction_P Parameter: Plant Line Value: WS
  misc_feature: MA Experiment 20001904 PARAMETER Experiment Name: At_Drought_Reproduction_P Parameter: Timepoint (day) Value: 7
  misc_feature: MA Experiment 20001904 PARAMETER Experiment Name: At_Drought_Reproduction_P Parameter: Tissue Value: Rosettes
  misc_feature: MA Experiment 20001904 PARAMETER Experiment Name: At_Drought_Reproduction_P Parameter: Treatment Value: Drought vs. No Drought
  misc_feature: MA Experiment ID: 20001906 Result: Down-regulated in Transcription
  misc_feature: MA Experiment 20001906 PARAMETER Experiment Name: At_Drought_Reproduction_P Parameter: Age (day) Value: 35
  misc_feature: MA Experiment 20001906 PARAMETER Experiment Name: At_Drought_Reproduction_P Parameter: Organism Value: A. thaliana
  misc_feature: MA Experiment 20001906 PARAMETER Experiment Name: At_Drought_Reproduction_P Parameter: Plant Line Value: WS
  misc_feature: MA Experiment 20001906 PARAMETER Experiment Name: At_Drought_Reproduction_P Parameter: Timepoint (day) Value: 5
  misc_feature: MA Experiment 20001906 PARAMETER Experiment Name: At_Drought_Reproduction_P Parameter: Tissue Value: Siliques
  misc_feature: MA Experiment 20001906 PARAMETER Experiment Name: At_Drought_Reproduction_P Parameter: Treatment Value: Drought vs. No Drought
  misc_feature: MA Experiment ID: 20001907 Result: Down-regulated in Transcription
  misc_feature: MA Experiment 20001907 PARAMETER Experiment Name: At_Drought_Reproduction_P Parameter: Age (day) Value: 37
  misc_feature: MA Experiment 20001907 PARAMETER Experiment Name: At_Drought_Reproduction_P Parameter: Organism Value: A. thaliana
  misc_feature: MA Experiment 20001907 PARAMETER Experiment Name: At_Drought_Reproduction_P Parameter: Plant Line Value: WS
  misc_feature: MA Experiment 20001907 PARAMETER Experiment Name: At_Drought_Reproduction_P Parameter: Timepoint (day) Value: 7
  misc_feature: MA Experiment 20001907 PARAMETER Experiment Name: At_Drought_Reproduction_P Parameter: Tissue Value: Siliques
  misc_feature: MA Experiment 20001907 PARAMETER Experiment Name: At_Drought_Reproduction_P Parameter: Treatment Value: Drought vs. No Drought
  misc_feature: MA Experiment ID: 20001910 Result: Down-regulated in Transcription
  misc_feature: MA Experiment 20001910 PARAMETER Experiment Name: At_Drought_Reproduction_P Parameter: Age (day) Value: 37
  misc_feature: MA Experiment 20001910 PARAMETER Experiment Name: At_Drought_Reproduction_P Parameter: Organism Value: A. thaliana
  misc_feature: MA Experiment 20001910 PARAMETER Experiment Name: At_Drought_Reproduction_P Parameter: Plant Line Value: WS
  misc_feature: MA Experiment 20001910 PARAMETER Experiment Name: At_Drought_Reproduction_P Parameter: Timepoint (day) Value: 7
  misc_feature: MA Experiment 20001910 PARAMETER Experiment Name: At_Drought_Reproduction_P Parameter: Tissue Value: Flowers
  misc_feature: MA Experiment 20001910 PARAMETER Experiment Name: At_Drought_Reproduction_P Parameter: Treatment Value: Drought vs. No Drought
  misc_feature: MA Experiment ID: 20001911 Result: Down-regulated in Transcription
  misc_feature: MA Experiment 20001911 PARAMETER Experiment Name: At_Drought_Reproduction_P Parameter: Age (day) Value: 40
  misc_feature: MA Experiment 20001911 PARAMETER Experiment Name: At_Drought_Reproduction_P Parameter: Organism Value: A. thaliana
  misc_feature: MA Experiment 20001911 PARAMETER Experiment Name: At_Drought_Reproduction_P Parameter: Plant Line Value: WS
  misc_feature: MA Experiment 20001911 PARAMETER Experiment Name: At_Drought_Reproduction_P Parameter: Timepoint (day) Value: 10
  misc_feature: MA Experiment 20001911 PARAMETER Experiment Name: At_Drought_Reproduction_P Parameter: Tissue Value: Flowers
  misc_feature: MA Experiment 20001911 PARAMETER Experiment Name: At_Drought_Reproduction_P Parameter: Treatment Value: Drought vs. No Drought
aaatctcacaaaccaatctaaacatcaaagacaaaaaccaaacctctttcactattacacttttcctcaaaaaaaagaaaaatgtatttgttagtgtttaaactctttctatttttgtctcttcttcaaatctctgtctctgctagaaacctagcttcacaagaaccaaaccagtttcaactactcaagtaccacaaaggagctcttctctccggcaaaatctccgttaacctaatctggtacggcaaattcaaaccatctcaaagagcaatcatctccgacttcattacctcactcacacacacttctcctacgtccaaaactctccaccaaccatctgttgccacgtggtggaaaaccacagaaaaatactacaaactcgcaacacccagcaaaaactcatcacctctgtctctaactctcgggaaacaaatcatcgacgagtcttgctctctaggaaaatctttaaccgataaaaagattcaaaccctagcttcgaaaggagaccaacgcaacgccatcaacgtcgttttgacttcagctgacgttacggttacaggatttggtatgagtcgttgcgggactcacggacacgctcgtggtttaggtaaacgtggctccaagtttgcttacatttgggttggaaactctgagacacaatgtcctggtcaatgcgcgtggcctttccacgcgccggtgtacggtccacagagtccaccactagtggcaccaaacaatgacgtgggactcgatgggatggttattaacttagctagtcttttagctggaaccgcaacgaacccttttggtaatggttactatcaaggtccacaaaacgcaccgcttgaagctgcttctgcttgtcctggcgtttatggtaaaggagcttatcctggttacgctggagatttgcttgtggatactacaacgggaggtagttttaatgcgtatggtgcaaacggcaggaagtttttgcttcctgctttgtatgatcctacgacgtcggcttgctctactatggtctgaatactaaaaaaaagtccaatgtttggtctttggtagtagaaaataatattctagcgtaattcttttgttatgtttggttacaaattctagtataattcaatttattcattaatattattctcatttttcccttcatgttgtatgactgaaatcttgtcgcttggactataatttaacggaatattatt

SEQ ID NO: 26705 - protein, 314 aa, Arabidopsis thaliana
  peptide (1)..(314): Ceres Seq. ID no. 12394984
  misc_feature (35)..(314): Pfam Name: Phosphate-induced protein 1 conserved region Pfam Description: Phosphate-induced protein 1 conserved region
  misc_feature (35)..(313): Homolog of NCBI NO: 37533672 NR Description: putative phosphate-induced protein
  misc_feature (137)..(313): Homolog of NCBI NO: 13194680 NR Description: phosphate-induced protein 1-like protein
  misc_feature (43)..(314): Homolog of NCBI NO: 15242420 NR Description: putative protein
  misc_feature (85)..(314): Homolog of NCBI NO: 31074969 NR Description: erg-1 [Solanum tuberosum]
  misc_feature (1)..(245): Homolog of NCBI NO: 11762144 NR Description: At1g35140 [Arabidopsis thaliana]
  misc_feature (6)..(314): Homolog of NCBI NO: 15237656 NR Description: phi-1-like protein
  misc_feature (1)..(313): Homolog of NCBI NO: 15219504 NR Description: phosphate-induced (phi-1) protein, putative
  misc_feature (5)..(314): Homolog of NCBI NO: 3759184 NR Description: phi-1 [Nicotiana tabacum]
  misc_feature (1)..(314): Homolog of NCBI NO: 21593043 NR Description: putative phi-1-like phosphate-induced protein
  misc_feature (1)..(314): Homolog of NCBI NO: 15236667 NR Description: putative phi-1-like phosphate-induced protein
MYLLVFKLFLFLSLLQISVSARNLASQEPNQFQLLKYHKGALLSGKISVNLIWYGKFKPSQRAIISDFITSLTHTSPTSKTLHQPSVATWWKTTEKYYKLATPSKNSSPLSLTLGKQIIDESCSLGKSLTDKKIQTLASKGDQRNAINVVLTSADVTVTGFGMSRCGTHGHARGLGKRGSKFAYIWVGNSETQCPGQCAWPFHAPVYGPQSPPLVAPNNDVGLDGMVINLASLLAGTATNPFGNGYYQGPQNAPLEAASACPGVYGKGAYPGYAGDLLVDTTTGGSFNAYGANGRKFLLPALYDPTTSACSTMV

SEQ ID NO: 26706 - DNA, 1161 bp, Arabidopsis thaliana
  misc_feature (1)..(1161): Ceres Seq. ID no. 12370808
  misc_feature: MA Experiment ID: 108433 Result: Up-regulated in Transcription
  misc_feature: MA Experiment 108433 PARAMETER Experiment Name: At_rhl_Mutant2_cDNA_P Parameter: Age (day) Value: 7
  misc_feature: MA Experiment 108433 PARAMETER Experiment Name: At_rhl_Mutant2_cDNA_P Parameter: Organism Value: A. thaliana
  misc_feature: MA Experiment 108433 PARAMETER Experiment Name: At_rhl_Mutant2_cDNA_P Parameter: Plant Line Value: rhl Mutant vs. wt landsburg
  misc_feature: MA Experiment 108433 PARAMETER Experiment Name: At_rhl_Mutant2_cDNA_P Parameter: Tissue Value: Roots
  misc_feature: MA Experiment ID: 108434 Result: Down-regulated in Transcription
  misc_feature: MA Experiment 108434 PARAMETER Experiment Name: At_Root_Tips_cDNA_P Parameter: Tissue Value: Root Tips
  misc_feature: MA Experiment ID: 108435 Result: Up-regulated in Transcription
  misc_feature: MA Experiment 108435 PARAMETER Experiment Name: At_stm_Mutants_cDNA_P Parameter: Plant Line Value: wt Landsburg vs stm
  misc_feature: MA Experiment 108435 PARAMETER Experiment Name: At_stm_Mutants_cDNA_P Parameter: Tissue Value: Shoot Apical Meristem Region
  misc_feature: MA Experiment ID: 108462 Result: Up-regulated in Transcription
  misc_feature: MA Experiment 108462 PARAMETER Experiment Name: At_Germinating_Seeds_cDNA_P Parameter: Age (day) Value: 2 vs. 0
  misc_feature: MA Experiment 108462 PARAMETER Experiment Name: At_Germinating_Seeds_cDNA_P Parameter: Tissue Value: Germinating Seeds
  misc_feature: MA Experiment ID: 108463 Result: Up-regulated in Transcription
  misc_feature: MA Experiment 108463 PARAMETER Experiment Name: At_Germinating_Seeds_cDNA_P Parameter: Age (day) Value: 3 vs. 0
  misc_feature: MA Experiment 108463 PARAMETER Experiment Name: At_Germinating_Seeds_cDNA_P Parameter: Tissue Value: Germinating Seeds
  misc_feature: MA Experiment ID: 108464 Result: Up-regulated in Transcription
  misc_feature: MA Experiment 108464 PARAMETER Experiment Name: At_Germinating_Seeds_cDNA_P Parameter: Age (day) Value: 4 vs. 0
  misc_feature: MA Experiment 108464 PARAMETER Experiment Name: At_Germinating_Seeds_cDNA_P Parameter: Tissue Value: Germinating Seeds
  misc_feature: MA Experiment ID: 108474 Result: Up-regulated in Transcription
  misc_feature: MA Experiment 108474 PARAMETER Experiment Name: At_Drought_Flowers_cDNA_P Parameter: Timepoint (hr) Value: null
  misc_feature: MA Experiment 108474 PARAMETER Experiment Name: At_Drought_Flowers_cDNA_P Parameter: Treatment Value: Drought vs. No Drought
  misc_feature: MA Experiment ID: 108488 Result: Down-regulated in Transcription
  misc_feature: MA Experiment ID: 108561 Result: Down-regulated in Transcription
  misc_feature: MA Experiment 108561 PARAMETER Experiment Name: At_100uM_ABA_cDNA_P Parameter: Timepoint (hr) Value: 6
  misc_feature: MA Experiment 108561 PARAMETER Experiment Name: At_100uM_ABA_cDNA_P Parameter: Tissue Value: Aerial
  misc_feature: MA Experiment 108561 PARAMETER Experiment Name: At_100uM_ABA_cDNA_P Parameter: Treatment Value: 100uM ABA vs. No Treatment
  misc_feature: MA Experiment ID: 108574 Result: Down-regulated in Transcription
  misc_feature: MA Experiment 108574 PARAMETER Experiment Name: At_Wounding__cDNA_P Parameter: Timepoint (hr) Value: 1
  misc_feature: MA Experiment 108574 PARAMETER Experiment Name: At_Wounding__cDNA_P Parameter: Tissue Value: Aerial
  misc_feature: MA Experiment 108574 PARAMETER Experiment Name: At_Wounding__cDNA_P Parameter: Treatment Value: Wounding vs. No Wounding
  misc_feature: MA Experiment ID: 108577 Result: Down-regulated in Transcription
  misc_feature: MA Experiment 108577 PARAMETER Experiment Name: At_42deg_Heat_cDNA_P Parameter: Temperature (deg C) Value: 42 vs. 22
  misc_feature: MA Experiment 108577 PARAMETER Experiment Name: At_42deg_Heat_cDNA_P Parameter: Timepoint (hr) Value: 6
  misc_feature: MA Experiment 108577 PARAMETER Experiment Name: At_42deg_Heat_cDNA_P Parameter: Tissue Value: Aerial
  misc_feature: MA Experiment ID: 108579 Result: Down-regulated in Transcription
  misc_feature: MA Experiment 108579 PARAMETER Experiment Name: At_4deg_Cold_cDNA_P Parameter: Temperature (deg C) Value: 4 vs. 22
  misc_feature: MA Experiment 108579 PARAMETER Experiment Name: At_4deg_Cold_cDNA_P Parameter: Timepoint (hr) Value: 6
  misc_feature: MA Experiment 108579 PARAMETER Experiment Name: At_4deg_Cold_cDNA_P Parameter: Tissue Value: Aerial
  misc_feature: MA Experiment ID: 108594 Result: Down-regulated in Transcription
  misc_feature: MA Experiment 108594 PARAMETER Experiment Name: At_Ler-rhl_Root_cDNA_P Parameter: Plant Line Value: null
  misc_feature: MA Experiment ID: 108595 Result: Up-regulated in Transcription
  misc_feature: MA Experiment 108595 PARAMETER Experiment Name: At_Ler-pi_Ovule_cDNA_P Parameter: Plant Line Value: null
  misc_feature: MA Experiment ID: 108668 Result: Up-regulated in Transcription
  misc_feature: MA Experiment 108668 PARAMETER Experiment Name: At_2mM_SA_cDNA_P Parameter: Plant Line Value: WS
  misc_feature: MA Experiment 108668 PARAMETER Experiment Name: At_2mM_SA_cDNA_P Parameter: Timepoint (hr) Value: 6
  misc_feature: MA Experiment 108668 PARAMETER Experiment Name: At_2mM_SA_cDNA_P Parameter: Treatment Value: 2mM SA vs. No Treatment
  misc_feature: MA Experiment ID: 20000068 Result: Up-regulated in Transcription
  misc_feature: MA Experiment ID: 20000069 Result: Up-regulated in Transcription
  misc_feature: MA Experiment 20000069 PARAMETER Experiment Name: At_100uM_ABA_Mutants_cDNA_P Parameter: Plant Line Value: CS23
  misc_feature: MA Experiment 20000069 PARAMETER Experiment Name: At_100uM_ABA_Mutants_cDNA_P Parameter: Timepoint (hr) Value: 6
  misc_feature: MA Experiment 20000069 PARAMETER Experiment Name: At_100uM_ABA_Mutants_cDNA_P Parameter: Tissue Value: Aerial
  misc_feature: MA Experiment 20000069 PARAMETER Experiment Name: At_100uM_ABA_Mutants_cDNA_P Parameter: Treatment Value: 100uM ABA vs. No Treatment
  misc_feature: MA Experiment ID: 20000070 Result: Up-regulated in Transcription
  misc_feature: MA Experiment 20000070 PARAMETER Experiment Name: At_100uM_ABA_Mutants_cDNA_P Parameter: Plant Line Value: CS24
  misc_feature: MA Experiment 20000070 PARAMETER Experiment Name: At_100uM_ABA_Mutants_cDNA_P Parameter: Timepoint (hr) Value: 6
  misc_feature: MA Experiment 20000070 PARAMETER Experiment Name: At_100uM_ABA_Mutants_cDNA_P Parameter: Tissue Value: Aerial
  misc_feature: MA Experiment 20000070 PARAMETER Experiment Name: At_100uM_ABA_Mutants_cDNA_P Parameter: Treatment Value: 100uM ABA vs. No Treatment
  misc_feature: MA Experiment ID: 20000071 Result: Up-regulated in Transcription
  misc_feature: MA Experiment 20000071 PARAMETER Experiment Name: At_100uM_ABA_Mutants_cDNA_P Parameter: Plant Line Value: CS8104
  misc_feature: MA Experiment 20000071 PARAMETER Experiment Name: At_100uM_ABA_Mutants_cDNA_P Parameter: Timepoint (hr) Value: 6
  misc_feature: MA Experiment 20000071 PARAMETER Experiment Name: At_100uM_ABA_Mutants_cDNA_P Parameter: Tissue Value: Aerial
  misc_feature: MA Experiment 20000071 PARAMETER Experiment Name: At_100uM_ABA_Mutants_cDNA_P Parameter: Treatment Value: 100uM ABA vs. No Treatment
  misc_feature: MA Experiment ID: 20000086 Result: Up-regulated in Transcription
  misc_feature: MA Experiment 20000086 PARAMETER Experiment Name: At_100uM_ABA_Mutants_cDNA_P Parameter: Plant Line Value: CS22
  misc_feature: MA Experiment 20000086 PARAMETER Experiment Name: At_100uM_ABA_Mutants_cDNA_P Parameter: Timepoint (hr) Value: 6
  misc_feature: MA Experiment 20000086 PARAMETER Experiment Name: At_100uM_ABA_Mutants_cDNA_P Parameter: Tissue Value: Aerial
  misc_feature: MA Experiment 20000086 PARAMETER Experiment Name: At_100uM_ABA_Mutants_cDNA_P Parameter: Treatment Value: 100uM ABA vs. No Treatment
  misc_feature: MA Experiment ID: 20000090 Result: Up-regulated in Transcription
  misc_feature: MA Experiment ID: 20000111 Result: Down-regulated in Transcription
  misc_feature: MA Experiment 20000111 PARAMETER Experiment Name: At_42deg_Heat_cDNA_P Parameter: Temperature (deg C) Value: 42 vs. 22
  misc_feature: MA Experiment 20000111 PARAMETER Experiment Name: At_42deg_Heat_cDNA_P Parameter: Timepoint (hr) Value: 6
  misc_feature: MA Experiment 20000111 PARAMETER Experiment Name: At_42deg_Heat_cDNA_P Parameter: Tissue Value: Aerial
  misc_feature: MA Experiment ID: 20000117 Result: Up-regulated in Transcription
  misc_feature: MA Experiment 20000117 PARAMETER Experiment Name: At_100uM_ABA_Mutants_cDNA_P Parameter: Plant Line Value: Columbia
  misc_feature: MA Experiment 20000117 PARAMETER Experiment Name: At_100uM_ABA_Mutants_cDNA_P Parameter: Timepoint (hr) Value: 6
  misc_feature: MA Experiment 20000117 PARAMETER Experiment Name: At_100uM_ABA_Mutants_cDNA_P Parameter: Tissue Value: Aerial
  misc_feature: MA Experiment 20000117 PARAMETER Experiment Name: At_100uM_ABA_Mutants_cDNA_P Parameter: Treatment Value: 100uM ABA vs. No Treatment
  misc_feature: MA Experiment ID: 20000169 Result: Down-regulated in Transcription
  misc_feature: MA Experiment 20000169 PARAMETER Experiment Name: At_100uM_ABA_P Parameter: Age (day) Value: 14
  misc_feature: MA Experiment 20000169 PARAMETER Experiment Name: At_100uM_ABA_P Parameter: Organism Value: A. thaliana
  misc_feature: MA Experiment 20000169 PARAMETER Experiment Name: At_100uM_ABA_P Parameter: Plant Line Value: WS
  misc_feature: MA Experiment 20000169 PARAMETER Experiment Name: At_100uM_ABA_P Parameter: Timepoint (hr) Value: 6
  misc_feature: MA Experiment 20000169 PARAMETER Experiment Name: At_100uM_ABA_P Parameter: Tissue Value: Aerial
  misc_feature: MA Experiment 20000169 PARAMETER Experiment Name: At_100uM_ABA_P Parameter: Treatment Value: 100uM ABA vs. No Treatment
  misc_feature: MA Experiment ID: 20000173 Result: Down-regulated in Transcription
  misc_feature: MA Experiment 20000173 PARAMETER Experiment Name: At_42deg_Heat_P Parameter: Age (day) Value: 14
  misc_feature: MA Experiment 20000173 PARAMETER Experiment Name: At_42deg_Heat_P Parameter: Organism Value: A. thaliana
  misc_feature: MA Experiment 20000173 PARAMETER Experiment Name: At_42deg_Heat_P Parameter: Plant Line Value: WS
  misc_feature: MA Experiment 20000173 PARAMETER Experiment Name: At_42deg_Heat_P Parameter: Temperature (deg C) Value: 42 vs. 22
  misc_feature: MA Experiment 20000173 PARAMETER Experiment Name: At_42deg_Heat_P Parameter: Timepoint (hr) Value: 6
  misc_feature: MA Experiment 20000173 PARAMETER Experiment Name: At_42deg_Heat_P Parameter: Tissue Value: Aerial
  misc_feature: MA Experiment ID: 20000180 Result: Up-regulated in Transcription
  misc_feature: MA Experiment 20000180 PARAMETER Experiment Name: At_Germinating_Seeds_P Parameter: Age (hr) Value: 24 vs. 0
  misc_feature: MA Experiment 20000180 PARAMETER Experiment Name: At_Germinating_Seeds_P Parameter: Tissue Value: Germinating Seeds
  misc_feature: MA Experiment ID: 20000182 Result: Up-regulated in Transcription
  misc_feature: MA Experiment 20000182 PARAMETER Experiment Name: At_2mM_SA_P Parameter: Age (day) Value: 14
  misc_feature: MA Experiment 20000182 PARAMETER Experiment Name: At_2mM_SA_P Parameter: Organism Value: A. thaliana
  misc_feature: MA Experiment 20000182 PARAMETER Experiment Name: At_2mM_SA_P Parameter: Plant Line Value: WS
  misc_feature: MA Experiment 20000182 PARAMETER Experiment Name: At_2mM_SA_P Parameter: Timepoint (hr) Value: 6
  misc_feature: MA Experiment 20000182 PARAMETER Experiment Name: At_2mM_SA_P Parameter: Tissue Value: Aerial
  misc_feature: MA Experiment 20000182 PARAMETER Experiment Name: At_2mM_SA_P Parameter: Treatment Value: 2mM SA vs. No Treatment
  misc_feature: MA Experiment ID: 20000213 Result: Down-regulated in Transcription
  misc_feature: MA Experiment 20000213 PARAMETER Experiment Name: At_4deg_Cold_P Parameter: Timepoint (hr) Value: 2
  misc_feature: MA Experiment ID: 20000214 Result: Down-regulated in Transcription
  misc_feature: MA Experiment 20000214 PARAMETER Experiment Name: At_4deg_Cold_P Parameter: Timepoint (hr) Value: 6
  misc_feature: MA Experiment ID: 20000234 Result: Down-regulated in Transcription
  misc_feature: MA Experiment 20000234 PARAMETER Experiment Name: At_Siliques_P Parameter: Age (day) Value: 21
  misc_feature: MA Experiment 20000234 PARAMETER Experiment Name: At_Siliques_P Parameter: Organism Value: A. thaliana
  misc_feature: MA Experiment 20000234 PARAMETER Experiment Name: At_Siliques_P Parameter: Plant Line Value: WS
  misc_feature: MA Experiment 20000234 PARAMETER Experiment Name: At_Siliques_P Parameter: Tissue Value: Less Than 5mm Siliques vs. Whole Plant
  misc_feature: MA Experiment ID: 20000264 Result: Down-regulated in Transcription
  misc_feature: MA Experiment 20000264 PARAMETER Experiment Name: At_Open_Flower_P Parameter: Age (day) Value: 21
  misc_feature: MA Experiment 20000264 PARAMETER Experiment Name: At_Open_Flower_P Parameter: Plant Line Value: WS
  misc_feature: MA Experiment 20000264 PARAMETER Experiment Name: At_Open_Flower_P Parameter: Tissue Value: Open Flower vs. Whole Plant
  misc_feature: MA Experiment ID: 20000265 Result: Down-regulated in Transcription
  misc_feature: MA Experiment 20000265 PARAMETER Experiment Name: At_Open_Flower_P Parameter: Age (day) Value: 21
  misc_feature: MA Experiment 20000265 PARAMETER Experiment Name: At_Open_Flower_P Parameter: Plant Line Value: WS
  misc_feature: MA Experiment 20000265 PARAMETER Experiment Name: At_Open_Flower_P Parameter: Tissue Value: Closed Flower vs. Whole Plant
  misc_feature: MA Experiment ID: 20000267 Result: Down-regulated in Transcription
  misc_feature: MA Experiment 20000267 PARAMETER Experiment Name: At_Drought_P Parameter: Age (day) Value: 7
  misc_feature: MA Experiment 20000267 PARAMETER Experiment Name: At_Drought_P Parameter: Organism Value: A. thaliana
  misc_feature: MA Experiment 20000267 PARAMETER Experiment Name: At_Drought_P Parameter: Plant Line Value: WS
  misc_feature: MA Experiment 20000267 PARAMETER Experiment Name: At_Drought_P Parameter: Timepoint (hr) Value: 6
  misc_feature: MA Experiment 20000267 PARAMETER Experiment Name: At_Drought_P Parameter: Tissue Value: Whole Plant
  misc_feature: MA Experiment 20000267 PARAMETER Experiment Name: At_Drought_P Parameter: Treatment Value: Drought vs. No Drought
  misc_feature: MA Experiment ID: 20000269 Result: Down-regulated in Transcription
  misc_feature: MA Experiment 20000269 PARAMETER Experiment Name: At_1mM_KNO3_L-vs-H_Roots_P Parameter: Age (day) Value: 7,10,12
  misc_feature: MA Experiment 20000269 PARAMETER Experiment Name: At_1mM_KNO3_L-vs-H_Roots_P Parameter: Organism Value: A. thaliana
  misc_feature: MA Experiment 20000269 PARAMETER Experiment Name: At_1mM_KNO3_L-vs-H_Roots_P Parameter: Plant Line Value: WS
  misc_feature: MA Experiment 20000269 PARAMETER Experiment Name: At_1mM_KNO3_L-vs-H_Roots_P Parameter: Timepoint (day) Value: 7,10,12
  misc_feature: MA Experiment 20000269 PARAMETER Experiment Name: At_1mM_KNO3_L-vs-H_Roots_P Parameter: Tissue Value: Roots
  misc_feature: MA Experiment 20000269 PARAMETER Experiment Name: At_1mM_KNO3_L-vs-H_Roots_P Parameter: Treatment Value: 1mM KNO3 vs. 50mM KNO3
  misc_feature: MA Experiment ID: 20000436 Result: Down-regulated in Transcription
  misc_feature: MA Experiment 20000436 PARAMETER Experiment Name: At_Drought_P Parameter: Age (day) Value: 7
  misc_feature: MA Experiment 20000436 PARAMETER Experiment Name: At_Drought_P Parameter: Organism Value: A. thaliana
  misc_feature: MA Experiment 20000436 PARAMETER Experiment Name: At_Drought_P Parameter: Plant Line Value: WS
  misc_feature: MA Experiment 20000436 PARAMETER Experiment Name: At_Drought_P Parameter: Timepoint (hr) Value: 12
  misc_feature: MA Experiment 20000436 PARAMETER Experiment Name: At_Drought_P Parameter: Tissue Value: Whole Plant
  misc_feature: MA Experiment 20000436 PARAMETER Experiment Name: At_Drought_P Parameter: Treatment Value: Drought vs. No Drought
  misc_feature: MA Experiment ID: 20000437 Result: Down-regulated in Transcription
  misc_feature: MA Experiment 20000437 PARAMETER Experiment Name: At_Drought_P Parameter: Age (day) Value: 8
  misc_feature: MA Experiment 20000437 PARAMETER Experiment Name: At_Drought_P Parameter: Organism Value: A. thaliana
  misc_feature: MA Experiment 20000437 PARAMETER Experiment Name: At_Drought_P Parameter: Plant Line Value: WS
  misc_feature: MA Experiment 20000437 PARAMETER Experiment Name: At_Drought_P Parameter: Timepoint (hr) Value: 24
  misc_feature: MA Experiment 20000437 PARAMETER Experiment Name: At_Drought_P Parameter: Tissue Value: Whole Plant
  misc_feature: MA Experiment 20000437 PARAMETER Experiment Name: At_Drought_P Parameter: Treatment Value: Drought vs. No Drought
  misc_feature: MA Experiment ID: 20000438 Result: Down-regulated in Transcription
  misc_feature: MA Experiment 20000438 PARAMETER Experiment Name: At_Shoots__P Parameter: Age (day) Value: 14
  misc_feature: MA Experiment 20000438 PARAMETER Experiment Name: At_Shoots__P Parameter: Tissue Value: Shoots vs. Whole Plant
  misc_feature: MA Experiment ID: 20000445 Result: Down-regulated in Transcription
  misc_feature: MA Experiment 20000445 PARAMETER Experiment Name: At_100uM_NAA__P Parameter: Age (day) Value: 14
  misc_feature: MA Experiment 20000445 PARAMETER Experiment Name: At_100uM_NAA__P Parameter: Organism Value: A. thaliana
  misc_feature: MA Experiment 20000445 PARAMETER Experiment Name: At_100uM_NAA__P Parameter: Plant Line Value: WS
  misc_feature: MA Experiment 20000445 PARAMETER Experiment Name: At_100uM_NAA__P Parameter: Timepoint (hr) Value: 6
  misc_feature: MA Experiment 20000445 PARAMETER Experiment Name: At_100uM_NAA__P Parameter: Tissue Value: Aerial
  misc_feature: MA Experiment 20000445 PARAMETER Experiment Name: At_100uM_NAA__P Parameter: Treatment Value: 100uM NAA vs. No Treatment
  misc_feature: MA Experiment ID: 20000452 Result: Up-regulated in Transcription
  misc_feature: MA Experiment 20000452 PARAMETER Experiment Name: At_CS6879_Shoots-Roots_P Parameter: Age (day) Value: 14
  misc_feature: MA Experiment 20000452 PARAMETER Experiment Name: At_CS6879_Shoots-Roots_P Parameter: Organism Value: A. thaliana
  misc_feature: MA Experiment 20000452 PARAMETER Experiment Name: At_CS6879_Shoots-Roots_P Parameter: Plant Line Value: CS6879 vs. WS
  misc_feature: MA Experiment 20000452 PARAMETER Experiment Name: At_CS6879_Shoots-Roots_P Parameter: Tissue Value: Shoots
  misc_feature: MA Experiment ID: 20000456 Result: Down-regulated in Transcription
  misc_feature: MA Experiment 20000456 PARAMETER Experiment Name: At_100uM_BA_P Parameter: Age (day) Value: 14
  misc_feature: MA Experiment 20000456 PARAMETER Experiment Name: At_100uM_BA_P Parameter: Organism Value: A. thaliana
  misc_feature: MA Experiment 20000456 PARAMETER Experiment Name: At_100uM_BA_P Parameter: Plant Line Value: WS
  misc_feature: MA Experiment 20000456 PARAMETER Experiment Name: At_100uM_BA_P Parameter: Timepoint (hr) Value: 6
  misc_feature: MA Experiment 20000456 PARAMETER Experiment Name: At_100uM_BA_P Parameter: Tissue Value: Aerial
  misc_feature: MA Experiment 20000456 PARAMETER Experiment Name: At_100uM_BA_P Parameter: Treatment Value: 100uM BA vs. No Treatment
  misc_feature: MA Experiment ID: 20000495 Result: Up-regulated in Transcription
  misc_feature: MA Experiment 20000495 PARAMETER Experiment Name: At_Guard_Cells_P Parameter: Harvest Date Value: 8/2/2002
  misc_feature: MA Experiment 20000495 PARAMETER Experiment Name: At_Guard_Cells_P Parameter: Organism Value: A. thaliana
  misc_feature: MA Experiment 20000495 PARAMETER Experiment Name: At_Guard_Cells_P Parameter: Tissue Value: Guard Cells vs. Leaves
  misc_feature: MA Experiment ID: 20000496 Result: Up-regulated in Transcription
  misc_feature: MA Experiment 20000496 PARAMETER Experiment Name: At_Guard_Cells_P Parameter: Harvest Date Value: 7/19/2002
  misc_feature: MA Experiment 20000496 PARAMETER Experiment Name: At_Guard_Cells_P Parameter: Organism Value: Canola
  misc_feature: MA Experiment 20000496 PARAMETER Experiment Name: At_Guard_Cells_P Parameter: Tissue Value: Guard Cells vs. Leaves
  misc_feature: MA Experiment ID: 20000575 Result: Down-regulated in Transcription
  misc_feature: MA Experiment 20000575 PARAMETER Experiment Name: At_100uM_ABA_Mutants__P Parameter: Organism Value: A. thaliana
  misc_feature: MA Experiment 20000575 PARAMETER Experiment Name: At_100uM_ABA_Mutants__P Parameter: Plant Line Value: CS22
  misc_feature: MA Experiment 20000575 PARAMETER Experiment Name: At_100uM_ABA_Mutants__P Parameter: Timepoint (hr) Value: 6
  misc_feature: MA Experiment 20000575 PARAMETER Experiment Name: At_100uM_ABA_Mutants__P Parameter: Tissue Value: Whole Plant
  misc_feature: MA Experiment 20000575 PARAMETER Experiment Name: At_100uM_ABA_Mutants__P Parameter: Treatment Value: 1uM ABA vs. No Treatment
  misc_feature: MA Experiment ID: 20000709 Result: Down-regulated in Transcription
  misc_feature: MA Experiment 20000709 PARAMETER Experiment Name: At_15mM_NH4NO3_L-to-H_P Parameter: Age (hr) Value: 14
  misc_feature: MA Experiment 20000709 PARAMETER Experiment Name: At_15mM_NH4NO3_L-to-H_P Parameter: Organism Value: A. thaliana
  misc_feature: MA Experiment 20000709 PARAMETER Experiment Name: At_15mM_NH4NO3_L-to-H_P Parameter: Plant Line Value: WS
  misc_feature: MA Experiment 20000709 PARAMETER Experiment Name: At_15mM_NH4NO3_L-to-H_P Parameter: Timepoint (hr) Value: 4
  misc_feature: MA Experiment 20000709 PARAMETER Experiment Name: At_15mM_NH4NO3_L-to-H_P Parameter: Tissue Value: Aerial
  misc_feature: MA Experiment 20000709 PARAMETER Experiment Name: At_15mM_NH4NO3_L-to-H_P Parameter: Treatment Value: 15mM NH4NO3 vs. 30mM Mannitol
  misc_feature: MA Experiment ID: 20001248 Result: Up-regulated in Transcription
  misc_feature: MA Experiment 20001248 PARAMETER Experiment Name: At_Far-red-induction_P Parameter: Age (day) Value: 7
  misc_feature: MA Experiment 20001248 PARAMETER Experiment Name: At_Far-red-induction_P Parameter: Light Value: Far-red vs. White
  misc_feature: MA Experiment 20001248 PARAMETER Experiment Name: At_Far-red-induction_P Parameter: Organism Value: A. thaliana
  misc_feature: MA Experiment 20001248 PARAMETER Experiment Name: At_Far-red-induction_P Parameter: Plant Line Value: Columbia
  misc_feature: MA Experiment 20001248 PARAMETER Experiment Name: At_Far-red-induction_P Parameter: Timepoint (hr) Value: 4
  misc_feature: MA Experiment 20001248 PARAMETER Experiment Name: At_Far-red-induction_P Parameter: Tissue Value: Whole Plant
  misc_feature: MA Experiment ID: 20001451 Result: Up-regulated in Transcription
  misc_feature: MA Experiment 20001451 PARAMETER Experiment Name: At_Far-red-induction_P Parameter: Age (day) Value: 7
  misc_feature: MA Experiment 20001451 PARAMETER Experiment Name: At_Far-red-induction_P Parameter: Light Value: Far-red vs. White
  misc_feature: MA Experiment 20001451 PARAMETER Experiment Name: At_Far-red-induction_P Parameter: Organism Value: A. thaliana
  misc_feature: MA Experiment 20001451 PARAMETER Experiment Name: At_Far-red-induction_P Parameter: Plant Line Value: Columbia
  misc_feature: MA Experiment 20001451 PARAMETER Experiment Name: At_Far-red-induction_P Parameter: Timepoint (hr) Value: 24
  misc_feature: MA Experiment 20001451 PARAMETER Experiment Name: At_Far-red-induction_P Parameter: Tissue Value: Whole Plant
  misc_feature: MA Experiment ID: 20001457 Result: Down-regulated in Transcription
  misc_feature: MA Experiment 20001457 PARAMETER Experiment Name: At_50mM_NH4NO3_L-to-H_P Parameter: Age (day) Value: Undefined
  misc_feature: MA Experiment 20001457 PARAMETER Experiment Name: At_50mM_NH4NO3_L-to-H_P Parameter: Organism Value: Undefined
  misc_feature: MA Experiment 20001457 PARAMETER Experiment Name: At_50mM_NH4NO3_L-to-H_P Parameter: Plant Line Value: Undefined
  misc_feature: MA Experiment 20001457 PARAMETER Experiment Name: At_50mM_NH4NO3_L-to-H_P Parameter: Timepoint (hr) Value: 0.5
  misc_feature: MA Experiment 20001457 PARAMETER Experiment Name: At_50mM_NH4NO3_L-to-H_P Parameter: Tissue Value: Siliques
  misc_feature: MA Experiment 20001457 PARAMETER Experiment Name: At_50mM_NH4NO3_L-to-H_P Parameter: Treatment Value: 50mM NH4NO3 vs. 100mM Manitol
  misc_feature: MA Experiment ID: 20001554 Result: Down-regulated in Transcription
  misc_feature: MA Experiment 20001554 PARAMETER Experiment Name: At_Drought_Soil_Dry_P Parameter: Age (day) Value: 21
  misc_feature: MA Experiment 20001554 PARAMETER Experiment Name: At_Drought_Soil_Dry_P Parameter: Organism Value: A. thaliana
  misc_feature: MA Experiment 20001554 PARAMETER Experiment Name: At_Drought_Soil_Dry_P Parameter: Plant Line Value: WS
  misc_feature: MA Experiment 20001554 PARAMETER Experiment Name: At_Drought_Soil_Dry_P Parameter: Post Timepoint (hr) Value: None
  misc_feature: MA Experiment 20001554 PARAMETER Experiment Name: At_Drought_Soil_Dry_P Parameter: Post-Treatment Value: None
  misc_feature: MA Experiment 20001554 PARAMETER Experiment Name: At_Drought_Soil_Dry_P Parameter: Timepoint (day) Value: 7
  misc_feature: MA Experiment 20001554 PARAMETER Experiment Name: At_Drought_Soil_Dry_P Parameter: Treatment Value: Drought vs. No Drought
  misc_feature: MA Experiment ID: 20001555 Result: Down-regulated in Transcription
  misc_feature: MA Experiment 20001555 PARAMETER Experiment Name: At_Drought_Soil_Dry_P Parameter: Age (day) Value: 24
  misc_feature: MA Experiment 20001555 PARAMETER Experiment Name: At_Drought_Soil_Dry_P Parameter: Organism Value: A. thaliana
  misc_feature: MA Experiment 20001555 PARAMETER Experiment Name: At_Drought_Soil_Dry_P Parameter: Plant Line Value: WS
  misc_feature: MA Experiment 20001555 PARAMETER Experiment Name: At_Drought_Soil_Dry_P Parameter: Post Timepoint (hr) Value: None
  misc_feature: MA Experiment 20001555 PARAMETER Experiment Name: At_Drought_Soil_Dry_P Parameter: Post-Treatment Value: None
  misc_feature: MA Experiment 20001555 PARAMETER Experiment Name: At_Drought_Soil_Dry_P Parameter: Timepoint (day) Value: 10
  misc_feature: MA Experiment 20001555 PARAMETER Experiment Name: At_Drought_Soil_Dry_P Parameter: Treatment Value: Drought vs. No Drought
  misc_feature: MA Experiment ID: 20001556 Result: Down-regulated in Transcription
  misc_feature: MA Experiment 20001556 PARAMETER Experiment Name: At_Drought_Soil_Dry_P Parameter: Age (day) Value: 26
  misc_feature: MA Experiment 20001556 PARAMETER Experiment Name: At_Drought_Soil_Dry_P Parameter: Organism Value: A. thaliana
  misc_feature: MA Experiment 20001556 PARAMETER Experiment Name: At_Drought_Soil_Dry_P Parameter: Plant Line Value: WS
  misc_feature: MA Experiment 20001556 PARAMETER Experiment Name: At_Drought_Soil_Dry_P Parameter: Post Timepoint (hr) Value: None
  misc_feature: MA Experiment 20001556 PARAMETER Experiment Name: At_Drought_Soil_Dry_P Parameter: Post-Treatment Value: None
  misc_feature: MA Experiment 20001556 PARAMETER Experiment Name: At_Drought_Soil_Dry_P Parameter: Timepoint (day) Value: 12
  misc_feature: MA Experiment 20001556 PARAMETER Experiment Name: At_Drought_Soil_Dry_P Parameter: Treatment Value: Drought vs. No Drought
  misc_feature: MA Experiment ID: 20001559 Result: Down-regulated in Transcription
  misc_feature: MA Experiment 20001559 PARAMETER Experiment Name: At_Drought_Soil_Dry_P Parameter: Age (day) Value: 28
  misc_feature: MA Experiment 20001559 PARAMETER Experiment Name: At_Drought_Soil_Dry_P Parameter: Organism Value: A. thaliana
  misc_feature: MA Experiment 20001559 PARAMETER Experiment Name: At_Drought_Soil_Dry_P Parameter: Plant Line Value: WS
  misc_feature: MA Experiment 20001559 PARAMETER Experiment Name: At_Drought_Soil_Dry_P Parameter: Post Timepoint (hr) Value: 29
  misc_feature: MA Experiment 20001559 PARAMETER Experiment Name: At_Drought_Soil_Dry_P Parameter: Post-Treatment Value: Re-Water vs. No Drought
  misc_feature: MA Experiment 20001559 PARAMETER Experiment Name: At_Drought_Soil_Dry_P Parameter: Timepoint (day) Value: 14
  misc_feature: MA Experiment 20001559 PARAMETER Experiment Name: At_Drought_Soil_Dry_P Parameter: Treatment Value: Drought vs. No Drought
  misc_feature: MA Experiment ID: 20001560 Result: Down-regulated in Transcription
  misc_feature: MA Experiment 20001560 PARAMETER Experiment Name: At_Drought_Soil_Dry_P Parameter: Age (day) Value: 28
  misc_feature: MA Experiment 20001560 PARAMETER Experiment Name: At_Drought_Soil_Dry_P Parameter: Organism Value: A. thaliana
  misc_feature: MA Experiment 20001560 PARAMETER Experiment Name: At_Drought_Soil_Dry_P Parameter: Plant Line Value: WS
  misc_feature: MA Experiment 20001560 PARAMETER Experiment Name: At_Drought_Soil_Dry_P Parameter: Post Timepoint (hr) Value: None
  misc_feature: MA Experiment 20001560 PARAMETER Experiment Name: At_Drought_Soil_Dry_P Parameter: Post-Treatment Value: None
  misc_feature: MA Experiment 20001560 PARAMETER Experiment Name: At_Drought_Soil_Dry_P Parameter: Timepoint (day) Value: 14
  misc_feature: MA Experiment 20001560 PARAMETER Experiment Name: At_Drought_Soil_Dry_P Parameter: Treatment Value: Drought vs. No Drought
  misc_feature: MA Experiment ID: 20001760 Result: Down-regulated in Transcription
  misc_feature: MA Experiment 20001760 PARAMETER Experiment Name: At_50mM_NH4NO3_L-to-H_P Parameter: Timepoint (hr) Value: 2
  misc_feature: MA Experiment 20001760 PARAMETER Experiment Name: At_50mM_NH4NO3_L-to-H_P Parameter: Tissue Value: Siliques
  misc_feature: MA Experiment 20001760 PARAMETER Experiment Name: At_50mM_NH4NO3_L-to-H_P Parameter: Treatment Value: 50mM NH4NO3 vs 100mM Mannitol
  misc_feature: MA Experiment ID: 20001761 Result: Up-regulated in Transcription
  misc_feature: MA Experiment 20001761 PARAMETER Experiment Name: At_50mM_NH4NO3_L-to-H_P Parameter: Timepoint (hr) Value: 4
  misc_feature: MA Experiment 20001761 PARAMETER Experiment Name: At_50mM_NH4NO3_L-to-H_P Parameter: Tissue Value: Siliques
  misc_feature: MA Experiment 20001761 PARAMETER Experiment Name: At_50mM_NH4NO3_L-to-H_P Parameter: Treatment Value: 50mM NH4NO3 vs 100mM Mannitol
  misc_feature: MA Experiment ID: 20001770 Result: Down-regulated in Transcription
  misc_feature: MA Experiment 20001770 PARAMETER Experiment Name: At_Far-red-enriched-adult_P Parameter: Age (day) Value: 28
  misc_feature: MA Experiment 20001770 PARAMETER Experiment Name: At_Far-red-enriched-adult_P Parameter: Light Value: Far-red enriched vs. White
  misc_feature: MA Experiment 20001770 PARAMETER Experiment Name: At_Far-red-enriched-adult_P Parameter: Organism Value: A. thaliana
  misc_feature: MA Experiment 20001770 PARAMETER Experiment Name: At_Far-red-enriched-adult_P Parameter: Plant Line Value: Columbia
  misc_feature: MA Experiment 20001770 PARAMETER Experiment Name: At_Far-red-enriched-adult_P Parameter: Timepoint (hr) Value: 8
  misc_feature: MA Experiment 20001770 PARAMETER Experiment Name: At_Far-red-enriched-adult_P Parameter: Tissue Value: Aerial
  misc_feature: MA Experiment ID: 20001904 Result: Down-regulated in Transcription
  misc_feature: MA Experiment 20001904 PARAMETER Experiment Name: At_Drought_Reproduction_P Parameter: Age (day) Value: 37
  misc_feature: MA Experiment 20001904 PARAMETER Experiment Name: At_Drought_Reproduction_P Parameter: Organism Value: A. thaliana
  misc_feature: MA Experiment 20001904 PARAMETER Experiment Name: At_Drought_Reproduction_P Parameter: Plant Line Value: WS
  misc_feature: MA Experiment 20001904 PARAMETER Experiment Name: At_Drought_Reproduction_P Parameter: Timepoint (day) Value: 7
  misc_feature: MA Experiment 20001904 PARAMETER Experiment Name: At_Drought_Reproduction_P Parameter: Tissue Value: Rosettes
  misc_feature: MA Experiment 20001904 PARAMETER Experiment Name: At_Drought_Reproduction_P Parameter: Treatment Value: Drought vs. No Drought
  misc_feature: MA Experiment ID: 20001905 Result: Down-regulated in Transcription
  misc_feature: MA Experiment 20001905 PARAMETER Experiment Name: At_Drought_Reproduction_P Parameter: Age (day) Value: 40
  misc_feature: MA Experiment 20001905 PARAMETER Experiment Name: At_Drought_Reproduction_P Parameter: Organism Value: A. thaliana
  misc_feature: MA Experiment 20001905 PARAMETER Experiment Name: At_Drought_Reproduction_P Parameter: Plant Line Value: WS
  misc_feature: MA Experiment 20001905 PARAMETER Experiment Name: At_Drought_Reproduction_P Parameter: Timepoint (day) Value: 10
  misc_feature: MA Experiment 20001905 PARAMETER Experiment Name: At_Drought_Reproduction_P Parameter: Tissue Value: Rosettes
  misc_feature: MA Experiment 20001905 PARAMETER Experiment Name: At_Drought_Reproduction_P Parameter: Treatment Value: Drought vs. No Drought
  misc_feature: MA Experiment ID: 20001906 Result: Down-regulated in Transcription
  misc_feature: MA Experiment 20001906 PARAMETER Experiment Name: At_Drought_Reproduction_P Parameter: Age (day) Value: 35
  misc_feature: MA Experiment 20001906 PARAMETER Experiment Name: At_Drought_Reproduction_P Parameter: Organism Value: A. thaliana
  misc_feature: MA Experiment 20001906 PARAMETER Experiment Name: At_Drought_Reproduction_P Parameter: Plant Line Value: WS
  misc_feature: MA Experiment 20001906 PARAMETER Experiment Name: At_Drought_Reproduction_P Parameter: Timepoint (day) Value: 5
  misc_feature: MA Experiment 20001906 PARAMETER Experiment Name: At_Drought_Reproduction_P Parameter: Tissue Value: Siliques
  misc_feature: MA Experiment 20001906 PARAMETER Experiment Name: At_Drought_Reproduction_P Parameter: Treatment Value: Drought vs. No Drought
  misc_feature: MA Experiment ID: 20001907 Result: Down-regulated in Transcription
  misc_feature: MA Experiment 20001907 PARAMETER Experiment Name: At_Drought_Reproduction_P Parameter: Age (day) Value: 37
  misc_feature: MA Experiment 20001907 PARAMETER Experiment Name: At_Drought_Reproduction_P Parameter: Organism Value: A. thaliana
  misc_feature: MA Experiment 20001907 PARAMETER Experiment Name: At_Drought_Reproduction_P Parameter: Plant Line Value: WS
  misc_feature: MA Experiment 20001907 PARAMETER Experiment Name: At_Drought_Reproduction_P Parameter: Timepoint (day) Value: 7
  misc_feature: MA Experiment 20001907 PARAMETER Experiment Name: At_Drought_Reproduction_P Parameter: Tissue Value: Siliques
  misc_feature: MA Experiment 20001907 PARAMETER Experiment Name: At_Drought_Reproduction_P Parameter: Treatment Value: Drought vs. No Drought
  misc_feature: MA Experiment ID: 20001908 Result: Down-regulated in Transcription
  misc_feature: MA Experiment 20001908 PARAMETER Experiment Name: At_Drought_Reproduction_P Parameter: Age (day) Value: 40
  misc_feature: MA Experiment 20001908 PARAMETER Experiment Name: At_Drought_Reproduction_P Parameter: Organism Value: A. thaliana
  misc_feature: MA Experiment 20001908 PARAMETER Experiment Name: At_Drought_Reproduction_P Parameter: Plant Line Value: WS
  misc_feature: MA Experiment 20001908 PARAMETER Experiment Name: At_Drought_Reproduction_P Parameter: Timepoint (day) Value: 10
  misc_feature: MA Experiment 20001908 PARAMETER Experiment Name: At_Drought_Reproduction_P Parameter: Tissue Value: Siliques
  misc_feature: MA Experiment 20001908 PARAMETER Experiment Name: At_Drought_Reproduction_P Parameter: Treatment Value: Drought vs. No Drought
  misc_feature: MA Experiment ID: 20001911 Result: Down-regulated in Transcription
  misc_feature: MA Experiment 20001911 PARAMETER Experiment Name: At_Drought_Reproduction_P Parameter: Age (day) Value: 40
  misc_feature: MA Experiment 20001911 PARAMETER Experiment Name: At_Drought_Reproduction_P Parameter: Organism Value: A. thaliana
  misc_feature: MA Experiment 20001911 PARAMETER Experiment Name: At_Drought_Reproduction_P Parameter: Plant Line Value: WS
  misc_feature: MA Experiment 20001911 PARAMETER Experiment Name: At_Drought_Reproduction_P Parameter: Timepoint (day) Value: 10
  misc_feature: MA Experiment 20001911 PARAMETER Experiment Name: At_Drought_Reproduction_P Parameter: Tissue Value: Flowers
  misc_feature: MA Experiment 20001911 PARAMETER Experiment Name: At_Drought_Reproduction_P Parameter: Treatment Value: Drought vs. No Drought
cacaccaataattaattagacaaaagataagagagaatagagagagagagagcaatggccaatgcgaagcccttttgtctcctcggcttcttttgtctgttattacagttattctccatcttccatatcggaaatggggaattggagatgaactattacaaagagagttgtccaaaagcggaagagataataagacaacaagtggagacgctttactacaaacacggtaacacagccgtatcttggctccgtaatctcttccatgactgtgtcgtcaagtcgtgtgatgcgtcgctgctgctagagacagcgagaggtgtggaatctgagcagaaatcgaagaggagtttcggtatgagaaactttaagtacgttaagattatcaaagacgcactcgagaaagagtgtccttccacagtctcttgtgctgatattgtcgctctttctgcgagagacggtattgtcatgttgaaagggccaaagatagagatgataaagacaggaaggagagatagtagagggagctacttgggagatgttgagactctaatccctaaccacaatgactctctctcatctgttatctccacctttaactccattggcatcgatgtcgaagccaccgtcgctctcttaggtgctcactcagtgggtagggtccactgcgttaacctagtgcaccggctatacccaacgattgaccctactctcgacccaagttacgccctttacttaaaaaaacgttgcccaagtccaacaccggacccgaacgccgtcttgtactcccgtaacgatcgtgagactccgatggttgtggacaacatgtattataagaacatcatggcccataaggggcttcttgtcattgatgatgagctagccaccgatcccaggaccgcaccgtttgtggccaagatggctgcggacaataattacttccatgagcagttctcacgtggcgtcaggctcttgtccgagaccaacccgctcacgggagaccaaggggagatcaggaaggattgtcgttatgtgaactaatattgatggtccttgcataaaggatatatattgtggaaaagtaataataataatatatatgtgtatgaatgtctgtcaatgttttggattcaataagaagaaataccaaaaccgttgtggatc

SEQ ID NO: 26707 - protein, 327 aa, Arabidopsis thaliana
  peptide (1)..(327): Ceres Seq. ID no. 12370809
  misc_feature (46)..(291): Pfam Name: Peroxidase Pfam Description: Peroxidase
  misc_feature (10)..(327): Homolog of NCBI NO: 10697182 NR Description: secretory peroxidase [Avicennia marina]
  misc_feature (26)..(327): Homolog of NCBI NO: 34394026 NR Description: putative peroxidase [Oryza sativa (japonica
  misc_feature (101)..(327): Homolog of NCBI NO: 16649127 NR Description: putative peroxidase ATP2a [Arabidopsis thaliana]
  misc_feature (1)..(327): Homolog of NCBI NO: 1402912 NR Description: peroxidase [Arabidopsis thaliana]
  misc_feature (1)..(327): Homolog of NCBI NO: 21593054 NR Description: putative peroxidase ATP2a [Arabidopsis thaliana]
  misc_feature (1)..(327): Homolog of NCBI NO: 15228090 NR Description: peroxidase, putative (ATP2a)
MANAKPFCLLGFFCLLLQLFSIFHIGNGELEMNYYKESCPKAEEIIRQQVETLYYKHGNTAVSWLRNLFHDCVVKSCDASLLLETARGVESEQKSKRSFGMRNFKYVKIIKDALEKECPSTVSCADIVALSARDGIVMLKGPKIEMIKTGRRDSRGSYLGDVETLIPNHNDSLSSVISTFNSIGIDVEATVALLGAHSVGRVHCVNLVHRLYPTIDPTLDPSYALYLKKRCPSPTPDPNAVLYSRNDRETPMVVDNMYYKNIMAHKGLLVIDDELATDPRTAPFVAKMAADNNYFHEQFSRGVRLLSETNPLTGDQGEIRKDCRYVN

SEQ ID NO: 26708 - protein, 296 aa, Arabidopsis thaliana
  peptide (1)..(296): Ceres Seq. ID no. 12370810
  misc_feature (15)..(260): Pfam Name: Peroxidase Pfam Description: Peroxidase
  misc_feature (1)..(296): Homolog of NCBI NO: 10697182 NR Description: secretory peroxidase [Avicennia marina]
  misc_feature (1)..(296): Homolog of NCBI NO: 34394026 NR Description: putative peroxidase [Oryza sativa (japonica
  misc_feature (70)..(296): Homolog of NCBI NO: 16649127 NR Description: putative peroxidase ATP2a [Arabidopsis thaliana]
  misc_feature (1)..(296): Homolog of NCBI NO: 1402912 NR Description: peroxidase [Arabidopsis thaliana]
  misc_feature (1)..(296): Homolog of NCBI NO: 21593054 NR Description: putative peroxidase ATP2a [Arabidopsis thaliana]
  misc_feature (1)..(296): Homolog of NCBI NO: 15228090 NR Description: peroxidase, putative (ATP2a)
MNYYKESCPKAEEIIRQQVETLYYKHGNTAVSWLRNLFHDCVVKSCDASLLLETARGVESEQKSKRSFGMRNFKYVKIIKDALEKECPSTVSCADIVALSARDGIVMLKGPKIEMIKTGRRDSRGSYLGDVETLIPNHNDSLSSVISTFNSIGIDVEATVALLGAHSVGRVHCVNLVHRLYPTIDPTLDPSYALYLKKRCPSPTPDPNAVLYSRNDRETPMVVDNMYYKNIMAHKGLLVIDDELATDPRTAPFVAKMAADNNYFHEQFSRGVRLLSETNPLTGDQGEIRKDCRYVN

SEQ ID NO: 26709 - protein, 227 aa, Arabidopsis thaliana
  peptide (1)..(227): Ceres Seq. ID no. 12370811
  misc_feature (1)..(191): Pfam Name: Peroxidase Pfam Description: Peroxidase
  misc_feature (1)..(227): Homolog of NCBI NO: 10697182 NR Description: secretory peroxidase [Avicennia marina]
  misc_feature (1)..(227): Homolog of NCBI NO: 34394026 NR Description: putative peroxidase [Oryza sativa (japonica
  misc_feature (1)..(227): Homolog of NCBI NO: 16649127 NR Description: putative peroxidase ATP2a [Arabidopsis thaliana]
  misc_feature (1)..(227): Homolog of NCBI NO: 1402912 NR Description: peroxidase [Arabidopsis thaliana]
  misc_feature (1)..(227): Homolog of NCBI NO: 21593054 NR Description: putative peroxidase ATP2a [Arabidopsis thaliana]
  misc_feature (1)..(227): Homolog of NCBI NO: 15228090 NR Description: peroxidase, putative (ATP2a)
MRNFKYVKIIKDALEKECPSTVSCADIVALSARDGIVMLKGPKIEMIKTGRRDSRGSYLGDVETLIPNHNDSLSSVISTFNSIGIDVEATVALLGAHSVGRVHCVNLVHRLYPTIDPTLDPSYALYLKKRCPSPTPDPNAVLYSRNDRETPMVVDNMYYKNIMAHKGLLVIDDELATDPRTAPFVAKMAADNNYFHEQFSRGVRLLSETNPLTGDQGEIRKDCRYVN

SEQ ID NO: 26710 - DNA, 799 bp, Arabidopsis thaliana
  misc_feature (1)..(799): Ceres Seq. ID no. 13509874
  misc_feature: MA Experiment ID: 20000184 Result: Down-regulated in Transcription
  misc_feature: MA Experiment 20000184 PARAMETER Experiment Name: At_Shoots__P Parameter: Age (day) Value: 7
  misc_feature: MA Experiment 20000184 PARAMETER Experiment Name: At_Shoots__P Parameter: Tissue Value: Shoots vs. Whole Plant
  misc_feature: MA Experiment ID: 20001248 Result: Up-regulated in Transcription
  misc_feature: MA Experiment 20001248 PARAMETER Experiment Name: At_Far-red-induction_P Parameter: Age (day) Value: 7
  misc_feature: MA Experiment 20001248 PARAMETER Experiment Name: At_Far-red-induction_P Parameter: Light Value: Far-red vs. White
  misc_feature: MA Experiment 20001248 PARAMETER Experiment Name: At_Far-red-induction_P Parameter: Organism Value: A. thaliana
  misc_feature: MA Experiment 20001248 PARAMETER Experiment Name: At_Far-red-induction_P Parameter: Plant Line Value: Columbia
  misc_feature: MA Experiment 20001248 PARAMETER Experiment Name: At_Far-red-induction_P Parameter: Timepoint (hr) Value: 4
  misc_feature: MA Experiment 20001248 PARAMETER Experiment Name: At_Far-red-induction_P Parameter: Tissue Value: Whole Plant
atttcctaaaagaacgaacgacgccgtatacaccgagaagctcaacgttcgtcatcactcttctcgcttctcggcgtctccatcgccgtctctatctaatctcgtcctgcgtcgacctagtgagctacttcagattccggccatcacgcagctccagttgtatgctttgagagttaatacaaagatgacaacaatcgaaaccggtcagaaaactcaaaagtcttctccttccggttctggtactacccctactggtactcttaagcagtcatcagcatcgtttaaaaggtggggaaggagacacccgtttgtaagatatggacttccgatgatatctctcactgtatttggagccctcggactcggccaactccttcaaggcagttcagtaaggatattgcaaaggtaaaagatgaccaagaatgggagattatagaaacaagaaaggcactttcgagaacaggacctgtcgatgcctataaacctaaaaacacatccattgaagatgagctcaaggctatgcaagagaaggtggacataaacacgtacgagtacaagaaaattccaaagctaaacgaaagcaagtcgagttaagaagagtctttgtataagattagtctttttagatgtgtttcagttttaaatgactcttcagttcacataatcgcccaagtacaaattccagtaagttctgtctgggcttcctaaaaccaagaacaacgagggacttgccaattgttgataatacatgttgtcgtgttgatttacgacgtccaaatagatctgaaagaggttttat

SEQ ID NO: 26711 - protein, 135 aa, Arabidopsis thaliana
  peptide (1)..(135): Ceres Seq. ID no. 13509875
  misc_feature (62)..(135): Homolog of NCBI NO: 26453208 NR Description: putative kinesin [Arabidopsis thaliana]
  misc_feature (58)..(128): Homolog of NCBI NO: 7428718 NR Description: probable kinesin - Arabidopsis thaliana
  misc_feature (62)..(128): Homolog of NCBI NO: 22328612 NR Description: kinesin like protein {Arabidopsis -related
FPKRTNDAVYTEKLNVRHHSSRFSASPSPSLSNLVLRRPSELLQIPAITQLQLYALRVNTKMTTIETGQKTQKSSPSGSGTTPTGTLKQSSASFKRWGRRHPFVRYGLPMISLTVFGALGLGQLLQGSSVRILQR

SEQ ID NO: 26712 - protein, 74 aa, Arabidopsis thaliana
  peptide (1)..(74): Ceres Seq. ID no. 13509876
  misc_feature (1)..(74): Homolog of NCBI NO: 26453208 NR Description: putative kinesin [Arabidopsis thaliana]
  misc_feature (1)..(67): Homolog of NCBI NO: 7428718 NR Description: probable kinesin - Arabidopsis thaliana
  misc_feature (1)..(67): Homolog of NCBI NO: 22328612 NR Description: kinesin like protein {Arabidopsis -related
MTTIETGQKTQKSSPSGSGTTPTGTLKQSSASFKRWGRRHPFVRYGLPMISLTVFGALGLGQLLQGSSVRILQR

SEQ ID NO: 26713 - DNA, 1150 bp, Arabidopsis thaliana
  misc_feature (1)..(1150): Ceres Seq. ID no. 12322190
  misc_feature: MA Experiment ID: 108434 Result: Up-regulated in Transcription
  misc_feature: MA Experiment 108434 PARAMETER Experiment Name: At_Root_Tips_cDNA_P Parameter: Tissue Value: Root Tips
  misc_feature: MA Experiment ID: 108461 Result: Down-regulated in Transcription
  misc_feature: MA Experiment 108461 PARAMETER Experiment Name: At_Germinating_Seeds_cDNA_P Parameter: Age (day) Value: 1 vs. 0
  misc_feature: MA Experiment 108461 PARAMETER Experiment Name: At_Germinating_Seeds_cDNA_P Parameter: Tissue Value: Germinating Seeds
  misc_feature: MA Experiment ID: 108462 Result: Down-regulated in Transcription
  misc_feature: MA Experiment 108462 PARAMETER Experiment Name: At_Germinating_Seeds_cDNA_P Parameter: Age (day) Value: 2 vs. 0
  misc_feature: MA Experiment 108462 PARAMETER Experiment Name: At_Germinating_Seeds_cDNA_P Parameter: Tissue Value: Germinating Seeds
  misc_feature: MA Experiment ID: 108463 Result: Down-regulated in Transcription
  misc_feature: MA Experiment 108463 PARAMETER Experiment Name: At_Germinating_Seeds_cDNA_P Parameter: Age (day) Value: 3 vs. 0
  misc_feature: MA Experiment 108463 PARAMETER Experiment Name: At_Germinating_Seeds_cDNA_P Parameter: Tissue Value: Germinating Seeds
  misc_feature: MA Experiment ID: 108464 Result: Down-regulated in Transcription
  misc_feature: MA Experiment 108464 PARAMETER Experiment Name: At_Germinating_Seeds_cDNA_P Parameter: Age (day) Value: 4 vs. 0
  misc_feature: MA Experiment 108464 PARAMETER Experiment Name: At_Germinating_Seeds_cDNA_P Parameter: Tissue Value: Germinating Seeds
  misc_feature: MA Experiment ID: 20000180 Result: Down-regulated in Transcription
  misc_feature: MA Experiment 20000180 PARAMETER Experiment Name: At_Germinating_Seeds_P Parameter: Age (hr) Value: 24 vs. 0
  misc_feature: MA Experiment 20000180 PARAMETER Experiment Name: At_Germinating_Seeds_P Parameter: Tissue Value: Germinating Seeds
aaaaaaagtttcagaatcgaactcgtctattctccgccggtgtgccgtcgccgatatgcttcgtcgtgtcttttacaagcgtgcacgtgatgatttatcttactgtcatcgtctgttgcacattccgtataacgaaccagagcctgactcaaaggcaatttctgaaatcgttggtatagtttcaaagaaagaagaagctgtattagttacggaaccaactcatcattggcgtaagaattgggaagatttgagaaagaataggttaacagctagtaatttcgcgcgtgctatcggattttcgcctgacggtagacgaaatctttggttagagaaaatcggggcagcgaaaccgtttgctggaaaccgagctacgttttgggacattgagaatgaggtcgaagcactcgagaggtacaacgagttaacgggaaatgaaatcctcatacctgagtttgttgtttataagaatggtgaaagccctgaagaaaactggttaggagcttctcctgatggagtgatcaatgtagttaaggacggtgttacttcgtgtggtgtgttagaagtgaaatgcccgtttgataaccgggataactcgaaagtttatccgtggaagaaggttccttataattgtgttccacaacttcagggtttaatggagattgtggatacagattggttggatttgtattgttggactcgcaatggaagcagtctctttagagtttggcgtgataccgcgttttgggaggatatgaaaccggcactgtttgatttttggcagaatcatgttttacctgcaagagagatatacaataactttgatataaaggatcctcaagtgaagctgagagagtttaaaccgaagcattggcatgaagattgcaagaagattatgcgtggagctgagagaatcagcgcaaacgcaaaccgtttgttctatgagatcgatgggaatcttgtagactgaggtttttgtaactgattatgtgaaatttgcaagcaagcaagccaggttcccttatttcatttgaatgttattttcttagtgtggaatgtagaaaacactaaatgaagctcttgtgttgagctaaagtacatatttcatattgtatactctgtttcttattgtctcatcagcttttgttacatc

SEQ ID NO: 26714 - protein, 321 aa, Arabidopsis thaliana
  peptide (1)..(321): Ceres Seq. ID no. 12322191
  misc_feature (78)..(315): Homolog of NCBI NO: 30697546 NR Description: F12A21.19 [Arabidopsis thaliana]
  misc_feature (78)..(315): Homolog of NCBI NO: 25404961 NR Description: protein F12A21.19 [imported] - Arabidopsis
  misc_feature (78)..(319): Homolog of NCBI NO: 40253518 NR Description: unknown protein [Oryza sativa (japonica
  misc_feature (78)..(319): Homolog of NCBI NO: 38345347 NR Description: OSJNBa0081L15.20 [Oryza sativa (japonica
  misc_feature (78)..(319): Homolog of NCBI NO: 10241653 NR Description: contains similarity to F12A21.16
  misc_feature (30)..(321): Homolog of NCBI NO: 25402766 NR Description: protein F16A14.4 [imported] - Arabidopsis
  misc_feature (19)..(321): Homolog of NCBI NO: 15222951 NR Description: unknown protein; protein id: At1g13810.1
KKVSESNSSILRRCAVADMLRRVFYKRARDDLSYCHRLLHIPYNEPEPDSKAISEIVGIVSKKEEAVLVTEPTHHWRKNWEDLRKNRLTASNFARAIGFSPDGRRNLWLEKIGAAKPFAGNRATFWDIENEVEALERYNELTGNEILIPEFVVYKNGESPEENWLGASPDGVINVVKDGVTSCGVLEVKCPFDNRDNSKVYPWKKVPYNCVPQLQGLMEIVDTDWLDLYCWTRNGSSLFRVWRDTAFWEDMKPALFDFWQNHVLPAREIYNNFDIKDPQVKLREFKPKHWHEDCKKIMRGAERISANANRLFYEIDGNLVD

SEQ ID NO: 26715 - protein, 303 aa, Arabidopsis thaliana
  peptide (1)..(303): Ceres Seq. ID no. 12322192
  misc_feature (60)..(297): Homolog of NCBI NO: 30697546 NR Description: F12A21.19 [Arabidopsis thaliana]
  misc_feature (60)..(297): Homolog of NCBI NO: 25404961 NR Description: protein F12A21.19 [imported] - Arabidopsis
  misc_feature (60)..(301): Homolog of NCBI NO: 40253518 NR Description: unknown protein [Oryza sativa (japonica
  misc_feature (60)..(301): Homolog of NCBI NO: 38345347 NR Description: OSJNBa0081L15.20 [Oryza sativa (japonica
  misc_feature (60)..(301): Homolog of NCBI NO: 10241653 NR Description: contains similarity to F12A21.16
  misc_feature (12)..(303): Homolog of NCBI NO: 25402766 NR Description: protein F16A14.4 [imported] - Arabidopsis
  misc_feature (1)..(303): Homolog of NCBI NO: 15222951 NR Description: unknown protein; protein id: At1g13810.1
MLRRVFYKRARDDLSYCHRLLHIPYNEPEPDSKAISEIVGIVSKKEEAVLVTEPTHHWRKNWEDLRKNRLTASNFARAIGFSPDGRRNLWLEKIGAAKPFAGNRATFWDIENEVEALERYNELTGNEILIPEFVVYKNGESPEENWLGASPDGVINVVKDGVTSCGVLEVKCPFDNRDNSKVYPWKKVPYNCVPQLQGLMEIVDTDWLDLYCWTRNGSSLFRVWRDTAFWEDMKPALFDFWQNHVLPAREIYNNFDIKDPQVKLREFKPKHWHEDCKKIMRGAERISANANRLFYEIDGNLVD

SEQ ID NO: 26716 - DNA, 1135 bp, Arabidopsis thaliana
  misc_feature (1)..(1135): Ceres Seq. ID no. 12324089
  misc_feature: MA Experiment ID: 108573 Result: Up-regulated in Transcription
  misc_feature: MA Experiment 108573 PARAMETER Experiment Name: At_Drought_cDNA_P Parameter: Timepoint (hr) Value: 6
  misc_feature: MA Experiment 108573 PARAMETER Experiment Name: At_Drought_cDNA_P Parameter: Tissue Value: Aerial
  misc_feature: MA Experiment 108573 PARAMETER Experiment Name: At_Drought_cDNA_P Parameter: Treatment Value: Drought vs. No Drought
  misc_feature: MA Experiment ID: 20000265 Result: Down-regulated in Transcription
  misc_feature: MA Experiment 20000265 PARAMETER Experiment Name: At_Open_Flower_P Parameter: Age (day) Value: 21
  misc_feature: MA Experiment 20000265 PARAMETER Experiment Name: At_Open_Flower_P Parameter: Plant Line Value: WS
  misc_feature: MA Experiment 20000265 PARAMETER Experiment Name: At_Open_Flower_P Parameter: Tissue Value: Closed Flower vs. Whole Plant
agaacctcagatcttattcttagaagtttccccatgaaatccgagaagattcaaatgtaaattcagcctccgattcatatattttgctcaccggaaacttcagatcgagctactgcaatttgcggatcgtgttttttttttttctttcaattcacggtgtatttatctcgggagaagaagaatggatactttcacggcggaggatctgtcgacgatcggcggaatagcgacagtatcgctccttcactcgtttattccgacgcattggctacctttctccatcgtcggacgtgcgcagaaatggacgctttcgagaacactcctcgtcactgcatttggagcagtcctacatgttatatccacttctctccttggtataacagcaatcacaatggcgaataccatcgctggtgaagagactgttcacaaacttgcttcccttttgcttgtatttctcggtggaagctatgttttgctgtttttggctggtaaaggtggtcacactcattctcataaccaacccatggagaaaatggctgttgctggacttgtccttgttcctgcattatctccttgtgcaacaactctcccggttttcctcgctgttggaaattccaagtccatgatggttctcgccatcatagttctgctcttcagcaccatattggttatgacatcgctggttgctctatcgttctatggtgcaagccagctcaagtttcactgggtggagcggtacgacaaactactggttggttcagtcctgtgtttggtaggtatcttaacccttctcttccatgatcatgaccatggcggtcatgaagcacatcaactccacaggaaaatcattactctttagataccgtttcgagtctctgttttgcctatctgtcatgtctgtttgttgtagagcgtcttaaggtctattaatctttctgcttcgcgttgtatgtctataactagttgtaacgctctctgttgcacgtgaagaaacatatggaagcattaaattccttaaatagaacaactctttggaggtctagtgtaaggcttgtagcttttacataattttgtagttgttccgttgataaagttgggtttaatttttgtaatacaacatagttgtcttcgagtc

SEQ ID NO: 26717 - protein, 225 aa, Arabidopsis thaliana
  peptide (1)..(225): Ceres Seq. ID no. 12324090
  misc_feature (18)..(200): Homolog of NCBI NO: 16124575 NR Description: hypothetical protein [Caulobacter crescentus
  misc_feature (115)..(215): Homolog of NCBI NO: 15209177 NR Description: hypothetical protein [Solanum demissum]
  misc_feature (4)..(225): Homolog of NCBI NO: 34903290 NR Description: unnamed protein product [Oryza sativa (japonica
  misc_feature (1)..(225): Homolog of NCBI NO: 21593186 NR Description: unknown [Arabidopsis thaliana]
  misc_feature (1)..(225): Homolog of NCBI NO: 15242149 NR Description: putative protein
MDTFTAEDLSTIGGIATVSLLHSFIPTHWLPFSIVGRAQKWTLSRTLLVTAFGAVLHVISTSLLGITAITMANTIAGEETVHKLASLLLVFLGGSYVLLFLAGKGGHTHSHNQPMEKMAVAGLVLVPALSPCATTLPVFLAVGNSKSMMVLAIIVLLFSTILVMTSLVALSFYGASQLKFHWVERYDKLLVGSVLCLVGILTLLFHDHDHGGHEAHQLHRKIITL

SEQ ID NO: 26718 - protein, 155 aa, Arabidopsis thaliana
  peptide (1)..(155): Ceres Seq. ID no. 12324091
  misc_feature (1)..(130): Homolog of NCBI NO: 16124575 NR Description: hypothetical protein [Caulobacter crescentus
  misc_feature (45)..(145): Homolog of NCBI NO: 15209177 NR Description: hypothetical protein [Solanum demissum]
  misc_feature (1)..(155): Homolog of NCBI NO: 34903290 NR Description: unnamed protein product [Oryza sativa (japonica
  misc_feature (1)..(155): Homolog of NCBI NO: 21593186 NR Description: unknown [Arabidopsis thaliana]
  misc_feature (1)..(155): Homolog of NCBI NO: 15242149 NR Description: putative protein
MANTIAGEETVHKLASLLLVFLGGSYVLLFLAGKGGHTHSHNQPMEKMAVAGLVLVPALSPCATTLPVFLAVGNSKSMMVLAIIVLLFSTILVMTSLVALSFYGASQLKFHWVERYDKLLVGSVLCLVGILTLLFHDHDHGGHEAHQLHRKIITL

SEQ ID NO: 26719 - DNA, 1569 bp, Arabidopsis thaliana
  misc_feature (1)..(1569): Ceres Seq. ID no. 15178660
  misc_feature: MA Experiment ID: 20000173 Result: Down-regulated in Transcription
  misc_feature: MA Experiment 20000173 PARAMETER Experiment Name: At_42deg_Heat_P Parameter: Age (day) Value: 14
  misc_feature: MA Experiment 20000173 PARAMETER Experiment Name: At_42deg_Heat_P Parameter: Organism Value: A. thaliana
  misc_feature: MA Experiment 20000173 PARAMETER Experiment Name: At_42deg_Heat_P Parameter: Plant Line Value: WS
  misc_feature: MA Experiment 20000173 PARAMETER Experiment Name: At_42deg_Heat_P Parameter: Temperature (deg C) Value: 42 vs. 22
  misc_feature: MA Experiment 20000173 PARAMETER Experiment Name: At_42deg_Heat_P Parameter: Timepoint (hr) Value: 6
  misc_feature: MA Experiment 20000173 PARAMETER Experiment Name: At_42deg_Heat_P Parameter: Tissue Value: Aerial
  misc_feature: MA Experiment ID: 20000180 Result: Up-regulated in Transcription
  misc_feature: MA Experiment 20000180 PARAMETER Experiment Name: At_Germinating_Seeds_P Parameter: Age (hr) Value: 24 vs. 0
  misc_feature: MA Experiment 20000180 PARAMETER Experiment Name: At_Germinating_Seeds_P Parameter: Tissue Value: Germinating Seeds
  misc_feature: MA Experiment ID: 20000184 Result: Down-regulated in Transcription
  misc_feature: MA Experiment 20000184 PARAMETER Experiment Name: At_Shoots__P Parameter: Age (day) Value: 7
  misc_feature: MA Experiment 20000184 PARAMETER Experiment Name: At_Shoots__P Parameter: Tissue Value: Shoots vs. Whole Plant
  misc_feature: MA Experiment ID: 20000227 Result: Up-regulated in Transcription
  misc_feature: MA Experiment 20000227 PARAMETER Experiment Name: At_Root-Tips-vs-Tops_P Parameter: Tissue Value: Root Tips vs. Root Tops
  misc_feature: MA Experiment ID: 20000234 Result: Up-regulated in Transcription
  misc_feature: MA Experiment 20000234 PARAMETER Experiment Name: At_Siliques_P Parameter: Age (day) Value: 21
  misc_feature: MA Experiment 20000234 PARAMETER Experiment Name: At_Siliques_P Parameter: Organism Value: A. thaliana
  misc_feature: MA Experiment 20000234 PARAMETER Experiment Name: At_Siliques_P Parameter: Plant Line Value: WS
  misc_feature: MA Experiment 20000234 PARAMETER Experiment Name: At_Siliques_P Parameter: Tissue Value: Less Than 5mm Siliques vs. Whole Plant
  misc_feature: MA Experiment ID: 20000235 Result: Up-regulated in Transcription
  misc_feature: MA Experiment 20000235 PARAMETER Experiment Name: At_Siliques_P Parameter: Age (day) Value: 21
  misc_feature: MA Experiment 20000235 PARAMETER Experiment Name: At_Siliques_P Parameter: Organism Value: A. thaliana
  misc_feature: MA Experiment 20000235 PARAMETER Experiment Name: At_Siliques_P Parameter: Plant Line Value: WS
  misc_feature: MA Experiment 20000235 PARAMETER Experiment Name: At_Siliques_P Parameter: Tissue Value: 5-10mm Siliques vs. Whole Plant
  misc_feature: MA Experiment ID: 20000264 Result: Up-regulated in Transcription
  misc_feature: MA Experiment 20000264 PARAMETER Experiment Name: At_Open_Flower_P Parameter: Age (day) Value: 21
  misc_feature: MA Experiment 20000264 PARAMETER Experiment Name: At_Open_Flower_P Parameter: Plant Line Value: WS
  misc_feature: MA Experiment 20000264 PARAMETER Experiment Name: At_Open_Flower_P Parameter: Tissue Value: Open Flower vs. Whole Plant
  misc_feature: MA Experiment ID: 20000265 Result: Up-regulated in Transcription
  misc_feature: MA Experiment 20000265 PARAMETER Experiment Name: At_Open_Flower_P Parameter: Age (day) Value: 21
  misc_feature: MA Experiment 20000265 PARAMETER Experiment Name: At_Open_Flower_P Parameter: Plant Line Value: WS
  misc_feature: MA Experiment 20000265 PARAMETER Experiment Name: At_Open_Flower_P Parameter: Tissue Value: Closed Flower vs. Whole Plant
  misc_feature: MA Experiment ID: 20000286 Result: Up-regulated in Transcription
  misc_feature: MA Experiment 20000286 PARAMETER Experiment Name: At_Open_Flower_P Parameter: Age (day) Value: 21
  misc_feature: MA Experiment 20000286 PARAMETER Experiment Name: At_Open_Flower_P Parameter: Plant Line Value: WS
  misc_feature: MA Experiment 20000286 PARAMETER Experiment Name: At_Open_Flower_P Parameter: Tissue Value: Half Open vs. Whole Plant
  misc_feature: MA Experiment ID: 20000495 Result: Up-regulated in Transcription
  misc_feature: MA Experiment 20000495 PARAMETER Experiment Name: At_Guard_Cells_P Parameter: Harvest Date Value: 8/2/2002
  misc_feature: MA Experiment 20000495 PARAMETER Experiment Name: At_Guard_Cells_P Parameter: Organism Value: A. thaliana
  misc_feature: MA Experiment 20000495 PARAMETER Experiment Name: At_Guard_Cells_P Parameter: Tissue Value: Guard Cells vs. Leaves
  misc_feature: MA Experiment ID: 20000496 Result: Up-regulated in Transcription
  misc_feature: MA Experiment 20000496 PARAMETER Experiment Name: At_Guard_Cells_P Parameter: Harvest Date Value: 7/19/2002
  misc_feature: MA Experiment 20000496 PARAMETER Experiment Name: At_Guard_Cells_P Parameter: Organism Value: Canola
  misc_feature: MA Experiment 20000496 PARAMETER Experiment Name: At_Guard_Cells_P Parameter: Tissue Value: Guard Cells vs. Leaves
  misc_feature: MA Experiment ID: 20000527 Result: Down-regulated in Transcription
  misc_feature: MA Experiment 20000527 PARAMETER Experiment Name: At_10percent_PEG_P Parameter: Age (day) Value: 20
  misc_feature: MA Experiment 20000527 PARAMETER Experiment Name: At_10percent_PEG_P Parameter: Organism Value: A. thaliana
  misc_feature: MA Experiment 20000527 PARAMETER Experiment Name: At_10percent_PEG_P Parameter: Plant Line Value: WS
  misc_feature: MA Experiment 20000527 PARAMETER Experiment Name: At_10percent_PEG_P Parameter: Timepoint (day) Value: 20
  misc_feature: MA Experiment 20000527 PARAMETER Experiment Name: At_10percent_PEG_P Parameter: Tissue Value: Whole Plant
  misc_feature: MA Experiment 20000527 PARAMETER Experiment Name: At_10percent_PEG_P Parameter: Treatment Value: 10percent PEG vs. No Treatment
  misc_feature: MA Experiment ID: 20001248 Result: Down-regulated in Transcription
  misc_feature: MA Experiment 20001248 PARAMETER Experiment Name: At_Far-red-induction_P Parameter: Age (day) Value: 7
  misc_feature: MA Experiment 20001248 PARAMETER Experiment Name: At_Far-red-induction_P Parameter: Light Value: Far-red vs. White
  misc_feature: MA Experiment 20001248 PARAMETER Experiment Name: At_Far-red-induction_P Parameter: Organism Value: A. thaliana
  misc_feature: MA Experiment 20001248 PARAMETER Experiment Name: At_Far-red-induction_P Parameter: Plant Line Value: Columbia
  misc_feature: MA Experiment 20001248 PARAMETER Experiment Name: At_Far-red-induction_P Parameter: Timepoint (hr) Value: 4
  misc_feature: MA Experiment 20001248 PARAMETER Experiment Name: At_Far-red-induction_P Parameter: Tissue Value: Whole Plant
  misc_feature: MA Experiment ID: 20001451 Result: Down-regulated in Transcription
  misc_feature: MA Experiment 20001451 PARAMETER Experiment Name: At_Far-red-induction_P Parameter: Age (day) Value: 7
  misc_feature: MA Experiment 20001451 PARAMETER Experiment Name: At_Far-red-induction_P Parameter: Light Value: Far-red vs. White
  misc_feature: MA Experiment 20001451 PARAMETER Experiment Name: At_Far-red-induction_P Parameter: Organism Value: A. thaliana
  misc_feature: MA Experiment 20001451 PARAMETER Experiment Name: At_Far-red-induction_P Parameter: Plant Line Value: Columbia
  misc_feature: MA Experiment 20001451 PARAMETER Experiment Name: At_Far-red-induction_P Parameter: Timepoint (hr) Value: 24
  misc_feature: MA Experiment 20001451 PARAMETER Experiment Name: At_Far-red-induction_P Parameter: Tissue Value: Whole Plant
  misc_feature: MA Experiment ID: 20001560 Result: Up-regulated in Transcription
  misc_feature: MA Experiment 20001560 PARAMETER Experiment Name: At_Drought_Soil_Dry_P Parameter: Age (day) Value: 28
  misc_feature: MA Experiment 20001560 PARAMETER Experiment Name: At_Drought_Soil_Dry_P Parameter: Organism Value: A. thaliana
  misc_feature: MA Experiment 20001560 PARAMETER Experiment Name: At_Drought_Soil_Dry_P Parameter: Plant Line Value: WS
  misc_feature: MA Experiment 20001560 PARAMETER Experiment Name: At_Drought_Soil_Dry_P Parameter: Post Timepoint (hr) Value: None
  misc_feature: MA Experiment 20001560 PARAMETER Experiment Name: At_Drought_Soil_Dry_P Parameter: Post-Treatment Value: None
  misc_feature: MA Experiment 20001560 PARAMETER Experiment Name: At_Drought_Soil_Dry_P Parameter: Timepoint (day) Value: 14
  misc_feature: MA Experiment 20001560 PARAMETER Experiment Name: At_Drought_Soil_Dry_P Parameter: Treatment Value: Drought vs. No Drought
  misc_feature: MA Experiment ID: 20001904 Result: Up-regulated in Transcription
  misc_feature: MA Experiment 20001904 PARAMETER Experiment Name: At_Drought_Reproduction_P Parameter: Age (day) Value: 37
  misc_feature: MA Experiment 20001904 PARAMETER Experiment Name: At_Drought_Reproduction_P Parameter: Organism Value: A. thaliana
  misc_feature: MA Experiment 20001904 PARAMETER Experiment Name: At_Drought_Reproduction_P Parameter: Plant Line Value: WS
  misc_feature: MA Experiment 20001904 PARAMETER Experiment Name: At_Drought_Reproduction_P Parameter: Timepoint (day) Value: 7
  misc_feature: MA Experiment 20001904 PARAMETER Experiment Name: At_Drought_Reproduction_P Parameter: Tissue Value: Rosettes
  misc_feature: MA Experiment 20001904 PARAMETER Experiment Name: At_Drought_Reproduction_P Parameter: Treatment Value: Drought vs. No Drought
  misc_feature: MA Experiment ID: 20001911 Result: Down-regulated in Transcription
  misc_feature: MA Experiment 20001911 PARAMETER Experiment Name: At_Drought_Reproduction_P Parameter: Age (day) Value: 40
  misc_feature: MA Experiment 20001911 PARAMETER Experiment Name: At_Drought_Reproduction_P Parameter: Organism Value: A. thaliana
  misc_feature: MA Experiment 20001911 PARAMETER Experiment Name: At_Drought_Reproduction_P Parameter: Plant Line Value: WS
  misc_feature: MA Experiment 20001911 PARAMETER Experiment Name: At_Drought_Reproduction_P Parameter: Timepoint (day) Value: 10
  misc_feature: MA Experiment 20001911 PARAMETER Experiment Name: At_Drought_Reproduction_P Parameter: Tissue Value: Flowers
  misc_feature: MA Experiment 20001911 PARAMETER Experiment Name: At_Drought_Reproduction_P Parameter: Treatment Value: Drought vs. No Drought
atccattctctatcaaattctaaaatcaaaaatggctctgcatttgagatcttctttttcatcaaaatcgactttactcaatattctcagacacaacctcggtttcggttctaggagccacgtgactcggcatatccgcaaaatcctaccacatgacccccccgcttcgaggttcacagaatccaattagccgtctctgtaataccatggcggagccagagacactctctagttttgttcagcacgaatacgccaacaatcatcaggtaatggactttccaggaggaaaggtagctttcacacctgagattcaattcatatcagaatctgataaagagcgtgttccttgctaccgtgttcttgatgacaatggccaacttatcaccaacagccagtttgttcaggttagcgaggaggttgcggtgaagatatatagcgatatggttactcttcaaattatggataacatattctacgaagctcaaagacaaggcagactttccttttacgctactgcaatcggtgaagaggccattaatattgcatcagctgctgctctcactcctcaagatgttatctttcctcagtacagagagcctggtgttctactatggcgtggtttcacgcttcaagaatttgcaaaccagtgttttgggaacaaatctgattatggaaaaggcaggcagatgcccgtccactatggctctaacaagctcaattattttaccgtttctgcaaccattgctacgcagttaccaaacgcggttggtgctgcttattccttaaagatggacaagaaggatgcatgtgcggtcacatattttggcgatggtggcacgagtgagggagatttccatgctgctttgaattttgcagcagttatggaagctcctgttttatttatttgccggaacaatggatgggccatcagtactcccacctcagatcagttccgaagtgatggtgtagtggtcaaaggccgtgcttatggaattcgaagtatacgtgtggatggaaatgatgcacttgccatgtacagtgcggtacatactgctcgcgaaatggcaattagagaacagaggccaatcttgattgaggccttaacataccgtgtaggacaccattcaacatcagatgattccactaggtaccgctctgcaggtgagatagagtggtggaacaaagcaagaaacccactgtctaggtttaggacatggattgaaagtaatggctggtggagtgataaaacggaatcggatctgagaagcagaatcaaaaaagagatgttagaagcgctccgggttgcagagaagactgagaaaccgaatctgcagaacatgttctcagatgtctacgatgttcctccatctaacctcagggaacaagaacttctggtgaggcagacgatcaatagtcacccacaagattacccatcagatgtgcctctttaggtagactctagttgtatgctttgtgtagtaatttatgtaagccaaataatctacattgtgtattgaaatcttttattgaaatcgagaccaatattcaaaaacaaaaaaaaaaaaaaaa

SEQ ID NO: 26720 - protein, 432 aa, Arabidopsis thaliana
  peptide (1)..(432): Ceres Seq. ID no. 15178661
  misc_feature (94)..(394): Pfam Name: Dehydrogenase E1 component Pfam Description: Dehydrogenase E1 component
  misc_feature (30)..(429): Homolog of NCBI NO: 8176547 NR Description: branched-chain alpha-keto acid dehydrogenase E1
  misc_feature (30)..(429): Homolog of NCBI NO: 386841 NR Description: branched-chain alpha-keto acid dehydrogenase
  misc_feature (30)..(429): Homolog of NCBI NO: 27806229 NR Description: branched chain keto acid dehydrogenase E1, alpha
  misc_feature (42)..(430): Homolog of NCBI NO: 12964598 NR Description: branched-chain alpha-keto acid dehydrogenase
  misc_feature (46)..(432): Homolog of NCBI NO: 30145768 NR Description: Hypothetical protein Y39E4A.3 [Caenorhabditis
  misc_feature (21)..(429): Homolog of NCBI NO: 7431561 NR Description: 3-methyl-2-oxobutanoate dehydrogenase (lipoamide)
  misc_feature (10)..(427): Homolog of NCBI NO: 11357201 NR Description: branched-chain alpha keto-acid dehydrogenase E1
  misc_feature (10)..(427): Homolog of NCBI NO: 15218984 NR Description: branched-chain alpha keto-acid dehydrogenase
  misc_feature (19)..(432): Homolog of NCBI NO: 9955517 NR Description: branched-chain alpha keto-acid dehydrogenase E1
  misc_feature (3)..(432): Homolog of NCBI NO: 18415939 NR Description: branched-chain alpha keto-acid dehydrogenase E1
MTPPLRGSQNPISRLCNTMAEPETLSSFVQHEYANNHQVMDFPGGKVAFTPEIQFISESDKERVPCYRVLDDNGQLITNSQFVQVSEEVAVKIYSDMVTLQIMDNIFYEAQRQGRLSFYATAIGEEAINIASAAALTPQDVIFPQYREPGVLLWRGFTLQEFANQCFGNKSDYGKGRQMPVHYGSNKLNYFTVSATIATQLPNAVGAAYSLKMDKKDACAVTYFGDGGTSEGDFHAALNFAAVMEAPVLFICRNNGWAISTPTSDQFRSDGVVVKGRAYGIRSIRVDGNDALAMYSAVHTAREMAIREQRPILIEALTYRVGHHSTSDDSTRYRSAGEIEWWNKARNPLSRFRTWIESNGWWSDKTESDLRSRIKKEMLEALRVAEKTEKPNLQNMFSDVYDVPPSNLREQELLVRQTINSHPQDYPSDVPL

SEQ ID NO: 26721 - protein, 414 aa, Arabidopsis thaliana
  peptide (1)..(414): Ceres Seq. ID no. 15178662
  misc_feature (76)..(376): Pfam Name: Dehydrogenase E1 component Pfam Description: Dehydrogenase E1 component
  misc_feature (12)..(411): Homolog of NCBI NO: 8176547 NR Description: branched-chain alpha-keto acid dehydrogenase E1
  misc_feature (12)..(411): Homolog of NCBI NO: 386841 NR Description: branched-chain alpha-keto acid dehydrogenase
  misc_feature (12)..(411): Homolog of NCBI NO: 27806229 NR Description: branched chain keto acid dehydrogenase E1, alpha
  misc_feature (24)..(412): Homolog of NCBI NO: 12964598 NR Description: branched-chain alpha-keto acid dehydrogenase
  misc_feature (28)..(414): Homolog of NCBI NO: 30145768 NR Description: Hypothetical protein Y39E4A.3 [Caenorhabditis
  misc_feature (3)..(411): Homolog of NCBI NO: 7431561 NR Description: 3-methyl-2-oxobutanoate dehydrogenase (lipoamide)
  misc_feature (1)..(409): Homolog of NCBI NO: 11357201 NR Description: branched-chain alpha keto-acid dehydrogenase E1
  misc_feature (1)..(409): Homolog of NCBI NO: 15218984 NR Description: branched-chain alpha keto-acid dehydrogenase
  misc_feature (1)..(414): Homolog of NCBI NO: 9955517 NR Description: branched-chain alpha keto-acid dehydrogenase E1
  misc_feature (1)..(414): Homolog of NCBI NO: 18415939 NR Description: branched-chain alpha keto-acid dehydrogenase E1
MAEPETLSSFVQHEYANNHQVMDFPGGKVAFTPEIQFISESDKERVPCYRVLDDNGQLITNSQFVQVSEEVAVKIYSDMVTLQIMDNIFYEAQRQGRLSFYATAIGEEAINIASAAALTPQDVIFPQYREPGVLLWRGFTLQEFANQCFGNKSDYGKGRQMPVHYGSNKLNYFTVSATIATQLPNAVGAAYSLKMDKKDACAVTYFGDGGTSEGDFHAALNFAAVMEAPVLFICRNNGWAISTPTSDQFRSDGVVVKGRAYGIRSIRVDGNDALAMYSAVHTAREMAIREQRPILIEALTYRVGHHSTSDDSTRYRSAGEIEWWNKARNPLSRFRTWIESNGWWSDKTESDLRSRIKKEMLEALRVAEKTEKPNLQNMFSDVYDVPPSNLREQELLVRQTINSHPQDYPSDVPL

SEQ ID NO: 26722 - protein, 393 aa, Arabidopsis thaliana
  peptide (1)..(393): Ceres Seq. ID no. 15178663
  misc_feature (55)..(355): Pfam Name: Dehydrogenase E1 component Pfam Description: Dehydrogenase E1 component
  misc_feature (1)..(390): Homolog of NCBI NO: 8176547 NR Description: branched-chain alpha-keto acid dehydrogenase E1
  misc_feature (1)..(390): Homolog of NCBI NO: 386841 NR Description: branched-chain alpha-keto acid dehydrogenase
  misc_feature (1)..(390): Homolog of NCBI NO: 27806229 NR Description: branched chain keto acid dehydrogenase E1, alpha
  misc_feature (3)..(391): Homolog of NCBI NO: 12964598 NR Description: branched-chain alpha-keto acid dehydrogenase
  misc_feature (7)..(393): Homolog of NCBI NO: 30145768 NR Description: Hypothetical protein Y39E4A.3 [Caenorhabditis
  misc_feature (1)..(390): Homolog of NCBI NO: 7431561 NR Description: 3-methyl-2-oxobutanoate dehydrogenase (lipoamide)
  misc_feature (1)..(388): Homolog of NCBI NO: 11357201 NR Description: branched-chain alpha keto-acid dehydrogenase E1
  misc_feature (1)..(388): Homolog of NCBI NO: 15218984 NR Description: branched-chain alpha keto-acid dehydrogenase
  misc_feature (1)..(393): Homolog of NCBI NO: 9955517 NR Description: branched-chain alpha keto-acid dehydrogenase E1
  misc_feature (1)..(393): Homolog of NCBI NO: 18415939 NR Description: branched-chain alpha keto-acid dehydrogenase E1
MDFPGGKVAFTPEIQFISESDKERVPCYRVLDDNGQLITNSQFVQVSEEVAVKIYSDMVTLQIMDNIFYEAQRQGRLSFYATAIGEEAINIASAAALTPQDVIFPQYREPGVLLWRGFTLQEFANQCFGNKSDYGKGRQMPVHYGSNKLNYFTVSATIATQLPNAVGAAYSLKMDKKDACAVTYFGDGGTSEGDFHAALNFAAVMEAPVLFICRNNGWAISTPTSDQFRSDGVVVKGRAYGIRSIRVDGNDALAMYSAVHTAREMAIREQRPILIEALTYRVGHHSTSDDSTRYRSAGEIEWWNKARNPLSRFRTWIESNGWWSDKTESDLRSRIKKEMLEALRVAEKTEKPNLQNMFSDVYDVPPSNLREQELLVRQTINSHPQDYPSDVPL

SEQ ID NO: 26723 - DNA, 1208 bp, Arabidopsis thaliana
  misc_feature (1)..(1208): Ceres Seq. ID no. 12370681
  misc_feature: MA Experiment ID: 108461 Result: Up-regulated in Transcription
  misc_feature: MA Experiment 108461 PARAMETER Experiment Name: At_Germinating_Seeds_cDNA_P Parameter: Age (day) Value: 1 vs. 0
  misc_feature: MA Experiment 108461 PARAMETER Experiment Name: At_Germinating_Seeds_cDNA_P Parameter: Tissue Value: Germinating Seeds
  misc_feature: MA Experiment ID: 108462 Result: Up-regulated in Transcription
  misc_feature: MA Experiment 108462 PARAMETER Experiment Name: At_Germinating_Seeds_cDNA_P Parameter: Age (day) Value: 2 vs. 0
  misc_feature: MA Experiment 108462 PARAMETER Experiment Name: At_Germinating_Seeds_cDNA_P Parameter: Tissue Value: Germinating Seeds
  misc_feature: MA Experiment ID: 108464 Result: Up-regulated in Transcription
  misc_feature: MA Experiment 108464 PARAMETER Experiment Name: At_Germinating_Seeds_cDNA_P Parameter: Age (day) Value: 4 vs. 0
  misc_feature: MA Experiment 108464 PARAMETER Experiment Name: At_Germinating_Seeds_cDNA_P Parameter: Tissue Value: Germinating Seeds
  misc_feature: MA Experiment ID: 108595 Result: Up-regulated in Transcription
  misc_feature: MA Experiment 108595 PARAMETER Experiment Name: At_Ler-pi_Ovule_cDNA_P Parameter: Plant Line Value: null
  misc_feature: MA Experiment ID: 20000113 Result: Up-regulated in Transcription
  misc_feature: MA Experiment 20000113 PARAMETER Experiment Name: At_42deg_Heat_cDNA_P Parameter: Temperature (deg C) Value: 42 vs. 22
  misc_feature: MA Experiment 20000113 PARAMETER Experiment Name: At_42deg_Heat_cDNA_P Parameter: Timepoint (hr) Value: 8
  misc_feature: MA Experiment 20000113 PARAMETER Experiment Name: At_42deg_Heat_cDNA_P Parameter: Tissue Value: Aerial
  misc_feature: MA Experiment ID: 20000185 Result: Up-regulated in Transcription
  misc_feature: MA Experiment 20000185 PARAMETER Experiment Name: At_Roots__P Parameter: Age (day) Value: 7 vs. 21
  misc_feature: MA Experiment 20000185 PARAMETER Experiment Name: At_Roots__P Parameter: Organism Value: A. thaliana
  misc_feature: MA Experiment 20000185 PARAMETER Experiment Name: At_Roots__P Parameter: Tissue Value: Roots vs. Whole Plant
aacacctaactcatttgatagtgatttccaaatctgcaaacaacaaagtatatttgatcatcactatactgatttcacaatccattaatcactgataggtttttggtggaatacatacatgtatgtgtttgatccaacaacagaagctggattgagattagagatggcgtttcctcaacatggttttatgttccaacaacttcatgaagacaacagtcaagatcagctcccttcttgtcctcctcatctcttcaatggaggaggaaactacatgatgaacagatctatgtctttaatgaacgtgcaagaagatcataatcaaaccttggatgaggagaatctatcagacgatggggcacatactatgctgggagagaagaagaagaggctgcaattagagcaagttaaggcattagagaagagctttgagcttggtaacaagctggagccagagaggaagatacaactagctaaagcattagggatgcaaccaagacagatcgcgatttggtttcaaaacaggagagctaggtggaagactagacagctcgagagagattatgattcactcaagaaacagtttgagtctcttaaatccgacaatgcttctctacttgcctataacaagaaactccttgctgaggtaatggctttaaagaacaaagaatgtaatgaaggaaacatagtaaagagagaagcagaagcttcatggagcaacaacggaagcacagagaatagttcagacatcaatctggagatgcctagagagaccattacaacacatgtgaacacgatcaaagacctattcccttcatcgattcgatcatctgcacatgatgatgatcatcatcagaatcatgaaatagttcaagaagaaagcctttgtaacatgtttaatggcattgatgaaacgacgccggctggttactgggcatggtctgacccaaaccacaaccaccaccaccaccagttcaactgattcatgattctaaagctcaaaaaaaagtcatcagcacgcatcaagacaaatgatcataatcatcatcatcatatcatcaggagaagatcaagacacaattcatctctttggaattatgttattgctactcatttcaatttaaattaatggagcattttgttttctttgggtttgtagagcattggtgtatagtgcgaaaatttgttgttgctttaatttaataaaaatc

SEQ ID NO: 26724 - protein, 286 aa, Arabidopsis thaliana
  peptide (1)..(286): Ceres Seq. ID no. 12370682
  misc_feature (87)..(141): Pfam Name: Homeobox domain Pfam Description: Homeobox domain
  misc_feature (16)..(233): Homolog of NCBI NO: 7446247 NR Description: homeotic protein - common sunflower
  misc_feature (16)..(218): Homolog of NCBI NO: 21555784 NR Description: homeobox gene 13 protein [Arabidopsis thaliana]
  misc_feature (16)..(218): Homolog of NCBI NO: 15222452 NR Description: HD-Zip transcription factor, Athb-13
  misc_feature (51)..(185): Homolog of NCBI NO: 99712 NR Description: homeotic protein Athb-3 - Arabidopsis thaliana
  misc_feature (20)..(273): Homolog of NCBI NO: 7446243 NR Description: homeotic protein - carrot
  misc_feature (50)..(286): Homolog of NCBI NO: 21431775 NR Description: Homeobox-leucine zipper protein HAT7 (HD-ZIP
  misc_feature (51)..(286): Homolog of NCBI NO: 25453564 NR Description: homeobox protein HAT7 [imported] - Arabidopsis
  misc_feature (41)..(286): Homolog of NCBI NO: 30685207 NR Description: Homeobox-leucine zipper protein HAT7 (HD-ZIP
  misc_feature (16)..(286): Homolog of NCBI NO: 21593221 NR Description: putative homeobox-leucine zipper protein, HAT7
  misc_feature (1)..(286): Homolog of NCBI NO: 15232066 NR Description: HD-Zip transcription factor
MYVFDPTTEAGLRLEMAFPQHGFMFQQLHEDNSQDQLPSCPPHLFNGGGNYMMNRSMSLMNVQEDHNQTLDEENLSDDGAHTMLGEKKKRLQLEQVKALEKSFELGNKLEPERKIQLAKALGMQPRQIAIWFQNRRARWKTRQLERDYDSLKKQFESLKSDNASLLAYNKKLLAEVMALKNKECNEGNIVKREAEASWSNNGSTENSSDINLEMPRETITTHVNTIKDLFPSSIRSSAHDDDHHQNHEIVQEESLCNMFNGIDETTPAGYWAWSDPNHNHHHHQFN

SEQ ID NO: 26725 - protein, 271 aa, Arabidopsis thaliana
  peptide (1)..(271): Ceres Seq. ID no. 12370683
  misc_feature (72)..(126): Pfam Name: Homeobox domain Pfam Description: Homeobox domain
  misc_feature (1)..(218): Homolog of NCBI NO: 7446247 NR Description: homeotic protein - common sunflower
  misc_feature (1)..(203): Homolog of NCBI NO: 21555784 NR Description: homeobox gene 13 protein [Arabidopsis thaliana]
  misc_feature (1)..(203): Homolog of NCBI NO: 15222452 NR Description: HD-Zip transcription factor, Athb-13
  misc_feature (36)..(170): Homolog of NCBI NO: 99712 NR Description: homeotic protein Athb-3 - Arabidopsis thaliana
  misc_feature (5)..(258): Homolog of NCBI NO: 7446243 NR Description: homeotic protein - carrot
  misc_feature (35)..(271): Homolog of NCBI NO: 21431775 NR Description: Homeobox-leucine zipper protein HAT7 (HD-ZIP
  misc_feature (36)..(271): Homolog of NCBI NO: 25453564 NR Description: homeobox protein HAT7 [imported] - Arabidopsis
  misc_feature (26)..(271): Homolog of NCBI NO: 30685207 NR Description: Homeobox-leucine zipper protein HAT7 (HD-ZIP
  misc_feature (1)..(271): Homolog of NCBI NO: 21593221 NR Description: putative homeobox-leucine zipper protein, HAT7
  misc_feature (1)..(271): Homolog of NCBI NO: 15232066 NR Description: HD-Zip transcription factor
MAFPQHGFMFQQLHEDNSQDQLPSCPPHLFNGGGNYMMNRSMSLMNVQEDHNQTLDEENLSDDGAHTMLGEKKKRLQLEQVKALEKSFELGNKLEPERKIQLAKALGMQPRQIAIWFQNRRARWKTRQLERDYDSLKKQFESLKSDNASLLAYNKKLLAEVMALKNKECNEGNIVKREAEASWSNNGSTENSSDINLEMPRETITTHVNTIKDLFPSSIRSSAHDDDHHQNHEIVQEESLCNMFNGIDETTPAGYWAWSDPNHNHHHHQFN

SEQ ID NO: 26726 - protein, 263 aa, Arabidopsis thaliana
  peptide (1)..(263): Ceres Seq. ID no. 12370684
  misc_feature (64)..(118): Pfam Name: Homeobox domain Pfam Description: Homeobox domain
  misc_feature (1)..(210): Homolog of NCBI NO: 7446247 NR Description: homeotic protein - common sunflower
  misc_feature (1)..(195): Homolog of NCBI NO: 21555784 NR Description: homeobox gene 13 protein [Arabidopsis thaliana]
  misc_feature (1)..(195): Homolog of NCBI NO: 15222452 NR Description: HD-Zip transcription factor, Athb-13
  misc_feature (28)..(162): Homolog of NCBI NO: 99712 NR Description: homeotic protein Athb-3 - Arabidopsis thaliana
  misc_feature (1)..(250): Homolog of NCBI NO: 7446243 NR Description: homeotic protein - carrot
  misc_feature (27)..(263): Homolog of NCBI NO: 21431775 NR Description: Homeobox-leucine zipper protein HAT7 (HD-ZIP
  misc_feature (28)..(263): Homolog of NCBI NO: 25453564 NR Description: homeobox protein HAT7 [imported] - Arabidopsis
  misc_feature (18)..(263): Homolog of NCBI NO: 30685207 NR Description: Homeobox-leucine zipper protein HAT7 (HD-ZIP
  misc_feature (1)..(263): Homolog of NCBI NO: 21593221 NR Description: putative homeobox-leucine zipper protein, HAT7
  misc_feature (1)..(263): Homolog of NCBI NO: 15232066 NR Description: HD-Zip transcription factor
MFQQLHEDNSQDQLPSCPPHLFNGGGNYMMNRSMSLMNVQEDHNQTLDEENLSDDGAHTMLGEKKKRLQLEQVKALEKSFELGNKLEPERKIQLAKALGMQPRQIAIWFQNRRARWKTRQLERDYDSLKKQFESLKSDNASLLAYNKKLLAEVMALKNKECNEGNIVKREAEASWSNNGSTENSSDINLEMPRETITTHVNTIKDLFPSSIRSSAHDDDHHQNHEIVQEESLCNMFNGIDETTPAGYWAWSDPNHNHHHHQFN

SEQ ID NO: 26727 - DNA, 728 bp, Arabidopsis thaliana
  misc_feature (1)..(728): Ceres Seq. ID no. 13487276
  misc_feature: MA Experiment ID: 108434 Result: Down-regulated in Transcription
  misc_feature: MA Experiment 108434 PARAMETER Experiment Name: At_Root_Tips_cDNA_P Parameter: Tissue Value: Root Tips
  misc_feature: MA Experiment ID: 108435 Result: Down-regulated in Transcription
  misc_feature: MA Experiment 108435 PARAMETER Experiment Name: At_stm_Mutants_cDNA_P Parameter: Plant Line Value: wt Landsburg vs stm
  misc_feature: MA Experiment 108435 PARAMETER Experiment Name: At_stm_Mutants_cDNA_P Parameter: Tissue Value: Shoot Apical Meristem Region
  misc_feature: MA Experiment ID: 108462 Result: Up-regulated in Transcription
  misc_feature: MA Experiment 108462 PARAMETER Experiment Name: At_Germinating_Seeds_cDNA_P Parameter: Age (day) Value: 2 vs. 0
  misc_feature: MA Experiment 108462 PARAMETER Experiment Name: At_Germinating_Seeds_cDNA_P Parameter: Tissue Value: Germinating Seeds
  misc_feature: MA Experiment ID: 108463 Result: Up-regulated in Transcription
  misc_feature: MA Experiment 108463 PARAMETER Experiment Name: At_Germinating_Seeds_cDNA_P Parameter: Age (day) Value: 3 vs. 0
  misc_feature: MA Experiment 108463 PARAMETER Experiment Name: At_Germinating_Seeds_cDNA_P Parameter: Tissue Value: Germinating Seeds
  misc_feature: MA Experiment ID: 108464 Result: Up-regulated in Transcription
  misc_feature: MA Experiment 108464 PARAMETER Experiment Name: At_Germinating_Seeds_cDNA_P Parameter: Age (day) Value: 4 vs. 0
  misc_feature: MA Experiment 108464 PARAMETER Experiment Name: At_Germinating_Seeds_cDNA_P Parameter: Tissue Value: Germinating Seeds
  misc_feature: MA Experiment ID: 108577 Result: Up-regulated in Transcription
  misc_feature: MA Experiment 108577 PARAMETER Experiment Name: At_42deg_Heat_cDNA_P Parameter: Temperature (deg C) Value: 42 vs. 22
  misc_feature: MA Experiment 108577 PARAMETER Experiment Name: At_42deg_Heat_cDNA_P Parameter: Timepoint (hr) Value: 6
  misc_feature: MA Experiment 108577 PARAMETER Experiment Name: At_42deg_Heat_cDNA_P Parameter: Tissue Value: Aerial
  misc_feature: MA Experiment ID: 108594 Result: Down-regulated in Transcription
  misc_feature: MA Experiment 108594 PARAMETER Experiment Name: At_Ler-rhl_Root_cDNA_P Parameter: Plant Line Value: null
  misc_feature: MA Experiment ID: 108595 Result: Down-regulated in Transcription
  misc_feature: MA Experiment 108595 PARAMETER Experiment Name: At_Ler-pi_Ovule_cDNA_P Parameter: Plant Line Value: null
  misc_feature: MA Experiment ID: 20000090 Result: Down-regulated in Transcription
  misc_feature: MA Experiment ID: 20000111 Result: Up-regulated in Transcription
  misc_feature: MA Experiment 20000111 PARAMETER Experiment Name: At_42deg_Heat_cDNA_P Parameter: Temperature (deg C) Value: 42 vs. 22
  misc_feature: MA Experiment 20000111 PARAMETER Experiment Name: At_42deg_Heat_cDNA_P Parameter: Timepoint (hr) Value: 6
  misc_feature: MA Experiment 20000111 PARAMETER Experiment Name: At_42deg_Heat_cDNA_P Parameter: Tissue Value: Aerial
  misc_feature: MA Experiment ID: 20000113 Result: Up-regulated in Transcription
  misc_feature: MA Experiment 20000113 PARAMETER Experiment Name: At_42deg_Heat_cDNA_P Parameter: Temperature (deg C) Value: 42 vs. 22
  misc_feature: MA Experiment 20000113 PARAMETER Experiment Name: At_42deg_Heat_cDNA_P Parameter: Timepoint (hr) Value: 8
  misc_feature: MA Experiment 20000113 PARAMETER Experiment Name: At_42deg_Heat_cDNA_P Parameter: Tissue Value: Aerial
ctactagattaactattatacaatcaagcttcgtctccgcaagaacaagactcaattacgtctccaagacaaatcattctgggttcgcttgtcgttctctttcaaaacccagaaacttgagtctctctgtttattctatgggttcttctagttcttctccgaaaccagacaacgtccaagaggctgagaagaatgagtttgcttctctaagtgaaaatgaatggaagaaacggctaacaccagaacagtactacatcactagacagaagggcacagagagagctttcactggggagtattggaactcaaagacccctggagtatataattgtgtatgttgcgacacacctctatttgattcatcaacaaagtttgatagtggaacagggtggccatcttactaccaaccaattggaaacaatgtgaagacaaagctagacctctctatcatcttcatgcctagacaagaagttgtctgtgctgtttgtaacgcccatcttggtcatgtctttgacgacggtccacgcccaaccggaaaacgatattgcctcaacagtgctgctctgaaacttaacgcattggagaaaacaagagattgagagtttctggtacaaggatttgttcatattacataatatactgtatcattatatccactgtatttcctcgtattaagtcgttgtatgtaagtcaactataatccatcaaaaggtttaaactttgagttg

SEQ ID NO: 26728 - protein, 198 aa, Arabidopsis thaliana
  peptide (1)..(198): Ceres Seq. ID no. 13487277
  misc_feature (71)..(193): Pfam Name: SelR domain Pfam Description: SelR domain
  misc_feature (62)..(189): Homolog of NCBI NO: 15678738 NR Description: transcriptional regulator
  misc_feature (70)..(191): Homolog of NCBI NO: 39997546 NR Description: PilB-related protein [Geobacter sulfurreducens
  misc_feature (31)..(196): Homolog of NCBI NO: 37620216 NR Description: hypothetical protein LOC253827 [Homo sapiens]
  misc_feature (70)..(194): Homolog of NCBI NO: 33594433 NR Description: peptide methionine sulfoxide reductase
  misc_feature (70)..(194): Homolog of NCBI NO: 33597872 NR Description: peptide methionine sulfoxide reductase
  misc_feature (70)..(191): Homolog of NCBI NO: 23040381 NR Description: hypothetical protein [Trichodesmium erythraeum
  misc_feature (70)..(189): Homolog of NCBI NO: 37523588 NR Description: hypothetical protein gll4019 [Gloeobacter
  misc_feature (70)..(188): Homolog of NCBI NO: 22298757 NR Description: ORF_ID:tlr1214~hypothetical protein
  misc_feature (46)..(198): Homolog of NCBI NO: 21593253 NR Description: transcriptional regulator, putative [Arabidopsis
  misc_feature (1)..(198): Homolog of NCBI NO: 30695559 NR Description: transcriptional regulator -related [Arabidopsis
TRLTIIQSSFVSARTRLNYVSKTNHSGFACRSLSKPRNLSLSVYSMGSSSSSPKPDNVQEAEKNEFASLSENEWKKRLTPEQYYITRQKGTERAFTGEYWNSKTPGVYNCVCCDTPLFDSSTKFDSGTGWPSYYQPIGNNVKTKLDLSIIFMPRQEVVCAVCNAHLGHVFDDGPRPTGKRYCLNSAALKLNALEKTRD

SEQ ID NO: 26729 - protein, 153 aa, Arabidopsis thaliana
  peptide (1)..(153): Ceres Seq. ID no. 13487278
  misc_feature (26)..(148): Pfam Name: SelR domain Pfam Description: SelR domain
  misc_feature (17)..(144): Homolog of NCBI NO: 15678738 NR Description: transcriptional regulator
  misc_feature (25)..(146): Homolog of NCBI NO: 39997546 NR Description: PilB-related protein [Geobacter sulfurreducens
  misc_feature (1)..(151): Homolog of NCBI NO: 37620216 NR Description: hypothetical protein LOC253827 [Homo sapiens]
  misc_feature (25)..(149): Homolog of NCBI NO: 33594433 NR Description: peptide methionine sulfoxide reductase
  misc_feature (25)..(149): Homolog of NCBI NO: 33597872 NR Description: peptide methionine sulfoxide reductase
  misc_feature (25)..(146): Homolog of NCBI NO: 23040381 NR Description: hypothetical protein [Trichodesmium erythraeum
  misc_feature (25)..(144): Homolog of NCBI NO: 37523588 NR Description: hypothetical protein gll4019 [Gloeobacter
  misc_feature (25)..(143): Homolog of NCBI NO: 22298757 NR Description: ORF_ID:tlr1214~hypothetical protein
  misc_feature (1)..(153): Homolog of NCBI NO: 21593253 NR Description: transcriptional regulator, putative [Arabidopsis
  misc_feature (1)..(153): Homolog of NCBI NO: 30695559 NR Description: transcriptional regulator -related [Arabidopsis
MGSSSSSPKPDNVQEAEKNEFASLSENEWKKRLTPEQYYITRQKGTERAFTGEYWNSKTPGVYNCVCCDTPLFDSSTKFDSGTGWPSYYQPIGNNVKTKLDLSIIFMPRQEVVCAVCNAHLGHVFDDGPRPTGKRYCLNSAALKLNALEKTRD

SEQ ID NO: 26730 - DNA, 830 bp, Arabidopsis thaliana
  misc_feature (1)..(830): Ceres Seq. ID no. 12323407
  misc_feature: MA Experiment ID: 108461 Result: Up-regulated in Transcription
  misc_feature: MA Experiment 108461 PARAMETER Experiment Name: At_Germinating_Seeds_cDNA_P Parameter: Age (day) Value: 1 vs. 0
  misc_feature: MA Experiment 108461 PARAMETER Experiment Name: At_Germinating_Seeds_cDNA_P Parameter: Tissue Value: Germinating Seeds
  misc_feature: MA Experiment ID: 108462 Result: Up-regulated in Transcription
  misc_feature: MA Experiment 108462 PARAMETER Experiment Name: At_Germinating_Seeds_cDNA_P Parameter: Age (day) Value: 2 vs. 0
  misc_feature: MA Experiment 108462 PARAMETER Experiment Name: At_Germinating_Seeds_cDNA_P Parameter: Tissue Value: Germinating Seeds
  misc_feature: MA Experiment ID: 108463 Result: Up-regulated in Transcription
  misc_feature: MA Experiment 108463 PARAMETER Experiment Name: At_Germinating_Seeds_cDNA_P Parameter: Age (day) Value: 3 vs. 0
  misc_feature: MA Experiment 108463 PARAMETER Experiment Name: At_Germinating_Seeds_cDNA_P Parameter: Tissue Value: Germinating Seeds
  misc_feature: MA Experiment ID: 108464 Result: Up-regulated in Transcription
  misc_feature: MA Experiment 108464 PARAMETER Experiment Name: At_Germinating_Seeds_cDNA_P Parameter: Age (day) Value: 4 vs. 0
  misc_feature: MA Experiment 108464 PARAMETER Experiment Name: At_Germinating_Seeds_cDNA_P Parameter: Tissue Value: Germinating Seeds
  misc_feature: MA Experiment ID: 108488 Result: Down-regulated in Transcription
  misc_feature: MA Experiment ID: 108595 Result: Up-regulated in Transcription
  misc_feature: MA Experiment 108595 PARAMETER Experiment Name: At_Ler-pi_Ovule_cDNA_P Parameter: Plant Line Value: null
  misc_feature: MA Experiment ID: 108667 Result: Down-regulated in Transcription
  misc_feature: MA Experiment 108667 PARAMETER Experiment Name: At_2mM_SA_cDNA_P Parameter: Plant Line Value: WS
  misc_feature: MA Experiment 108667 PARAMETER Experiment Name: At_2mM_SA_cDNA_P Parameter: Timepoint (hr) Value: 1
  misc_feature: MA Experiment 108667 PARAMETER Experiment Name: At_2mM_SA_cDNA_P Parameter: Treatment Value: 2mM SA vs. No Treatment
  misc_feature: MA Experiment ID: 20000144 Result: Down-regulated in Transcription
  misc_feature: MA Experiment 20000144 PARAMETER Experiment Name: At_42deg_Heat_cDNA_P Parameter: Temperature (deg C) Value: 42 vs. 22
  misc_feature: MA Experiment 20000144 PARAMETER Experiment Name: At_42deg_Heat_cDNA_P Parameter: Timepoint (hr) Value: 1
  misc_feature: MA Experiment 20000144 PARAMETER Experiment Name: At_42deg_Heat_cDNA_P Parameter: Tissue Value: Aerial
  misc_feature: MA Experiment ID: 20000224 Result: Up-regulated in Transcription
  misc_feature: MA Experiment ID: 20000264 Result: Up-regulated in Transcription
  misc_feature: MA Experiment 20000264 PARAMETER Experiment Name: At_Open_Flower_P Parameter: Age (day) Value: 21
  misc_feature: MA Experiment 20000264 PARAMETER Experiment Name: At_Open_Flower_P Parameter: Plant Line Value: WS
  misc_feature: MA Experiment 20000264 PARAMETER Experiment Name: At_Open_Flower_P Parameter: Tissue Value: Open Flower vs. Whole Plant
  misc_feature: MA Experiment ID: 20000265 Result: Up-regulated in Transcription
  misc_feature: MA Experiment 20000265 PARAMETER Experiment Name: At_Open_Flower_P Parameter: Age (day) Value: 21
  misc_feature: MA Experiment 20000265 PARAMETER Experiment Name: At_Open_Flower_P Parameter: Plant Line Value: WS
  misc_feature: MA Experiment 20000265 PARAMETER Experiment Name: At_Open_Flower_P Parameter: Tissue Value: Closed Flower vs. Whole Plant
  misc_feature: MA Experiment ID: 20000286 Result: Up-regulated in Transcription
  misc_feature: MA Experiment 20000286 PARAMETER Experiment Name: At_Open_Flower_P Parameter: Age (day) Value: 21
  misc_feature: MA Experiment 20000286 PARAMETER Experiment Name: At_Open_Flower_P Parameter: Plant Line Value: WS
  misc_feature: MA Experiment 20000286 PARAMETER Experiment Name: At_Open_Flower_P Parameter: Tissue Value: Half Open vs. Whole Plant
  misc_feature: MA Experiment ID: 20000495 Result: Down-regulated in Transcription
  misc_feature: MA Experiment 20000495 PARAMETER Experiment Name: At_Guard_Cells_P Parameter: Harvest Date Value: 8/2/2002
  misc_feature: MA Experiment 20000495 PARAMETER Experiment Name: At_Guard_Cells_P Parameter: Organism Value: A. thaliana
  misc_feature: MA Experiment 20000495 PARAMETER Experiment Name: At_Guard_Cells_P Parameter: Tissue Value: Guard Cells vs. Leaves
  misc_feature: MA Experiment ID: 20000573 Result: Up-regulated in Transcription
  misc_feature: MA Experiment 20000573 PARAMETER Experiment Name: At_100uM_ABA_Mutants__P Parameter: Organism Value: A. thaliana
  misc_feature: MA Experiment 20000573 PARAMETER Experiment Name: At_100uM_ABA_Mutants__P Parameter: Plant Line Value: CS22 vs. Ler wt
  misc_feature: MA Experiment 20000573 PARAMETER Experiment Name: At_100uM_ABA_Mutants__P Parameter: Timepoint (hr) Value: N/A
  misc_feature: MA Experiment 20000573 PARAMETER Experiment Name: At_100uM_ABA_Mutants__P Parameter: Tissue Value: Whole Plant
  misc_feature: MA Experiment 20000573 PARAMETER Experiment Name: At_100uM_ABA_Mutants__P Parameter: Treatment Value: None
  misc_feature: MA Experiment ID: 20000574 Result: Up-regulated in Transcription
  misc_feature: MA Experiment 20000574 PARAMETER Experiment Name: At_100uM_ABA_Mutants__P Parameter: Organism Value: A. thaliana
  misc_feature: MA Experiment 20000574 PARAMETER Experiment Name: At_100uM_ABA_Mutants__P Parameter: Plant Line Value: CS23 vs. Ler wt
  misc_feature: MA Experiment 20000574 PARAMETER Experiment Name: At_100uM_ABA_Mutants__P Parameter: Timepoint (hr) Value: N/A
  misc_feature: MA Experiment 20000574 PARAMETER Experiment Name: At_100uM_ABA_Mutants__P Parameter: Tissue Value: Whole Plant
  misc_feature: MA Experiment 20000574 PARAMETER Experiment Name: At_100uM_ABA_Mutants__P Parameter: Treatment Value: None
  misc_feature: MA Experiment ID: 20000794 Result: Up-regulated in Transcription
  misc_feature: MA Experiment 20000794 PARAMETER Experiment Name: At_Petals_P Parameter: Age (day) Value: 23-25 days
  misc_feature: MA Experiment 20000794 PARAMETER Experiment Name: At_Petals_P Parameter: Plant Line Value: WS
  misc_feature: MA Experiment 20000794 PARAMETER Experiment Name: At_Petals_P Parameter: Tissue Value: Petals vs. Whole plant
  misc_feature: MA Experiment ID: 20001457 Result: Down-regulated in Transcription
  misc_feature: MA Experiment 20001457 PARAMETER Experiment Name: At_50mM_NH4NO3_L-to-H_P Parameter: Age (day) Value: Undefined
  misc_feature: MA Experiment 20001457 PARAMETER Experiment Name: At_50mM_NH4NO3_L-to-H_P Parameter: Organism Value: Undefined
  misc_feature: MA Experiment 20001457 PARAMETER Experiment Name: At_50mM_NH4NO3_L-to-H_P Parameter: Plant Line Value: Undefined
  misc_feature: MA Experiment 20001457 PARAMETER Experiment Name: At_50mM_NH4NO3_L-to-H_P Parameter: Timepoint (hr) Value: 0.5
  misc_feature: MA Experiment 20001457 PARAMETER Experiment Name: At_50mM_NH4NO3_L-to-H_P Parameter: Tissue Value: Siliques
  misc_feature: MA Experiment 20001457 PARAMETER Experiment Name: At_50mM_NH4NO3_L-to-H_P Parameter: Treatment Value: 50mM NH4NO3 vs. 100mM Manitol
  misc_feature: MA Experiment ID: 20001555 Result: Down-regulated in Transcription
  misc_feature: MA Experiment 20001555 PARAMETER Experiment Name: At_Drought_Soil_Dry_P Parameter: Age (day) Value: 24
  misc_feature: MA Experiment 20001555 PARAMETER Experiment Name: At_Drought_Soil_Dry_P Parameter: Organism Value: A. thaliana
  misc_feature: MA Experiment 20001555 PARAMETER Experiment Name: At_Drought_Soil_Dry_P Parameter: Plant Line Value: WS
  misc_feature: MA Experiment 20001555 PARAMETER Experiment Name: At_Drought_Soil_Dry_P Parameter: Post Timepoint (hr) Value: None
  misc_feature: MA Experiment 20001555 PARAMETER Experiment Name: At_Drought_Soil_Dry_P Parameter: Post-Treatment Value: None
  misc_feature: MA Experiment 20001555 PARAMETER Experiment Name: At_Drought_Soil_Dry_P Parameter: Timepoint (day) Value: 10
  misc_feature: MA Experiment 20001555 PARAMETER Experiment Name: At_Drought_Soil_Dry_P Parameter: Treatment Value: Drought vs. No Drought
  misc_feature: MA Experiment ID: 20001556 Result: Down-regulated in Transcription
  misc_feature: MA Experiment 20001556 PARAMETER Experiment Name: At_Drought_Soil_Dry_P Parameter: Age (day) Value: 26
  misc_feature: MA Experiment 20001556 PARAMETER Experiment Name: At_Drought_Soil_Dry_P Parameter: Organism Value: A. thaliana
  misc_feature: MA Experiment 20001556 PARAMETER Experiment Name: At_Drought_Soil_Dry_P Parameter: Plant Line Value: WS
  misc_feature: MA Experiment 20001556 PARAMETER Experiment Name: At_Drought_Soil_Dry_P Parameter: Post Timepoint (hr) Value: None
  misc_feature: MA Experiment 20001556 PARAMETER Experiment Name: At_Drought_Soil_Dry_P Parameter: Post-Treatment Value: None
  misc_feature: MA Experiment 20001556 PARAMETER Experiment Name: At_Drought_Soil_Dry_P Parameter: Timepoint (day) Value: 12
  misc_feature: MA Experiment 20001556 PARAMETER Experiment Name: At_Drought_Soil_Dry_P Parameter: Treatment Value: Drought vs. No Drought
aacacataacaacaacaaagaaccaaataaaagaaaaaaattctataagtaatctttattttgctaaagaaaacatagaaatctgtttgcaaagaagaagatatgggaaacagtttacggtgttgtttggcttgtgtacttccatgtggagctttagatttgatccgtatcgtacatctcaacggccacgtcgacgagatcactagtccaatgaccgccggcgagattcttcaggcgaatcctaaccatgtcttaagcaaaccttgttctcaaggagttgtgcgtaagatcttgatcttgtctcctgaatctgagcttaagcgtggaagcatctattttcttatcccggatacttctatgccggagaagaagaaaacaaagaagagaaaagagctccgatgccggaaaaagcctcttgaaagcggcaacgatattaatagtgatcatgtgagtactaataaggatcttgatggtcattgtttgacgttgtgtgagaaatatttggaagatgttatgttgtcggagaagatgagttcggccggtaaagagaatcgtcaccgtcggaaacatagccggtcggcgtcagtgtccacgtggcggcctcaccttgatagcatcactgaggatcttaattaaattagtacttcttctttttttcactccttgttaattatgtctctattttcttaaattcttttttttttttttggatccggaatcggatttttatttaacatgcccggtgagaaaatttcaaatattttatttattatgaagttaaaaccaaaactatgtactgttctcatgtggataagatctatgttaaattg

SEQ ID NO: 26731 - protein, 177 aa, Arabidopsis thaliana
  peptide (1)..(177): Ceres Seq. ID no. 12323408
  misc_feature (59)..(175): Homolog of NCBI NO: 34909702 NR Description: B1131G08.9 [Oryza sativa (japonica
  misc_feature (25)..(91): Homolog of NCBI NO: 34896398 NR Description: hypothetical protein [Oryza sativa (japonica
  misc_feature (3)..(104): Homolog of NCBI NO: 34909702 NR Description: B1131G08.9 [Oryza sativa (japonica
  misc_feature (1)..(174): Homolog of NCBI NO: 18396990 NR Description: Expressed protein
  misc_feature (1)..(175): Homolog of NCBI NO: 34896112 NR Description: P0701D05.10 [Oryza sativa (japonica
  misc_feature (1)..(175): Homolog of NCBI NO: 34907910 NR Description: P0439E11.22 [Oryza sativa (japonica
  misc_feature (1)..(177): Homolog of NCBI NO: 18390706 NR Description: expressed protein
  misc_feature (1)..(177): Homolog of NCBI NO: 15227725 NR Description: hypothetical protein; protein id: At2g30230.1
MGNSLRCCLACVLPCGALDLIRIVHLNGHVDEITSPMTAGEILQANPNHVLSKPCSQGVVRKILILSPESELKRGSIYFLIPDTSMPEKKKTKKRKELRCRKKPLESGNDINSDHVSTNKDLDGHCLTLCEKYLEDVMLSEKMSSAGKENRHRRKHSRSASVSTWRPHLDSITEDLN

SEQ ID NO: 26732 - protein, 141 aa, Arabidopsis thaliana
  peptide (1)..(141): Ceres Seq. ID no. 12323409
  misc_feature (23)..(139): Homolog of NCBI NO: 34909702 NR Description: B1131G08.9 [Oryza sativa (japonica
  misc_feature (1)..(55): Homolog of NCBI NO: 34896398 NR Description: hypothetical protein [Oryza sativa (japonica
  misc_feature (1)..(68): Homolog of NCBI NO: 34909702 NR Description: B1131G08.9 [Oryza sativa (japonica
  misc_feature (1)..(138): Homolog of NCBI NO: 18396990 NR Description: Expressed protein
  misc_feature (1)..(139): Homolog of NCBI NO: 34896112 NR Description: P0701D05.10 [Oryza sativa (japonica
  misc_feature (1)..(139): Homolog of NCBI NO: 34907910 NR Description: P0439E11.22 [Oryza sativa (japonica
  misc_feature (1)..(141): Homolog of NCBI NO: 18390706 NR Description: expressed protein
  misc_feature (1)..(141): Homolog of NCBI NO: 15227725 NR Description: hypothetical protein; protein id: At2g30230.1
MTAGEILQANPNHVLSKPCSQGVVRKILILSPESELKRGSIYFLIPDTSMPEKKKTKKRKELRCRKKPLESGNDINSDHVSTNKDLDGHCLTLCEKYLEDVMLSEKMSSAGKENRHRRKHSRSASVSTWRPHLDSITEDLN

SEQ ID NO: 26733 - protein, 92 aa, Arabidopsis thaliana
  peptide (1)..(92): Ceres Seq. ID no. 12323410
  misc_feature (1)..(90): Homolog of NCBI NO: 34909702 NR Description: B1131G08.9 [Oryza sativa (japonica
  misc_feature (1)..(19): Homolog of NCBI NO: 34909702 NR Description: B1131G08.9 [Oryza sativa (japonica
  misc_feature (1)..(89): Homolog of NCBI NO: 18396990 NR Description: Expressed protein
  misc_feature (1)..(90): Homolog of NCBI NO: 34896112 NR Description: P0701D05.10 [Oryza sativa (japonica
  misc_feature (1)..(90): Homolog of NCBI NO: 34907910 NR Description: P0439E11.22 [Oryza sativa (japonica
  misc_feature (1)..(92): Homolog of NCBI NO: 18390706 NR Description: expressed protein
  misc_feature (1)..(92): Homolog of NCBI NO: 15227725 NR Description: hypothetical protein; protein id: At2g30230.1
MPEKKKTKKRKELRCRKKPLESGNDINSDHVSTNKDLDGHCLTLCEKYLEDVMLSEKMSSAGKENRHRRKHSRSASVSTWRPHLDSITEDLN

SEQ ID NO: 26734 - DNA, 866 bp, Arabidopsis thaliana
  misc_feature (1)..(866): Ceres Seq. ID no. 12559528
  misc_feature: MA Experiment ID: 108434 Result: Up-regulated in Transcription
  misc_feature: MA Experiment 108434 PARAMETER Experiment Name: At_Root_Tips_cDNA_P Parameter: Tissue Value: Root Tips
  misc_feature: MA Experiment ID: 108461 Result: Down-regulated in Transcription
  misc_feature: MA Experiment 108461 PARAMETER Experiment Name: At_Germinating_Seeds_cDNA_P Parameter: Age (day) Value: 1 vs. 0
  misc_feature: MA Experiment 108461 PARAMETER Experiment Name: At_Germinating_Seeds_cDNA_P Parameter: Tissue Value: Germinating Seeds
  misc_feature: MA Experiment ID: 108462 Result: Down-regulated in Transcription
  misc_feature: MA Experiment 108462 PARAMETER Experiment Name: At_Germinating_Seeds_cDNA_P Parameter: Age (day) Value: 2 vs. 0
  misc_feature: MA Experiment 108462 PARAMETER Experiment Name: At_Germinating_Seeds_cDNA_P Parameter: Tissue Value: Germinating Seeds
  misc_feature: MA Experiment ID: 108463 Result: Down-regulated in Transcription
  misc_feature: MA Experiment 108463 PARAMETER Experiment Name: At_Germinating_Seeds_cDNA_P Parameter: Age (day) Value: 3 vs. 0
  misc_feature: MA Experiment 108463 PARAMETER Experiment Name: At_Germinating_Seeds_cDNA_P Parameter: Tissue Value: Germinating Seeds
  misc_feature: MA Experiment ID: 108464 Result: Down-regulated in Transcription
  misc_feature: MA Experiment 108464 PARAMETER Experiment Name: At_Germinating_Seeds_cDNA_P Parameter: Age (day) Value: 4 vs. 0
  misc_feature: MA Experiment 108464 PARAMETER Experiment Name: At_Germinating_Seeds_cDNA_P Parameter: Tissue Value: Germinating Seeds
  misc_feature: MA Experiment ID: 108573 Result: Down-regulated in Transcription
  misc_feature: MA Experiment 108573 PARAMETER Experiment Name: At_Drought_cDNA_P Parameter: Timepoint (hr) Value: 6
  misc_feature: MA Experiment 108573 PARAMETER Experiment Name: At_Drought_cDNA_P Parameter: Tissue Value: Aerial
  misc_feature: MA Experiment 108573 PARAMETER Experiment Name: At_Drought_cDNA_P Parameter: Treatment Value: Drought vs. No Drought
  misc_feature: MA Experiment ID: 20000113 Result: Up-regulated in Transcription
  misc_feature: MA Experiment 20000113 PARAMETER Experiment Name: At_42deg_Heat_cDNA_P Parameter: Temperature (deg C) Value: 42 vs. 22
  misc_feature: MA Experiment 20000113 PARAMETER Experiment Name: At_42deg_Heat_cDNA_P Parameter: Timepoint (hr) Value: 8
  misc_feature: MA Experiment 20000113 PARAMETER Experiment Name: At_42deg_Heat_cDNA_P Parameter: Tissue Value: Aerial
  misc_feature: MA Experiment ID: 20000180 Result: Down-regulated in Transcription
  misc_feature: MA Experiment 20000180 PARAMETER Experiment Name: At_Germinating_Seeds_P Parameter: Age (hr) Value: 24 vs. 0
  misc_feature: MA Experiment 20000180 PARAMETER Experiment Name: At_Germinating_Seeds_P Parameter: Tissue Value: Germinating Seeds
  misc_feature: MA Experiment ID: 20000184 Result: Down-regulated in Transcription
  misc_feature: MA Experiment 20000184 PARAMETER Experiment Name: At_Shoots__P Parameter: Age (day) Value: 7
  misc_feature: MA Experiment 20000184 PARAMETER Experiment Name: At_Shoots__P Parameter: Tissue Value: Shoots vs. Whole Plant
  misc_feature: MA Experiment ID: 20000224 Result: Up-regulated in Transcription
  misc_feature: MA Experiment ID: 20001451 Result: Up-regulated in Transcription
  misc_feature: MA Experiment 20001451 PARAMETER Experiment Name: At_Far-red-induction_P Parameter: Age (day) Value: 7
  misc_feature: MA Experiment 20001451 PARAMETER Experiment Name: At_Far-red-induction_P Parameter: Light Value: Far-red vs. White
  misc_feature: MA Experiment 20001451 PARAMETER Experiment Name: At_Far-red-induction_P Parameter: Organism Value: A. thaliana
  misc_feature: MA Experiment 20001451 PARAMETER Experiment Name: At_Far-red-induction_P Parameter: Plant Line Value: Columbia
  misc_feature: MA Experiment 20001451 PARAMETER Experiment Name: At_Far-red-induction_P Parameter: Timepoint (hr) Value: 24
  misc_feature: MA Experiment 20001451 PARAMETER Experiment Name: At_Far-red-induction_P Parameter: Tissue Value: Whole Plant
  misc_feature: MA Experiment ID: 20001557 Result: Up-regulated in Transcription
  misc_feature: MA Experiment 20001557 PARAMETER Experiment Name: At_Drought_Soil_Dry_P Parameter: Age (day) Value: 27
  misc_feature: MA Experiment 20001557 PARAMETER Experiment Name: At_Drought_Soil_Dry_P Parameter: Organism Value: A. thaliana
  misc_feature: MA Experiment 20001557 PARAMETER Experiment Name: At_Drought_Soil_Dry_P Parameter: Plant Line Value: WS
  misc_feature: MA Experiment 20001557 PARAMETER Experiment Name: At_Drought_Soil_Dry_P Parameter: Post Timepoint (hr) Value: 3
  misc_feature: MA Experiment 20001557 PARAMETER Experiment Name: At_Drought_Soil_Dry_P Parameter: Post-Treatment Value: Re-Water vs. No Drought
  misc_feature: MA Experiment 20001557 PARAMETER Experiment Name: At_Drought_Soil_Dry_P Parameter: Timepoint (day) Value: 13
  misc_feature: MA Experiment 20001557 PARAMETER Experiment Name: At_Drought_Soil_Dry_P Parameter: Treatment Value: Drought vs. No Drought
  misc_feature: MA Experiment ID: 20001558 Result: Up-regulated in Transcription
  misc_feature: MA Experiment 20001558 PARAMETER Experiment Name: At_Drought_Soil_Dry_P Parameter: Age (day) Value: 27
  misc_feature: MA Experiment 20001558 PARAMETER Experiment Name: At_Drought_Soil_Dry_P Parameter: Organism Value: A. thaliana
  misc_feature: MA Experiment 20001558 PARAMETER Experiment Name: At_Drought_Soil_Dry_P Parameter: Plant Line Value: WS
  misc_feature: MA Experiment 20001558 PARAMETER Experiment Name: At_Drought_Soil_Dry_P Parameter: Post Timepoint (hr) Value: 6
  misc_feature: MA Experiment 20001558 PARAMETER Experiment Name: At_Drought_Soil_Dry_P Parameter: Post-Treatment Value: Re-Water vs. No Drought
  misc_feature: MA Experiment 20001558 PARAMETER Experiment Name: At_Drought_Soil_Dry_P Parameter: Timepoint (day) Value: 13
  misc_feature: MA Experiment 20001558 PARAMETER Experiment Name: At_Drought_Soil_Dry_P Parameter: Treatment Value: Drought vs. No Drought
  misc_feature: MA Experiment ID: 20001757 Result: Up-regulated in Transcription
  misc_feature: MA Experiment 20001757 PARAMETER Experiment Name: At_50mM_NH4NO3_L-to-H_P Parameter: Timepoint (hr) Value: 6
  misc_feature: MA Experiment 20001757 PARAMETER Experiment Name: At_50mM_NH4NO3_L-to-H_P Parameter: Tissue Value: Leaf
  misc_feature: MA Experiment 20001757 PARAMETER Experiment Name: At_50mM_NH4NO3_L-to-H_P Parameter: Treatment Value: 50mM NH4NO3 vs 100mM Mannitol
aaatcgaaaactaattgtatcatcctcttccttgcgttctctctttctctctctcgccgacgacgaaaacatgggtgccaaggcgaagaaagctttgaagaagaacatgaagaaggttgctgcttcggcttcttcttctcagctacctcttccccagaacccgaaaccttcagctgattttttgccactagaaggaggtccagctcgaaaagctccagttaccaccccacctcttcagaataaagctactgtgctatacatcggtagaatccctcatggcttctatgagactgagattgaagctttcttctcgcagtttggaacagttaagagagttagagtcgccagaaacaaaaagactgggaaatcaaagcattttgggttcatacagtttgaggaccctgaggtggcggaaattgcagcgggtgcaatgaatgattatttgttgatggagcacatgcttaaagtccatgtcattgaaccagagaatgttaaacccaatctgtggagagggtttaaatgtaacttcaaaccagtggattcggttcagattgagcgaagacaacttaataaggaaaggacattggaagagcataggaaaatgttgcagaagatagttaaaaaggatcagaaaaggaggaagagaatcgaagccgctggaatagaatacgaatgccctgagcttgttggaaacacacagccagtcccgaagaggatcaagtttagtgaagaagactaaaagctgaagctgaacaacacttttccgataaccttttttgaatagaaatctgttctgttgtactcttgatattggatcaataactaaactttaaagtttgcaatgaaaacttctgtttcaatgatcc

SEQ ID NO: 26735 - protein, 245 aa, Arabidopsis thaliana
  peptide (1)..(245): Ceres Seq. ID no. 12559529
  misc_feature (85)..(156): Pfam Name: RNA recognition motif. (a.k.a. RRM, RBD, or RNP domain) Pfam Description: RNA recognition motif. (a.k.a. RRM, RBD, or RNP
  misc_feature (85)..(156): Pfam Name: RNA recognition motif. (a.k.a. RRM, RBD, or RNP domain) Pfam Description: RNA recognition motif. (a.k.a. RRM, RBD, or RNP
  misc_feature (84)..(226): Homolog of NCBI NO: 38111220 NR Description: hypothetical protein MG07186.4 [Magnaporthe
  misc_feature (78)..(207): Homolog of NCBI NO: 6324219 NR Description: Nucleolar protein 15; Nop15p [Saccharomyces
  misc_feature (58)..(224): Homolog of NCBI NO: 20302745 NR Description: unknown [Branchiostoma floridae]
  misc_feature (50)..(237): Homolog of NCBI NO: 21314753 NR Description: MKI67 (FHA domain) interacting nucleolar
  misc_feature (50)..(237): Homolog of NCBI NO: 13699902 NR Description: nucleolar phosphoprotein Nopp34 [Homo sapiens]
  misc_feature (84)..(226): Homolog of NCBI NO: 38111220 NR Description: hypothetical protein MG07186.4 [Magnaporthe
  misc_feature (58)..(224): Homolog of NCBI NO: 20302745 NR Description: unknown [Branchiostoma floridae]
  misc_feature (50)..(237): Homolog of NCBI NO: 13699902 NR Description: nucleolar phosphoprotein Nopp34 [Homo sapiens]
  misc_feature (24)..(245): Homolog of NCBI NO: 15238220 NR Description: RRM-containing protein
  misc_feature (24)..(245): Homolog of NCBI NO: 18652180 NR Description: RNA binding protein [Elaeis oleifera]
  misc_feature (84)..(237): Homolog of NCBI NO: 40741317 NR Description: hypothetical protein AN4346.2 [Aspergillus
  misc_feature (50)..(245): Homolog of NCBI NO: 27545352 NR Description: mki67 (FHA domain) interacting nucleolar
  misc_feature (78)..(224): Homolog of NCBI NO: 19076051 NR Description: putative RNA-binding protein [Schizosaccharomyces
  misc_feature (50)..(237): Homolog of NCBI NO: 21314753 NR Description: MKI67 (FHA domain) interacting nucleolar
  misc_feature (78)..(207): Homolog of NCBI NO: 6324219 NR Description: Nucleolar protein 15; Nop15p [Saccharomyces
  misc_feature (78)..(224): Homolog of NCBI NO: 19076051 NR Description: putative RNA-binding protein [Schizosaccharomyces
  misc_feature (50)..(245): Homolog of NCBI NO: 27545352 NR Description: mki67 (FHA domain) interacting nucleolar
  misc_feature (84)..(237): Homolog of NCBI NO: 40741317 NR Description: hypothetical protein AN4346.2 [Aspergillus
  misc_feature (24)..(245): Homolog of NCBI NO: 18652180 NR Description: RNA binding protein [Elaeis oleifera]
  misc_feature (24)..(245): Homolog of NCBI NO: 15238220 NR Description: RRM-containing protein
NRKLIVSSSSLRSLFLSLADDENMGAKAKKALKKNMKKVAASASSSQLPLPQNPKPSADFLPLEGGPARKAPVTTPPLQNKATVLYIGRIPHGFYETEIEAFFSQFGTVKRVRVARNKKTGKSKHFGFIQFEDPEVAEIAAGAMNDYLLMEHMLKVHVIEPENVKPNLWRGFKCNFKPVDSVQIERRQLNKERTLEEHRKMLQKIVKKDQKRRKRIEAAGIEYECPELVGNTQPVPKRIKFSEED

SEQ ID NO: 26736 - protein, 222 aa, Arabidopsis thaliana
  peptide (1)..(222): Ceres Seq. ID no. 12559530
  misc_feature (62)..(133): Pfam Name: RNA recognition motif. (a.k.a. RRM, RBD, or RNP domain) Pfam Description: RNA recognition motif. (a.k.a. RRM, RBD, or RNP
  misc_feature (62)..(133): Pfam Name: RNA recognition motif. (a.k.a. RRM, RBD, or RNP domain) Pfam Description: RNA recognition motif. (a.k.a. RRM, RBD, or RNP
  misc_feature (61)..(203): Homolog of NCBI NO: 38111220 NR Description: hypothetical protein MG07186.4 [Magnaporthe
  misc_feature (55)..(184): Homolog of NCBI NO: 6324219 NR Description: Nucleolar protein 15; Nop15p [Saccharomyces
  misc_feature (35)..(201): Homolog of NCBI NO: 20302745 NR Description: unknown [Branchiostoma floridae]
  misc_feature (27)..(214): Homolog of NCBI NO: 21314753 NR Description: MKI67 (FHA domain) interacting nucleolar
  misc_feature (27)..(214): Homolog of NCBI NO: 13699902 NR Description: nucleolar phosphoprotein Nopp34 [Homo sapiens]
  misc_feature (61)..(203): Homolog of NCBI NO: 38111220 NR Description: hypothetical protein MG07186.4 [Magnaporthe
  misc_feature (35)..(201): Homolog of NCBI NO: 20302745 NR Description: unknown [Branchiostoma floridae]
  misc_feature (27)..(214): Homolog of NCBI NO: 13699902 NR Description: nucleolar phosphoprotein Nopp34 [Homo sapiens]
  misc_feature (1)..(222): Homolog of NCBI NO: 15238220 NR Description: RRM-containing protein
  misc_feature (1)..(222): Homolog of NCBI NO: 18652180 NR Description: RNA binding protein [Elaeis oleifera]
  misc_feature (61)..(214): Homolog of NCBI NO: 40741317 NR Description: hypothetical protein AN4346.2 [Aspergillus
  misc_feature (27)..(222): Homolog of NCBI NO: 27545352 NR Description: mki67 (FHA domain) interacting nucleolar
  misc_feature (55)..(201): Homolog of NCBI NO: 19076051 NR Description: putative RNA-binding protein [Schizosaccharomyces
  misc_feature (27)..(214): Homolog of NCBI NO: 21314753 NR Description: MKI67 (FHA domain) interacting nucleolar
  misc_feature (55)..(184): Homolog of NCBI NO: 6324219 NR Description: Nucleolar protein 15; Nop15p [Saccharomyces
  misc_feature (55)..(201): Homolog of NCBI NO: 19076051 NR Description: putative RNA-binding protein [Schizosaccharomyces
  misc_feature (27)..(222): Homolog of NCBI NO: 27545352 NR Description: mki67 (FHA domain) interacting nucleolar
  misc_feature (61)..(214): Homolog of NCBI NO: 40741317 NR Description: hypothetical protein AN4346.2 [Aspergillus
  misc_feature (1)..(222): Homolog of NCBI NO: 18652180 NR Description: RNA binding protein [Elaeis oleifera]
  misc_feature (1)..(222): Homolog of NCBI NO: 15238220 NR Description: RRM-containing protein
MGAKAKKALKKNMKKVAASASSSQLPLPQNPKPSADFLPLEGGPARKAPVTTPPLQNKATVLYIGRIPHGFYETEIEAFFSQFGTVKRVRVARNKKTGKSKHFGFIQFEDPEVAEIAAGAMNDYLLMEHMLKVHVIEPENVKPNLWRGFKCNFKPVDSVQIERRQLNKERTLEEHRKMLQKIVKKDQKRRKRIEAAGIEYECPELVGNTQPVPKRIKFSEED

SEQ ID NO: 26737 - protein, 210 aa, Arabidopsis thaliana
  peptide (1)..(210): Ceres Seq. ID no. 12559531
  misc_feature (50)..(121): Pfam Name: RNA recognition motif. (a.k.a. RRM, RBD, or RNP domain) Pfam Description: RNA recognition motif. (a.k.a. RRM, RBD, or RNP
  misc_feature (50)..(121): Pfam Name: RNA recognition motif. (a.k.a. RRM, RBD, or RNP domain) Pfam Description: RNA recognition motif. (a.k.a. RRM, RBD, or RNP
  misc_feature (49)..(191): Homolog of NCBI NO: 38111220 NR Description: hypothetical protein MG07186.4 [Magnaporthe
  misc_feature (43)..(172): Homolog of NCBI NO: 6324219 NR Description: Nucleolar protein 15; Nop15p [Saccharomyces
  misc_feature (23)..(189): Homolog of NCBI NO: 20302745 NR Description: unknown [Branchiostoma floridae]
  misc_feature (15)..(202): Homolog of NCBI NO: 21314753 NR Description: MKI67 (FHA domain) interacting nucleolar
  misc_feature (15)..(202): Homolog of NCBI NO: 13699902 NR Description: nucleolar phosphoprotein Nopp34 [Homo sapiens]
  misc_feature (49)..(191): Homolog of NCBI NO: 38111220 NR Description: hypothetical protein MG07186.4 [Magnaporthe
  misc_feature (23)..(189): Homolog of NCBI NO: 20302745 NR Description: unknown [Branchiostoma floridae]
  misc_feature (15)..(202): Homolog of NCBI NO: 13699902 NR Description: nucleolar phosphoprotein Nopp34 [Homo sapiens]
  misc_feature (1)..(210): Homolog of NCBI NO: 15238220 NR Description: RRM-containing protein
  misc_feature (1)..(210): Homolog of NCBI NO: 18652180 NR Description: RNA binding protein [Elaeis oleifera]
  misc_feature (49)..(202): Homolog of NCBI NO: 40741317 NR Description: hypothetical protein AN4346.2 [Aspergillus
  misc_feature (15)..(210): Homolog of NCBI NO: 27545352 NR Description: mki67 (FHA domain) interacting nucleolar
  misc_feature (43)..(189): Homolog of NCBI NO: 19076051 NR Description: putative RNA-binding protein [Schizosaccharomyces
  misc_feature (15)..(202): Homolog of NCBI NO: 21314753 NR Description: MKI67 (FHA domain) interacting nucleolar
  misc_feature (43)..(172): Homolog of NCBI NO: 6324219 NR Description: Nucleolar protein 15; Nop15p [Saccharomyces
  misc_feature (43)..(189): Homolog of NCBI NO: 19076051 NR Description: putative RNA-binding protein [Schizosaccharomyces
  misc_feature (15)..(210): Homolog of NCBI NO: 27545352 NR Description: mki67 (FHA domain) interacting nucleolar
  misc_feature (49)..(202): Homolog of NCBI NO: 40741317 NR Description: hypothetical protein AN4346.2 [Aspergillus
  misc_feature (1)..(210): Homolog of NCBI NO: 18652180 NR Description: RNA binding protein [Elaeis oleifera]
  misc_feature (1)..(210): Homolog of NCBI NO: 15238220 NR Description: RRM-containing protein
MKKVAASASSSQLPLPQNPKPSADFLPLEGGPARKAPVTTPPLQNKATVLYIGRIPHGFYETEIEAFFSQFGTVKRVRVARNKKTGKSKHFGFIQFEDPEVAEIAAGAMNDYLLMEHMLKVHVIEPENVKPNLWRGFKCNFKPVDSVQIERRQLNKERTLEEHRKMLQKIVKKDQKRRKRIEAAGIEYECPELVGNTQPVPKRIKFSEED

SEQ ID NO: 26738 - DNA, 1950 bp, Arabidopsis thaliana
  misc_feature (1)..(1950): Ceres Seq. ID no. 12338515
  misc_feature: MA Experiment ID: 108434 Result: Up-regulated in Transcription
  misc_feature: MA Experiment 108434 PARAMETER Experiment Name: At_Root_Tips_cDNA_P Parameter: Tissue Value: Root Tips
  misc_feature: MA Experiment ID: 108461 Result: Up-regulated in Transcription
  misc_feature: MA Experiment 108461 PARAMETER Experiment Name: At_Germinating_Seeds_cDNA_P Parameter: Age (day) Value: 1 vs. 0
  misc_feature: MA Experiment 108461 PARAMETER Experiment Name: At_Germinating_Seeds_cDNA_P Parameter: Tissue Value: Germinating Seeds
  misc_feature: MA Experiment ID: 20000111 Result: Down-regulated in Transcription
  misc_feature: MA Experiment 20000111 PARAMETER Experiment Name: At_42deg_Heat_cDNA_P Parameter: Temperature (deg C) Value: 42 vs. 22
  misc_feature: MA Experiment 20000111 PARAMETER Experiment Name: At_42deg_Heat_cDNA_P Parameter: Timepoint (hr) Value: 6
  misc_feature: MA Experiment 20000111 PARAMETER Experiment Name: At_42deg_Heat_cDNA_P Parameter: Tissue Value: Aerial
  misc_feature: MA Experiment ID: 20000113 Result: Down-regulated in Transcription
  misc_feature: MA Experiment 20000113 PARAMETER Experiment Name: At_42deg_Heat_cDNA_P Parameter: Temperature (deg C) Value: 42 vs. 22
  misc_feature: MA Experiment 20000113 PARAMETER Experiment Name: At_42deg_Heat_cDNA_P Parameter: Timepoint (hr) Value: 8
  misc_feature: MA Experiment 20000113 PARAMETER Experiment Name: At_42deg_Heat_cDNA_P Parameter: Tissue Value: Aerial
  misc_feature: MA Experiment ID: 20000173 Result: Down-regulated in Transcription
  misc_feature: MA Experiment 20000173 PARAMETER Experiment Name: At_42deg_Heat_P Parameter: Age (day) Value: 14
  misc_feature: MA Experiment 20000173 PARAMETER Experiment Name: At_42deg_Heat_P Parameter: Organism Value: A. thaliana
  misc_feature: MA Experiment 20000173 PARAMETER Experiment Name: At_42deg_Heat_P Parameter: Plant Line Value: WS
  misc_feature: MA Experiment 20000173 PARAMETER Experiment Name: At_42deg_Heat_P Parameter: Temperature (deg C) Value: 42 vs. 22
  misc_feature: MA Experiment 20000173 PARAMETER Experiment Name: At_42deg_Heat_P Parameter: Timepoint (hr) Value: 6
  misc_feature: MA Experiment 20000173 PARAMETER Experiment Name: At_42deg_Heat_P Parameter: Tissue Value: Aerial
  misc_feature: MA Experiment ID: 20000184 Result: Down-regulated in Transcription
  misc_feature: MA Experiment 20000184 PARAMETER Experiment Name: At_Shoots__P Parameter: Age (day) Value: 7
  misc_feature: MA Experiment 20000184 PARAMETER Experiment Name: At_Shoots__P Parameter: Tissue Value: Shoots vs. Whole Plant
  misc_feature: MA Experiment ID: 20000224 Result: Up-regulated in Transcription
  misc_feature: MA Experiment ID: 20000794 Result: Down-regulated in Transcription
  misc_feature: MA Experiment 20000794 PARAMETER Experiment Name: At_Petals_P Parameter: Age (day) Value: 23-25 days
  misc_feature: MA Experiment 20000794 PARAMETER Experiment Name: At_Petals_P Parameter: Plant Line Value: WS
  misc_feature: MA Experiment 20000794 PARAMETER Experiment Name: At_Petals_P Parameter: Tissue Value: Petals vs. Whole plant
  misc_feature: MA Experiment ID: 20001451 Result: Down-regulated in Transcription
  misc_feature: MA Experiment 20001451 PARAMETER Experiment Name: At_Far-red-induction_P Parameter: Age (day) Value: 7
  misc_feature: MA Experiment 20001451 PARAMETER Experiment Name: At_Far-red-induction_P Parameter: Light Value: Far-red vs. White
  misc_feature: MA Experiment 20001451 PARAMETER Experiment Name: At_Far-red-induction_P Parameter: Organism Value: A. thaliana
  misc_feature: MA Experiment 20001451 PARAMETER Experiment Name: At_Far-red-induction_P Parameter: Plant Line Value: Columbia
  misc_feature: MA Experiment 20001451 PARAMETER Experiment Name: At_Far-red-induction_P Parameter: Timepoint (hr) Value: 24
  misc_feature: MA Experiment 20001451 PARAMETER Experiment Name: At_Far-red-induction_P Parameter: Tissue Value: Whole Plant
aacagagtcgcacacactaaaatggcgttccgcgttttgctcctcttctcactcaccgcacttctcatcttctccgccgtttctccttctttcgccgcttcttcctccgacgacgttgacgatgaggatctcagcttcctcgaagatctcaaagaagacgacgttcccggcgctgactcactctcttcctcaactggatttgacgaattcgaaggaggagaagaagaagatcccgatatgtacaacgacgatgacgatgaagaaggagatttttccgatctaggtaatccggattccgatccgttaccgacgccggagattgatgagaaagacgttgtggttatcaaggagcgtaacttcactgatgtgattgagaataatcaatacgttttggttgagttttatgctccgtggtgtggtcattgtcagtctcttgctcctgagtatgctgctgctgccacggagcttaaggaagatggtgttgttttggctaagattgatgcgacggaggagaatgagttagctcaggagtatcgtgttcagggctttccgacgcttcttttcttcgttgatggtgagcacaagccttacactggaggaaggactaaagaaacaattgtgacatgggtgaagaagaagattggtcctggtgtgtataatctaactacattagatgatgctgagaaagtgttgacttctgggaacaaagttgttttgggatacttgaactccttggtgggtgttgagcacgatcagcttaatgctgcttccaaagctgaagacgatgtgaacttttatcaaacagtgaatcctgatgttgcaaagatgtttcaccttgatccggagtctaaaaggcctgctcttgtcctagttaagaaggaagaggagaaaattagccattttgatggagaatttgttaagtctgctctagttagttttgtgtctgccaacaagcttgctttggtctctgttttcaccagagagactgctccggaaatttttgagagtgcaatcaagaaacagttgttgttgtttgtaaccaaaaatgaatctgaaaaggttcttacggaatttcaagaagcagcgaaatcattcaaaggaaagctcatctttgtatctgtggatctggataatgaggattatgggaagccagtcgctgaatactttggtgtgtctggaaatggtcctaaacttattggctacacagggaatgaagaccataaaaaatactttttcgatggcgagatccagtcagataaaattaagatatttggggaggatttcctgaacgacaagttaaagcctttctataagtcagaccccattcctgaaaagaacgatgaagatgtgaaaatagtggttggagataactttgatgaaattgttctggacgattctaaagatgtgcttctcgaggtctacgcaccatggtgtggccattgccaagcccttgagccaatgtataacaaacttgccaagcatttacgaagtattgattctctcgtcataaccaagatggatggaacaaccaatgaacatcccaaggcaaaggctgaggggttccctaccattctcttcttccctgcgggcaacaagacttcagagccgattactgtagatacagaccgcactgtggttgcattttacaagttcttaaggaaacacgcaacgatcccattcaaactggagaaacctgcatcaaccgaatcacctaaaactgcagagtccacaccaaaagtagaaactaccgagaccaaagaatcacccgatagcacgacaaagagtagccaaagtgactcgaaggacgaattgtgatcagaaaagggtataatatatattacatgtctccttaagttgttatatgtatgatcagaattgtcacatcatgagtttggactagataaagatgggaattaaagtaattttagttttgagaaagacaatttcttc

SEQ ID NO: 26739 - protein, 604 aa, Arabidopsis thaliana
  peptide (1)..(604): Ceres Seq. ID no. 12338516
  misc_feature (102)..(604): Homolog of NCBI NO: 30923135 NR Description: Protein disulfide isomerase precursor (PDI)
  misc_feature (108)..(552): Homolog of NCBI NO: 129731 NR Description: PROTEIN DISULFIDE ISOMERASE PRECURSOR (PDI)
  misc_feature (98)..(579): Homolog of NCBI NO: 7437394 NR Description: protein disulfide-isomerase (EC 5.3.4.1) RB60 -
  misc_feature (92)..(581): Homolog of NCBI NO: 5902592 NR Description: protein disulfide isomerase precursor
  misc_feature (106)..(604): Homolog of NCBI NO: 20805287 NR Description: protein disulfide isomerase-like PDI-M
  misc_feature (99)..(604): Homolog of NCBI NO: 20805285 NR Description: protein disulfide isomerase-like PDI-H
  misc_feature (3)..(587): Homolog of NCBI NO: 7437396 NR Description: protein disulfide-isomerase homolog F28P10.60 -
  misc_feature (148)..(577): Homolog of NCBI NO: 28140231 NR Description: protein disulphide isomerase [Elaeis guineensis]
  misc_feature (3)..(587): Homolog of NCBI NO: 22331799 NR Description: protein disulfide-isomerase-like protein
  misc_feature (8)..(538): Homolog of NCBI NO: 30697408 NR Description: protein disulfide isomerase family [Arabidopsis
NRVAHTKMAFRVLLLFSLTALLIFSAVSPSFAASSSDDVDDEDLSFLEDLKEDDVPGADSLSSSTGFDEFEGGEEEDPDMYNDDDDEEGDFSDLGNPDSDPLPTPEIDEKDVVVIKERNFTDVIENNQYVLVEFYAPWCGHCQSLAPEYAAAATELKEDGVVLAKIDATEENELAQEYRVQGFPTLLFFVDGEHKPYTGGRTKETIVTWVKKKIGPGVYNLTTLDDAEKVLTSGNKVVLGYLNSLVGVEHDQLNAASKAEDDVNFYQTVNPDVAKMFHLDPESKRPALVLVKKEEEKISHFDGEFVKSALVSFVSANKLALVSVFTRETAPEIFESAIKKQLLLFVTKNESEKVLTEFQEAAKSFKGKLIFVSVDLDNEDYGKPVAEYFGVSGNGPKLIGYTGNEDHKKYFFDGEIQSDKIKIFGEDFLNDKLKPFYKSDPIPEKNDEDVKIVVGDNFDEIVLDDSKDVLLEVYAPWCGHCQALEPMYNKLAKHLRSIDSLVITKMDGTTNEHPKAKAEGFPTILFFPAGNKTSEPITVDTDRTVVAFYKFLRKHATIPFKLEKPASTESPKTAESTPKVETTETKESPDSTTKSSQSDSKDEL

SEQ ID NO: 26740 - protein, 597 aa, Arabidopsis thaliana
  peptide (1)..(597): Ceres Seq. ID no. 12338517
  misc_feature (95)..(597): Homolog of NCBI NO: 30923135 NR Description: Protein disulfide isomerase precursor (PDI)
  misc_feature (101)..(545): Homolog of NCBI NO: 129731 NR Description: PROTEIN DISULFIDE ISOMERASE PRECURSOR (PDI)
  misc_feature (91)..(572): Homolog of NCBI NO: 7437394 NR Description: protein disulfide-isomerase (EC 5.3.4.1) RB60 -
  misc_feature (85)..(574): Homolog of NCBI NO: 5902592 NR Description: protein disulfide isomerase precursor
  misc_feature (99)..(597): Homolog of NCBI NO: 20805287 NR Description: protein disulfide isomerase-like PDI-M
  misc_feature (92)..(597): Homolog of NCBI NO: 20805285 NR Description: protein disulfide isomerase-like PDI-H
  misc_feature (1)..(580): Homolog of NCBI NO: 7437396 NR Description: protein disulfide-isomerase homolog F28P10.60 -
  misc_feature (141)..(570): Homolog of NCBI NO: 28140231 NR Description: protein disulphide isomerase [Elaeis guineensis]
  misc_feature (1)..(580): Homolog of NCBI NO: 22331799 NR Description: protein disulfide-isomerase-like protein
  misc_feature (1)..(531): Homolog of NCBI NO: 30697408 NR Description: protein disulfide isomerase family [Arabidopsis
MAFRVLLLFSLTALLIFSAVSPSFAASSSDDVDDEDLSFLEDLKEDDVPGADSLSSSTGFDEFEGGEEEDPDMYNDDDDEEGDFSDLGNPDSDPLPTPEIDEKDVVVIKERNFTDVIENNQYVLVEFYAPWCGHCQSLAPEYAAAATELKEDGVVLAKIDATEENELAQEYRVQGFPTLLFFVDGEHKPYTGGRTKETIVTWVKKKIGPGVYNLTTLDDAEKVLTSGNKVVLGYLNSLVGVEHDQLNAASKAEDDVNFYQTVNPDVAKMFHLDPESKRPALVLVKKEEEKISHFDGEFVKSALVSFVSANKLALVSVFTRETAPEIFESAIKKQLLLFVTKNESEKVLTEFQEAAKSFKGKLIFVSVDLDNEDYGKPVAEYFGVSGNGPKLIGYTGNEDHKKYFFDGEIQSDKIKIFGEDFLNDKLKPFYKSDPIPEKNDEDVKIVVGDNFDEIVLDDSKDVLLEVYAPWCGHCQALEPMYNKLAKHLRSIDSLVITKMDGTTNEHPKAKAEGFPTILFFPAGNKTSEPITVDTDRTVVAFYKFLRKHATIPFKLEKPASTESPKTAESTPKVETTETKESPDSTTKSSQSDSKDEL

SEQ ID NO: 26741 - protein, 525 aa, Arabidopsis thaliana
  peptide (1)..(525): Ceres Seq. ID no. 12338518
  misc_feature (69)..(498): Homolog of NCBI NO: 28140231 NR Description: protein disulphide isomerase [Elaeis guineensis]
  misc_feature (1)..(508): Homolog of NCBI NO: 22331799 NR Description: protein disulfide-isomerase-like protein
  misc_feature (1)..(459): Homolog of NCBI NO: 30697408 NR Description: protein disulfide isomerase family [Arabidopsis
  misc_feature (23)..(525): Homolog of NCBI NO: 30923135 NR Description: Protein disulfide isomerase precursor (PDI)
  misc_feature (29)..(473): Homolog of NCBI NO: 129731 NR Description: PROTEIN DISULFIDE ISOMERASE PRECURSOR (PDI)
  misc_feature (19)..(500): Homolog of NCBI NO: 7437394 NR Description: protein disulfide-isomerase (EC 5.3.4.1) RB60 -
  misc_feature (13)..(502): Homolog of NCBI NO: 5902592 NR Description: protein disulfide isomerase precursor
  misc_feature (27)..(525): Homolog of NCBI NO: 20805287 NR Description: protein disulfide isomerase-like PDI-M
  misc_feature (20)..(525): Homolog of NCBI NO: 20805285 NR Description: protein disulfide isomerase-like PDI-H
  misc_feature (1)..(508): Homolog of NCBI NO: 7437396 NR Description: protein disulfide-isomerase homolog F28P10.60 -
MYNDDDDEEGDFSDLGNPDSDPLPTPEIDEKDVVVIKERNFTDVIENNQYVLVEFYAPWCGHCQSLAPEYAAAATELKEDGVVLAKIDATEENELAQEYRVQGFPTLLFFVDGEHKPYTGGRTKETIVTWVKKKIGPGVYNLTTLDDAEKVLTSGNKVVLGYLNSLVGVEHDQLNAASKAEDDVNFYQTVNPDVAKMFHLDPESKRPALVLVKKEEEKISHFDGEFVKSALVSFVSANKLALVSVFTRETAPEIFESAIKKQLLLFVTKNESEKVLTEFQEAAKSFKGKLIFVSVDLDNEDYGKPVAEYFGVSGNGPKLIGYTGNEDHKKYFFDGEIQSDKIKIFGEDFLNDKLKPFYKSDPIPEKNDEDVKIVVGDNFDEIVLDDSKDVLLEVYAPWCGHCQALEPMYNKLAKHLRSIDSLVITKMDGTTNEHPKAKAEGFPTILFFPAGNKTSEPITVDTDRTVVAFYKFLRKHATIPFKLEKPASTESPKTAESTPKVETTETKESPDSTTKSSQSDSKDEL

SEQ ID NO: 26742 - DNA, 832 bp, Arabidopsis thaliana
  misc_feature (1)..(832): Ceres Seq. ID no. 12482239
  misc_feature: MA Experiment ID: 108595 Result: Down-regulated in Transcription
  misc_feature: MA Experiment 108595 PARAMETER Experiment Name: At_Ler-pi_Ovule_cDNA_P Parameter: Plant Line Value: null
  misc_feature: MA Experiment ID: 20000180 Result: Up-regulated in Transcription
  misc_feature: MA Experiment 20000180 PARAMETER Experiment Name: At_Germinating_Seeds_P Parameter: Age (hr) Value: 24 vs. 0
  misc_feature: MA Experiment 20000180 PARAMETER Experiment Name: At_Germinating_Seeds_P Parameter: Tissue Value: Germinating Seeds
  misc_feature: MA Experiment ID: 20000184 Result: Up-regulated in Transcription
  misc_feature: MA Experiment 20000184 PARAMETER Experiment Name: At_Shoots__P Parameter: Age (day) Value: 7
  misc_feature: MA Experiment 20000184 PARAMETER Experiment Name: At_Shoots__P Parameter: Tissue Value: Shoots vs. Whole Plant
  misc_feature: MA Experiment ID: 20000185 Result: Down-regulated in Transcription
  misc_feature: MA Experiment 20000185 PARAMETER Experiment Name: At_Roots__P Parameter: Age (day) Value: 7 vs. 21
  misc_feature: MA Experiment 20000185 PARAMETER Experiment Name: At_Roots__P Parameter: Organism Value: A. thaliana
  misc_feature: MA Experiment 20000185 PARAMETER Experiment Name: At_Roots__P Parameter: Tissue Value: Roots vs. Whole Plant
  misc_feature: MA Experiment ID: 20000269 Result: Down-regulated in Transcription
  misc_feature: MA Experiment 20000269 PARAMETER Experiment Name: At_1mM_KNO3_L-vs-H_Roots_P Parameter: Age (day) Value: 7,10,12
  misc_feature: MA Experiment 20000269 PARAMETER Experiment Name: At_1mM_KNO3_L-vs-H_Roots_P Parameter: Organism Value: A. thaliana
  misc_feature: MA Experiment 20000269 PARAMETER Experiment Name: At_1mM_KNO3_L-vs-H_Roots_P Parameter: Plant Line Value: WS
  misc_feature: MA Experiment 20000269 PARAMETER Experiment Name: At_1mM_KNO3_L-vs-H_Roots_P Parameter: Timepoint (day) Value: 7,10,12
  misc_feature: MA Experiment 20000269 PARAMETER Experiment Name: At_1mM_KNO3_L-vs-H_Roots_P Parameter: Tissue Value: Roots
  misc_feature: MA Experiment 20000269 PARAMETER Experiment Name: At_1mM_KNO3_L-vs-H_Roots_P Parameter: Treatment Value: 1mM KNO3 vs. 50mM KNO3
  misc_feature: MA Experiment ID: 20000437 Result: Down-regulated in Transcription
  misc_feature: MA Experiment 20000437 PARAMETER Experiment Name: At_Drought_P Parameter: Age (day) Value: 8
  misc_feature: MA Experiment 20000437 PARAMETER Experiment Name: At_Drought_P Parameter: Organism Value: A. thaliana
  misc_feature: MA Experiment 20000437 PARAMETER Experiment Name: At_Drought_P Parameter: Plant Line Value: WS
  misc_feature: MA Experiment 20000437 PARAMETER Experiment Name: At_Drought_P Parameter: Timepoint (hr) Value: 24
  misc_feature: MA Experiment 20000437 PARAMETER Experiment Name: At_Drought_P Parameter: Tissue Value: Whole Plant
  misc_feature: MA Experiment 20000437 PARAMETER Experiment Name: At_Drought_P Parameter: Treatment Value: Drought vs. No Drought
  misc_feature: MA Experiment ID: 20000438 Result: Up-regulated in Transcription
  misc_feature: MA Experiment 20000438 PARAMETER Experiment Name: At_Shoots__P Parameter: Age (day) Value: 14
  misc_feature: MA Experiment 20000438 PARAMETER Experiment Name: At_Shoots__P Parameter: Tissue Value: Shoots vs. Whole Plant
  misc_feature: MA Experiment ID: 20000439 Result: Down-regulated in Transcription
  misc_feature: MA Experiment 20000439 PARAMETER Experiment Name: At_Roots__P Parameter: Age (day) Value: 14 vs. 21
  misc_feature: MA Experiment 20000439 PARAMETER Experiment Name: At_Roots__P Parameter: Organism Value: A. thaliana
  misc_feature: MA Experiment 20000439 PARAMETER Experiment Name: At_Roots__P Parameter: Tissue Value: Roots vs. Whole Plant
  misc_feature: MA Experiment ID: 20000794 Result: Down-regulated in Transcription
  misc_feature: MA Experiment 20000794 PARAMETER Experiment Name: At_Petals_P Parameter: Age (day) Value: 23-25 days
  misc_feature: MA Experiment 20000794 PARAMETER Experiment Name: At_Petals_P Parameter: Plant Line Value: WS
  misc_feature: MA Experiment 20000794 PARAMETER Experiment Name: At_Petals_P Parameter: Tissue Value: Petals vs. Whole plant
  misc_feature: MA Experiment ID: 20001248 Result: Down-regulated in Transcription
  misc_feature: MA Experiment 20001248 PARAMETER Experiment Name: At_Far-red-induction_P Parameter: Age (day) Value: 7
  misc_feature: MA Experiment 20001248 PARAMETER Experiment Name: At_Far-red-induction_P Parameter: Light Value: Far-red vs. White
  misc_feature: MA Experiment 20001248 PARAMETER Experiment Name: At_Far-red-induction_P Parameter: Organism Value: A. thaliana
  misc_feature: MA Experiment 20001248 PARAMETER Experiment Name: At_Far-red-induction_P Parameter: Plant Line Value: Columbia
  misc_feature: MA Experiment 20001248 PARAMETER Experiment Name: At_Far-red-induction_P Parameter: Timepoint (hr) Value: 4
  misc_feature: MA Experiment 20001248 PARAMETER Experiment Name: At_Far-red-induction_P Parameter: Tissue Value: Whole Plant
  misc_feature: MA Experiment ID: 20001555 Result: Down-regulated in Transcription
  misc_feature: MA Experiment 20001555 PARAMETER Experiment Name: At_Drought_Soil_Dry_P Parameter: Age (day) Value: 24
  misc_feature: MA Experiment 20001555 PARAMETER Experiment Name: At_Drought_Soil_Dry_P Parameter: Organism Value: A. thaliana
  misc_feature: MA Experiment 20001555 PARAMETER Experiment Name: At_Drought_Soil_Dry_P Parameter: Plant Line Value: WS
  misc_feature: MA Experiment 20001555 PARAMETER Experiment Name: At_Drought_Soil_Dry_P Parameter: Post Timepoint (hr) Value: None
  misc_feature: MA Experiment 20001555 PARAMETER Experiment Name: At_Drought_Soil_Dry_P Parameter: Post-Treatment Value: None
  misc_feature: MA Experiment 20001555 PARAMETER Experiment Name: At_Drought_Soil_Dry_P Parameter: Timepoint (day) Value: 10
  misc_feature: MA Experiment 20001555 PARAMETER Experiment Name: At_Drought_Soil_Dry_P Parameter: Treatment Value: Drought vs. No Drought
  misc_feature: MA Experiment ID: 20001556 Result: Down-regulated in Transcription
  misc_feature: MA Experiment 20001556 PARAMETER Experiment Name: At_Drought_Soil_Dry_P Parameter: Age (day) Value: 26
  misc_feature: MA Experiment 20001556 PARAMETER Experiment Name: At_Drought_Soil_Dry_P Parameter: Organism Value: A. thaliana
  misc_feature: MA Experiment 20001556 PARAMETER Experiment Name: At_Drought_Soil_Dry_P Parameter: Plant Line Value: WS
  misc_feature: MA Experiment 20001556 PARAMETER Experiment Name: At_Drought_Soil_Dry_P Parameter: Post Timepoint (hr) Value: None
  misc_feature: MA Experiment 20001556 PARAMETER Experiment Name: At_Drought_Soil_Dry_P Parameter: Post-Treatment Value: None
  misc_feature: MA Experiment 20001556 PARAMETER Experiment Name: At_Drought_Soil_Dry_P Parameter: Timepoint (day) Value: 12
  misc_feature: MA Experiment 20001556 PARAMETER Experiment Name: At_Drought_Soil_Dry_P Parameter: Treatment Value: Drought vs. No Drought
  misc_feature: MA Experiment ID: 20001557 Result: Down-regulated in Transcription
  misc_feature: MA Experiment 20001557 PARAMETER Experiment Name: At_Drought_Soil_Dry_P Parameter: Age (day) Value: 27
  misc_feature: MA Experiment 20001557 PARAMETER Experiment Name: At_Drought_Soil_Dry_P Parameter: Organism Value: A. thaliana
  misc_feature: MA Experiment 20001557 PARAMETER Experiment Name: At_Drought_Soil_Dry_P Parameter: Plant Line Value: WS
  misc_feature: MA Experiment 20001557 PARAMETER Experiment Name: At_Drought_Soil_Dry_P Parameter: Post Timepoint (hr) Value: 3
  misc_feature: MA Experiment 20001557 PARAMETER Experiment Name: At_Drought_Soil_Dry_P Parameter: Post-Treatment Value: Re-Water vs. No Drought
  misc_feature: MA Experiment 20001557 PARAMETER Experiment Name: At_Drought_Soil_Dry_P Parameter: Timepoint (day) Value: 13
  misc_feature: MA Experiment 20001557 PARAMETER Experiment Name: At_Drought_Soil_Dry_P Parameter: Treatment Value: Drought vs. No Drought
  misc_feature: MA Experiment ID: 20001559 Result: Down-regulated in Transcription
  misc_feature: MA Experiment 20001559 PARAMETER Experiment Name: At_Drought_Soil_Dry_P Parameter: Age (day) Value: 28
  misc_feature: MA Experiment 20001559 PARAMETER Experiment Name: At_Drought_Soil_Dry_P Parameter: Organism Value: A. thaliana
  misc_feature: MA Experiment 20001559 PARAMETER Experiment Name: At_Drought_Soil_Dry_P Parameter: Plant Line Value: WS
  misc_feature: MA Experiment 20001559 PARAMETER Experiment Name: At_Drought_Soil_Dry_P Parameter: Post Timepoint (hr) Value: 29
  misc_feature: MA Experiment 20001559 PARAMETER Experiment Name: At_Drought_Soil_Dry_P Parameter: Post-Treatment Value: Re-Water vs. No Drought
  misc_feature: MA Experiment 20001559 PARAMETER Experiment Name: At_Drought_Soil_Dry_P Parameter: Timepoint (day) Value: 14
  misc_feature: MA Experiment 20001559 PARAMETER Experiment Name: At_Drought_Soil_Dry_P Parameter: Treatment Value: Drought vs. No Drought
  misc_feature: MA Experiment ID: 20001904 Result: Down-regulated in Transcription
  misc_feature: MA Experiment 20001904 PARAMETER Experiment Name: At_Drought_Reproduction_P Parameter: Age (day) Value: 37
  misc_feature: MA Experiment 20001904 PARAMETER Experiment Name: At_Drought_Reproduction_P Parameter: Organism Value: A. thaliana
  misc_feature: MA Experiment 20001904 PARAMETER Experiment Name: At_Drought_Reproduction_P Parameter: Plant Line Value: WS
  misc_feature: MA Experiment 20001904 PARAMETER Experiment Name: At_Drought_Reproduction_P Parameter: Timepoint (day) Value: 7
  misc_feature: MA Experiment 20001904 PARAMETER Experiment Name: At_Drought_Reproduction_P Parameter: Tissue Value: Rosettes
  misc_feature: MA Experiment 20001904 PARAMETER Experiment Name: At_Drought_Reproduction_P Parameter: Treatment Value: Drought vs. No Drought
  misc_feature: MA Experiment ID: 20001905 Result: Down-regulated in Transcription
  misc_feature: MA Experiment 20001905 PARAMETER Experiment Name: At_Drought_Reproduction_P Parameter: Age (day) Value: 40
  misc_feature: MA Experiment 20001905 PARAMETER Experiment Name: At_Drought_Reproduction_P Parameter: Organism Value: A. thaliana
  misc_feature: MA Experiment 20001905 PARAMETER Experiment Name: At_Drought_Reproduction_P Parameter: Plant Line Value: WS
  misc_feature: MA Experiment 20001905 PARAMETER Experiment Name: At_Drought_Reproduction_P Parameter: Timepoint (day) Value: 10
  misc_feature: MA Experiment 20001905 PARAMETER Experiment Name: At_Drought_Reproduction_P Parameter: Tissue Value: Rosettes
  misc_feature: MA Experiment 20001905 PARAMETER Experiment Name: At_Drought_Reproduction_P Parameter: Treatment Value: Drought vs. No Drought
  misc_feature: MA Experiment ID: 20001906 Result: Down-regulated in Transcription
  misc_feature: MA Experiment 20001906 PARAMETER Experiment Name: At_Drought_Reproduction_P Parameter: Age (day) Value: 35
  misc_feature: MA Experiment 20001906 PARAMETER Experiment Name: At_Drought_Reproduction_P Parameter: Organism Value: A. thaliana
  misc_feature: MA Experiment 20001906 PARAMETER Experiment Name: At_Drought_Reproduction_P Parameter: Plant Line Value: WS
  misc_feature: MA Experiment 20001906 PARAMETER Experiment Name: At_Drought_Reproduction_P Parameter: Timepoint (day) Value: 5
  misc_feature: MA Experiment 20001906 PARAMETER Experiment Name: At_Drought_Reproduction_P Parameter: Tissue Value: Siliques
  misc_feature: MA Experiment 20001906 PARAMETER Experiment Name: At_Drought_Reproduction_P Parameter: Treatment Value: Drought vs. No Drought
  misc_feature: MA Experiment ID: 20001908 Result: Down-regulated in Transcription
  misc_feature: MA Experiment 20001908 PARAMETER Experiment Name: At_Drought_Reproduction_P Parameter: Age (day) Value: 40
  misc_feature: MA Experiment 20001908 PARAMETER Experiment Name: At_Drought_Reproduction_P Parameter: Organism Value: A. thaliana
  misc_feature: MA Experiment 20001908 PARAMETER Experiment Name: At_Drought_Reproduction_P Parameter: Plant Line Value: WS
  misc_feature: MA Experiment 20001908 PARAMETER Experiment Name: At_Drought_Reproduction_P Parameter: Timepoint (day) Value: 10
  misc_feature: MA Experiment 20001908 PARAMETER Experiment Name: At_Drought_Reproduction_P Parameter: Tissue Value: Siliques
  misc_feature: MA Experiment 20001908 PARAMETER Experiment Name: At_Drought_Reproduction_P Parameter: Treatment Value: Drought vs. No Drought
attggataagacaactatcaagaagccttcaatttccattggtcctcctctctccttctataatcccaaaaaccatctcacaaactcatcaaacctctttctcatctcatcttcaagccatctccgatcatcatcagacaatggcagcagctatggcaacagcaaccaagtgcatgtctctaaacccatctcctcctaaactccaaaaccaaaccaaatccaaaccattcatctccctaccaaccccaccaaaaccaaacgtctctctcgccgtcacaagcaccgccctagccggagccgtcttctcttccctcagctactctgagccagctttagccatccaacagatcgctcagctcgctgcagcaaacgccagtagcgacaaccgtggcttagctcttctccttcccatcgtcccagccattgcatgggtcctttacaacatcctccagccagctattaaccaggtcaacaagatgcgtgagagtaaaggtatcgttgttggtctaggtattggtggtggtcttgcagcgtcagggcttttgactccacctccggaggcttatgctgcggcagaagcggcggctgctagttcagacagcagaggacagttgttgttgattgttgtgacaccggcactactttgggttctgtacaatatcttgcagccagctttgaaccaaatcaacaagatgaggtctggggattaaaatcttatatatatataatattattataaatcatctttgggattcaaatgtaaaattaatcctttgttttatggacagttttatgtttacatttttggactaatatcgtttctcttatcggc

SEQ ID NO: 26743 - protein, 235 aa, Arabidopsis thaliana
  peptide (1)..(235): Ceres Seq. ID no. 12482240
  misc_feature (127)..(160): Pfam Name: Photosystem II protein Y (PsbY) Pfam Description: Photosystem II protein Y (PsbY)
  misc_feature (127)..(160): Pfam Name: Photosystem II protein Y (PsbY) Pfam Description: Photosystem II protein Y (PsbY)
  misc_feature (46)..(233): Homolog of NCBI NO: 6093830 NR Description: Photosystem II core complex proteins psbY,
  misc_feature (51)..(235): Homolog of NCBI NO: 21593330 NR Description: unknown [Arabidopsis thaliana]
  misc_feature (51)..(235): Homolog of NCBI NO: 21593330 NR Description: unknown [Arabidopsis thaliana]
  misc_feature (47)..(235): Homolog of NCBI NO: 15220530 NR Description: F12A21.13
  misc_feature (46)..(233): Homolog of NCBI NO: 6093830 NR Description: Photosystem II core complex proteins psbY,
  misc_feature (47)..(235): Homolog of NCBI NO: 15220530 NR Description: F12A21.13
WIRQLSRSLQFPLVLLSPSIIPKTISQTHQTSFSSHLQAISDHHQTMAAAMATATKCMSLNPSPPKLQNQTKSKPFISLPTPPKPNVSLAVTSTALAGAVFSSLSYSEPALAIQQIAQLAAANASSDNRGLALLLPIVPAIAWVLYNILQPAINQVNKMRESKGIVVGLGIGGGLAASGLLTPPPEAYAAAEAAAASSDSRGQLLLIVVTPALLWVLYNILQPALNQINKMRSGD

SEQ ID NO: 26744 - protein, 189 aa, Arabidopsis thaliana
  peptide (1)..(189): Ceres Seq. ID no. 12482241
  misc_feature (81)..(114): Pfam Name: Photosystem II protein Y (PsbY) Pfam Description: Photosystem II protein Y (PsbY)
  misc_feature (81)..(114): Pfam Name: Photosystem II protein Y (PsbY) Pfam Description: Photosystem II protein Y (PsbY)
  misc_feature (1)..(187): Homolog of NCBI NO: 6093830 NR Description: Photosystem II core complex proteins psbY,
  misc_feature (5)..(189): Homolog of NCBI NO: 21593330 NR Description: unknown [Arabidopsis thaliana]
  misc_feature (5)..(189): Homolog of NCBI NO: 21593330 NR Description: unknown [Arabidopsis thaliana]
  misc_feature (1)..(189): Homolog of NCBI NO: 15220530 NR Description: F12A21.13
  misc_feature (1)..(187): Homolog of NCBI NO: 6093830 NR Description: Photosystem II core complex proteins psbY,
  misc_feature (1)..(189): Homolog of NCBI NO: 15220530 NR Description: F12A21.13
MAAAMATATKCMSLNPSPPKLQNQTKSKPFISLPTPPKPNVSLAVTSTALAGAVFSSLSYSEPALAIQQIAQLAAANASSDNRGLALLLPIVPAIAWVLYNILQPAINQVNKMRESKGIVVGLGIGGGLAASGLLTPPPEAYAAAEAAAASSDSRGQLLLIVVTPALLWVLYNILQPALNQINKMRSGD

SEQ ID NO: 26745 - protein, 185 aa, Arabidopsis thaliana
  peptide (1)..(185): Ceres Seq. ID no. 12482242
  misc_feature (77)..(110): Pfam Name: Photosystem II protein Y (PsbY) Pfam Description: Photosystem II protein Y (PsbY)
  misc_feature (77)..(110): Pfam Name: Photosystem II protein Y (PsbY) Pfam Description: Photosystem II protein Y (PsbY)
  misc_feature (1)..(183): Homolog of NCBI NO: 6093830 NR Description: Photosystem II core complex proteins psbY,
  misc_feature (1)..(185): Homolog of NCBI NO: 21593330 NR Description: unknown [Arabidopsis thaliana]
  misc_feature (1)..(185): Homolog of NCBI NO: 21593330 NR Description: unknown [Arabidopsis thaliana]
  misc_feature (1)..(185): Homolog of NCBI NO: 15220530 NR Description: F12A21.13
  misc_feature (1)..(183): Homolog of NCBI NO: 6093830 NR Description: Photosystem II core complex proteins psbY,
  misc_feature (1)..(185): Homolog of NCBI NO: 15220530 NR Description: F12A21.13
MATATKCMSLNPSPPKLQNQTKSKPFISLPTPPKPNVSLAVTSTALAGAVFSSLSYSEPALAIQQIAQLAAANASSDNRGLALLLPIVPAIAWVLYNILQPAINQVNKMRESKGIVVGLGIGGGLAASGLLTPPPEAYAAAEAAAASSDSRGQLLLIVVTPALLWVLYNILQPALNQINKMRSGD

SEQ ID NO: 26746 - DNA, 1691 bp, Arabidopsis thaliana
  misc_feature (1)..(1691): Ceres Seq. ID no. 12738987
  misc_feature: MA Experiment ID: 108573 Result: Up-regulated in Transcription
  misc_feature: MA Experiment 108573 PARAMETER Experiment Name: At_Drought_cDNA_P Parameter: Timepoint (hr) Value: 6
  misc_feature: MA Experiment 108573 PARAMETER Experiment Name: At_Drought_cDNA_P Parameter: Tissue Value: Aerial
  misc_feature: MA Experiment 108573 PARAMETER Experiment Name: At_Drought_cDNA_P Parameter: Treatment Value: Drought vs. No Drought
  misc_feature: MA Experiment ID: 108595 Result: Down-regulated in Transcription
  misc_feature: MA Experiment 108595 PARAMETER Experiment Name: At_Ler-pi_Ovule_cDNA_P Parameter: Plant Line Value: null
atcgctttgcataatccattccttcttctctcttctccatctccttcctccgatcttcgtctccaattcggaatcttcctatcacaatttcaaggctcctttaacccttgatcatcaccgattcaatcaattcggaatcacaatttcaaatcgagagaatttcaatttctcttgtaaaaccctaaattatgtacagcaatttcaaggaacaagcgatcgagtacgtgaagcaagcggttcatgaagacaatgctgggaattacaataaagctttccctctatacatgaacgcgcttgagtacttcaaaactcatctcaagtatgagaagaaccctaagatcagagaagctattacccagaagttcaccgagtatctccgtcgtgctgaggagatccgtgctgttctcgatgaaggtggatcgggtccaggatctaacggtgatgcagccgtcgcaacgaggcccaaaactaagcctaaagatggagaaggtggtggtaaagatggagaagatcctgaacaatcaaagcttcgagctgggttaaactctgcgattgttagagagaaacctaatatcaagtggtcagatgttgctgggcttgaaagtgctaaacaagctctgcaggaagctgtgattttgcctgtcaagtttccacagttcttcactggaaagagacggccttggagagcttttctgttgtatgggcctcctggaacaggaaaatcgtatttggctaaggctgttgccactgaagctgactctaccttttttagcgtgtcttcatcagaccttgtctcgaagtggatgggtgaaagtgagaagctagtatcaaaccttttcgagatggcccgtgaaagtgctccctcgattatttttgttgatgagatagattctttgtgtggtacacgtggagaaggaaacgagagtgaagcttcaagacgtatcaaaacagagcttctagtgcagatgcagggtgttggacacaatgatgagaaagtacttgtacttgcagcaaccaatacaccctatgctcttgatcaggctatccggcgacgttttgacaagcgtatctatattcctctcccagaggccaaggctcggcagcacatgttcaaagtccacttgggagatacacctcataatttaactgaacctgattttgaatatttaggccaaaagacagaagggttttctggttcagatgtgtctgtttgtgtaaaagatgttctgtttgaacctgttcgtaaaacacaagatgcaatgttctttttcaagtctcctgatggtacatggatgccatgtgggcctaggcaccctggtgccatccagactacaatgcaagatctagcaacaaaagggcttgccgagattattccaccaccaatcaccagaacagatttcgagaaggtacttgcaagacaaaggccaacagtgagcaagtctgaccttgatgtccacgagagattcacacaggagtttggagaagaaggttgatagatttgacattcccatcaagcatctttcacaatcatattattattagtctcttcaccatctccttatgtatgtactgagaagcaaaacaaaatctcaaacccatgtttgatttcttcccaaaacattgaatttgctttatttctcgaattgtgtaaaaaaaaaatgttctgaacaatgttttctatttattatgtc

SEQ ID NO: 26747 - protein, 434 aa, Arabidopsis thaliana
  peptide (1)..(434): Ceres Seq. ID no. 12738988
  misc_feature (167)..(352): Pfam Name: ATPase family associated with various cellular Pfam Description: ATPase family associated with various cellular
  misc_feature (3)..(434): Homolog of NCBI NO: 40744456 NR Description: hypothetical protein AN3061.2 [Aspergillus
  misc_feature (7)..(434): Homolog of NCBI NO: 9087199 NR Description: SKD1 protein (Vacuolar sorting protein 4b)
  misc_feature (7)..(434): Homolog of NCBI NO: 17865802 NR Description: vacuolar protein sorting factor 4B
  misc_feature (4)..(434): Homolog of NCBI NO: 27503354 NR Description: Similar to vacuolar protein sorting 4B (yeast)
  misc_feature (146)..(434): Homolog of NCBI NO: 16265863 NR Description: suppressor of K+ transport growth defect-like
  misc_feature (1)..(93): Homolog of NCBI NO: 34895696 NR Description: putative AAA-type ATPase [Oryza sativa (japonica
  misc_feature (98)..(430): Homolog of NCBI NO: 34895696 NR Description: putative AAA-type ATPase [Oryza sativa (japonica
  misc_feature (1)..(392): Homolog of NCBI NO: 22652796 NR Description: AAA-ATPase-like protein [Oryza sativa (japonica
  misc_feature (1)..(434): Homolog of NCBI NO: 15226199 NR Description: putative ATPase
  misc_feature (1)..(434): Homolog of NCBI NO: 21593336 NR Description: putative ATPase [Arabidopsis thaliana]
MYSNFKEQAIEYVKQAVHEDNAGNYNKAFPLYMNALEYFKTHLKYEKNPKIREAITQKFTEYLRRAEEIRAVLDEGGSGPGSNGDAAVATRPKTKPKDGEGGGKDGEDPEQSKLRAGLNSAIVREKPNIKWSDVAGLESAKQALQEAVILPVKFPQFFTGKRRPWRAFLLYGPPGTGKSYLAKAVATEADSTFFSVSSSDLVSKWMGESEKLVSNLFEMARESAPSIIFVDEIDSLCGTRGEGNESEASRRIKTELLVQMQGVGHNDEKVLVLAATNTPYALDQAIRRRFDKRIYIPLPEAKARQHMFKVHLGDTPHNLTEPDFEYLGQKTEGFSGSDVSVCVKDVLFEPVRKTQDAMFFFKSPDGTWMPCGPRHPGAIQTTMQDLATKGLAEIIPPPITRTDFEKVLARQRPTVSKSDLDVHERFTQEFGEEG

SEQ ID NO: 26748 - protein, 402 aa, Arabidopsis thaliana
  peptide (1)..(402): Ceres Seq. ID no. 12738989
  misc_feature (135)..(320): Pfam Name: ATPase family associated with various cellular Pfam Description: ATPase family associated with various cellular
  misc_feature (1)..(402): Homolog of NCBI NO: 40744456 NR Description: hypothetical protein AN3061.2 [Aspergillus
  misc_feature (1)..(402): Homolog of NCBI NO: 9087199 NR Description: SKD1 protein (Vacuolar sorting protein 4b)
  misc_feature (1)..(402): Homolog of NCBI NO: 17865802 NR Description: vacuolar protein sorting factor 4B
  misc_feature (1)..(402): Homolog of NCBI NO: 27503354 NR Description: Similar to vacuolar protein sorting 4B (yeast)
  misc_feature (114)..(402): Homolog of NCBI NO: 16265863 NR Description: suppressor of K+ transport growth defect-like
  misc_feature (1)..(61): Homolog of NCBI NO: 34895696 NR Description: putative AAA-type ATPase [Oryza sativa (japonica
  misc_feature (66)..(398): Homolog of NCBI NO: 34895696 NR Description: putative AAA-type ATPase [Oryza sativa (japonica
  misc_feature (1)..(360): Homolog of NCBI NO: 22652796 NR Description: AAA-ATPase-like protein [Oryza sativa (japonica
  misc_feature (1)..(402): Homolog of NCBI NO: 15226199 NR Description: putative ATPase
  misc_feature (1)..(402): Homolog of NCBI NO: 21593336 NR Description: putative ATPase [Arabidopsis thaliana]
MNALEYFKTHLKYEKNPKIREAITQKFTEYLRRAEEIRAVLDEGGSGPGSNGDAAVATRPKTKPKDGEGGGKDGEDPEQSKLRAGLNSAIVREKPNIKWSDVAGLESAKQALQEAVILPVKFPQFFTGKRRPWRAFLLYGPPGTGKSYLAKAVATEADSTFFSVSSSDLVSKWMGESEKLVSNLFEMARESAPSIIFVDEIDSLCGTRGEGNESEASRRIKTELLVQMQGVGHNDEKVLVLAATNTPYALDQAIRRRFDKRIYIPLPEAKARQHMFKVHLGDTPHNLTEPDFEYLGQKTEGFSGSDVSVCVKDVLFEPVRKTQDAMFFFKSPDGTWMPCGPRHPGAIQTTMQDLATKGLAEIIPPPITRTDFEKVLARQRPTVSKSDLDVHERFTQEFGEEG

SEQ ID NO: 26749 - protein, 229 aa, Arabidopsis thaliana
  peptide (1)..(229): Ceres Seq. ID no. 12738990
  misc_feature (1)..(147): Pfam Name: ATPase family associated with various cellular Pfam Description: ATPase family associated with various cellular
  misc_feature (1)..(228): Homolog of NCBI NO: 38075589 NR Description: similar to SKD1 [Mus musculus]
  misc_feature (1)..(229): Homolog of NCBI NO: 40744456 NR Description: hypothetical protein AN3061.2 [Aspergillus
  misc_feature (1)..(229): Homolog of NCBI NO: 9087199 NR Description: SKD1 protein (Vacuolar sorting protein 4b)
  misc_feature (1)..(229): Homolog of NCBI NO: 17865802 NR Description: vacuolar protein sorting factor 4B
  misc_feature (1)..(229): Homolog of NCBI NO: 27503354 NR Description: Similar to vacuolar protein sorting 4B (yeast)
  misc_feature (1)..(229): Homolog of NCBI NO: 16265863 NR Description: suppressor of K+ transport growth defect-like
  misc_feature (1)..(225): Homolog of NCBI NO: 34895696 NR Description: putative AAA-type ATPase [Oryza sativa (japonica
  misc_feature (1)..(187): Homolog of NCBI NO: 22652796 NR Description: AAA-ATPase-like protein [Oryza sativa (japonica
  misc_feature (1)..(229): Homolog of NCBI NO: 15226199 NR Description: putative ATPase
  misc_feature (1)..(229): Homolog of NCBI NO: 21593336 NR Description: putative ATPase [Arabidopsis thaliana]
MGESEKLVSNLFEMARESAPSIIFVDEIDSLCGTRGEGNESEASRRIKTELLVQMQGVGHNDEKVLVLAATNTPYALDQAIRRRFDKRIYIPLPEAKARQHMFKVHLGDTPHNLTEPDFEYLGQKTEGFSGSDVSVCVKDVLFEPVRKTQDAMFFFKSPDGTWMPCGPRHPGAIQTTMQDLATKGLAEIIPPPITRTDFEKVLARQRPTVSKSDLDVHERFTQEFGEEG

SEQ ID NO: 26750 - DNA, 1228 bp, Arabidopsis thaliana
  misc_feature (1)..(1228): Ceres Seq. ID no. 12466463
  misc_feature: MA Experiment ID: 108433 Result: Up-regulated in Transcription
  misc_feature: MA Experiment 108433 PARAMETER Experiment Name: At_rhl_Mutant2_cDNA_P Parameter: Age (day) Value: 7
  misc_feature: MA Experiment 108433 PARAMETER Experiment Name: At_rhl_Mutant2_cDNA_P Parameter: Organism Value: A. thaliana
  misc_feature: MA Experiment 108433 PARAMETER Experiment Name: At_rhl_Mutant2_cDNA_P Parameter: Plant Line Value: rhl Mutant vs. wt landsburg
  misc_feature: MA Experiment 108433 PARAMETER Experiment Name: At_rhl_Mutant2_cDNA_P Parameter: Tissue Value: Roots
  misc_feature: MA Experiment ID: 108434 Result: Down-regulated in Transcription
  misc_feature: MA Experiment 108434 PARAMETER Experiment Name: At_Root_Tips_cDNA_P Parameter: Tissue Value: Root Tips
  misc_feature: MA Experiment ID: 108463 Result: Up-regulated in Transcription
  misc_feature: MA Experiment 108463 PARAMETER Experiment Name: At_Germinating_Seeds_cDNA_P Parameter: Age (day) Value: 3 vs. 0
  misc_feature: MA Experiment 108463 PARAMETER Experiment Name: At_Germinating_Seeds_cDNA_P Parameter: Tissue Value: Germinating Seeds
  misc_feature: MA Experiment ID: 108464 Result: Up-regulated in Transcription
  misc_feature: MA Experiment 108464 PARAMETER Experiment Name: At_Germinating_Seeds_cDNA_P Parameter: Age (day) Value: 4 vs. 0
  misc_feature: MA Experiment 108464 PARAMETER Experiment Name: At_Germinating_Seeds_cDNA_P Parameter: Tissue Value: Germinating Seeds
  misc_feature: MA Experiment ID: 108594 Result: Down-regulated in Transcription
  misc_feature: MA Experiment 108594 PARAMETER Experiment Name: At_Ler-rhl_Root_cDNA_P Parameter: Plant Line Value: null
  misc_feature: MA Experiment ID: 108595 Result: Up-regulated in Transcription
  misc_feature: MA Experiment 108595 PARAMETER Experiment Name: At_Ler-pi_Ovule_cDNA_P Parameter: Plant Line Value: null
  misc_feature: MA Experiment ID: 20000069 Result: Up-regulated in Transcription
  misc_feature: MA Experiment 20000069 PARAMETER Experiment Name: At_100uM_ABA_Mutants_cDNA_P Parameter: Plant Line Value: CS23
  misc_feature: MA Experiment 20000069 PARAMETER Experiment Name: At_100uM_ABA_Mutants_cDNA_P Parameter: Timepoint (hr) Value: 6
  misc_feature: MA Experiment 20000069 PARAMETER Experiment Name: At_100uM_ABA_Mutants_cDNA_P Parameter: Tissue Value: Aerial
  misc_feature: MA Experiment 20000069 PARAMETER Experiment Name: At_100uM_ABA_Mutants_cDNA_P Parameter: Treatment Value: 100uM ABA vs. No Treatment
  misc_feature: MA Experiment ID: 20000113 Result: Down-regulated in Transcription
  misc_feature: MA Experiment 20000113 PARAMETER Experiment Name: At_42deg_Heat_cDNA_P Parameter: Temperature (deg C) Value: 42 vs. 22
  misc_feature: MA Experiment 20000113 PARAMETER Experiment Name: At_42deg_Heat_cDNA_P Parameter: Timepoint (hr) Value: 8
  misc_feature: MA Experiment 20000113 PARAMETER Experiment Name: At_42deg_Heat_cDNA_P Parameter: Tissue Value: Aerial
  misc_feature: MA Experiment ID: 20000185 Result: Up-regulated in Transcription
  misc_feature: MA Experiment 20000185 PARAMETER Experiment Name: At_Roots__P Parameter: Age (day) Value: 7 vs. 21
  misc_feature: MA Experiment 20000185 PARAMETER Experiment Name: At_Roots__P Parameter: Organism Value: A. thaliana
  misc_feature: MA Experiment 20000185 PARAMETER Experiment Name: At_Roots__P Parameter: Tissue Value: Roots vs. Whole Plant
  misc_feature: MA Experiment ID: 20000234 Result: Up-regulated in Transcription
  misc_feature: MA Experiment 20000234 PARAMETER Experiment Name: At_Siliques_P Parameter: Age (day) Value: 21
  misc_feature: MA Experiment 20000234 PARAMETER Experiment Name: At_Siliques_P Parameter: Organism Value: A. thaliana
  misc_feature: MA Experiment 20000234 PARAMETER Experiment Name: At_Siliques_P Parameter: Plant Line Value: WS
  misc_feature: MA Experiment 20000234 PARAMETER Experiment Name: At_Siliques_P Parameter: Tissue Value: Less Than 5mm Siliques vs. Whole Plant
  misc_feature: MA Experiment ID: 20000235 Result: Up-regulated in Transcription
  misc_feature: MA Experiment 20000235 PARAMETER Experiment Name: At_Siliques_P Parameter: Age (day) Value: 21
  misc_feature: MA Experiment 20000235 PARAMETER Experiment Name: At_Siliques_P Parameter: Organism Value: A. thaliana
  misc_feature: MA Experiment 20000235 PARAMETER Experiment Name: At_Siliques_P Parameter: Plant Line Value: WS
  misc_feature: MA Experiment 20000235 PARAMETER Experiment Name: At_Siliques_P Parameter: Tissue Value: 5-10mm Siliques vs. Whole Plant
  misc_feature: MA Experiment ID: 20000264 Result: Up-regulated in Transcription
  misc_feature: MA Experiment 20000264 PARAMETER Experiment Name: At_Open_Flower_P Parameter: Age (day) Value: 21
  misc_feature: MA Experiment 20000264 PARAMETER Experiment Name: At_Open_Flower_P Parameter: Plant Line Value: WS
  misc_feature: MA Experiment 20000264 PARAMETER Experiment Name: At_Open_Flower_P Parameter: Tissue Value: Open Flower vs. Whole Plant
  misc_feature: MA Experiment ID: 20000265 Result: Up-regulated in Transcription
  misc_feature: MA Experiment 20000265 PARAMETER Experiment Name: At_Open_Flower_P Parameter: Age (day) Value: 21
  misc_feature: MA Experiment 20000265 PARAMETER Experiment Name: At_Open_Flower_P Parameter: Plant Line Value: WS
  misc_feature: MA Experiment 20000265 PARAMETER Experiment Name: At_Open_Flower_P Parameter: Tissue Value: Closed Flower vs. Whole Plant
  misc_feature: MA Experiment ID: 20000286 Result: Up-regulated in Transcription
  misc_feature: MA Experiment 20000286 PARAMETER Experiment Name: At_Open_Flower_P Parameter: Age (day) Value: 21
  misc_feature: MA Experiment 20000286 PARAMETER Experiment Name: At_Open_Flower_P Parameter: Plant Line Value: WS
  misc_feature: MA Experiment 20000286 PARAMETER Experiment Name: At_Open_Flower_P Parameter: Tissue Value: Half Open vs. Whole Plant
  misc_feature: MA Experiment ID: 20000439 Result: Up-regulated in Transcription
  misc_feature: MA Experiment 20000439 PARAMETER Experiment Name: At_Roots__P Parameter: Age (day) Value: 14 vs. 21
  misc_feature: MA Experiment 20000439 PARAMETER Experiment Name: At_Roots__P Parameter: Organism Value: A. thaliana
  misc_feature: MA Experiment 20000439 PARAMETER Experiment Name: At_Roots__P Parameter: Tissue Value: Roots vs. Whole Plant
  misc_feature: MA Experiment ID: 20000441 Result: Down-regulated in Transcription
  misc_feature: MA Experiment 20000441 PARAMETER Experiment Name: At_1uM_BR-BRZ__P Parameter: Tissue Value: Shoot Apices
  misc_feature: MA Experiment 20000441 PARAMETER Experiment Name: At_1uM_BR-BRZ__P Parameter: Treatment Value: 1uM BR vs. No Treatment
  misc_feature: MA Experiment ID: 20000443 Result: Down-regulated in Transcription
  misc_feature: MA Experiment 20000443 PARAMETER Experiment Name: At_1uM_BR-BRZ__P Parameter: Tissue Value: Shoot Apices
  misc_feature: MA Experiment 20000443 PARAMETER Experiment Name: At_1uM_BR-BRZ__P Parameter: Treatment Value: 1uM BRZ vs. No Treatment
  misc_feature: MA Experiment ID: 20000451 Result: Down-regulated in Transcription
  misc_feature: MA Experiment 20000451 PARAMETER Experiment Name: At_CS6879_Shoots-Roots_P Parameter: Age (day) Value: 14
  misc_feature: MA Experiment 20000451 PARAMETER Experiment Name: At_CS6879_Shoots-Roots_P Parameter: Organism Value: A. thaliana
  misc_feature: MA Experiment 20000451 PARAMETER Experiment Name: At_CS6879_Shoots-Roots_P Parameter: Plant Line Value: CS6879 vs. WS
  misc_feature: MA Experiment 20000451 PARAMETER Experiment Name: At_CS6879_Shoots-Roots_P Parameter: Tissue Value: Roots
  misc_feature: MA Experiment ID: 20000460 Result: Down-regulated in Transcription
  misc_feature: MA Experiment 20000460 PARAMETER Experiment Name: At_10percent_PEG_P Parameter: Age (day) Value: 12
  misc_feature: MA Experiment 20000460 PARAMETER Experiment Name: At_10percent_PEG_P Parameter: Organism Value: A. thaliana
  misc_feature: MA Experiment 20000460 PARAMETER Experiment Name: At_10percent_PEG_P Parameter: Plant Line Value: WS
  misc_feature: MA Experiment 20000460 PARAMETER Experiment Name: At_10percent_PEG_P Parameter: Timepoint (day) Value: 12
  misc_feature: MA Experiment 20000460 PARAMETER Experiment Name: At_10percent_PEG_P Parameter: Tissue Value: Whole Plant
  misc_feature: MA Experiment 20000460 PARAMETER Experiment Name: At_10percent_PEG_P Parameter: Treatment Value: 10percent PEG vs. No Treatment
  misc_feature: MA Experiment ID: 20000527 Result: Down-regulated in Transcription
  misc_feature: MA Experiment 20000527 PARAMETER Experiment Name: At_10percent_PEG_P Parameter: Age (day) Value: 20
  misc_feature: MA Experiment 20000527 PARAMETER Experiment Name: At_10percent_PEG_P Parameter: Organism Value: A. thaliana
  misc_feature: MA Experiment 20000527 PARAMETER Experiment Name: At_10percent_PEG_P Parameter: Plant Line Value: WS
  misc_feature: MA Experiment 20000527 PARAMETER Experiment Name: At_10percent_PEG_P Parameter: Timepoint (day) Value: 20
  misc_feature: MA Experiment 20000527 PARAMETER Experiment Name: At_10percent_PEG_P Parameter: Tissue Value: Whole Plant
  misc_feature: MA Experiment 20000527 PARAMETER Experiment Name: At_10percent_PEG_P Parameter: Treatment Value: 10percent PEG vs. No Treatment
  misc_feature: MA Experiment ID: 20001248 Result: Down-regulated in Transcription
  misc_feature: MA Experiment 20001248 PARAMETER Experiment Name: At_Far-red-induction_P Parameter: Age (day) Value: 7
  misc_feature: MA Experiment 20001248 PARAMETER Experiment Name: At_Far-red-induction_P Parameter: Light Value: Far-red vs. White
  misc_feature: MA Experiment 20001248 PARAMETER Experiment Name: At_Far-red-induction_P Parameter: Organism Value: A. thaliana
  misc_feature: MA Experiment 20001248 PARAMETER Experiment Name: At_Far-red-induction_P Parameter: Plant Line Value: Columbia
  misc_feature: MA Experiment 20001248 PARAMETER Experiment Name: At_Far-red-induction_P Parameter: Timepoint (hr) Value: 4
  misc_feature: MA Experiment 20001248 PARAMETER Experiment Name: At_Far-red-induction_P Parameter: Tissue Value: Whole Plant
  misc_feature: MA Experiment ID: 20001450 Result: Down-regulated in Transcription
  misc_feature: MA Experiment 20001450 PARAMETER Experiment Name: At_Far-red-induction_P Parameter: Age (day) Value: 7
  misc_feature: MA Experiment 20001450 PARAMETER Experiment Name: At_Far-red-induction_P Parameter: Light Value: Far-red vs. White
  misc_feature: MA Experiment 20001450 PARAMETER Experiment Name: At_Far-red-induction_P Parameter: Organism Value: A. thaliana
  misc_feature: MA Experiment 20001450 PARAMETER Experiment Name: At_Far-red-induction_P Parameter: Plant Line Value: Columbia
  misc_feature: MA Experiment 20001450 PARAMETER Experiment Name: At_Far-red-induction_P Parameter: Timepoint (hr) Value: 8
  misc_feature: MA Experiment 20001450 PARAMETER Experiment Name: At_Far-red-induction_P Parameter: Tissue Value: Whole Plant
  misc_feature: MA Experiment ID: 20001554 Result: Up-regulated in Transcription
  misc_feature: MA Experiment 20001554 PARAMETER Experiment Name: At_Drought_Soil_Dry_P Parameter: Age (day) Value: 21
  misc_feature: MA Experiment 20001554 PARAMETER Experiment Name: At_Drought_Soil_Dry_P Parameter: Organism Value: A. thaliana
  misc_feature: MA Experiment 20001554 PARAMETER Experiment Name: At_Drought_Soil_Dry_P Parameter: Plant Line Value: WS
  misc_feature: MA Experiment 20001554 PARAMETER Experiment Name: At_Drought_Soil_Dry_P Parameter: Post Timepoint (hr) Value: None
  misc_feature: MA Experiment 20001554 PARAMETER Experiment Name: At_Drought_Soil_Dry_P Parameter: Post-Treatment Value: None
  misc_feature: MA Experiment 20001554 PARAMETER Experiment Name: At_Drought_Soil_Dry_P Parameter: Timepoint (day) Value: 7
  misc_feature: MA Experiment 20001554 PARAMETER Experiment Name: At_Drought_Soil_Dry_P Parameter: Treatment Value: Drought vs. No Drought
  misc_feature: MA Experiment ID: 20001555 Result: Up-regulated in Transcription
  misc_feature: MA Experiment 20001555 PARAMETER Experiment Name: At_Drought_Soil_Dry_P Parameter: Age (day) Value: 24
  misc_feature: MA Experiment 20001555 PARAMETER Experiment Name: At_Drought_Soil_Dry_P Parameter: Organism Value: A. thaliana
  misc_feature: MA Experiment 20001555 PARAMETER Experiment Name: At_Drought_Soil_Dry_P Parameter: Plant Line Value: WS
  misc_feature: MA Experiment 20001555 PARAMETER Experiment Name: At_Drought_Soil_Dry_P Parameter: Post Timepoint (hr) Value: None
  misc_feature: MA Experiment 20001555 PARAMETER Experiment Name: At_Drought_Soil_Dry_P Parameter: Post-Treatment Value: None
  misc_feature: MA Experiment 20001555 PARAMETER Experiment Name: At_Drought_Soil_Dry_P Parameter: Timepoint (day) Value: 10
  misc_feature: MA Experiment 20001555 PARAMETER Experiment Name: At_Drought_Soil_Dry_P Parameter: Treatment Value: Drought vs. No Drought
  misc_feature: MA Experiment ID: 20001556 Result: Up-regulated in Transcription
  misc_feature: MA Experiment 20001556 PARAMETER Experiment Name: At_Drought_Soil_Dry_P Parameter: Age (day) Value: 26
  misc_feature: MA Experiment 20001556 PARAMETER Experiment Name: At_Drought_Soil_Dry_P Parameter: Organism Value: A. thaliana
  misc_feature: MA Experiment 20001556 PARAMETER Experiment Name: At_Drought_Soil_Dry_P Parameter: Plant Line Value: WS
  misc_feature: MA Experiment 20001556 PARAMETER Experiment Name: At_Drought_Soil_Dry_P Parameter: Post Timepoint (hr) Value: None
  misc_feature: MA Experiment 20001556 PARAMETER Experiment Name: At_Drought_Soil_Dry_P Parameter: Post-Treatment Value: None
  misc_feature: MA Experiment 20001556 PARAMETER Experiment Name: At_Drought_Soil_Dry_P Parameter: Timepoint (day) Value: 12
  misc_feature: MA Experiment 20001556 PARAMETER Experiment Name: At_Drought_Soil_Dry_P Parameter: Treatment Value: Drought vs. No Drought
  misc_feature: MA Experiment ID: 20001911 Result: Down-regulated in Transcription
  misc_feature: MA Experiment 20001911 PARAMETER Experiment Name: At_Drought_Reproduction_P Parameter: Age (day) Value: 40
  misc_feature: MA Experiment 20001911 PARAMETER Experiment Name: At_Drought_Reproduction_P Parameter: Organism Value: A. thaliana
  misc_feature: MA Experiment 20001911 PARAMETER Experiment Name: At_Drought_Reproduction_P Parameter: Plant Line Value: WS
  misc_feature: MA Experiment 20001911 PARAMETER Experiment Name: At_Drought_Reproduction_P Parameter: Timepoint (day) Value: 10
  misc_feature: MA Experiment 20001911 PARAMETER Experiment Name: At_Drought_Reproduction_P Parameter: Tissue Value: Flowers
  misc_feature: MA Experiment 20001911 PARAMETER Experiment Name: At_Drought_Reproduction_P Parameter: Treatment Value: Drought vs. No Drought
acattaatttcttataaccaacaacaataatgacaaaccatcttcaagatcccttacctacttacccaaaaccggttttaaccaaagaagaacaagaagtggacgagaaaatggtaagcttgcaagcagagagtatcgtgaacaccgtggctttccctatggttctcaaagccgccttcgagcttggcgtcatcgacaccatcgctgctgcaggaaacgacacgtggctctcaccgtgtgagatagcgtgtagtctcccaaccaaacccaccaacccggaggcgccggtgttgcttgaccggatgctgagcttacttgtcagccactcgatcttgaagtgccgtatgattgaaaccggagagaacggtcgaaccggaaagatcgagagggtatatgcagccgaaccggtttgcaagtattttttgagagatagtgatggtacaggatctctcgtgcctctgttcatgttgctccatacccaagtgtttttcaagacttggacaaatcttaaagatgtgatactagaaggaagagatgcattcaactctgcccacggcatgaaaatcttcgaatacataaattcggatcaaccatttgctgagttgtttaatcgtgcaatgtcggaaccttccaccatgatcatgaagaaggttctagacgtatatagaggatttgaagatgttaacactttggtggatgttggaggaggaaatggcactgttttaggtttagtcacttctaagtatcctcatatcaaaggtgttaatttcgacttagctcaagttttaacccaagctcctttttatccaggagtcgagcatgtatctggagacatgtttgtagaagttccaaagggagatgccgtctttatgaaatggatactacatgattggggagacgaggattgtataaagattctgaaaaattgttggaaaagtctaccggaaaaagggaagattattattgtagagtttgttacaccaaaggaaccaaagggtggtgacttatcttctaacactgtctttgccatggacttgttgatgttaacccaatgctctggtggtaaagagagatctctttcacagttcgagaatttggcgtttgcgtcaggttttcttcgatgtgaaatcatttgtcttgcttattcgtattctgttatcgaattccacaaataaatttggaatttaagaaagaaaagaaaacaatatatacgtaactttttctgttt

SEQ ID NO: 26751 - protein, 381 aa, Arabidopsis thaliana
  peptide (1)..(381): Ceres Seq. ID no. 12466464
  misc_feature (115)..(358): Pfam Name: O-methyltransferase Pfam Description: O-methyltransferase
  misc_feature (1)..(44): Homolog of NCBI NO: 15240132 NR Description: O-methyltransferase, family 2 family; protein id:
  misc_feature (66)..(126): Homolog of NCBI NO: 15240132 NR Description: O-methyltransferase, family 2 family; protein id:
  misc_feature (185)..(381): Homolog of NCBI NO: 15240132 NR Description: O-methyltransferase, family 2 family; protein id:
  misc_feature (1)..(381): Homolog of NCBI NO: 15238847 NR Description: O-methyltransferase 1, putative
  misc_feature (1)..(381): Homolog of NCBI NO: 21618183 NR Description: caffeic acid 3-O-methyltransferase-like protein
  misc_feature (1)..(381): Homolog of NCBI NO: 25315953 NR Description: hypothetical protein F16M19.12 [imported] -
  misc_feature (1)..(381): Homolog of NCBI NO: 15223977 NR Description: O-methyltransferase, family 2 family; protein id:
  misc_feature (44)..(381): Homolog of NCBI NO: 21593350 NR Description: putative caffeic acid 3-O-methyltransferase
  misc_feature (1)..(381): Homolog of NCBI NO: 27808586 NR Description: At1g77520 [Arabidopsis thaliana]
  misc_feature (1)..(381): Homolog of NCBI NO: 15223976 NR Description: O-methyltransferase, family 2 family
MTNHLQDPLPTYPKPVLTKEEQEVDEKMVSLQAESIVNTVAFPMVLKAAFELGVIDTIAAAGNDTWLSPCEIACSLPTKPTNPEAPVLLDRMLSLLVSHSILKCRMIETGENGRTGKIERVYAAEPVCKYFLRDSDGTGSLVPLFMLLHTQVFFKTWTNLKDVILEGRDAFNSAHGMKIFEYINSDQPFAELFNRAMSEPSTMIMKKVLDVYRGFEDVNTLVDVGGGNGTVLGLVTSKYPHIKGVNFDLAQVLTQAPFYPGVEHVSGDMFVEVPKGDAVFMKWILHDWGDEDCIKILKNCWKSLPEKGKIIIVEFVTPKEPKGGDLSSNTVFAMDLLMLTQCSGGKERSLSQFENLAFASGFLRCEIICLAYSYSVIEFHK

SEQ ID NO: 26752 - protein, 354 aa, Arabidopsis thaliana
  peptide (1)..(354): Ceres Seq. ID no. 12466465
  misc_feature (88)..(331): Pfam Name: O-methyltransferase Pfam Description: O-methyltransferase
  misc_feature (1)..(17): Homolog of NCBI NO: 15240132 NR Description: O-methyltransferase, family 2 family; protein id:
  misc_feature (39)..(99): Homolog of NCBI NO: 15240132 NR Description: O-methyltransferase, family 2 family; protein id:
  misc_feature (158)..(354): Homolog of NCBI NO: 15240132 NR Description: O-methyltransferase, family 2 family; protein id:
  misc_feature (1)..(354): Homolog of NCBI NO: 15238847 NR Description: O-methyltransferase 1, putative
  misc_feature (1)..(354): Homolog of NCBI NO: 21618183 NR Description: caffeic acid 3-O-methyltransferase-like protein
  misc_feature (1)..(354): Homolog of NCBI NO: 25315953 NR Description: hypothetical protein F16M19.12 [imported] -
  misc_feature (1)..(354): Homolog of NCBI NO: 15223977 NR Description: O-methyltransferase, family 2 family; protein id:
  misc_feature (17)..(354): Homolog of NCBI NO: 21593350 NR Description: putative caffeic acid 3-O-methyltransferase
  misc_feature (1)..(354): Homolog of NCBI NO: 27808586 NR Description: At1g77520 [Arabidopsis thaliana]
  misc_feature (1)..(354): Homolog of NCBI NO: 15223976 NR Description: O-methyltransferase, family 2 family
MVSLQAESIVNTVAFPMVLKAAFELGVIDTIAAAGNDTWLSPCEIACSLPTKPTNPEAPVLLDRMLSLLVSHSILKCRMIETGENGRTGKIERVYAAEPVCKYFLRDSDGTGSLVPLFMLLHTQVFFKTWTNLKDVILEGRDAFNSAHGMKIFEYINSDQPFAELFNRAMSEPSTMIMKKVLDVYRGFEDVNTLVDVGGGNGTVLGLVTSKYPHIKGVNFDLAQVLTQAPFYPGVEHVSGDMFVEVPKGDAVFMKWILHDWGDEDCIKILKNCWKSLPEKGKIIIVEFVTPKEPKGGDLSSNTVFAMDLLMLTQCSGGKERSLSQFENLAFASGFLRCEIICLAYSYSVIEFHK

SEQ ID NO: 26753 - protein, 338 aa, Arabidopsis thaliana
  peptide (1)..(338): Ceres Seq. ID no. 12466466
  misc_feature (72)..(315): Pfam Name: O-methyltransferase Pfam Description: O-methyltransferase
  misc_feature (1)..(338): Homolog of NCBI NO: 15218133 NR Description: O-methyltransferase 1, putative
  misc_feature (23)..(83): Homolog of NCBI NO: 15240132 NR Description: O-methyltransferase, family 2 family; protein id:
  misc_feature (142)..(338): Homolog of NCBI NO: 15240132 NR Description: O-methyltransferase, family 2 family; protein id:
  misc_feature (1)..(338): Homolog of NCBI NO: 15238847 NR Description: O-methyltransferase 1, putative
  misc_feature (1)..(338): Homolog of NCBI NO: 21618183 NR Description: caffeic acid 3-O-methyltransferase-like protein
  misc_feature (1)..(338): Homolog of NCBI NO: 25315953 NR Description: hypothetical protein F16M19.12 [imported] -
  misc_feature (1)..(338): Homolog of NCBI NO: 15223977 NR Description: O-methyltransferase, family 2 family; protein id:
  misc_feature (1)..(338): Homolog of NCBI NO: 21593350 NR Description: putative caffeic acid 3-O-methyltransferase
  misc_feature (1)..(338): Homolog of NCBI NO: 27808586 NR Description: At1g77520 [Arabidopsis thaliana]
  misc_feature (1)..(338): Homolog of NCBI NO: 15223976 NR Description: O-methyltransferase, family 2 family
MVLKAAFELGVIDTIAAAGNDTWLSPCEIACSLPTKPTNPEAPVLLDRMLSLLVSHSILKCRMIETGENGRTGKIERVYAAEPVCKYFLRDSDGTGSLVPLFMLLHTQVFFKTWTNLKDVILEGRDAFNSAHGMKIFEYINSDQPFAELFNRAMSEPSTMIMKKVLDVYRGFEDVNTLVDVGGGNGTVLGLVTSKYPHIKGVNFDLAQVLTQAPFYPGVEHVSGDMFVEVPKGDAVFMKWILHDWGDEDCIKILKNCWKSLPEKGKIIIVEFVTPKEPKGGDLSSNTVFAMDLLMLTQCSGGKERSLSQFENLAFASGFLRCEIICLAYSYSVIEFHK

SEQ ID NO: 26754 - DNA, 1471 bp, Arabidopsis thaliana
  misc_feature (1)..(1471): Ceres Seq. ID no. 13491196
  misc_feature: MA Experiment ID: 108462 Result: Down-regulated in Transcription
  misc_feature: MA Experiment 108462 PARAMETER Experiment Name: At_Germinating_Seeds_cDNA_P Parameter: Age (day) Value: 2 vs. 0
  misc_feature: MA Experiment 108462 PARAMETER Experiment Name: At_Germinating_Seeds_cDNA_P Parameter: Tissue Value: Germinating Seeds
  misc_feature: MA Experiment ID: 108463 Result: Down-regulated in Transcription
  misc_feature: MA Experiment 108463 PARAMETER Experiment Name: At_Germinating_Seeds_cDNA_P Parameter: Age (day) Value: 3 vs. 0
  misc_feature: MA Experiment 108463 PARAMETER Experiment Name: At_Germinating_Seeds_cDNA_P Parameter: Tissue Value: Germinating Seeds
  misc_feature: MA Experiment ID: 108464 Result: Down-regulated in Transcription
  misc_feature: MA Experiment 108464 PARAMETER Experiment Name: At_Germinating_Seeds_cDNA_P Parameter: Age (day) Value: 4 vs. 0
  misc_feature: MA Experiment 108464 PARAMETER Experiment Name: At_Germinating_Seeds_cDNA_P Parameter: Tissue Value: Germinating Seeds
  misc_feature: MA Experiment ID: 108595 Result: Down-regulated in Transcription
  misc_feature: MA Experiment 108595 PARAMETER Experiment Name: At_Ler-pi_Ovule_cDNA_P Parameter: Plant Line Value: null
  misc_feature: MA Experiment ID: 20000069 Result: Down-regulated in Transcription
  misc_feature: MA Experiment 20000069 PARAMETER Experiment Name: At_100uM_ABA_Mutants_cDNA_P Parameter: Plant Line Value: CS23
  misc_feature: MA Experiment 20000069 PARAMETER Experiment Name: At_100uM_ABA_Mutants_cDNA_P Parameter: Timepoint (hr) Value: 6
  misc_feature: MA Experiment 20000069 PARAMETER Experiment Name: At_100uM_ABA_Mutants_cDNA_P Parameter: Tissue Value: Aerial
  misc_feature: MA Experiment 20000069 PARAMETER Experiment Name: At_100uM_ABA_Mutants_cDNA_P Parameter: Treatment Value: 100uM ABA vs. No Treatment
  misc_feature: MA Experiment ID: 20000070 Result: Down-regulated in Transcription
  misc_feature: MA Experiment 20000070 PARAMETER Experiment Name: At_100uM_ABA_Mutants_cDNA_P Parameter: Plant Line Value: CS24
  misc_feature: MA Experiment 20000070 PARAMETER Experiment Name: At_100uM_ABA_Mutants_cDNA_P Parameter: Timepoint (hr) Value: 6
  misc_feature: MA Experiment 20000070 PARAMETER Experiment Name: At_100uM_ABA_Mutants_cDNA_P Parameter: Tissue Value: Aerial
  misc_feature: MA Experiment 20000070 PARAMETER Experiment Name: At_100uM_ABA_Mutants_cDNA_P Parameter: Treatment Value: 100uM ABA vs. No Treatment
  misc_feature: MA Experiment ID: 20000071 Result: Down-regulated in Transcription
  misc_feature: MA Experiment 20000071 PARAMETER Experiment Name: At_100uM_ABA_Mutants_cDNA_P Parameter: Plant Line Value: CS8104
  misc_feature: MA Experiment 20000071 PARAMETER Experiment Name: At_100uM_ABA_Mutants_cDNA_P Parameter: Timepoint (hr) Value: 6
  misc_feature: MA Experiment 20000071 PARAMETER Experiment Name: At_100uM_ABA_Mutants_cDNA_P Parameter: Tissue Value: Aerial
  misc_feature: MA Experiment 20000071 PARAMETER Experiment Name: At_100uM_ABA_Mutants_cDNA_P Parameter: Treatment Value: 100uM ABA vs. No Treatment
  misc_feature: MA Experiment ID: 20000072 Result: Down-regulated in Transcription
  misc_feature: MA Experiment 20000072 PARAMETER Experiment Name: At_100uM_ABA_Mutants_cDNA_P Parameter: Plant Line Value: CS8105
  misc_feature: MA Experiment 20000072 PARAMETER Experiment Name: At_100uM_ABA_Mutants_cDNA_P Parameter: Timepoint (hr) Value: 6
  misc_feature: MA Experiment 20000072 PARAMETER Experiment Name: At_100uM_ABA_Mutants_cDNA_P Parameter: Tissue Value: Aerial
  misc_feature: MA Experiment 20000072 PARAMETER Experiment Name: At_100uM_ABA_Mutants_cDNA_P Parameter: Treatment Value: 100uM ABA vs. No Treatment
  misc_feature: MA Experiment ID: 20000086 Result: Down-regulated in Transcription
  misc_feature: MA Experiment 20000086 PARAMETER Experiment Name: At_100uM_ABA_Mutants_cDNA_P Parameter: Plant Line Value: CS22
  misc_feature: MA Experiment 20000086 PARAMETER Experiment Name: At_100uM_ABA_Mutants_cDNA_P Parameter: Timepoint (hr) Value: 6
  misc_feature: MA Experiment 20000086 PARAMETER Experiment Name: At_100uM_ABA_Mutants_cDNA_P Parameter: Tissue Value: Aerial
  misc_feature: MA Experiment 20000086 PARAMETER Experiment Name: At_100uM_ABA_Mutants_cDNA_P Parameter: Treatment Value: 100uM ABA vs. No Treatment
  misc_feature: MA Experiment ID: 20000087 Result: Down-regulated in Transcription
  misc_feature: MA Experiment 20000087 PARAMETER Experiment Name: At_100uM_ABA_Mutants_cDNA_P Parameter: Plant Line Value: WS
  misc_feature: MA Experiment 20000087 PARAMETER Experiment Name: At_100uM_ABA_Mutants_cDNA_P Parameter: Timepoint (hr) Value: 6
  misc_feature: MA Experiment 20000087 PARAMETER Experiment Name: At_100uM_ABA_Mutants_cDNA_P Parameter: Tissue Value: Aerial
  misc_feature: MA Experiment 20000087 PARAMETER Experiment Name: At_100uM_ABA_Mutants_cDNA_P Parameter: Treatment Value: 100uM ABA vs. No Treatment
  misc_feature: MA Experiment ID: 20000117 Result: Down-regulated in Transcription
  misc_feature: MA Experiment 20000117 PARAMETER Experiment Name: At_100uM_ABA_Mutants_cDNA_P Parameter: Plant Line Value: Columbia
  misc_feature: MA Experiment 20000117 PARAMETER Experiment Name: At_100uM_ABA_Mutants_cDNA_P Parameter: Timepoint (hr) Value: 6
  misc_feature: MA Experiment 20000117 PARAMETER Experiment Name: At_100uM_ABA_Mutants_cDNA_P Parameter: Tissue Value: Aerial
  misc_feature: MA Experiment 20000117 PARAMETER Experiment Name: At_100uM_ABA_Mutants_cDNA_P Parameter: Treatment Value: 100uM ABA vs. No Treatment
  misc_feature: MA Experiment ID: 20001248 Result: Down-regulated in Transcription
  misc_feature: MA Experiment 20001248 PARAMETER Experiment Name: At_Far-red-induction_P Parameter: Age (day) Value: 7
  misc_feature: MA Experiment 20001248 PARAMETER Experiment Name: At_Far-red-induction_P Parameter: Light Value: Far-red vs. White
  misc_feature: MA Experiment 20001248 PARAMETER Experiment Name: At_Far-red-induction_P Parameter: Organism Value: A. thaliana
  misc_feature: MA Experiment 20001248 PARAMETER Experiment Name: At_Far-red-induction_P Parameter: Plant Line Value: Columbia
  misc_feature: MA Experiment 20001248 PARAMETER Experiment Name: At_Far-red-induction_P Parameter: Timepoint (hr) Value: 4
  misc_feature: MA Experiment 20001248 PARAMETER Experiment Name: At_Far-red-induction_P Parameter: Tissue Value: Whole Plant
  misc_feature: MA Experiment ID: 20001557 Result: Up-regulated in Transcription
  misc_feature: MA Experiment 20001557 PARAMETER Experiment Name: At_Drought_Soil_Dry_P Parameter: Age (day) Value: 27
  misc_feature: MA Experiment 20001557 PARAMETER Experiment Name: At_Drought_Soil_Dry_P Parameter: Organism Value: A. thaliana
  misc_feature: MA Experiment 20001557 PARAMETER Experiment Name: At_Drought_Soil_Dry_P Parameter: Plant Line Value: WS
  misc_feature: MA Experiment 20001557 PARAMETER Experiment Name: At_Drought_Soil_Dry_P Parameter: Post Timepoint (hr) Value: 3
  misc_feature: MA Experiment 20001557 PARAMETER Experiment Name: At_Drought_Soil_Dry_P Parameter: Post-Treatment Value: Re-Water vs. No Drought
  misc_feature: MA Experiment 20001557 PARAMETER Experiment Name: At_Drought_Soil_Dry_P Parameter: Timepoint (day) Value: 13
  misc_feature: MA Experiment 20001557 PARAMETER Experiment Name: At_Drought_Soil_Dry_P Parameter: Treatment Value: Drought vs. No Drought
aaaacacaaaccctatcttttcttcttcttcttcttcgttcagtcttcactttcttttcttttctccgccaccacacaaatacattcttcattctttgtaactttcacgctattcttcctcaatatattcattcgacctcctctcttcattcttaatttctcaaaaatcttatctttctccctcatttttcccgtcgagggttccttaatctccttcctaggaacgtttcatcgatttcatatttgctttccttaatccacaacgtttcttccttcgtttttttctgcaattttgttttcctttacaccaaattcatctcttagtcttgtccaattttcgattttttttccgacaatcctgattgtttgtttttttatctgtcgggatttcgaatggcgcttgcgtatgatcctctcttcattacatcggacaaatctttgtccgcctttgatgttgcctcttcaccgcctcagcccatgaatttaacacaagacgagctcaaacgtatcgccgcttacaaagccgtggaattcgtcgagtccggcatggttctcggtctcggaaccggctccaccgccaaacacgccgtcgaccgaatcggcgagcttctccgtcaaggcaaactcgagaacatcgttggtataccaacgtctaagaagacgcaggagcaggctctgtctctcggcatccctctctctgatctcgacgcacaccctgtcatcgatctctccatcgacggcgcagacgaggtcgacccttttctcaacctggtaaaaggcagaggagggtctctgcttcgagagaagatgatcgaaggagcttctaagaagtttgtggtgattgttgacgactccaagatggtgaagcatattggtggaagcaagcttgctcttccggtggagatagtgcccttttgctggaagttcacggcggagaagctccggagtctgctggaaggatacgggtgtgaagcgaatcttcggttgggagagaaagggaaggcctttgtgacagacaatgggaattacatagtggatatgcatgtggaagaggatatgggagatttgggagcagtgagtgatgcgattctgaggctaccgggagtagtggaacatgggatgtttctggatatggcttctactgttatcattgcaggtgagcttggtgttaagatcaagaacaaacactgaaacacacaccacacctcttctcgttgattttggcctttatgtattaggagacagaggattatggtttgctctatggtttagatgatatgagattaggttttggatgatgtcactgtgaggaggatgaatgactttcttttgacagagttttggatgcattgacatcgtcgtcatcatcatcaatcaatcttgtaaacagcattttgcttcttcattgcctttgttgtgtttgaatgctcttcttttactactgggcctgtgttgggctttgctccttgtt

SEQ ID NO: 26755 - protein, 265 aa, Arabidopsis thaliana
  peptide (1)..(265): Ceres Seq. ID no. 13491197
  misc_feature (81)..(260): Pfam Name: Ribose 5-phosphate isomerase A (phosphoriboisomerase A) Pfam Description: Ribose 5-phosphate isomerase A
  misc_feature (7)..(264): Homolog of NCBI NO: 18654317 NR Description: ribose-5-phosphate isomerase [Spinacia oleracea]
  misc_feature (1)..(264): Homolog of NCBI NO: 13430836 NR Description: putative ribose 5-phosphate isomerase
  misc_feature (1)..(264): Homolog of NCBI NO: 15223936 NR Description: ribose 5-phosphate isomerase -related
  misc_feature (1)..(264): Homolog of NCBI NO: 21594002 NR Description: putative ribose 5-phosphate isomerase
  misc_feature (31)..(264): Homolog of NCBI NO: 34393836 NR Description: putative ribose-5-phosphate isomerase
  misc_feature (31)..(264): Homolog of NCBI NO: 34393835 NR Description: putative ribose-5-phosphate isomerase
  misc_feature (1)..(264): Homolog of NCBI NO: 15229349 NR Description: ribose 5-phosphate isomerase -related
  misc_feature (26)..(258): Homolog of NCBI NO: 38347196 NR Description: OSJNBa0023J03.8 [Oryza sativa (japonica
  misc_feature (1)..(264): Homolog of NCBI NO: 21592672 NR Description: putative ribose 5-phosphate isomerase
  misc_feature (1)..(265): Homolog of NCBI NO: 15226223 NR Description: ribose 5-phosphate isomerase -related
MALAYDPLFITSDKSLSAFDVASSPPQPMNLTQDELKRIAAYKAVEFVESGMVLGLGTGSTAKHAVDRIGELLRQGKLENIVGIPTSKKTQEQALSLGIPLSDLDAHPVIDLSIDGADEVDPFLNLVKGRGGSLLREKMIEGASKKFVVIVDDSKMVKHIGGSKLALPVEIVPFCWKFTAEKLRSLLEGYGCEANLRLGEKGKAFVTDNGNYIVDMHVEEDMGDLGAVSDAILRLPGVVEHGMFLDMASTVIIAGELGVKIKNKH

SEQ ID NO: 26756 - protein, 237 aa, Arabidopsis thaliana
  peptide (1)..(237): Ceres Seq. ID no. 13491198
  misc_feature (53)..(232): Pfam Name: Ribose 5-phosphate isomerase A (phosphoriboisomerase A) Pfam Description: Ribose 5-phosphate isomerase A
  misc_feature (1)..(230): Homolog of NCBI NO: 38347196 NR Description: OSJNBa0023J03.8 [Oryza sativa (japonica
  misc_feature (1)..(236): Homolog of NCBI NO: 21594002 NR Description: putative ribose 5-phosphate isomerase
  misc_feature (1)..(236): Homolog of NCBI NO: 15229349 NR Description: ribose 5-phosphate isomerase -related
  misc_feature (3)..(236): Homolog of NCBI NO: 34393836 NR Description: putative ribose-5-phosphate isomerase
  misc_feature (3)..(236): Homolog of NCBI NO: 34393835 NR Description: putative ribose-5-phosphate isomerase
  misc_feature (1)..(236): Homolog of NCBI NO: 18654317 NR Description: ribose-5-phosphate isomerase [Spinacia oleracea]
  misc_feature (1)..(236): Homolog of NCBI NO: 13430836 NR Description: putative ribose 5-phosphate isomerase
  misc_feature (1)..(236): Homolog of NCBI NO: 15223936 NR Description: ribose 5-phosphate isomerase -related
  misc_feature (1)..(236): Homolog of NCBI NO: 21592672 NR Description: putative ribose 5-phosphate isomerase
  misc_feature (1)..(237): Homolog of NCBI NO: 15226223 NR Description: ribose 5-phosphate isomerase -related
MNLTQDELKRIAAYKAVEFVESGMVLGLGTGSTAKHAVDRIGELLRQGKLENIVGIPTSKKTQEQALSLGIPLSDLDAHPVIDLSIDGADEVDPFLNLVKGRGGSLLREKMIEGASKKFVVIVDDSKMVKHIGGSKLALPVEIVPFCWKFTAEKLRSLLEGYGCEANLRLGEKGKAFVTDNGNYIVDMHVEEDMGDLGAVSDAILRLPGVVEHGMFLDMASTVIIAGELGVKIKNKH

SEQ ID NO: 26757 - protein, 214 aa, Arabidopsis thaliana
  peptide (1)..(214): Ceres Seq. ID no. 13491199
  misc_feature (30)..(209): Pfam Name: Ribose 5-phosphate isomerase A (phosphoriboisomerase A) Pfam Description: Ribose 5-phosphate isomerase A
  misc_feature (1)..(207): Homolog of NCBI NO: 38347196 NR Description: OSJNBa0023J03.8 [Oryza sativa (japonica
  misc_feature (1)..(213): Homolog of NCBI NO: 21594002 NR Description: putative ribose 5-phosphate isomerase
  misc_feature (1)..(213): Homolog of NCBI NO: 15229349 NR Description: ribose 5-phosphate isomerase -related
  misc_feature (1)..(213): Homolog of NCBI NO: 34393836 NR Description: putative ribose-5-phosphate isomerase
  misc_feature (1)..(213): Homolog of NCBI NO: 34393835 NR Description: putative ribose-5-phosphate isomerase
  misc_feature (1)..(213): Homolog of NCBI NO: 18654317 NR Description: ribose-5-phosphate isomerase [Spinacia oleracea]
  misc_feature (1)..(213): Homolog of NCBI NO: 13430836 NR Description: putative ribose 5-phosphate isomerase
  misc_feature (1)..(213): Homolog of NCBI NO: 15223936 NR Description: ribose 5-phosphate isomerase -related
  misc_feature (1)..(213): Homolog of NCBI NO: 21592672 NR Description: putative ribose 5-phosphate isomerase
  misc_feature (1)..(214): Homolog of NCBI NO: 15226223 NR Description: ribose 5-phosphate isomerase -related
MVLGLGTGSTAKHAVDRIGELLRQGKLENIVGIPTSKKTQEQALSLGIPLSDLDAHPVIDLSIDGADEVDPFLNLVKGRGGSLLREKMIEGASKKFVVIVDDSKMVKHIGGSKLALPVEIVPFCWKFTAEKLRSLLEGYGCEANLRLGEKGKAFVTDNGNYIVDMHVEEDMGDLGAVSDAILRLPGVVEHGMFLDMASTVIIAGELGVKIKNKH

SEQ ID NO: 26758 - DNA, 1248 bp, Arabidopsis thaliana
  misc_feature (1)..(1248): Ceres Seq. ID no. 12331575
  misc_feature: MA Experiment ID: 108434 Result: Up-regulated in Transcription
  misc_feature: MA Experiment 108434 PARAMETER Experiment Name: At_Root_Tips_cDNA_P Parameter: Tissue Value: Root Tips
  misc_feature: MA Experiment ID: 108463 Result: Down-regulated in Transcription
  misc_feature: MA Experiment 108463 PARAMETER Experiment Name: At_Germinating_Seeds_cDNA_P Parameter: Age (day) Value: 3 vs. 0
  misc_feature: MA Experiment 108463 PARAMETER Experiment Name: At_Germinating_Seeds_cDNA_P Parameter: Tissue Value: Germinating Seeds
  misc_feature: MA Experiment ID: 108464 Result: Down-regulated in Transcription
  misc_feature: MA Experiment 108464 PARAMETER Experiment Name: At_Germinating_Seeds_cDNA_P Parameter: Age (day) Value: 4 vs. 0
  misc_feature: MA Experiment 108464 PARAMETER Experiment Name: At_Germinating_Seeds_cDNA_P Parameter: Tissue Value: Germinating Seeds
  misc_feature: MA Experiment ID: 20000224 Result: Down-regulated in Transcription
atctccttctccggcgaagaaattgaaaattcattatccctaaaaccctaataaaggtccagagagtcgtcagaaaccaccgattagcttttgaaatggacggtgccacataccaaagattcccaaagatcaagatccgtgagcttaaagatgattacgccaagttcgagcttcgtgaaaccgacgtttctatggccaacgctctccgtcgcgtaatgatctccgaagtccctaccgtcgcaatagatctagtcgaaatcgaggttaattcatctgtactcaacgacgagttcattgctcatcgattaggtctcattcctctcactagcgaacgtgctatgagcatgcgtttctctcgagattgtgatgcttgtgatggagatggacaatgcgagttttgctctgttgagtttcggcttagttctaagtgtgttactgatcaaaccctagatgttactagtagggatttgtacagtgctgatcctactgttactcctgtggatttcactattgactcgtctgtatctgattcaagcgagcacaagggaattatcattgtgaaactgcgtcggggacaagagttgaagcttagagcgatagcgaggaaagggattgggaaagatcatgcgaaatggtctcctgcagctactgttacgtttatgtatgagcctgacataattattaatgaagatatgatggatactttgtcagacgaggaaaagatcgacttgattgagagcagtcctaccaaagtgtttggcatggatccagtcaccagacaggttgtagtggttgatcctgaagcatacacttacgatgaagaagtgatcaagaaagctgaagcaatggggaaaccgggactcattgagatcagtccgaaagatgacagttttatattcactgttgagtccacaggtgcagtgaaggcttcccaactggtactaaatgccattgatcttctgaagcagaagcttgatgcagtccgtctctcagatgacaccgtagaagcggatgatcagtttggtgaactcggtgcccatatgcgtggaggatgaactcaagtgattaattcgagctctttgttatacctgtttgtttcaggttttgagtttcttctggagcagactgatattaaccgtagtggcactgtcttgtttgataacatgtgaagtggcagtcttctatttgttctggacctctgatccctctgttcctgaatcttgttaagtttggttgttgttagttgtc

SEQ ID NO: 26759 - protein, 319 aa, Arabidopsis thaliana
  peptide (1)..(319): Ceres Seq. ID no. 12331576
  misc_feature (53)..(181): Pfam Name: RNA polymerase Rpb3/RpoA insert domain Pfam Description: RNA polymerase Rpb3/RpoA insert domain
  misc_feature (221)..(299): Homolog of NCBI NO: 39589723 NR Description: Hypothetical protein CBG12350 [Caenorhabditis
  misc_feature (6)..(211): Homolog of NCBI NO: 39589723 NR Description: Hypothetical protein CBG12350 [Caenorhabditis
  misc_feature (11)..(297): Homolog of NCBI NO: 116575 NR Description: Conjugation stage-specific protein
  misc_feature (6)..(193): Homolog of NCBI NO: 28278474 NR Description: Similar to polymerase (RNA) II (DNA directed)
  misc_feature (262)..(293): Homolog of NCBI NO: 40645083 NR Description: homologue of DNA-directed RNA polymerase II
  misc_feature (6)..(200): Homolog of NCBI NO: 40645083 NR Description: homologue of DNA-directed RNA polymerase II
  misc_feature (1)..(319): Homolog of NCBI NO: 2129725 NR Description: DNA-directed RNA polymerase (EC 2.7.7.6) II 35.5K
  misc_feature (1)..(319): Homolog of NCBI NO: 15226509 NR Description: DNA-directed RNA polymerase II, third largest
  misc_feature (1)..(319): Homolog of NCBI NO: 21593370 NR Description: DNA-directed RNA polymerase II, third largest
  misc_feature (1)..(319): Homolog of NCBI NO: 15226523 NR Description: DNA-directed RNA polymerase II, third largest
MDGATYQRFPKIKIRELKDDYAKFELRETDVSMANALRRVMISEVPTVAIDLVEIEVNSSVLNDEFIAHRLGLIPLTSERAMSMRFSRDCDACDGDGQCEFCSVEFRLSSKCVTDQTLDVTSRDLYSADPTVTPVDFTIDSSVSDSSEHKGIIIVKLRRGQELKLRAIARKGIGKDHAKWSPAATVTFMYEPDIIINEDMMDTLSDEEKIDLIESSPTKVFGMDPVTRQVVVVDPEAYTYDEEVIKKAEAMGKPGLIEISPKDDSFIFTVESTGAVKASQLVLNAIDLLKQKLDAVRLSDDTVEADDQFGELGAHMRGG

SEQ ID NO: 26760 - protein, 287 aa, Arabidopsis thaliana
  peptide (1)..(287): Ceres Seq. ID no. 12331577
  misc_feature (21)..(149): Pfam Name: RNA polymerase Rpb3/RpoA insert domain Pfam Description: RNA polymerase Rpb3/RpoA insert domain
  misc_feature (189)..(267): Homolog of NCBI NO: 39589723 NR Description: Hypothetical protein CBG12350 [Caenorhabditis
  misc_feature (1)..(179): Homolog of NCBI NO: 39589723 NR Description: Hypothetical protein CBG12350 [Caenorhabditis
  misc_feature (1)..(265): Homolog of NCBI NO: 116575 NR Description: Conjugation stage-specific protein
  misc_feature (1)..(161): Homolog of NCBI NO: 28278474 NR Description: Similar to polymerase (RNA) II (DNA directed)
  misc_feature (230)..(261): Homolog of NCBI NO: 40645083 NR Description: homologue of DNA-directed RNA polymerase II
  misc_feature (1)..(168): Homolog of NCBI NO: 40645083 NR Description: homologue of DNA-directed RNA polymerase II
  misc_feature (1)..(287): Homolog of NCBI NO: 2129725 NR Description: DNA-directed RNA polymerase (EC 2.7.7.6) II 35.5K
  misc_feature (1)..(287): Homolog of NCBI NO: 15226509 NR Description: DNA-directed RNA polymerase II, third largest
  misc_feature (1)..(287): Homolog of NCBI NO: 21593370 NR Description: DNA-directed RNA polymerase II, third largest
  misc_feature (1)..(287): Homolog of NCBI NO: 15226523 NR Description: DNA-directed RNA polymerase II, third largest
MANALRRVMISEVPTVAIDLVEIEVNSSVLNDEFIAHRLGLIPLTSERAMSMRFSRDCDACDGDGQCEFCSVEFRLSSKCVTDQTLDVTSRDLYSADPTVTPVDFTIDSSVSDSSEHKGIIIVKLRRGQELKLRAIARKGIGKDHAKWSPAATVTFMYEPDIIINEDMMDTLSDEEKIDLIESSPTKVFGMDPVTRQVVVVDPEAYTYDEEVIKKAEAMGKPGLIEISPKDDSFIFTVESTGAVKASQLVLNAIDLLKQKLDAVRLSDDTVEADDQFGELGAHMRGG

SEQ ID NO: 26761 - protein, 279 aa, Arabidopsis thaliana
  peptide (1)..(279): Ceres Seq. ID no. 12331578
  misc_feature (13)..(141): Pfam Name: RNA polymerase Rpb3/RpoA insert domain Pfam Description: RNA polymerase Rpb3/RpoA insert domain
  misc_feature (181)..(259): Homolog of NCBI NO: 39589723 NR Description: Hypothetical protein CBG12350 [Caenorhabditis
  misc_feature (1)..(171): Homolog of NCBI NO: 39589723 NR Description: Hypothetical protein CBG12350 [Caenorhabditis
  misc_feature (1)..(257): Homolog of NCBI NO: 116575 NR Description: Conjugation stage-specific protein
  misc_feature (1)..(153): Homolog of NCBI NO: 28278474 NR Description: Similar to polymerase (RNA) II (DNA directed)
  misc_feature (222)..(253): Homolog of NCBI NO: 40645083 NR Description: homologue of DNA-directed RNA polymerase II
  misc_feature (1)..(160): Homolog of NCBI NO: 40645083 NR Description: homologue of DNA-directed RNA polymerase II
  misc_feature (1)..(279): Homolog of NCBI NO: 2129725 NR Description: DNA-directed RNA polymerase (EC 2.7.7.6) II 35.5K
  misc_feature (1)..(279): Homolog of NCBI NO: 15226509 NR Description: DNA-directed RNA polymerase II, third largest
  misc_feature (1)..(279): Homolog of NCBI NO: 21593370 NR Description: DNA-directed RNA polymerase II, third largest
  misc_feature (1)..(279): Homolog of NCBI NO: 15226523 NR Description: DNA-directed RNA polymerase II, third largest
MISEVPTVAIDLVEIEVNSSVLNDEFIAHRLGLIPLTSERAMSMRFSRDCDACDGDGQCEFCSVEFRLSSKCVTDQTLDVTSRDLYSADPTVTPVDFTIDSSVSDSSEHKGIIIVKLRRGQELKLRAIARKGIGKDHAKWSPAATVTFMYEPDIIINEDMMDTLSDEEKIDLIESSPTKVFGMDPVTRQVVVVDPEAYTYDEEVIKKAEAMGKPGLIEISPKDDSFIFTVESTGAVKASQLVLNAIDLLKQKLDAVRLSDDTVEADDQFGELGAHMRGG

SEQ ID NO: 26762 - DNA, 1723 bp, Arabidopsis thaliana
  misc_feature (1)..(1723): Ceres Seq. ID no. 13487732
  misc_feature: MA Experiment ID: 108488 Result: Down-regulated in Transcription
  misc_feature: MA Experiment ID: 108561 Result: Up-regulated in Transcription
  misc_feature: MA Experiment 108561 PARAMETER Experiment Name: At_100uM_ABA_cDNA_P Parameter: Timepoint (hr) Value: 6
  misc_feature: MA Experiment 108561 PARAMETER Experiment Name: At_100uM_ABA_cDNA_P Parameter: Tissue Value: Aerial
  misc_feature: MA Experiment 108561 PARAMETER Experiment Name: At_100uM_ABA_cDNA_P Parameter: Treatment Value: 100uM ABA vs. No Treatment
  misc_feature: MA Experiment ID: 108573 Result: Up-regulated in Transcription
  misc_feature: MA Experiment 108573 PARAMETER Experiment Name: At_Drought_cDNA_P Parameter: Timepoint (hr) Value: 6
  misc_feature: MA Experiment 108573 PARAMETER Experiment Name: At_Drought_cDNA_P Parameter: Tissue Value: Aerial
  misc_feature: MA Experiment 108573 PARAMETER Experiment Name: At_Drought_cDNA_P Parameter: Treatment Value: Drought vs. No Drought
  misc_feature: MA Experiment ID: 108574 Result: Down-regulated in Transcription
  misc_feature: MA Experiment 108574 PARAMETER Experiment Name: At_Wounding__cDNA_P Parameter: Timepoint (hr) Value: 1
  misc_feature: MA Experiment 108574 PARAMETER Experiment Name: At_Wounding__cDNA_P Parameter: Tissue Value: Aerial
  misc_feature: MA Experiment 108574 PARAMETER Experiment Name: At_Wounding__cDNA_P Parameter: Treatment Value: Wounding vs. No Wounding
  misc_feature: MA Experiment ID: 108579 Result: Down-regulated in Transcription
  misc_feature: MA Experiment 108579 PARAMETER Experiment Name: At_4deg_Cold_cDNA_P Parameter: Temperature (deg C) Value: 4 vs. 22
  misc_feature: MA Experiment 108579 PARAMETER Experiment Name: At_4deg_Cold_cDNA_P Parameter: Timepoint (hr) Value: 6
  misc_feature: MA Experiment 108579 PARAMETER Experiment Name: At_4deg_Cold_cDNA_P Parameter: Tissue Value: Aerial
  misc_feature: MA Experiment ID: 108595 Result: Down-regulated in Transcription
  misc_feature: MA Experiment 108595 PARAMETER Experiment Name: At_Ler-pi_Ovule_cDNA_P Parameter: Plant Line Value: null
  misc_feature: MA Experiment ID: 20000069 Result: Up-regulated in Transcription
  misc_feature: MA Experiment 20000069 PARAMETER Experiment Name: At_100uM_ABA_Mutants_cDNA_P Parameter: Plant Line Value: CS23
  misc_feature: MA Experiment 20000069 PARAMETER Experiment Name: At_100uM_ABA_Mutants_cDNA_P Parameter: Timepoint (hr) Value: 6
  misc_feature: MA Experiment 20000069 PARAMETER Experiment Name: At_100uM_ABA_Mutants_cDNA_P Parameter: Tissue Value: Aerial
  misc_feature: MA Experiment 20000069 PARAMETER Experiment Name: At_100uM_ABA_Mutants_cDNA_P Parameter: Treatment Value: 100uM ABA vs. No Treatment
  misc_feature: MA Experiment ID: 20000071 Result: Up-regulated in Transcription
  misc_feature: MA Experiment 20000071 PARAMETER Experiment Name: At_100uM_ABA_Mutants_cDNA_P Parameter: Plant Line Value: CS8104
  misc_feature: MA Experiment 20000071 PARAMETER Experiment Name: At_100uM_ABA_Mutants_cDNA_P Parameter: Timepoint (hr) Value: 6
  misc_feature: MA Experiment 20000071 PARAMETER Experiment Name: At_100uM_ABA_Mutants_cDNA_P Parameter: Tissue Value: Aerial
  misc_feature: MA Experiment 20000071 PARAMETER Experiment Name: At_100uM_ABA_Mutants_cDNA_P Parameter: Treatment Value: 100uM ABA vs. No Treatment
  misc_feature: MA Experiment ID: 20000179 Result: Up-regulated in Transcription
  misc_feature: MA Experiment 20000179 PARAMETER Experiment Name: At_Germinating_Seeds_P Parameter: Age (hr) Value: 6 vs. 0
  misc_feature: MA Experiment 20000179 PARAMETER Experiment Name: At_Germinating_Seeds_P Parameter: Tissue Value: Germinating Seeds
  misc_feature: MA Experiment ID: 20000180 Result: Up-regulated in Transcription
  misc_feature: MA Experiment 20000180 PARAMETER Experiment Name: At_Germinating_Seeds_P Parameter: Age (hr) Value: 24 vs. 0
  misc_feature: MA Experiment 20000180 PARAMETER Experiment Name: At_Germinating_Seeds_P Parameter: Tissue Value: Germinating Seeds
  misc_feature: MA Experiment ID: 20000213 Result: Down-regulated in Transcription
  misc_feature: MA Experiment 20000213 PARAMETER Experiment Name: At_4deg_Cold_P Parameter: Timepoint (hr) Value: 2
  misc_feature: MA Experiment ID: 20000234 Result: Down-regulated in Transcription
  misc_feature: MA Experiment 20000234 PARAMETER Experiment Name: At_Siliques_P Parameter: Age (day) Value: 21
  misc_feature: MA Experiment 20000234 PARAMETER Experiment Name: At_Siliques_P Parameter: Organism Value: A. thaliana
  misc_feature: MA Experiment 20000234 PARAMETER Experiment Name: At_Siliques_P Parameter: Plant Line Value: WS
  misc_feature: MA Experiment 20000234 PARAMETER Experiment Name: At_Siliques_P Parameter: Tissue Value: Less Than 5mm Siliques vs. Whole Plant
  misc_feature: MA Experiment ID: 20000265 Result: Down-regulated in Transcription
  misc_feature: MA Experiment 20000265 PARAMETER Experiment Name: At_Open_Flower_P Parameter: Age (day) Value: 21
  misc_feature: MA Experiment 20000265 PARAMETER Experiment Name: At_Open_Flower_P Parameter: Plant Line Value: WS
  misc_feature: MA Experiment 20000265 PARAMETER Experiment Name: At_Open_Flower_P Parameter: Tissue Value: Closed Flower vs. Whole Plant
  misc_feature: MA Experiment ID: 20000286 Result: Down-regulated in Transcription
  misc_feature: MA Experiment 20000286 PARAMETER Experiment Name: At_Open_Flower_P Parameter: Age (day) Value: 21
  misc_feature: MA Experiment 20000286 PARAMETER Experiment Name: At_Open_Flower_P Parameter: Plant Line Value: WS
  misc_feature: MA Experiment 20000286 PARAMETER Experiment Name: At_Open_Flower_P Parameter: Tissue Value: Half Open vs. Whole Plant
  misc_feature: MA Experiment ID: 20000438 Result: Down-regulated in Transcription
  misc_feature: MA Experiment 20000438 PARAMETER Experiment Name: At_Shoots__P Parameter: Age (day) Value: 14
  misc_feature: MA Experiment 20000438 PARAMETER Experiment Name: At_Shoots__P Parameter: Tissue Value: Shoots vs. Whole Plant
  misc_feature: MA Experiment ID: 20000794 Result: Up-regulated in Transcription
  misc_feature: MA Experiment 20000794 PARAMETER Experiment Name: At_Petals_P Parameter: Age (day) Value: 23-25 days
  misc_feature: MA Experiment 20000794 PARAMETER Experiment Name: At_Petals_P Parameter: Plant Line Value: WS
  misc_feature: MA Experiment 20000794 PARAMETER Experiment Name: At_Petals_P Parameter: Tissue Value: Petals vs. Whole plant
  misc_feature: MA Experiment ID: 20001247 Result: Up-regulated in Transcription
  misc_feature: MA Experiment 20001247 PARAMETER Experiment Name: At_Far-red-induction_P Parameter: Age (day) Value: 7
  misc_feature: MA Experiment 20001247 PARAMETER Experiment Name: At_Far-red-induction_P Parameter: Light Value: Far-red vs. White
  misc_feature: MA Experiment 20001247 PARAMETER Experiment Name: At_Far-red-induction_P Parameter: Organism Value: A. thaliana
  misc_feature: MA Experiment 20001247 PARAMETER Experiment Name: At_Far-red-induction_P Parameter: Plant Line Value: Columbia
  misc_feature: MA Experiment 20001247 PARAMETER Experiment Name: At_Far-red-induction_P Parameter: Timepoint (hr) Value: 1
  misc_feature: MA Experiment 20001247 PARAMETER Experiment Name: At_Far-red-induction_P Parameter: Tissue Value: Whole Plant
  misc_feature: MA Experiment ID: 20001248 Result: Up-regulated in Transcription
  misc_feature: MA Experiment 20001248 PARAMETER Experiment Name: At_Far-red-induction_P Parameter: Age (day) Value: 7
  misc_feature: MA Experiment 20001248 PARAMETER Experiment Name: At_Far-red-induction_P Parameter: Light Value: Far-red vs. White
  misc_feature: MA Experiment 20001248 PARAMETER Experiment Name: At_Far-red-induction_P Parameter: Organism Value: A. thaliana
  misc_feature: MA Experiment 20001248 PARAMETER Experiment Name: At_Far-red-induction_P Parameter: Plant Line Value: Columbia
  misc_feature: MA Experiment 20001248 PARAMETER Experiment Name: At_Far-red-induction_P Parameter: Timepoint (hr) Value: 4
  misc_feature: MA Experiment 20001248 PARAMETER Experiment Name: At_Far-red-induction_P Parameter: Tissue Value: Whole Plant
  misc_feature: MA Experiment ID: 20001450 Result: Up-regulated in Transcription
  misc_feature: MA Experiment 20001450 PARAMETER Experiment Name: At_Far-red-induction_P Parameter: Age (day) Value: 7
  misc_feature: MA Experiment 20001450 PARAMETER Experiment Name: At_Far-red-induction_P Parameter: Light Value: Far-red vs. White
  misc_feature: MA Experiment 20001450 PARAMETER Experiment Name: At_Far-red-induction_P Parameter: Organism Value: A. thaliana
  misc_feature: MA Experiment 20001450 PARAMETER Experiment Name: At_Far-red-induction_P Parameter: Plant Line Value: Columbia
  misc_feature: MA Experiment 20001450 PARAMETER Experiment Name: At_Far-red-induction_P Parameter: Timepoint (hr) Value: 8
  misc_feature: MA Experiment 20001450 PARAMETER Experiment Name: At_Far-red-induction_P Parameter: Tissue Value: Whole Plant
  misc_feature: MA Experiment ID: 20001451 Result: Up-regulated in Transcription
  misc_feature: MA Experiment 20001451 PARAMETER Experiment Name: At_Far-red-induction_P Parameter: Age (day) Value: 7
  misc_feature: MA Experiment 20001451 PARAMETER Experiment Name: At_Far-red-induction_P Parameter: Light Value: Far-red vs. White
  misc_feature: MA Experiment 20001451 PARAMETER Experiment Name: At_Far-red-induction_P Parameter: Organism Value: A. thaliana
  misc_feature: MA Experiment 20001451 PARAMETER Experiment Name: At_Far-red-induction_P Parameter: Plant Line Value: Columbia
  misc_feature: MA Experiment 20001451 PARAMETER Experiment Name: At_Far-red-induction_P Parameter: Timepoint (hr) Value: 24
  misc_feature: MA Experiment 20001451 PARAMETER Experiment Name: At_Far-red-induction_P Parameter: Tissue Value: Whole Plant
  misc_feature: MA Experiment ID: 20001558 Result: Down-regulated in Transcription
  misc_feature: MA Experiment 20001558 PARAMETER Experiment Name: At_Drought_Soil_Dry_P Parameter: Age (day) Value: 27
  misc_feature: MA Experiment 20001558 PARAMETER Experiment Name: At_Drought_Soil_Dry_P Parameter: Organism Value: A. thaliana
  misc_feature: MA Experiment 20001558 PARAMETER Experiment Name: At_Drought_Soil_Dry_P Parameter: Plant Line Value: WS
  misc_feature: MA Experiment 20001558 PARAMETER Experiment Name: At_Drought_Soil_Dry_P Parameter: Post Timepoint (hr) Value: 6
  misc_feature: MA Experiment 20001558 PARAMETER Experiment Name: At_Drought_Soil_Dry_P Parameter: Post-Treatment Value: Re-Water vs. No Drought
  misc_feature: MA Experiment 20001558 PARAMETER Experiment Name: At_Drought_Soil_Dry_P Parameter: Timepoint (day) Value: 13
  misc_feature: MA Experiment 20001558 PARAMETER Experiment Name: At_Drought_Soil_Dry_P Parameter: Treatment Value: Drought vs. No Drought
  misc_feature: MA Experiment ID: 20001560 Result: Down-regulated in Transcription
  misc_feature: MA Experiment 20001560 PARAMETER Experiment Name: At_Drought_Soil_Dry_P Parameter: Age (day) Value: 28
  misc_feature: MA Experiment 20001560 PARAMETER Experiment Name: At_Drought_Soil_Dry_P Parameter: Organism Value: A. thaliana
  misc_feature: MA Experiment 20001560 PARAMETER Experiment Name: At_Drought_Soil_Dry_P Parameter: Plant Line Value: WS
  misc_feature: MA Experiment 20001560 PARAMETER Experiment Name: At_Drought_Soil_Dry_P Parameter: Post Timepoint (hr) Value: None
  misc_feature: MA Experiment 20001560 PARAMETER Experiment Name: At_Drought_Soil_Dry_P Parameter: Post-Treatment Value: None
  misc_feature: MA Experiment 20001560 PARAMETER Experiment Name: At_Drought_Soil_Dry_P Parameter: Timepoint (day) Value: 14
  misc_feature: MA Experiment 20001560 PARAMETER Experiment Name: At_Drought_Soil_Dry_P Parameter: Treatment Value: Drought vs. No Drought
gaaaaaaacattatcttacaaaaatccaaatactccgacttaaccgggtcggatcctggtgagtactagtatctatctcattacaattcatatccttccttcaacattcgatcatcacgaagccaaagaacaatttctccgtcactatcataaccatggcggtgctttcatctgcagatcgagctagtaatgagaagaaggtgaagagttcatactttgatttgccacctatggaaatgtctgtagcatttcctcaagcaactccagcctctacatttccaccttgtacttcagactattatcatttcaatgatctactgactccggaagaacaagctatccggaagaaagtgagggaatgcatggagaaagaagttgctccaataatgacagagtactgggagaaagcagaatttccattccatatcactccaaagcttggggctatgggtgttgctggtggctcgatcaagggttatggatgtcctggtctctccatcaccgccaatgcaattgccacagcagaaatagctagagttgatgcaagttgttcgactttcattttggtgcattcttctttgggcatgctcactattgcactctgtggatcagaagcacagaaggagaagtatttgccttctttggctcaattgaatactgtggcttgttgggctttgacagagcccgacaatggaagcgatgcaagtggtctaggaacgactgcaacaaaggttgaaggaggttggaaaattaatggacaaaagcgttggattggaaacagcacctttgcagatctgttgatcatctttgcgaggaatacaacaactaaccaaatcaacggattcatagtcaagaaagatgcgcctggcctaaaggctactaagatcccaaataaaataggtttacgtatggttcaaaatggagatattctactacagaatgtctttgttccagatgaggatcggttacctggggtaaattcttttcaggacaccagcaaggttctggctgtctcacgtgtaatggtggcctggcaaccaatcggcatatcaatgggaatctacgatatgtgccacaggtatctgaaggagaggaaacagtttggagcaccgttggctgctttccagttaaaccaacagaagcttgtgcagatgctgggtaacgttcaagcgatgtttctaatgggttggcgtctctgcaagctgtatgagacgggtcagatgactccaggtcaagccagtttaggaaaggcatggatttcatcaaaagcgagagaaactgcttcgctaggtcgggaattacttggtgggaatggaattctagcagattttctggtagcaaaggctttctgtgaccttgaacccatttatacatacgaagggacttatgatataaacaccttagtaacagggagggaagtaacgggtattgcgagtttcaaaccggctacacgtagccgtctctaagttaaaaggttgtccattgtttgttgttgtctgttggttagtattgatattgtgatgtggggtttacatctacaaatgtgccaaataatctgacccaaaaagatttagggtccaatgggggaataatatcgttgttgcaaaacttaatccagttattgcttcttgcaatatggattcgtcttgtggcttgtactgggggaaataccatttgttaaccttttattaattcaaattgccaatgtcaataacttttggtc

SEQ ID NO: 26763 - protein, 436 aa, Arabidopsis thaliana
  peptide (1)..(436): Ceres Seq. ID no. 13487733
  misc_feature (173)..(271): Pfam Name: Acyl-CoA dehydrogenase, middle domain Pfam Description: Acyl-CoA dehydrogenase, middle domain
  misc_feature (47)..(433): Homolog of NCBI NO: 11498596 NR Description: glutaryl-CoA dehydrogenase (gcdH)
  misc_feature (42)..(428): Homolog of NCBI NO: 15805578 NR Description: glutaryl-CoA dehydrogenase, putative [Deinococcus
  misc_feature (46)..(435): Homolog of NCBI NO: 25026880 NR Description: putative acyl-CoA dehydrogenase
  misc_feature (33)..(433): Homolog of NCBI NO: 25027279 NR Description: putative glutaryl-CoA dehydrogenase precursor
  misc_feature (46)..(428): Homolog of NCBI NO: 29827260 NR Description: putative glutaryl-CoA dehydrogenase
  misc_feature (43)..(435): Homolog of NCBI NO: 28829336 NR Description: similar to Arabidopsis thaliana (Mouse-ear Putative acyl-CoA dehydrogenase G6P (ATG6) (At3g51840/AtG6)
  misc_feature (28)..(428): Homolog of NCBI NO: 29827888 NR Description: putative glutaryl-CoA dehydrogenase
  misc_feature (59)..(428): Homolog of NCBI NO: 31195739 NR Description: ENSANGP00000000259 [Anopheles gambiae]
  misc_feature (23)..(435): Homolog of NCBI NO: 34896018 NR Description: ESTs AU056822(S20908),C26441(C12328), correspond to a region of the predicted gene.~Similar to
  misc_feature (1)..(436): Homolog of NCBI NO: 15231059 NR Description: acyl-coA dehydrogenase [Arabidopsis thaliana]
MAVLSSADRASNEKKVKSSYFDLPPMEMSVAFPQATPASTFPPCTSDYYHFNDLLTPEEQAIRKKVRECMEKEVAPIMTEYWEKAEFPFHITPKLGAMGVAGGSIKGYGCPGLSITANAIATAEIARVDASCSTFILVHSSLGMLTIALCGSEAQKEKYLPSLAQLNTVACWALTEPDNGSDASGLGTTATKVEGGWKINGQKRWIGNSTFADLLIIFARNTTTNQINGFIVKKDAPGLKATKIPNKIGLRMVQNGDILLQNVFVPDEDRLPGVNSFQDTSKVLAVSRVMVAWQPIGISMGIYDMCHRYLKERKQFGAPLAAFQLNQQKLVQMLGNVQAMFLMGWRLCKLYETGQMTPGQASLGKAWISSKARETASLGRELLGGNGILADFLVAKAFCDLEPIYTYEGTYDINTLVTGREVTGIASFKPATRSRL

SEQ ID NO: 26764 - protein, 411 aa, Arabidopsis thaliana
  peptide (1)..(411): Ceres Seq. ID no. 13487734
  misc_feature (148)..(246): Pfam Name: Acyl-CoA dehydrogenase, middle domain Pfam Description: Acyl-CoA dehydrogenase, middle domain
  misc_feature (22)..(408): Homolog of NCBI NO: 11498596 NR Description: glutaryl-CoA dehydrogenase (gcdH)
  misc_feature (17)..(403): Homolog of NCBI NO: 15805578 NR Description: glutaryl-CoA dehydrogenase, putative [Deinococcus
  misc_feature (21)..(410): Homolog of NCBI NO: 25026880 NR Description: putative acyl-CoA dehydrogenase
  misc_feature (8)..(408): Homolog of NCBI NO: 25027279 NR Description: putative glutaryl-CoA dehydrogenase precursor
  misc_feature (21)..(403): Homolog of NCBI NO: 29827260 NR Description: putative glutaryl-CoA dehydrogenase
  misc_feature (18)..(410): Homolog of NCBI NO: 28829336 NR Description: similar to Arabidopsis thaliana (Mouse-ear Putative acyl-CoA dehydrogenase G6P (ATG6) (At3g51840/AtG6)
  misc_feature (3)..(403): Homolog of NCBI NO: 29827888 NR Description: putative glutaryl-CoA dehydrogenase
  misc_feature (34)..(403): Homolog of NCBI NO: 31195739 NR Description: ENSANGP00000000259 [Anopheles gambiae]
  misc_feature (1)..(410): Homolog of NCBI NO: 34896018 NR Description: ESTs AU056822(S20908),C26441(C12328), correspond to a region of the predicted gene.~Similar to
  misc_feature (1)..(411): Homolog of NCBI NO: 15231059 NR Description: acyl-coA dehydrogenase [Arabidopsis thaliana]
MEMSVAFPQATPASTFPPCTSDYYHFNDLLTPEEQAIRKKVRECMEKEVAPIMTEYWEKAEFPFHITPKLGAMGVAGGSIKGYGCPGLSITANAIATAEIARVDASCSTFILVHSSLGMLTIALCGSEAQKEKYLPSLAQLNTVACWALTEPDNGSDASGLGTTATKVEGGWKINGQKRWIGNSTFADLLIIFARNTTTNQINGFIVKKDAPGLKATKIPNKIGLRMVQNGDILLQNVFVPDEDRLPGVNSFQDTSKVLAVSRVMVAWQPIGISMGIYDMCHRYLKERKQFGAPLAAFQLNQQKLVQMLGNVQAMFLMGWRLCKLYETGQMTPGQASLGKAWISSKARETASLGRELLGGNGILADFLVAKAFCDLEPIYTYEGTYDINTLVTGREVTGIASFKPATRSRL

SEQ ID NO: 26765 - protein, 409 aa, Arabidopsis thaliana
  peptide (1)..(409): Ceres Seq. ID no. 13487735
  misc_feature (146)..(244): Pfam Name: Acyl-CoA dehydrogenase, middle domain Pfam Description: Acyl-CoA dehydrogenase, middle domain
  misc_feature (20)..(406): Homolog of NCBI NO: 11498596 NR Description: glutaryl-CoA dehydrogenase (gcdH)
  misc_feature (15)..(401): Homolog of NCBI NO: 15805578 NR Description: glutaryl-CoA dehydrogenase, putative [Deinococcus
  misc_feature (19)..(408): Homolog of NCBI NO: 25026880 NR Description: putative acyl-CoA dehydrogenase
  misc_feature (6)..(406): Homolog of NCBI NO: 25027279 NR Description: putative glutaryl-CoA dehydrogenase precursor
  misc_feature (19)..(401): Homolog of NCBI NO: 29827260 NR Description: putative glutaryl-CoA dehydrogenase
  misc_feature (16)..(408): Homolog of NCBI NO: 28829336 NR Description: similar to Arabidopsis thaliana (Mouse-ear Putative acyl-CoA dehydrogenase G6P (ATG6) (At3g51840/AtG6)
  misc_feature (1)..(401): Homolog of NCBI NO: 29827888 NR Description: putative glutaryl-CoA dehydrogenase
  misc_feature (32)..(401): Homolog of NCBI NO: 31195739 NR Description: ENSANGP00000000259 [Anopheles gambiae]
  misc_feature (1)..(408): Homolog of NCBI NO: 34896018 NR Description: ESTs AU056822(S20908),C26441(C12328), correspond to a region of the predicted gene.~Similar to
  misc_feature (1)..(409): Homolog of NCBI NO: 15231059 NR Description: acyl-coA dehydrogenase [Arabidopsis thaliana]
MSVAFPQATPASTFPPCTSDYYHFNDLLTPEEQAIRKKVRECMEKEVAPIMTEYWEKAEFPFHITPKLGAMGVAGGSIKGYGCPGLSITANAIATAEIARVDASCSTFILVHSSLGMLTIALCGSEAQKEKYLPSLAQLNTVACWALTEPDNGSDASGLGTTATKVEGGWKINGQKRWIGNSTFADLLIIFARNTTTNQINGFIVKKDAPGLKATKIPNKIGLRMVQNGDILLQNVFVPDEDRLPGVNSFQDTSKVLAVSRVMVAWQPIGISMGIYDMCHRYLKERKQFGAPLAAFQLNQQKLVQMLGNVQAMFLMGWRLCKLYETGQMTPGQASLGKAWISSKARETASLGRELLGGNGILADFLVAKAFCDLEPIYTYEGTYDINTLVTGREVTGIASFKPATRSRL

SEQ ID NO: 26766 - DNA, 1191 bp, Arabidopsis thaliana
  misc_feature (1)..(1191): Ceres Seq. ID no. 12333289
  misc_feature: MA Experiment ID: 108463 Result: Up-regulated in Transcription
  misc_feature: MA Experiment 108463 PARAMETER Experiment Name: At_Germinating_Seeds_cDNA_P Parameter: Age (day) Value: 3 vs. 0
  misc_feature: MA Experiment 108463 PARAMETER Experiment Name: At_Germinating_Seeds_cDNA_P Parameter: Tissue Value: Germinating Seeds
  misc_feature: MA Experiment ID: 108595 Result: Up-regulated in Transcription
  misc_feature: MA Experiment 108595 PARAMETER Experiment Name: At_Ler-pi_Ovule_cDNA_P Parameter: Plant Line Value: null
  misc_feature: MA Experiment ID: 20000460 Result: Down-regulated in Transcription
  misc_feature: MA Experiment 20000460 PARAMETER Experiment Name: At_10percent_PEG_P Parameter: Age (day) Value: 12
  misc_feature: MA Experiment 20000460 PARAMETER Experiment Name: At_10percent_PEG_P Parameter: Organism Value: A. thaliana
  misc_feature: MA Experiment 20000460 PARAMETER Experiment Name: At_10percent_PEG_P Parameter: Plant Line Value: WS
  misc_feature: MA Experiment 20000460 PARAMETER Experiment Name: At_10percent_PEG_P Parameter: Timepoint (day) Value: 12
  misc_feature: MA Experiment 20000460 PARAMETER Experiment Name: At_10percent_PEG_P Parameter: Tissue Value: Whole Plant
  misc_feature: MA Experiment 20000460 PARAMETER Experiment Name: At_10percent_PEG_P Parameter: Treatment Value: 10percent PEG vs. No Treatment
  misc_feature: MA Experiment ID: 20001458 Result: Up-regulated in Transcription
  misc_feature: MA Experiment 20001458 PARAMETER Experiment Name: At_50mM_NH4NO3_L-to-H_P Parameter: Age (day) Value: Undefined
  misc_feature: MA Experiment 20001458 PARAMETER Experiment Name: At_50mM_NH4NO3_L-to-H_P Parameter: Organism Value: Undefined
  misc_feature: MA Experiment 20001458 PARAMETER Experiment Name: At_50mM_NH4NO3_L-to-H_P Parameter: Plant Line Value: Undefined
  misc_feature: MA Experiment 20001458 PARAMETER Experiment Name: At_50mM_NH4NO3_L-to-H_P Parameter: Timepoint (hr) Value: 2
  misc_feature: MA Experiment 20001458 PARAMETER Experiment Name: At_50mM_NH4NO3_L-to-H_P Parameter: Tissue Value: Siliques
  misc_feature: MA Experiment 20001458 PARAMETER Experiment Name: At_50mM_NH4NO3_L-to-H_P Parameter: Treatment Value: 50mM NH4NO3 vs. 100mM Manitol
atcagctctttcttacatcatattccaatctatcactttataacaaattaaagtctacgttgagatatggctttaaaaacatggaagccattcataactgttgtttctctacaatttggatatgctggattgtcgatcatagcgaaattcgcactgaaccaaggcatgagtcctcacgttctagcgtcgtatcgccatatcgtcgctacaattttcattgctccatttgcctatttcttggatagaaaaatacggccgaagatgacgctatccatcttcttcaagatattgttgcttgggttattggaaccaacaattgatcagaacttatactacactggtatgaagtacacttccgccactttcacagctgcaatgacaaatgttcttcctgcctttgcctttattatggcatggatctttagacttgagaaggttaacgtcaagaaaatacacagccaagccaagattctaggaacaattgtgacagttggtggagcaatgcttatgactgttgtgaaaggacctttaattcctttgccttgggctaatcctcacgacattcatcaagactcatccaataccggagtcaaacaagacctaaccaaaggcgcaagcctcatcgctatcggttgtatctgctgggccggttttatcaatctccaagcgatcacgcttaagtcgtaccctgtagagctatccttgacagcttacatatgttttttggggtctattgaaagcactattgtggcactttttattgaaagaggaaatccatctgcgtgggccatccacttggattccaaattactagctgctgtttatggtggagtcatatgttcagggattggttactacgttcaaggagtgataatgaaaactcgtggacccgtgtttgttactgccttcaatccattgagcatggtcattgttgcgatcttggggtctataattcttgctgaggttatgttccttggaaggattcttggagcaatagtgatagttcttggactctattcggttttgtggggaaaaagcaaagacgaaccatcttcatcattttcagacatggacaaggagctaccacttagtacaccacaaattgtgctcccatcaaaagcaaatgcaaaaatggacacaaatgatgcaagtgttgtgatctcgaggcctaacaccaatgaatcagtctaa

SEQ ID NO: 26767 - protein, 374 aa, Arabidopsis thaliana
  peptide (1)..(374): Ceres Seq. ID no. 12333290
  misc_feature (17)..(150): Pfam Name: Integral membrane protein DUF6 Pfam Description: Integral membrane protein DUF6
  misc_feature (3)..(326): Homolog of NCBI NO: 15240683 NR Description: MtN21 nodulin protein-like; protein id:
  misc_feature (7)..(343): Homolog of NCBI NO: 26452235 NR Description: putative nodulin [Arabidopsis thaliana]
  misc_feature (7)..(343): Homolog of NCBI NO: 15236455 NR Description: nodulin-like protein
  misc_feature (7)..(342): Homolog of NCBI NO: 21553533 NR Description: nodulin protein, putative [Arabidopsis thaliana]
  misc_feature (7)..(342): Homolog of NCBI NO: 15219448 NR Description: nodulin protein, putative
  misc_feature (7)..(343): Homolog of NCBI NO: 21593603 NR Description: nodulin-like protein [Arabidopsis thaliana]
  misc_feature (3)..(343): Homolog of NCBI NO: 25408555 NR Description: nodulin-like protein [imported] - Arabidopsis
  misc_feature (12)..(367): Homolog of NCBI NO: 21553757 NR Description: nodulin-like protein [Arabidopsis thaliana]
  misc_feature (7)..(367): Homolog of NCBI NO: 15224291 NR Description: nodulin-like protein
  misc_feature (1)..(374): Homolog of NCBI NO: 15225480 NR Description: nodulin-like protein; protein id: At2g39510.1
MALKTWKPFITVVSLQFGYAGLSIIAKFALNQGMSPHVLASYRHIVATIFIAPFAYFLDRKIRPKMTLSIFFKILLLGLLEPTIDQNLYYTGMKYTSATFTAAMTNVLPAFAFIMAWIFRLEKVNVKKIHSQAKILGTIVTVGGAMLMTVVKGPLIPLPWANPHDIHQDSSNTGVKQDLTKGASLIAIGCICWAGFINLQAITLKSYPVELSLTAYICFLGSIESTIVALFIERGNPSAWAIHLDSKLLAAVYGGVICSGIGYYVQGVIMKTRGPVFVTAFNPLSMVIVAILGSIILAEVMFLGRILGAIVIVLGLYSVLWGKSKDEPSSSFSDMDKELPLSTPQIVLPSKANAKMDTNDASVVISRPNTNESV

SEQ ID NO: 26768 - protein, 341 aa, Arabidopsis thaliana
  peptide (1)..(341): Ceres Seq. ID no. 12333291
  misc_feature (1)..(117): Pfam Name: Integral membrane protein DUF6 Pfam Description: Integral membrane protein DUF6
  misc_feature (1)..(293): Homolog of NCBI NO: 15240683 NR Description: MtN21 nodulin protein-like; protein id:
  misc_feature (1)..(310): Homolog of NCBI NO: 26452235 NR Description: putative nodulin [Arabidopsis thaliana]
  misc_feature (1)..(310): Homolog of NCBI NO: 15236455 NR Description: nodulin-like protein
  misc_feature (1)..(309): Homolog of NCBI NO: 21553533 NR Description: nodulin protein, putative [Arabidopsis thaliana]
  misc_feature (1)..(309): Homolog of NCBI NO: 15219448 NR Description: nodulin protein, putative
  misc_feature (1)..(310): Homolog of NCBI NO: 21593603 NR Description: nodulin-like protein [Arabidopsis thaliana]
  misc_feature (1)..(310): Homolog of NCBI NO: 25408555 NR Description: nodulin-like protein [imported] - Arabidopsis
  misc_feature (1)..(334): Homolog of NCBI NO: 21553757 NR Description: nodulin-like protein [Arabidopsis thaliana]
  misc_feature (1)..(334): Homolog of NCBI NO: 15224291 NR Description: nodulin-like protein
  misc_feature (1)..(341): Homolog of NCBI NO: 15225480 NR Description: nodulin-like protein; protein id: At2g39510.1
MSPHVLASYRHIVATIFIAPFAYFLDRKIRPKMTLSIFFKILLLGLLEPTIDQNLYYTGMKYTSATFTAAMTNVLPAFAFIMAWIFRLEKVNVKKIHSQAKILGTIVTVGGAMLMTVVKGPLIPLPWANPHDIHQDSSNTGVKQDLTKGASLIAIGCICWAGFINLQAITLKSYPVELSLTAYICFLGSIESTIVALFIERGNPSAWAIHLDSKLLAAVYGGVICSGIGYYVQGVIMKTRGPVFVTAFNPLSMVIVAILGSIILAEVMFLGRILGAIVIVLGLYSVLWGKSKDEPSSSFSDMDKELPLSTPQIVLPSKANAKMDTNDASVVISRPNTNESV

SEQ ID NO: 26769 - protein, 309 aa, Arabidopsis thaliana
  peptide (1)..(309): Ceres Seq. ID no. 12333292
  misc_feature (1)..(85): Pfam Name: Integral membrane protein DUF6 Pfam Description: Integral membrane protein DUF6
  misc_feature (1)..(261): Homolog of NCBI NO: 15240683 NR Description: MtN21 nodulin protein-like; protein id:
  misc_feature (1)..(278): Homolog of NCBI NO: 26452235 NR Description: putative nodulin [Arabidopsis thaliana]
  misc_feature (1)..(278): Homolog of NCBI NO: 15236455 NR Description: nodulin-like protein
  misc_feature (1)..(277): Homolog of NCBI NO: 21553533 NR Description: nodulin protein, putative [Arabidopsis thaliana]
  misc_feature (1)..(277): Homolog of NCBI NO: 15219448 NR Description: nodulin protein, putative
  misc_feature (1)..(278): Homolog of NCBI NO: 21593603 NR Description: nodulin-like protein [Arabidopsis thaliana]
  misc_feature (1)..(278): Homolog of NCBI NO: 25408555 NR Description: nodulin-like protein [imported] - Arabidopsis
  misc_feature (1)..(302): Homolog of NCBI NO: 21553757 NR Description: nodulin-like protein [Arabidopsis thaliana]
  misc_feature (1)..(302): Homolog of NCBI NO: 15224291 NR Description: nodulin-like protein
  misc_feature (1)..(309): Homolog of NCBI NO: 15225480 NR Description: nodulin-like protein; protein id: At2g39510.1
MTLSIFFKILLLGLLEPTIDQNLYYTGMKYTSATFTAAMTNVLPAFAFIMAWIFRLEKVNVKKIHSQAKILGTIVTVGGAMLMTVVKGPLIPLPWANPHDIHQDSSNTGVKQDLTKGASLIAIGCICWAGFINLQAITLKSYPVELSLTAYICFLGSIESTIVALFIERGNPSAWAIHLDSKLLAAVYGGVICSGIGYYVQGVIMKTRGPVFVTAFNPLSMVIVAILGSIILAEVMFLGRILGAIVIVLGLYSVLWGKSKDEPSSSFSDMDKELPLSTPQIVLPSKANAKMDTNDASVVISRPNTNESV

SEQ ID NO: 26770 - DNA, 1122 bp, Arabidopsis thaliana
  misc_feature (1)..(1122): Ceres Seq. ID no. 13610669
  misc_feature: MA Experiment ID: 108462 Result: Up-regulated in Transcription
  misc_feature: MA Experiment 108462 PARAMETER Experiment Name: At_Germinating_Seeds_cDNA_P Parameter: Age (day) Value: 2 vs. 0
  misc_feature: MA Experiment 108462 PARAMETER Experiment Name: At_Germinating_Seeds_cDNA_P Parameter: Tissue Value: Germinating Seeds
  misc_feature: MA Experiment ID: 108464 Result: Up-regulated in Transcription
  misc_feature: MA Experiment 108464 PARAMETER Experiment Name: At_Germinating_Seeds_cDNA_P Parameter: Age (day) Value: 4 vs. 0
  misc_feature: MA Experiment 108464 PARAMETER Experiment Name: At_Germinating_Seeds_cDNA_P Parameter: Tissue Value: Germinating Seeds
  misc_feature: MA Experiment ID: 108585 Result: Down-regulated in Transcription
  misc_feature: MA Experiment 108585 PARAMETER Experiment Name: At_5mM_NaNP_cDNA_P Parameter: Timepoint (hr) Value: 6
  misc_feature: MA Experiment 108585 PARAMETER Experiment Name: At_5mM_NaNP_cDNA_P Parameter: Tissue Value: Aerial
  misc_feature: MA Experiment 108585 PARAMETER Experiment Name: At_5mM_NaNP_cDNA_P Parameter: Treatment Value: null
  misc_feature: MA Experiment ID: 108595 Result: Down-regulated in Transcription
  misc_feature: MA Experiment 108595 PARAMETER Experiment Name: At_Ler-pi_Ovule_cDNA_P Parameter: Plant Line Value: null
  misc_feature: MA Experiment ID: 20000179 Result: Up-regulated in Transcription
  misc_feature: MA Experiment 20000179 PARAMETER Experiment Name: At_Germinating_Seeds_P Parameter: Age (hr) Value: 6 vs. 0
  misc_feature: MA Experiment 20000179 PARAMETER Experiment Name: At_Germinating_Seeds_P Parameter: Tissue Value: Germinating Seeds
  misc_feature: MA Experiment ID: 20000180 Result: Up-regulated in Transcription
  misc_feature: MA Experiment 20000180 PARAMETER Experiment Name: At_Germinating_Seeds_P Parameter: Age (hr) Value: 24 vs. 0
  misc_feature: MA Experiment 20000180 PARAMETER Experiment Name: At_Germinating_Seeds_P Parameter: Tissue Value: Germinating Seeds
  misc_feature: MA Experiment ID: 20000185 Result: Down-regulated in Transcription
  misc_feature: MA Experiment 20000185 PARAMETER Experiment Name: At_Roots__P Parameter: Age (day) Value: 7 vs. 21
  misc_feature: MA Experiment 20000185 PARAMETER Experiment Name: At_Roots__P Parameter: Organism Value: A. thaliana
  misc_feature: MA Experiment 20000185 PARAMETER Experiment Name: At_Roots__P Parameter: Tissue Value: Roots vs. Whole Plant
  misc_feature: MA Experiment ID: 20000438 Result: Up-regulated in Transcription
  misc_feature: MA Experiment 20000438 PARAMETER Experiment Name: At_Shoots__P Parameter: Age (day) Value: 14
  misc_feature: MA Experiment 20000438 PARAMETER Experiment Name: At_Shoots__P Parameter: Tissue Value: Shoots vs. Whole Plant
  misc_feature: MA Experiment ID: 20000439 Result: Down-regulated in Transcription
  misc_feature: MA Experiment 20000439 PARAMETER Experiment Name: At_Roots__P Parameter: Age (day) Value: 14 vs. 21
  misc_feature: MA Experiment 20000439 PARAMETER Experiment Name: At_Roots__P Parameter: Organism Value: A. thaliana
  misc_feature: MA Experiment 20000439 PARAMETER Experiment Name: At_Roots__P Parameter: Tissue Value: Roots vs. Whole Plant
  misc_feature: MA Experiment ID: 20000794 Result: Down-regulated in Transcription
  misc_feature: MA Experiment 20000794 PARAMETER Experiment Name: At_Petals_P Parameter: Age (day) Value: 23-25 days
  misc_feature: MA Experiment 20000794 PARAMETER Experiment Name: At_Petals_P Parameter: Plant Line Value: WS
  misc_feature: MA Experiment 20000794 PARAMETER Experiment Name: At_Petals_P Parameter: Tissue Value: Petals vs. Whole plant
  misc_feature: MA Experiment ID: 20001450 Result: Down-regulated in Transcription
  misc_feature: MA Experiment 20001450 PARAMETER Experiment Name: At_Far-red-induction_P Parameter: Age (day) Value: 7
  misc_feature: MA Experiment 20001450 PARAMETER Experiment Name: At_Far-red-induction_P Parameter: Light Value: Far-red vs. White
  misc_feature: MA Experiment 20001450 PARAMETER Experiment Name: At_Far-red-induction_P Parameter: Organism Value: A. thaliana
  misc_feature: MA Experiment 20001450 PARAMETER Experiment Name: At_Far-red-induction_P Parameter: Plant Line Value: Columbia
  misc_feature: MA Experiment 20001450 PARAMETER Experiment Name: At_Far-red-induction_P Parameter: Timepoint (hr) Value: 8
  misc_feature: MA Experiment 20001450 PARAMETER Experiment Name: At_Far-red-induction_P Parameter: Tissue Value: Whole Plant
  misc_feature: MA Experiment ID: 20001557 Result: Down-regulated in Transcription
  misc_feature: MA Experiment 20001557 PARAMETER Experiment Name: At_Drought_Soil_Dry_P Parameter: Age (day) Value: 27
  misc_feature: MA Experiment 20001557 PARAMETER Experiment Name: At_Drought_Soil_Dry_P Parameter: Organism Value: A. thaliana
  misc_feature: MA Experiment 20001557 PARAMETER Experiment Name: At_Drought_Soil_Dry_P Parameter: Plant Line Value: WS
  misc_feature: MA Experiment 20001557 PARAMETER Experiment Name: At_Drought_Soil_Dry_P Parameter: Post Timepoint (hr) Value: 3
  misc_feature: MA Experiment 20001557 PARAMETER Experiment Name: At_Drought_Soil_Dry_P Parameter: Post-Treatment Value: Re-Water vs. No Drought
  misc_feature: MA Experiment 20001557 PARAMETER Experiment Name: At_Drought_Soil_Dry_P Parameter: Timepoint (day) Value: 13
  misc_feature: MA Experiment 20001557 PARAMETER Experiment Name: At_Drought_Soil_Dry_P Parameter: Treatment Value: Drought vs. No Drought
  misc_feature: MA Experiment ID: 20001558 Result: Down-regulated in Transcription
  misc_feature: MA Experiment 20001558 PARAMETER Experiment Name: At_Drought_Soil_Dry_P Parameter: Age (day) Value: 27
  misc_feature: MA Experiment 20001558 PARAMETER Experiment Name: At_Drought_Soil_Dry_P Parameter: Organism Value: A. thaliana
  misc_feature: MA Experiment 20001558 PARAMETER Experiment Name: At_Drought_Soil_Dry_P Parameter: Plant Line Value: WS
  misc_feature: MA Experiment 20001558 PARAMETER Experiment Name: At_Drought_Soil_Dry_P Parameter: Post Timepoint (hr) Value: 6
  misc_feature: MA Experiment 20001558 PARAMETER Experiment Name: At_Drought_Soil_Dry_P Parameter: Post-Treatment Value: Re-Water vs. No Drought
  misc_feature: MA Experiment 20001558 PARAMETER Experiment Name: At_Drought_Soil_Dry_P Parameter: Timepoint (day) Value: 13
  misc_feature: MA Experiment 20001558 PARAMETER Experiment Name: At_Drought_Soil_Dry_P Parameter: Treatment Value: Drought vs. No Drought
  misc_feature: MA Experiment ID: 20001905 Result: Down-regulated in Transcription
  misc_feature: MA Experiment 20001905 PARAMETER Experiment Name: At_Drought_Reproduction_P Parameter: Age (day) Value: 40
  misc_feature: MA Experiment 20001905 PARAMETER Experiment Name: At_Drought_Reproduction_P Parameter: Organism Value: A. thaliana
  misc_feature: MA Experiment 20001905 PARAMETER Experiment Name: At_Drought_Reproduction_P Parameter: Plant Line Value: WS
  misc_feature: MA Experiment 20001905 PARAMETER Experiment Name: At_Drought_Reproduction_P Parameter: Timepoint (day) Value: 10
  misc_feature: MA Experiment 20001905 PARAMETER Experiment Name: At_Drought_Reproduction_P Parameter: Tissue Value: Rosettes
  misc_feature: MA Experiment 20001905 PARAMETER Experiment Name: At_Drought_Reproduction_P Parameter: Treatment Value: Drought vs. No Drought
  misc_feature: MA Experiment ID: 20001906 Result: Down-regulated in Transcription
  misc_feature: MA Experiment 20001906 PARAMETER Experiment Name: At_Drought_Reproduction_P Parameter: Age (day) Value: 35
  misc_feature: MA Experiment 20001906 PARAMETER Experiment Name: At_Drought_Reproduction_P Parameter: Organism Value: A. thaliana
  misc_feature: MA Experiment 20001906 PARAMETER Experiment Name: At_Drought_Reproduction_P Parameter: Plant Line Value: WS
  misc_feature: MA Experiment 20001906 PARAMETER Experiment Name: At_Drought_Reproduction_P Parameter: Timepoint (day) Value: 5
  misc_feature: MA Experiment 20001906 PARAMETER Experiment Name: At_Drought_Reproduction_P Parameter: Tissue Value: Siliques
  misc_feature: MA Experiment 20001906 PARAMETER Experiment Name: At_Drought_Reproduction_P Parameter: Treatment Value: Drought vs. No Drought
  misc_feature: Phenotype: FERTILITY Fertility-Reduced
  misc_feature: Phenotype: FERTILITY Fertility-Reduced
  misc_feature: Phenotype: FERTILITY Fertility-Reduced
accaatccttcacttcctttcacgatccaaaacaaaacacaagaaaatgcaacaaaatcttctccatctctgaactcaaaaactcattcactgagaaaaatggagacccttctctcccctcgtgcgctctctcctcctctcaatcccaaacctttgtcccttcaccagaccaaacccacttcacattcattgtctctctcaaaacccaccaccttctccggtcctaaacacctctccacccggttcactaaaccggaatcaagaaactggttaatagatgcaaagcaaggactagctgctttagctttatctctaactctcactttctcacctgttggcactgctttagcctctgagttcaatatcctcaacgatggtccacctaaagaaacttacgtagtcgatgacgctggtgttcttagtcgagtgacgaagtcagatcttaagaagcttttgtctgatcttgaatacagaaagaaactgagactcaatttcatcactgtccgaaagctcaccagtaaagcagatgcgtttgagtatgcagaccaggttttggaaaaatggtatccttctattgaagaaggtaacaataagggtattgttgttttgataacaagtcagaaggaaggagctattactggtggtcctgcttttattgaagctgttggtgaaaacattcttgatgctaccgtctccgaaaatcttcccgtactagcaacggacgaaaaatacaacgaggcggtatatagcagtgcgaaaaggttggttgcagctatagacggtcaaccagatcccgggggtccaaccgtaaaggatagcaagagagaatcaaatttcaagacgaaagaagaaaccgatgagaagcgaggacagttcagtcttgtcgttggaggattacttgtaattgcctttgtagttcccatggcacaatactttgcttatgtctccaggaagtaagtaagtaaactcggttcactctcgtaaaccaaaccgatcaggtcagaactttgatttacctcggttatttggttatggtttcttggtaaattggtttatttgaacaatataagtaaataataacagaaaactaaagaatgaatgaaaccatccgattgtaacggc

SEQ ID NO: 26771 - protein, 318 aa, Arabidopsis thaliana
  peptide (1)..(318): Ceres Seq. ID no. 13610670
  misc_feature (107)..(315): Homolog of NCBI NO: 13812326 NR Description: hypothetical protein [Guillardia theta]
  misc_feature (87)..(314): Homolog of NCBI NO: 23128295 NR Description: hypothetical protein [Nostoc punctiforme]
  misc_feature (89)..(315): Homolog of NCBI NO: 16330824 NR Description: hypothetical protein [Synechocystis sp. PCC 6803]
  misc_feature (100)..(316): Homolog of NCBI NO: 17231592 NR Description: hypothetical protein [Nostoc sp. PCC 7120]
  misc_feature (89)..(314): Homolog of NCBI NO: 22297947 NR Description: ORF_ID:tll0404~hypothetical protein
  misc_feature (98)..(316): Homolog of NCBI NO: 23041448 NR Description: hypothetical protein [Trichodesmium erythraeum
  misc_feature (34)..(318): Homolog of NCBI NO: 18405061 NR Description: thylakoid lumen 18.3 kDa protein [Arabidopsis
TNPSLPFTIQNKTQENATKSSPSLNSKTHSLRKMETLLSPRALSPPLNPKPLSLHQTKPTSHSLSLSKPTTFSGPKHLSTRFTKPESRNWLIDAKQGLAALALSLTLTFSPVGTALASEFNILNDGPPKETYVVDDAGVLSRVTKSDLKKLLSDLEYRKKLRLNFITVRKLTSKADAFEYADQVLEKWYPSIEEGNNKGIVVLITSQKEGAITGGPAFIEAVGENILDATVSENLPVLATDEKYNEAVYSSAKRLVAAIDGQPDPGGPTVKDSKRESNFKTKEETDEKRGQFSLVVGGLLVIAFVVPMAQYFAYVSRK

SEQ ID NO: 26772 - protein, 285 aa, Arabidopsis thaliana
  peptide (1)..(285): Ceres Seq. ID no. 13610671
  misc_feature (74)..(282): Homolog of NCBI NO: 13812326 NR Description: hypothetical protein [Guillardia theta]
  misc_feature (54)..(281): Homolog of NCBI NO: 23128295 NR Description: hypothetical protein [Nostoc punctiforme]
  misc_feature (56)..(282): Homolog of NCBI NO: 16330824 NR Description: hypothetical protein [Synechocystis sp. PCC 6803]
  misc_feature (67)..(283): Homolog of NCBI NO: 17231592 NR Description: hypothetical protein [Nostoc sp. PCC 7120]
  misc_feature (56)..(281): Homolog of NCBI NO: 22297947 NR Description: ORF_ID:tll0404~hypothetical protein
  misc_feature (65)..(283): Homolog of NCBI NO: 23041448 NR Description: hypothetical protein [Trichodesmium erythraeum
  misc_feature (1)..(285): Homolog of NCBI NO: 18405061 NR Description: thylakoid lumen 18.3 kDa protein [Arabidopsis
METLLSPRALSPPLNPKPLSLHQTKPTSHSLSLSKPTTFSGPKHLSTRFTKPESRNWLIDAKQGLAALALSLTLTFSPVGTALASEFNILNDGPPKETYVVDDAGVLSRVTKSDLKKLLSDLEYRKKLRLNFITVRKLTSKADAFEYADQVLEKWYPSIEEGNNKGIVVLITSQKEGAITGGPAFIEAVGENILDATVSENLPVLATDEKYNEAVYSSAKRLVAAIDGQPDPGGPTVKDSKRESNFKTKEETDEKRGQFSLVVGGLLVIAFVVPMAQYFAYVSRK

SEQ ID NO: 26773 - DNA, 651 bp, Arabidopsis thaliana
  misc_feature (1)..(651): Ceres Seq. ID no. 12323414
  misc_feature: MA Experiment ID: 20000185 Result: Down-regulated in Transcription
  misc_feature: MA Experiment 20000185 PARAMETER Experiment Name: At_Roots__P Parameter: Age (day) Value: 7 vs. 21
  misc_feature: MA Experiment 20000185 PARAMETER Experiment Name: At_Roots__P Parameter: Organism Value: A. thaliana
  misc_feature: MA Experiment 20000185 PARAMETER Experiment Name: At_Roots__P Parameter: Tissue Value: Roots vs. Whole Plant
  misc_feature: MA Experiment ID: 20000234 Result: Down-regulated in Transcription
  misc_feature: MA Experiment 20000234 PARAMETER Experiment Name: At_Siliques_P Parameter: Age (day) Value: 21
  misc_feature: MA Experiment 20000234 PARAMETER Experiment Name: At_Siliques_P Parameter: Organism Value: A. thaliana
  misc_feature: MA Experiment 20000234 PARAMETER Experiment Name: At_Siliques_P Parameter: Plant Line Value: WS
  misc_feature: MA Experiment 20000234 PARAMETER Experiment Name: At_Siliques_P Parameter: Tissue Value: Less Than 5mm Siliques vs. Whole Plant
  misc_feature: MA Experiment ID: 20000235 Result: Down-regulated in Transcription
  misc_feature: MA Experiment 20000235 PARAMETER Experiment Name: At_Siliques_P Parameter: Age (day) Value: 21
  misc_feature: MA Experiment 20000235 PARAMETER Experiment Name: At_Siliques_P Parameter: Organism Value: A. thaliana
  misc_feature: MA Experiment 20000235 PARAMETER Experiment Name: At_Siliques_P Parameter: Plant Line Value: WS
  misc_feature: MA Experiment 20000235 PARAMETER Experiment Name: At_Siliques_P Parameter: Tissue Value: 5-10mm Siliques vs. Whole Plant
  misc_feature: MA Experiment ID: 20000264 Result: Down-regulated in Transcription
  misc_feature: MA Experiment 20000264 PARAMETER Experiment Name: At_Open_Flower_P Parameter: Age (day) Value: 21
  misc_feature: MA Experiment 20000264 PARAMETER Experiment Name: At_Open_Flower_P Parameter: Plant Line Value: WS
  misc_feature: MA Experiment 20000264 PARAMETER Experiment Name: At_Open_Flower_P Parameter: Tissue Value: Open Flower vs. Whole Plant
  misc_feature: MA Experiment ID: 20000265 Result: Down-regulated in Transcription
  misc_feature: MA Experiment 20000265 PARAMETER Experiment Name: At_Open_Flower_P Parameter: Age (day) Value: 21
  misc_feature: MA Experiment 20000265 PARAMETER Experiment Name: At_Open_Flower_P Parameter: Plant Line Value: WS
  misc_feature: MA Experiment 20000265 PARAMETER Experiment Name: At_Open_Flower_P Parameter: Tissue Value: Closed Flower vs. Whole Plant
  misc_feature: MA Experiment ID: 20000286 Result: Down-regulated in Transcription
  misc_feature: MA Experiment 20000286 PARAMETER Experiment Name: At_Open_Flower_P Parameter: Age (day) Value: 21
  misc_feature: MA Experiment 20000286 PARAMETER Experiment Name: At_Open_Flower_P Parameter: Plant Line Value: WS
  misc_feature: MA Experiment 20000286 PARAMETER Experiment Name: At_Open_Flower_P Parameter: Tissue Value: Half Open vs. Whole Plant
  misc_feature: MA Experiment ID: 20000439 Result: Down-regulated in Transcription
  misc_feature: MA Experiment 20000439 PARAMETER Experiment Name: At_Roots__P Parameter: Age (day) Value: 14 vs. 21
  misc_feature: MA Experiment 20000439 PARAMETER Experiment Name: At_Roots__P Parameter: Organism Value: A. thaliana
  misc_feature: MA Experiment 20000439 PARAMETER Experiment Name: At_Roots__P Parameter: Tissue Value: Roots vs. Whole Plant
  misc_feature: MA Experiment ID: 20001451 Result: Up-regulated in Transcription
  misc_feature: MA Experiment 20001451 PARAMETER Experiment Name: At_Far-red-induction_P Parameter: Age (day) Value: 7
  misc_feature: MA Experiment 20001451 PARAMETER Experiment Name: At_Far-red-induction_P Parameter: Light Value: Far-red vs. White
  misc_feature: MA Experiment 20001451 PARAMETER Experiment Name: At_Far-red-induction_P Parameter: Organism Value: A. thaliana
  misc_feature: MA Experiment 20001451 PARAMETER Experiment Name: At_Far-red-induction_P Parameter: Plant Line Value: Columbia
  misc_feature: MA Experiment 20001451 PARAMETER Experiment Name: At_Far-red-induction_P Parameter: Timepoint (hr) Value: 24
  misc_feature: MA Experiment 20001451 PARAMETER Experiment Name: At_Far-red-induction_P Parameter: Tissue Value: Whole Plant
  misc_feature: MA Experiment ID: 20001911 Result: Up-regulated in Transcription
  misc_feature: MA Experiment 20001911 PARAMETER Experiment Name: At_Drought_Reproduction_P Parameter: Age (day) Value: 40
  misc_feature: MA Experiment 20001911 PARAMETER Experiment Name: At_Drought_Reproduction_P Parameter: Organism Value: A. thaliana
  misc_feature: MA Experiment 20001911 PARAMETER Experiment Name: At_Drought_Reproduction_P Parameter: Plant Line Value: WS
  misc_feature: MA Experiment 20001911 PARAMETER Experiment Name: At_Drought_Reproduction_P Parameter: Timepoint (day) Value: 10
  misc_feature: MA Experiment 20001911 PARAMETER Experiment Name: At_Drought_Reproduction_P Parameter: Tissue Value: Flowers
  misc_feature: MA Experiment 20001911 PARAMETER Experiment Name: At_Drought_Reproduction_P Parameter: Treatment Value: Drought vs. No Drought
atctctaaagttgttccttcttctctccttcgtctcccgtcaagctgctttagccatggctatggcggcgtctattatccaatcttctccgctctccttcaatagcaaagccacggattcatagttcaggatcgctcggcggaatcaaaagccaaaatagagtctctccattgagtgcggttggattaagctcaggccttggaagtagaaggaaatctcttttgatatgtcactcagccattaacgcgaaatgcagtgaaggacaaacacagaccgttactcgggagtcaccgactataacacaggctcctgtacactctaaggagaaatcaccaagcctagacgatggaggagacgggttcccaccgcgagatgatggagatggtggtggaggaggagggggtggaggcaactggtcgggtgggttcttcttctttggttttctggccttcttgggtctattgaaggataaagagggcgaggaagattaccgagggagcagaaggcgataataatatgggccactcttggttatcttattacagctacaggactcattttgtatctgtttcgttgagtgggggatgatatgccttgtattcaagagaagagagacacggttgatttcaacaaagcttatattgataactt

SEQ ID NO: 26774 - protein, 40 aa, Arabidopsis thaliana
  peptide (1)..(40): Ceres Seq. ID no. 12323415
  misc_feature (19)..(35): Homolog of NCBI NO: 18405726 NR Description: expressed protein
SLKLFLLLSFVSRQAALAMAMAASIIQSSPLSFNSKATDS

SEQ ID NO: 26775 - protein, 39 aa, Arabidopsis thaliana
  peptide (1)..(39): Ceres Seq. ID no. 12323416
MEETGSHREMMEMVVEEEGVEATGRVGSSSLVFWPSWVY

SEQ ID NO: 26776 - protein, 34 aa, Arabidopsis thaliana
  peptide (1)..(34): Ceres Seq. ID no. 12323417
ISKVVPSSLLRLPSSCFSHGYGGVYYPIFSALLQ

SEQ ID NO: 26777 - DNA, 852 bp, Arabidopsis thaliana
  misc_feature (1)..(852): Ceres Seq. ID no. 12335906
  misc_feature: MA Experiment ID: 108434 Result: Up-regulated in Transcription
  misc_feature: MA Experiment 108434 PARAMETER Experiment Name: At_Root_Tips_cDNA_P Parameter: Tissue Value: Root Tips
  misc_feature: MA Experiment ID: 108461 Result: Up-regulated in Transcription
  misc_feature: MA Experiment 108461 PARAMETER Experiment Name: At_Germinating_Seeds_cDNA_P Parameter: Age (day) Value: 1 vs. 0
  misc_feature: MA Experiment 108461 PARAMETER Experiment Name: At_Germinating_Seeds_cDNA_P Parameter: Tissue Value: Germinating Seeds
  misc_feature: MA Experiment ID: 108488 Result: Up-regulated in Transcription
  misc_feature: MA Experiment ID: 108595 Result: Down-regulated in Transcription
  misc_feature: MA Experiment 108595 PARAMETER Experiment Name: At_Ler-pi_Ovule_cDNA_P Parameter: Plant Line Value: null
  misc_feature: MA Experiment ID: 20000069 Result: Down-regulated in Transcription
  misc_feature: MA Experiment 20000069 PARAMETER Experiment Name: At_100uM_ABA_Mutants_cDNA_P Parameter: Plant Line Value: CS23
  misc_feature: MA Experiment 20000069 PARAMETER Experiment Name: At_100uM_ABA_Mutants_cDNA_P Parameter: Timepoint (hr) Value: 6
  misc_feature: MA Experiment 20000069 PARAMETER Experiment Name: At_100uM_ABA_Mutants_cDNA_P Parameter: Tissue Value: Aerial
  misc_feature: MA Experiment 20000069 PARAMETER Experiment Name: At_100uM_ABA_Mutants_cDNA_P Parameter: Treatment Value: 100uM ABA vs. No Treatment
  misc_feature: MA Experiment ID: 20000070 Result: Down-regulated in Transcription
  misc_feature: MA Experiment 20000070 PARAMETER Experiment Name: At_100uM_ABA_Mutants_cDNA_P Parameter: Plant Line Value: CS24
  misc_feature: MA Experiment 20000070 PARAMETER Experiment Name: At_100uM_ABA_Mutants_cDNA_P Parameter: Timepoint (hr) Value: 6
  misc_feature: MA Experiment 20000070 PARAMETER Experiment Name: At_100uM_ABA_Mutants_cDNA_P Parameter: Tissue Value: Aerial
  misc_feature: MA Experiment 20000070 PARAMETER Experiment Name: At_100uM_ABA_Mutants_cDNA_P Parameter: Treatment Value: 100uM ABA vs. No Treatment
  misc_feature: MA Experiment ID: 20000071 Result: Down-regulated in Transcription
  misc_feature: MA Experiment 20000071 PARAMETER Experiment Name: At_100uM_ABA_Mutants_cDNA_P Parameter: Plant Line Value: CS8104
  misc_feature: MA Experiment 20000071 PARAMETER Experiment Name: At_100uM_ABA_Mutants_cDNA_P Parameter: Timepoint (hr) Value: 6
  misc_feature: MA Experiment 20000071 PARAMETER Experiment Name: At_100uM_ABA_Mutants_cDNA_P Parameter: Tissue Value: Aerial
  misc_feature: MA Experiment 20000071 PARAMETER Experiment Name: At_100uM_ABA_Mutants_cDNA_P Parameter: Treatment Value: 100uM ABA vs. No Treatment
  misc_feature: MA Experiment ID: 20000072 Result: Down-regulated in Transcription
  misc_feature: MA Experiment 20000072 PARAMETER Experiment Name: At_100uM_ABA_Mutants_cDNA_P Parameter: Plant Line Value: CS8105
  misc_feature: MA Experiment 20000072 PARAMETER Experiment Name: At_100uM_ABA_Mutants_cDNA_P Parameter: Timepoint (hr) Value: 6
  misc_feature: MA Experiment 20000072 PARAMETER Experiment Name: At_100uM_ABA_Mutants_cDNA_P Parameter: Tissue Value: Aerial
  misc_feature: MA Experiment 20000072 PARAMETER Experiment Name: At_100uM_ABA_Mutants_cDNA_P Parameter: Treatment Value: 100uM ABA vs. No Treatment
  misc_feature: MA Experiment ID: 20000086 Result: Down-regulated in Transcription
  misc_feature: MA Experiment 20000086 PARAMETER Experiment Name: At_100uM_ABA_Mutants_cDNA_P Parameter: Plant Line Value: CS22
  misc_feature: MA Experiment 20000086 PARAMETER Experiment Name: At_100uM_ABA_Mutants_cDNA_P Parameter: Timepoint (hr) Value: 6
  misc_feature: MA Experiment 20000086 PARAMETER Experiment Name: At_100uM_ABA_Mutants_cDNA_P Parameter: Tissue Value: Aerial
  misc_feature: MA Experiment 20000086 PARAMETER Experiment Name: At_100uM_ABA_Mutants_cDNA_P Parameter: Treatment Value: 100uM ABA vs. No Treatment
  misc_feature: MA Experiment ID: 20000087 Result: Down-regulated in Transcription
  misc_feature: MA Experiment 20000087 PARAMETER Experiment Name: At_100uM_ABA_Mutants_cDNA_P Parameter: Plant Line Value: WS
  misc_feature: MA Experiment 20000087 PARAMETER Experiment Name: At_100uM_ABA_Mutants_cDNA_P Parameter: Timepoint (hr) Value: 6
  misc_feature: MA Experiment 20000087 PARAMETER Experiment Name: At_100uM_ABA_Mutants_cDNA_P Parameter: Tissue Value: Aerial
  misc_feature: MA Experiment 20000087 PARAMETER Experiment Name: At_100uM_ABA_Mutants_cDNA_P Parameter: Treatment Value: 100uM ABA vs. No Treatment
  misc_feature: MA Experiment ID: 20000117 Result: Down-regulated in Transcription
  misc_feature: MA Experiment 20000117 PARAMETER Experiment Name: At_100uM_ABA_Mutants_cDNA_P Parameter: Plant Line Value: Columbia
  misc_feature: MA Experiment 20000117 PARAMETER Experiment Name: At_100uM_ABA_Mutants_cDNA_P Parameter: Timepoint (hr) Value: 6
  misc_feature: MA Experiment 20000117 PARAMETER Experiment Name: At_100uM_ABA_Mutants_cDNA_P Parameter: Tissue Value: Aerial
  misc_feature: MA Experiment 20000117 PARAMETER Experiment Name: At_100uM_ABA_Mutants_cDNA_P Parameter: Treatment Value: 100uM ABA vs. No Treatment
  misc_feature: MA Experiment ID: 20000185 Result: Down-regulated in Transcription
  misc_feature: MA Experiment 20000185 PARAMETER Experiment Name: At_Roots__P Parameter: Age (day) Value: 7 vs. 21
  misc_feature: MA Experiment 20000185 PARAMETER Experiment Name: At_Roots__P Parameter: Organism Value: A. thaliana
  misc_feature: MA Experiment 20000185 PARAMETER Experiment Name: At_Roots__P Parameter: Tissue Value: Roots vs. Whole Plant
  misc_feature: MA Experiment ID: 20000437 Result: Down-regulated in Transcription
  misc_feature: MA Experiment 20000437 PARAMETER Experiment Name: At_Drought_P Parameter: Age (day) Value: 8
  misc_feature: MA Experiment 20000437 PARAMETER Experiment Name: At_Drought_P Parameter: Organism Value: A. thaliana
  misc_feature: MA Experiment 20000437 PARAMETER Experiment Name: At_Drought_P Parameter: Plant Line Value: WS
  misc_feature: MA Experiment 20000437 PARAMETER Experiment Name: At_Drought_P Parameter: Timepoint (hr) Value: 24
  misc_feature: MA Experiment 20000437 PARAMETER Experiment Name: At_Drought_P Parameter: Tissue Value: Whole Plant
  misc_feature: MA Experiment 20000437 PARAMETER Experiment Name: At_Drought_P Parameter: Treatment Value: Drought vs. No Drought
  misc_feature: MA Experiment ID: 20000439 Result: Down-regulated in Transcription
  misc_feature: MA Experiment 20000439 PARAMETER Experiment Name: At_Roots__P Parameter: Age (day) Value: 14 vs. 21
  misc_feature: MA Experiment 20000439 PARAMETER Experiment Name: At_Roots__P Parameter: Organism Value: A. thaliana
  misc_feature: MA Experiment 20000439 PARAMETER Experiment Name: At_Roots__P Parameter: Tissue Value: Roots vs. Whole Plant
  misc_feature: MA Experiment ID: 20000794 Result: Down-regulated in Transcription
  misc_feature: MA Experiment 20000794 PARAMETER Experiment Name: At_Petals_P Parameter: Age (day) Value: 23-25 days
  misc_feature: MA Experiment 20000794 PARAMETER Experiment Name: At_Petals_P Parameter: Plant Line Value: WS
  misc_feature: MA Experiment 20000794 PARAMETER Experiment Name: At_Petals_P Parameter: Tissue Value: Petals vs. Whole plant
  misc_feature: MA Experiment ID: 20001450 Result: Down-regulated in Transcription
  misc_feature: MA Experiment 20001450 PARAMETER Experiment Name: At_Far-red-induction_P Parameter: Age (day) Value: 7
  misc_feature: MA Experiment 20001450 PARAMETER Experiment Name: At_Far-red-induction_P Parameter: Light Value: Far-red vs. White
  misc_feature: MA Experiment 20001450 PARAMETER Experiment Name: At_Far-red-induction_P Parameter: Organism Value: A. thaliana
  misc_feature: MA Experiment 20001450 PARAMETER Experiment Name: At_Far-red-induction_P Parameter: Plant Line Value: Columbia
  misc_feature: MA Experiment 20001450 PARAMETER Experiment Name: At_Far-red-induction_P Parameter: Timepoint (hr) Value: 8
  misc_feature: MA Experiment 20001450 PARAMETER Experiment Name: At_Far-red-induction_P Parameter: Tissue Value: Whole Plant
  misc_feature: MA Experiment ID: 20001757 Result: Up-regulated in Transcription
  misc_feature: MA Experiment 20001757 PARAMETER Experiment Name: At_50mM_NH4NO3_L-to-H_P Parameter: Timepoint (hr) Value: 6
  misc_feature: MA Experiment 20001757 PARAMETER Experiment Name: At_50mM_NH4NO3_L-to-H_P Parameter: Tissue Value: Leaf
  misc_feature: MA Experiment 20001757 PARAMETER Experiment Name: At_50mM_NH4NO3_L-to-H_P Parameter: Treatment Value: 50mM NH4NO3 vs 100mM Mannitol
  misc_feature: MA Experiment ID: 20001905 Result: Down-regulated in Transcription
  misc_feature: MA Experiment 20001905 PARAMETER Experiment Name: At_Drought_Reproduction_P Parameter: Age (day) Value: 40
  misc_feature: MA Experiment 20001905 PARAMETER Experiment Name: At_Drought_Reproduction_P Parameter: Organism Value: A. thaliana
  misc_feature: MA Experiment 20001905 PARAMETER Experiment Name: At_Drought_Reproduction_P Parameter: Plant Line Value: WS
  misc_feature: MA Experiment 20001905 PARAMETER Experiment Name: At_Drought_Reproduction_P Parameter: Timepoint (day) Value: 10
  misc_feature: MA Experiment 20001905 PARAMETER Experiment Name: At_Drought_Reproduction_P Parameter: Tissue Value: Rosettes
  misc_feature: MA Experiment 20001905 PARAMETER Experiment Name: At_Drought_Reproduction_P Parameter: Treatment Value: Drought vs. No Drought
  misc_feature: MA Experiment ID: 20001911 Result: Down-regulated in Transcription
  misc_feature: MA Experiment 20001911 PARAMETER Experiment Name: At_Drought_Reproduction_P Parameter: Age (day) Value: 40
  misc_feature: MA Experiment 20001911 PARAMETER Experiment Name: At_Drought_Reproduction_P Parameter: Organism Value: A. thaliana
  misc_feature: MA Experiment 20001911 PARAMETER Experiment Name: At_Drought_Reproduction_P Parameter: Plant Line Value: WS
  misc_feature: MA Experiment 20001911 PARAMETER Experiment Name: At_Drought_Reproduction_P Parameter: Timepoint (day) Value: 10
  misc_feature: MA Experiment 20001911 PARAMETER Experiment Name: At_Drought_Reproduction_P Parameter: Tissue Value: Flowers
  misc_feature: MA Experiment 20001911 PARAMETER Experiment Name: At_Drought_Reproduction_P Parameter: Treatment Value: Drought vs. No Drought
tccaaagtctcgagcttagagctctctctcagtcgaaaacaatggcgtcttcttcagcgacgctctctctctgctctactttctctgctcattgcaatgtcaattctcgccgttctagcactatcctctgttctctctctaaaccttcgcttaatttggctaaacctctgactggatttctttctccttccactgcgtcgacgtctcgaaccgcattcaccgtcgctccgaaattcgcggaatcagtcgtcgaagctgaaccggagactaccgatatcgaagctgtggtggtttccgatgtttcggaggttactgaggaaaaagctaaacgagaagagattttcgctgttattatggttggtggacgccaatacatagtgtttccagggagatatctctacactcagaggctaaaagatgcaaatgttgatgaccagattgttctcaacaaagtgttgcttgttggaacaaagacacacacttacattggcaagccggttgtgaccaatgccactgtacatgctgttgtggaaagtcaaggtttgaatgataaagtggtagtcttcaagtacaagcctaagaagaagtaccgtagaaatatcggtcacagacagccgaatacgaggattaggattaccggaatcacagggtatgaagagtatccagcctcgcccaatgttgcagttggagaagtaaatctttgacacaaaatgtttcttgaatgttaaaatttttctgatcttctctatgtaattttgtaaggaccctggtcatttcatttctgctgagattccttttattaatatgtaccttttgccattctttgatcacaaattctaagttagtgtatgg

SEQ ID NO: 26778 - protein, 233 aa, Arabidopsis thaliana
  peptide (1)..(233): Ceres Seq. ID no. 12335907
  misc_feature (113)..(209): Pfam Name: Ribosomal prokaryotic L21 protein Pfam Description: Ribosomal prokaryotic L21 protein
  misc_feature (114)..(214): Homolog of NCBI NO: 22537517 NR Description: ribosomal protein L21 [Streptococcus agalactiae
  misc_feature (114)..(214): Homolog of NCBI NO: 15674860 NR Description: 50S ribosomal protein L21 [Streptococcus
  misc_feature (98)..(214): Homolog of NCBI NO: 5712722 NR Description: unknown [Pseudomonas sp. BG33R]
  misc_feature (113)..(214): Homolog of NCBI NO: 28868025 NR Description: ribosomal protein L21
  misc_feature (113)..(214): Homolog of NCBI NO: 15894539 NR Description: Ribosomal protein L21 [Clostridium
  misc_feature (113)..(214): Homolog of NCBI NO: 28211680 NR Description: LSU ribosomal protein L21P [Clostridium tetani
  misc_feature (79)..(219): Homolog of NCBI NO: 25407696 NR Description: hypothetical protein AT4g30930 [imported] -
  misc_feature (79)..(219): Homolog of NCBI NO: 18417696 NR Description: WRKY family transcription factor
  misc_feature (110)..(223): Homolog of NCBI NO: 132776 NR Description: 50S RIBOSOMAL PROTEIN L21, CHLOROPLAST PRECURSOR
  misc_feature (14)..(233): Homolog of NCBI NO: 15219695 NR Description: 50S ribosomal protein L21 chloroplast precursor
QSLELRALSQSKTMASSSATLSLCSTFSAHCNVNSRRSSTILCSLSKPSLNLAKPLTGFLSPSTASTSRTAFTVAPKFAESVVEAEPETTDIEAVVVSDVSEVTEEKAKREEIFAVIMVGGRQYIVFPGRYLYTQRLKDANVDDQIVLNKVLLVGTKTHTYIGKPVVTNATVHAVVESQGLNDKVVVFKYKPKKKYRRNIGHRQPNTRIRITGITGYEEYPASPNVAVGEVNL

SEQ ID NO: 26779 - protein, 220 aa, Arabidopsis thaliana
  peptide (1)..(220): Ceres Seq. ID no. 12335908
  misc_feature (100)..(196): Pfam Name: Ribosomal prokaryotic L21 protein Pfam Description: Ribosomal prokaryotic L21 protein
  misc_feature (100)..(201): Homolog of NCBI NO: 15894539 NR Description: Ribosomal protein L21 [Clostridium
  misc_feature (100)..(201): Homolog of NCBI NO: 28211680 NR Description: LSU ribosomal protein L21P [Clostridium tetani
  misc_feature (66)..(206): Homolog of NCBI NO: 25407696 NR Description: hypothetical protein AT4g30930 [imported] -
  misc_feature (101)..(201): Homolog of NCBI NO: 22537517 NR Description: ribosomal protein L21 [Streptococcus agalactiae
  misc_feature (85)..(201): Homolog of NCBI NO: 5712722 NR Description: unknown [Pseudomonas sp. BG33R]
  misc_feature (100)..(201): Homolog of NCBI NO: 28868025 NR Description: ribosomal protein L21
  misc_feature (101)..(201): Homolog of NCBI NO: 15674860 NR Description: 50S ribosomal protein L21 [Streptococcus
  misc_feature (66)..(206): Homolog of NCBI NO: 18417696 NR Description: WRKY family transcription factor
  misc_feature (97)..(210): Homolog of NCBI NO: 132776 NR Description: 50S RIBOSOMAL PROTEIN L21, CHLOROPLAST PRECURSOR
  misc_feature (1)..(220): Homolog of NCBI NO: 15219695 NR Description: 50S ribosomal protein L21 chloroplast precursor
MASSSATLSLCSTFSAHCNVNSRRSSTILCSLSKPSLNLAKPLTGFLSPSTASTSRTAFTVAPKFAESVVEAEPETTDIEAVVVSDVSEVTEEKAKREEIFAVIMVGGRQYIVFPGRYLYTQRLKDANVDDQIVLNKVLLVGTKTHTYIGKPVVTNATVHAVVESQGLNDKVVVFKYKPKKKYRRNIGHRQPNTRIRITGITGYEEYPASPNVAVGEVNL

SEQ ID NO: 26780 - protein, 116 aa, Arabidopsis thaliana
  peptide (1)..(116): Ceres Seq. ID no. 12335909
  misc_feature (1)..(92): Pfam Name: Ribosomal prokaryotic L21 protein Pfam Description: Ribosomal prokaryotic L21 protein
  misc_feature (1)..(97): Homolog of NCBI NO: 22537517 NR Description: ribosomal protein L21 [Streptococcus agalactiae
  misc_feature (1)..(97): Homolog of NCBI NO: 15674860 NR Description: 50S ribosomal protein L21 [Streptococcus
  misc_feature (1)..(97): Homolog of NCBI NO: 5712722 NR Description: unknown [Pseudomonas sp. BG33R]
  misc_feature (1)..(97): Homolog of NCBI NO: 28868025 NR Description: ribosomal protein L21
  misc_feature (1)..(97): Homolog of NCBI NO: 15894539 NR Description: Ribosomal protein L21 [Clostridium
  misc_feature (1)..(97): Homolog of NCBI NO: 28211680 NR Description: LSU ribosomal protein L21P [Clostridium tetani
  misc_feature (1)..(102): Homolog of NCBI NO: 25407696 NR Description: hypothetical protein AT4g30930 [imported] -
  misc_feature (1)..(102): Homolog of NCBI NO: 18417696 NR Description: WRKY family transcription factor
  misc_feature (1)..(106): Homolog of NCBI NO: 132776 NR Description: 50S RIBOSOMAL PROTEIN L21, CHLOROPLAST PRECURSOR
  misc_feature (1)..(116): Homolog of NCBI NO: 15219695 NR Description: 50S ribosomal protein L21 chloroplast precursor
MVGGRQYIVFPGRYLYTQRLKDANVDDQIVLNKVLLVGTKTHTYIGKPVVTNATVHAVVESQGLNDKVVVFKYKPKKKYRRNIGHRQPNTRIRITGITGYEEYPASPNVAVGEVNL

SEQ ID NO: 26781 - DNA, 2589 bp, Arabidopsis thaliana
  misc_feature (1)..(2589): Ceres Seq. ID no. 12372158
  misc_feature: MA Experiment ID: 108435 Result: Up-regulated in Transcription
  misc_feature: MA Experiment 108435 PARAMETER Experiment Name: At_stm_Mutants_cDNA_P Parameter: Plant Line Value: wt Landsburg vs stm
  misc_feature: MA Experiment 108435 PARAMETER Experiment Name: At_stm_Mutants_cDNA_P Parameter: Tissue Value: Shoot Apical Meristem Region
  misc_feature: MA Experiment ID: 108461 Result: Down-regulated in Transcription
  misc_feature: MA Experiment 108461 PARAMETER Experiment Name: At_Germinating_Seeds_cDNA_P Parameter: Age (day) Value: 1 vs. 0
  misc_feature: MA Experiment 108461 PARAMETER Experiment Name: At_Germinating_Seeds_cDNA_P Parameter: Tissue Value: Germinating Seeds
  misc_feature: MA Experiment ID: 108462 Result: Down-regulated in Transcription
  misc_feature: MA Experiment 108462 PARAMETER Experiment Name: At_Germinating_Seeds_cDNA_P Parameter: Age (day) Value: 2 vs. 0
  misc_feature: MA Experiment 108462 PARAMETER Experiment Name: At_Germinating_Seeds_cDNA_P Parameter: Tissue Value: Germinating Seeds
  misc_feature: MA Experiment ID: 108463 Result: Down-regulated in Transcription
  misc_feature: MA Experiment 108463 PARAMETER Experiment Name: At_Germinating_Seeds_cDNA_P Parameter: Age (day) Value: 3 vs. 0
  misc_feature: MA Experiment 108463 PARAMETER Experiment Name: At_Germinating_Seeds_cDNA_P Parameter: Tissue Value: Germinating Seeds
  misc_feature: MA Experiment ID: 108573 Result: Up-regulated in Transcription
  misc_feature: MA Experiment 108573 PARAMETER Experiment Name: At_Drought_cDNA_P Parameter: Timepoint (hr) Value: 6
  misc_feature: MA Experiment 108573 PARAMETER Experiment Name: At_Drought_cDNA_P Parameter: Tissue Value: Aerial
  misc_feature: MA Experiment 108573 PARAMETER Experiment Name: At_Drought_cDNA_P Parameter: Treatment Value: Drought vs. No Drought
  misc_feature: MA Experiment ID: 20000086 Result: Down-regulated in Transcription
  misc_feature: MA Experiment 20000086 PARAMETER Experiment Name: At_100uM_ABA_Mutants_cDNA_P Parameter: Plant Line Value: CS22
  misc_feature: MA Experiment 20000086 PARAMETER Experiment Name: At_100uM_ABA_Mutants_cDNA_P Parameter: Timepoint (hr) Value: 6
  misc_feature: MA Experiment 20000086 PARAMETER Experiment Name: At_100uM_ABA_Mutants_cDNA_P Parameter: Tissue Value: Aerial
  misc_feature: MA Experiment 20000086 PARAMETER Experiment Name: At_100uM_ABA_Mutants_cDNA_P Parameter: Treatment Value: 100uM ABA vs. No Treatment
  misc_feature: MA Experiment ID: 20000112 Result: Up-regulated in Transcription
  misc_feature: MA Experiment 20000112 PARAMETER Experiment Name: At_42deg_Heat_cDNA_P Parameter: Temperature (deg C) Value: 42 vs. 22
  misc_feature: MA Experiment 20000112 PARAMETER Experiment Name: At_42deg_Heat_cDNA_P Parameter: Timepoint (hr) Value: 2
  misc_feature: MA Experiment 20000112 PARAMETER Experiment Name: At_42deg_Heat_cDNA_P Parameter: Tissue Value: Aerial
aaacacaccaaaatcaaaagctgagagctctcttacattgaagctactttcgaagatagcattcactgattggtaaagagttctagaagcgacgagcatcttctttagttcccgagttttctgcgtttgagaagtctgttctagaaagtaatgggtgacagcgaggccatggtttccgagggttatacttctgctccatatggagactataatgcttctgctgctactgtggaatcgaccgggcaagagactgcaccaattgttgatgcatcacactcggtcaacaatgattctttggtcaatggtactgcgccagttgagaacggaagtgcaacagataatgtggctgtgactgctccagcagcggagcatggagacaatactggctctacactctcaacggaagaggagcgcttgtggaatattgtaagggcaaattctttagagtttaatgcttggactgccttgattgatgagacggagaggatagcgcaggacaatatagcaaaaatccggaaggtctatgatgctttcttagctgaatttcctctgtgttatggctattggaaaaagtttgccgatcatgaggctcgggtgggggcaatggacaaagtcgtggaggtttatgaaagagcagtgctgggagtgacatattcagtggatatctggttgcattattgcacttttgccatcaatacatatggagatccagaaacgatcagaaggctttttgaacgagctttggtttacgttggaactgattttctttcctctccgttgtgggacaaatacattgagtatgagtacatgcagcaggactggagccgagttgccttgatttacaccagaatattggagaatccaattcaaaatctggatagatatttcagcagttttaaggagctagctgaaacacggcctctgtcggaactaaggagtgctgaggaatccgcagctgctgctgttgctgttgctggtgatgcttctgaaagtgcagcatctgagtccggtgaaaaggcagatgaaggacgatctcaagttgatggttccaccgaacaatcccctaaattggaaagtgctagttcaactgaacctgaggagttgaagaagtatgtaggcatcagggaagccatgtacataaaatcgaaagagtttgaatctaaaatcattggttatgaaatggctataaggaggccctatttccatgtgcgtcctctgaatgtcgcagaactggagaattggcacaactatctggatttcattgagagggatggagacttcaataaggtggtcaagctgtatgaaagatgtgtggttacctgtgcaaattacccagaatactggattcgttatgtgacaaacatggaagcaagtggaagtgcggaccttgcagaaaatgcccttgctcgagcaactcaagtctttgtcaagaaacaaccagagattcacctatttgctgctcgattaaaagagcagaatggagatatagctggtgctagagctgcataccaattagtgcactctgaaatttctcctggacttcttgaagcagtaatcaagcatgcaaatatggaataccgactaggtaatctggatgatgctttctctttgtatgagcaagtgattgctgttgaaaaggggaaagaacattccacaatactgccactgctgtatgcgcagtattcaaggttttcatacttggtctccagggatgctgagaaagctaggaggattattgtcgaagcacttgaccatgtacaaccgtcaaaacctctcatggaagcactgattcattttgaggcgattcagccaccaccaagagagattgattaccttgagccacttgtagagaaagttataaagccagatgcagatgcccaaaacattgcaagttccactgagagggaagagctatccttaatatatatagagttcctgggtatttttggagatgtgaagtccattaaaaaagcggaagatcaacatgttaaactgttttatcctcatcggagcacgtcggagctgaaaaagcgtagcgcagatgattttctcgcatcagataggacgaaaatggcaaaaacttacaacggcactccacctgctcagccagtatccaatgcatatccaaatgctcaggctcaatggtctggtggttatgctgcgcagcctcagacttggccaccagcacaagctgctcctgctcaaccacagcaatggaaccctgcctacggtcaacaggctgcttatggtgcatatgggggatatcctgctggctataccgctccacaagcaccaacacctgtgccacaggccgcagcttatggagcgtatcctgctcagacatacccaacgcagagttatgcacctccagttgcagcagcagcaccagcggctgcaccggtgcagcaaccggctgctgctgttgctcctcaagcgtactacaacacgtactactgagcctattactgctgctggtcgtttttgtagtgtaattgataaccatttgcttctatctactcaaatttagtgtctggatgtttacatgtctctcttttctcgatcagtgacaatagatatttacttttcttc

SEQ ID NO: 26782 - protein, 768 aa, Arabidopsis thaliana
  peptide (1)..(768): Ceres Seq. ID no. 12372159
  misc_feature (118)..(462): Homolog of NCBI NO: 40745599 NR Description: hypothetical protein AN1635.2 [Aspergillus
  misc_feature (194)..(686): Homolog of NCBI NO: 34865282 NR Description: similar to hypothetical protein FLJ20666 [Rattus
  misc_feature (194)..(686): Homolog of NCBI NO: 30704561 NR Description: Similar to hypothetical protein FLJ20666 [Homo
  misc_feature (158)..(686): Homolog of NCBI NO: 33946299 NR Description: hypothetical protein FLJ20666 [Homo sapiens]
  misc_feature (84)..(596): Homolog of NCBI NO: 19113218 NR Description: possible pre-mRNA processing by similarity to
  misc_feature (28)..(644): Homolog of NCBI NO: 29561840 NR Description: SI:dZ261O22.3 (novel protein similar to pre-mRNA
  misc_feature (142)..(646): Homolog of NCBI NO: 40253455 NR Description: unknown protein [Oryza sativa (japonica
  misc_feature (95)..(646): Homolog of NCBI NO: 34904902 NR Description: similar to pre-mRNA processing protein
  misc_feature (80)..(626): Homolog of NCBI NO: 30694946 NR Description: expressed protein [Arabidopsis thaliana]
  misc_feature (80)..(626): Homolog of NCBI NO: 10177721 NR Description: gene_id:MPL12.20~pir||T00964~strong similarity to
MGDSEAMVSEGYTSAPYGDYNASAATVESTGQETAPIVDASHSVNNDSLVNGTAPVENGSATDNVAVTAPAAEHGDNTGSTLSTEEERLWNIVRANSLEFNAWTALIDETERIAQDNIAKIRKVYDAFLAEFPLCYGYWKKFADHEARVGAMDKVVEVYERAVLGVTYSVDIWLHYCTFAINTYGDPETIRRLFERALVYVGTDFLSSPLWDKYIEYEYMQQDWSRVALIYTRILENPIQNLDRYFSSFKELAETRPLSELRSAEESAAAAVAVAGDASESAASESGEKADEGRSQVDGSTEQSPKLESASSTEPEELKKYVGIREAMYIKSKEFESKIIGYEMAIRRPYFHVRPLNVAELENWHNYLDFIERDGDFNKVVKLYERCVVTCANYPEYWIRYVTNMEASGSADLAENALARATQVFVKKQPEIHLFAARLKEQNGDIAGARAAYQLVHSEISPGLLEAVIKHANMEYRLGNLDDAFSLYEQVIAVEKGKEHSTILPLLYAQYSRFSYLVSRDAEKARRIIVEALDHVQPSKPLMEALIHFEAIQPPPREIDYLEPLVEKVIKPDADAQNIASSTEREELSLIYIEFLGIFGDVKSIKKAEDQHVKLFYPHRSTSELKKRSADDFLASDRTKMAKTYNGTPPAQPVSNAYPNAQAQWSGGYAAQPQTWPPAQAAPAQPQQWNPAYGQQAAYGAYGGYPAGYTAPQAPTPVPQAAAYGAYPAQTYPTQSYAPPVAAAAPAAAPVQQPAAAVAPQAYYNTYY

SEQ ID NO: 26783 - protein, 762 aa, Arabidopsis thaliana
  peptide (1)..(762): Ceres Seq. ID no. 12372160
  misc_feature (112)..(456): Homolog of NCBI NO: 40745599 NR Description: hypothetical protein AN1635.2 [Aspergillus
  misc_feature (188)..(680): Homolog of NCBI NO: 34865282 NR Description: similar to hypothetical protein FLJ20666 [Rattus
  misc_feature (188)..(680): Homolog of NCBI NO: 30704561 NR Description: Similar to hypothetical protein FLJ20666 [Homo
  misc_feature (152)..(680): Homolog of NCBI NO: 33946299 NR Description: hypothetical protein FLJ20666 [Homo sapiens]
  misc_feature (78)..(590): Homolog of NCBI NO: 19113218 NR Description: possible pre-mRNA processing by similarity to
  misc_feature (22)..(638): Homolog of NCBI NO: 29561840 NR Description: SI:dZ261O22.3 (novel protein similar to pre-mRNA
  misc_feature (136)..(640): Homolog of NCBI NO: 40253455 NR Description: unknown protein [Oryza sativa (japonica
  misc_feature (89)..(640): Homolog of NCBI NO: 34904902 NR Description: similar to pre-mRNA processing protein
  misc_feature (74)..(620): Homolog of NCBI NO: 30694946 NR Description: expressed protein [Arabidopsis thaliana]
  misc_feature (74)..(620): Homolog of NCBI NO: 10177721 NR Description: gene_id:MPL12.20~pir||T00964~strong similarity to
MVSEGYTSAPYGDYNASAATVESTGQETAPIVDASHSVNNDSLVNGTAPVENGSATDNVAVTAPAAEHGDNTGSTLSTEEERLWNIVRANSLEFNAWTALIDETERIAQDNIAKIRKVYDAFLAEFPLCYGYWKKFADHEARVGAMDKVVEVYERAVLGVTYSVDIWLHYCTFAINTYGDPETIRRLFERALVYVGTDFLSSPLWDKYIEYEYMQQDWSRVALIYTRILENPIQNLDRYFSSFKELAETRPLSELRSAEESAAAAVAVAGDASESAASESGEKADEGRSQVDGSTEQSPKLESASSTEPEELKKYVGIREAMYIKSKEFESKIIGYEMAIRRPYFHVRPLNVAELENWHNYLDFIERDGDFNKVVKLYERCVVTCANYPEYWIRYVTNMEASGSADLAENALARATQVFVKKQPEIHLFAARLKEQNGDIAGARAAYQLVHSEISPGLLEAVIKHANMEYRLGNLDDAFSLYEQVIAVEKGKEHSTILPLLYAQYSRFSYLVSRDAEKARRIIVEALDHVQPSKPLMEALIHFEAIQPPPREIDYLEPLVEKVIKPDADAQNIASSTEREELSLIYIEFLGIFGDVKSIKKAEDQHVKLFYPHRSTSELKKRSADDFLASDRTKMAKTYNGTPPAQPVSNAYPNAQAQWSGGYAAQPQTWPPAQAAPAQPQQWNPAYGQQAAYGAYGGYPAGYTAPQAPTPVPQAAAYGAYPAQTYPTQSYAPPVAAAAPAAAPVQQPAAAVAPQAYYNTYY

SEQ ID NO: 26784 - protein, 617 aa, Arabidopsis thaliana
  peptide (1)..(617): Ceres Seq. ID no. 12372161
  misc_feature (1)..(311): Homolog of NCBI NO: 40745599 NR Description: hypothetical protein AN1635.2 [Aspergillus
  misc_feature (43)..(535): Homolog of NCBI NO: 34865282 NR Description: similar to hypothetical protein FLJ20666 [Rattus
  misc_feature (43)..(535): Homolog of NCBI NO: 30704561 NR Description: Similar to hypothetical protein FLJ20666 [Homo
  misc_feature (7)..(535): Homolog of NCBI NO: 33946299 NR Description: hypothetical protein FLJ20666 [Homo sapiens]
  misc_feature (1)..(445): Homolog of NCBI NO: 19113218 NR Description: possible pre-mRNA processing by similarity to
  misc_feature (1)..(493): Homolog of NCBI NO: 29561840 NR Description: SI:dZ261O22.3 (novel protein similar to pre-mRNA
  misc_feature (1)..(495): Homolog of NCBI NO: 40253455 NR Description: unknown protein [Oryza sativa (japonica
  misc_feature (1)..(495): Homolog of NCBI NO: 34904902 NR Description: similar to pre-mRNA processing protein
  misc_feature (1)..(475): Homolog of NCBI NO: 30694946 NR Description: expressed protein [Arabidopsis thaliana]
  misc_feature (1)..(475): Homolog of NCBI NO: 10177721 NR Description: gene_id:MPL12.20~pir||T00964~strong similarity to
MDKVVEVYERAVLGVTYSVDIWLHYCTFAINTYGDPETIRRLFERALVYVGTDFLSSPLWDKYIEYEYMQQDWSRVALIYTRILENPIQNLDRYFSSFKELAETRPLSELRSAEESAAAAVAVAGDASESAASESGEKADEGRSQVDGSTEQSPKLESASSTEPEELKKYVGIREAMYIKSKEFESKIIGYEMAIRRPYFHVRPLNVAELENWHNYLDFIERDGDFNKVVKLYERCVVTCANYPEYWIRYVTNMEASGSADLAENALARATQVFVKKQPEIHLFAARLKEQNGDIAGARAAYQLVHSEISPGLLEAVIKHANMEYRLGNLDDAFSLYEQVIAVEKGKEHSTILPLLYAQYSRFSYLVSRDAEKARRIIVEALDHVQPSKPLMEALIHFEAIQPPPREIDYLEPLVEKVIKPDADAQNIASSTEREELSLIYIEFLGIFGDVKSIKKAEDQHVKLFYPHRSTSELKKRSADDFLASDRTKMAKTYNGTPPAQPVSNAYPNAQAQWSGGYAAQPQTWPPAQAAPAQPQQWNPAYGQQAAYGAYGGYPAGYTAPQAPTPVPQAAAYGAYPAQTYPTQSYAPPVAAAAPAAAPVQQPAAAVAPQAYYNTYY

SEQ ID NO: 26785 - DNA, 550 bp, Arabidopsis thaliana
  misc_feature (1)..(550): Ceres Seq. ID no. 12422862
  misc_feature: MA Experiment ID: 108434 Result: Down-regulated in Transcription
  misc_feature: MA Experiment 108434 PARAMETER Experiment Name: At_Root_Tips_cDNA_P Parameter: Tissue Value: Root Tips
  misc_feature: MA Experiment ID: 108595 Result: Up-regulated in Transcription
  misc_feature: MA Experiment 108595 PARAMETER Experiment Name: At_Ler-pi_Ovule_cDNA_P Parameter: Plant Line Value: null
  misc_feature: MA Experiment ID: 20000171 Result: Up-regulated in Transcription
  misc_feature: MA Experiment 20000171 PARAMETER Experiment Name: At_42deg_Heat_P Parameter: Age (day) Value: 14
  misc_feature: MA Experiment 20000171 PARAMETER Experiment Name: At_42deg_Heat_P Parameter: Organism Value: A. thaliana
  misc_feature: MA Experiment 20000171 PARAMETER Experiment Name: At_42deg_Heat_P Parameter: Plant Line Value: WS
  misc_feature: MA Experiment 20000171 PARAMETER Experiment Name: At_42deg_Heat_P Parameter: Temperature (deg C) Value: 42 vs. 22
  misc_feature: MA Experiment 20000171 PARAMETER Experiment Name: At_42deg_Heat_P Parameter: Timepoint (hr) Value: 1
  misc_feature: MA Experiment 20000171 PARAMETER Experiment Name: At_42deg_Heat_P Parameter: Tissue Value: Aerial
  misc_feature: MA Experiment ID: 20000184 Result: Up-regulated in Transcription
  misc_feature: MA Experiment 20000184 PARAMETER Experiment Name: At_Shoots__P Parameter: Age (day) Value: 7
  misc_feature: MA Experiment 20000184 PARAMETER Experiment Name: At_Shoots__P Parameter: Tissue Value: Shoots vs. Whole Plant
  misc_feature: MA Experiment ID: 20000185 Result: Up-regulated in Transcription
  misc_feature: MA Experiment 20000185 PARAMETER Experiment Name: At_Roots__P Parameter: Age (day) Value: 7 vs. 21
  misc_feature: MA Experiment 20000185 PARAMETER Experiment Name: At_Roots__P Parameter: Organism Value: A. thaliana
  misc_feature: MA Experiment 20000185 PARAMETER Experiment Name: At_Roots__P Parameter: Tissue Value: Roots vs. Whole Plant
  misc_feature: MA Experiment ID: 20000234 Result: Down-regulated in Transcription
  misc_feature: MA Experiment 20000234 PARAMETER Experiment Name: At_Siliques_P Parameter: Age (day) Value: 21
  misc_feature: MA Experiment 20000234 PARAMETER Experiment Name: At_Siliques_P Parameter: Organism Value: A. thaliana
  misc_feature: MA Experiment 20000234 PARAMETER Experiment Name: At_Siliques_P Parameter: Plant Line Value: WS
  misc_feature: MA Experiment 20000234 PARAMETER Experiment Name: At_Siliques_P Parameter: Tissue Value: Less Than 5mm Siliques vs. Whole Plant
  misc_feature: MA Experiment ID: 20000235 Result: Down-regulated in Transcription
  misc_feature: MA Experiment 20000235 PARAMETER Experiment Name: At_Siliques_P Parameter: Age (day) Value: 21
  misc_feature: MA Experiment 20000235 PARAMETER Experiment Name: At_Siliques_P Parameter: Organism Value: A. thaliana
  misc_feature: MA Experiment 20000235 PARAMETER Experiment Name: At_Siliques_P Parameter: Plant Line Value: WS
  misc_feature: MA Experiment 20000235 PARAMETER Experiment Name: At_Siliques_P Parameter: Tissue Value: 5-10mm Siliques vs. Whole Plant
  misc_feature: MA Experiment ID: 20000269 Result: Down-regulated in Transcription
  misc_feature: MA Experiment 20000269 PARAMETER Experiment Name: At_1mM_KNO3_L-vs-H_Roots_P Parameter: Age (day) Value: 7,10,12
  misc_feature: MA Experiment 20000269 PARAMETER Experiment Name: At_1mM_KNO3_L-vs-H_Roots_P Parameter: Organism Value: A. thaliana
  misc_feature: MA Experiment 20000269 PARAMETER Experiment Name: At_1mM_KNO3_L-vs-H_Roots_P Parameter: Plant Line Value: WS
  misc_feature: MA Experiment 20000269 PARAMETER Experiment Name: At_1mM_KNO3_L-vs-H_Roots_P Parameter: Timepoint (day) Value: 7,10,12
  misc_feature: MA Experiment 20000269 PARAMETER Experiment Name: At_1mM_KNO3_L-vs-H_Roots_P Parameter: Tissue Value: Roots
  misc_feature: MA Experiment 20000269 PARAMETER Experiment Name: At_1mM_KNO3_L-vs-H_Roots_P Parameter: Treatment Value: 1mM KNO3 vs. 50mM KNO3
  misc_feature: MA Experiment ID: 20000438 Result: Up-regulated in Transcription
  misc_feature: MA Experiment 20000438 PARAMETER Experiment Name: At_Shoots__P Parameter: Age (day) Value: 14
  misc_feature: MA Experiment 20000438 PARAMETER Experiment Name: At_Shoots__P Parameter: Tissue Value: Shoots vs. Whole Plant
  misc_feature: MA Experiment ID: 20000439 Result: Up-regulated in Transcription
  misc_feature: MA Experiment 20000439 PARAMETER Experiment Name: At_Roots__P Parameter: Age (day) Value: 14 vs. 21
  misc_feature: MA Experiment 20000439 PARAMETER Experiment Name: At_Roots__P Parameter: Organism Value: A. thaliana
  misc_feature: MA Experiment 20000439 PARAMETER Experiment Name: At_Roots__P Parameter: Tissue Value: Roots vs. Whole Plant
  misc_feature: MA Experiment ID: 20000451 Result: Down-regulated in Transcription
  misc_feature: MA Experiment 20000451 PARAMETER Experiment Name: At_CS6879_Shoots-Roots_P Parameter: Age (day) Value: 14
  misc_feature: MA Experiment 20000451 PARAMETER Experiment Name: At_CS6879_Shoots-Roots_P Parameter: Organism Value: A. thaliana
  misc_feature: MA Experiment 20000451 PARAMETER Experiment Name: At_CS6879_Shoots-Roots_P Parameter: Plant Line Value: CS6879 vs. WS
  misc_feature: MA Experiment 20000451 PARAMETER Experiment Name: At_CS6879_Shoots-Roots_P Parameter: Tissue Value: Roots
  misc_feature: MA Experiment ID: 20000452 Result: Down-regulated in Transcription
  misc_feature: MA Experiment 20000452 PARAMETER Experiment Name: At_CS6879_Shoots-Roots_P Parameter: Age (day) Value: 14
  misc_feature: MA Experiment 20000452 PARAMETER Experiment Name: At_CS6879_Shoots-Roots_P Parameter: Organism Value: A. thaliana
  misc_feature: MA Experiment 20000452 PARAMETER Experiment Name: At_CS6879_Shoots-Roots_P Parameter: Plant Line Value: CS6879 vs. WS
  misc_feature: MA Experiment 20000452 PARAMETER Experiment Name: At_CS6879_Shoots-Roots_P Parameter: Tissue Value: Shoots
  misc_feature: MA Experiment ID: 20000453 Result: Up-regulated in Transcription
  misc_feature: MA Experiment 20000453 PARAMETER Experiment Name: At_100uM_ABA_P Parameter: Age (day) Value: 15
  misc_feature: MA Experiment 20000453 PARAMETER Experiment Name: At_100uM_ABA_P Parameter: Organism Value: A. thaliana
  misc_feature: MA Experiment 20000453 PARAMETER Experiment Name: At_100uM_ABA_P Parameter: Plant Line Value: WS
  misc_feature: MA Experiment 20000453 PARAMETER Experiment Name: At_100uM_ABA_P Parameter: Timepoint (hr) Value: 24
  misc_feature: MA Experiment 20000453 PARAMETER Experiment Name: At_100uM_ABA_P Parameter: Tissue Value: Aerial
  misc_feature: MA Experiment 20000453 PARAMETER Experiment Name: At_100uM_ABA_P Parameter: Treatment Value: 100uM ABA vs. No Treatment
  misc_feature: MA Experiment ID: 20000455 Result: Up-regulated in Transcription
  misc_feature: MA Experiment 20000455 PARAMETER Experiment Name: At_100uM_ABA_P Parameter: Age (day) Value: 16
  misc_feature: MA Experiment 20000455 PARAMETER Experiment Name: At_100uM_ABA_P Parameter: Organism Value: A. thaliana
  misc_feature: MA Experiment 20000455 PARAMETER Experiment Name: At_100uM_ABA_P Parameter: Plant Line Value: WS
  misc_feature: MA Experiment 20000455 PARAMETER Experiment Name: At_100uM_ABA_P Parameter: Timepoint (hr) Value: 48
  misc_feature: MA Experiment 20000455 PARAMETER Experiment Name: At_100uM_ABA_P Parameter: Tissue Value: Aerial
  misc_feature: MA Experiment 20000455 PARAMETER Experiment Name: At_100uM_ABA_P Parameter: Treatment Value: 100uM ABA vs. No Treatment
  misc_feature: MA Experiment ID: 20000495 Result: Up-regulated in Transcription
  misc_feature: MA Experiment 20000495 PARAMETER Experiment Name: At_Guard_Cells_P Parameter: Harvest Date Value: 8/2/2002
  misc_feature: MA Experiment 20000495 PARAMETER Experiment Name: At_Guard_Cells_P Parameter: Organism Value: A. thaliana
  misc_feature: MA Experiment 20000495 PARAMETER Experiment Name: At_Guard_Cells_P Parameter: Tissue Value: Guard Cells vs. Leaves
  misc_feature: MA Experiment ID: 20000709 Result: Up-regulated in Transcription
  misc_feature: MA Experiment 20000709 PARAMETER Experiment Name: At_15mM_NH4NO3_L-to-H_P Parameter: Age (hr) Value: 14
  misc_feature: MA Experiment 20000709 PARAMETER Experiment Name: At_15mM_NH4NO3_L-to-H_P Parameter: Organism Value: A. thaliana
  misc_feature: MA Experiment 20000709 PARAMETER Experiment Name: At_15mM_NH4NO3_L-to-H_P Parameter: Plant Line Value: WS
  misc_feature: MA Experiment 20000709 PARAMETER Experiment Name: At_15mM_NH4NO3_L-to-H_P Parameter: Timepoint (hr) Value: 4
  misc_feature: MA Experiment 20000709 PARAMETER Experiment Name: At_15mM_NH4NO3_L-to-H_P Parameter: Tissue Value: Aerial
  misc_feature: MA Experiment 20000709 PARAMETER Experiment Name: At_15mM_NH4NO3_L-to-H_P Parameter: Treatment Value: 15mM NH4NO3 vs. 30mM Mannitol
  misc_feature: MA Experiment ID: 20001554 Result: Up-regulated in Transcription
  misc_feature: MA Experiment 20001554 PARAMETER Experiment Name: At_Drought_Soil_Dry_P Parameter: Age (day) Value: 21
  misc_feature: MA Experiment 20001554 PARAMETER Experiment Name: At_Drought_Soil_Dry_P Parameter: Organism Value: A. thaliana
  misc_feature: MA Experiment 20001554 PARAMETER Experiment Name: At_Drought_Soil_Dry_P Parameter: Plant Line Value: WS
  misc_feature: MA Experiment 20001554 PARAMETER Experiment Name: At_Drought_Soil_Dry_P Parameter: Post Timepoint (hr) Value: None
  misc_feature: MA Experiment 20001554 PARAMETER Experiment Name: At_Drought_Soil_Dry_P Parameter: Post-Treatment Value: None
  misc_feature: MA Experiment 20001554 PARAMETER Experiment Name: At_Drought_Soil_Dry_P Parameter: Timepoint (day) Value: 7
  misc_feature: MA Experiment 20001554 PARAMETER Experiment Name: At_Drought_Soil_Dry_P Parameter: Treatment Value: Drought vs. No Drought
  misc_feature: MA Experiment ID: 20001555 Result: Up-regulated in Transcription
  misc_feature: MA Experiment 20001555 PARAMETER Experiment Name: At_Drought_Soil_Dry_P Parameter: Age (day) Value: 24
  misc_feature: MA Experiment 20001555 PARAMETER Experiment Name: At_Drought_Soil_Dry_P Parameter: Organism Value: A. thaliana
  misc_feature: MA Experiment 20001555 PARAMETER Experiment Name: At_Drought_Soil_Dry_P Parameter: Plant Line Value: WS
  misc_feature: MA Experiment 20001555 PARAMETER Experiment Name: At_Drought_Soil_Dry_P Parameter: Post Timepoint (hr) Value: None
  misc_feature: MA Experiment 20001555 PARAMETER Experiment Name: At_Drought_Soil_Dry_P Parameter: Post-Treatment Value: None
  misc_feature: MA Experiment 20001555 PARAMETER Experiment Name: At_Drought_Soil_Dry_P Parameter: Timepoint (day) Value: 10
  misc_feature: MA Experiment 20001555 PARAMETER Experiment Name: At_Drought_Soil_Dry_P Parameter: Treatment Value: Drought vs. No Drought
  misc_feature: MA Experiment ID: 20001558 Result: Down-regulated in Transcription
  misc_feature: MA Experiment 20001558 PARAMETER Experiment Name: At_Drought_Soil_Dry_P Parameter: Age (day) Value: 27
  misc_feature: MA Experiment 20001558 PARAMETER Experiment Name: At_Drought_Soil_Dry_P Parameter: Organism Value: A. thaliana
  misc_feature: MA Experiment 20001558 PARAMETER Experiment Name: At_Drought_Soil_Dry_P Parameter: Plant Line Value: WS
  misc_feature: MA Experiment 20001558 PARAMETER Experiment Name: At_Drought_Soil_Dry_P Parameter: Post Timepoint (hr) Value: 6
  misc_feature: MA Experiment 20001558 PARAMETER Experiment Name: At_Drought_Soil_Dry_P Parameter: Post-Treatment Value: Re-Water vs. No Drought
  misc_feature: MA Experiment 20001558 PARAMETER Experiment Name: At_Drought_Soil_Dry_P Parameter: Timepoint (day) Value: 13
  misc_feature: MA Experiment 20001558 PARAMETER Experiment Name: At_Drought_Soil_Dry_P Parameter: Treatment Value: Drought vs. No Drought
atcacttacttaacatactaagagagttattagaacttgcaaaaaatggcttccaaggctttgattctgttaggtctcttctcagttcttctcgtcgtctccgaagtgtctgccgcaaggcaatcgggcatggtgaagccagagagtgaggaaactgtgcaacctgaaggttatggcggtggccacggaggacatggtggtcacggagggggaggaggccacggacatggaggacacaacggaggagggggccacggacttgacggatacggaggaggtggaggacactatggaggaggtggaggacactacggaggaggtggaggacactacggaggaggtggaggacactacggaggaggtggccacggggctaaacgaacctgttcagactaagccgggtgtttaaaactatataatatcttcactaccatgcatgattgcatatatatatatacgcttatgtattatctatatgcctataaataaaccatggtgagtttgtaacgcagtgccttcagaaatgttcggaataaatttccataatatt

SEQ ID NO: 26786 - protein, 116 aa, Arabidopsis thaliana
  peptide (1)..(116): Ceres Seq. ID no. 12422863
  misc_feature (38)..(109): Pfam Name: Herpesvirus latent membrane protein 1 (LMP1) Pfam Description: Herpesvirus latent membrane protein 1 (LMP1)
  misc_feature (1)..(115): Homolog of NCBI NO: 15224559 NR Description: putative glycine-rich protein; protein id:
  misc_feature (1)..(107): Homolog of NCBI NO: 81625 NR Description: glycine-rich protein 3 precursor - Arabidopsis
  misc_feature (1)..(115): Homolog of NCBI NO: 18266043 NR Description: glycine-rich protein [Brassica oleracea]
  misc_feature (1)..(107): Homolog of NCBI NO: 259447 NR Description: glycine-rich protein; atGRP [Arabidopsis thaliana]
  misc_feature (1)..(116): Homolog of NCBI NO: 15224548 NR Description: putative glycine-rich protein
  misc_feature (1)..(109): Homolog of NCBI NO: 9957568 NR Description: antimicrobial peptide shep-GRP [Capsella
  misc_feature (1)..(108): Homolog of NCBI NO: 15224547 NR Description: putative glycine-rich protein; protein id:
  misc_feature (1)..(109): Homolog of NCBI NO: 21536606 NR Description: putative glycine-rich protein [Arabidopsis
  misc_feature (1)..(109): Homolog of NCBI NO: 15224540 NR Description: putative glycine-rich protein
  misc_feature (1)..(107): Homolog of NCBI NO: 30678191 NR Description: glycine-rich protein [Arabidopsis thaliana]
MASKALILLGLFSVLLVVSEVSAARQSGMVKPESEETVQPEGYGGGHGGHGGHGGGGGHGHGGHNGGGGHGLDGYGGGGGHYGGGGGHYGGGGGHYGGGGGHYGGGGHGAKRTCSD

SEQ ID NO: 26787 - protein, 88 aa, Arabidopsis thaliana
  peptide (1)..(88): Ceres Seq. ID no. 12422864
  misc_feature (10)..(81): Pfam Name: Herpesvirus latent membrane protein 1 (LMP1) Pfam Description: Herpesvirus latent membrane protein 1 (LMP1)
  misc_feature (1)..(87): Homolog of NCBI NO: 15224559 NR Description: putative glycine-rich protein; protein id:
  misc_feature (1)..(79): Homolog of NCBI NO: 81625 NR Description: glycine-rich protein 3 precursor - Arabidopsis
  misc_feature (1)..(87): Homolog of NCBI NO: 18266043 NR Description: glycine-rich protein [Brassica oleracea]
  misc_feature (1)..(79): Homolog of NCBI NO: 259447 NR Description: glycine-rich protein; atGRP [Arabidopsis thaliana]
  misc_feature (1)..(88): Homolog of NCBI NO: 15224548 NR Description: putative glycine-rich protein
  misc_feature (1)..(81): Homolog of NCBI NO: 9957568 NR Description: antimicrobial peptide shep-GRP [Capsella
  misc_feature (1)..(80): Homolog of NCBI NO: 15224547 NR Description: putative glycine-rich protein; protein id:
  misc_feature (1)..(81): Homolog of NCBI NO: 21536606 NR Description: putative glycine-rich protein [Arabidopsis
  misc_feature (1)..(81): Homolog of NCBI NO: 15224540 NR Description: putative glycine-rich protein
  misc_feature (1)..(79): Homolog of NCBI NO: 30678191 NR Description: glycine-rich protein [Arabidopsis thaliana]
MVKPESEETVQPEGYGGGHGGHGGHGGGGGHGHGGHNGGGGHGLDGYGGGGGHYGGGGGHYGGGGGHYGGGGGHYGGGGHGAKRTCSD

SEQ ID NO: 26788 - protein, 78 aa, Arabidopsis thaliana
  peptide (1)..(78): Ceres Seq. ID no. 12422865
  misc_feature (1)..(77): Pfam Name: Transferrin binding protein-like solute binding protein Pfam Description: Transferrin binding protein-like solute binding
MAVATEDMVVTEGEEATDMEDTTEEGATDLTDTEEVEDTMEEVEDTTEEVEDTTEEVEDTTEEVATGLNEPVQTKPGV

SEQ ID NO: 26789 - DNA, 631 bp, Arabidopsis thaliana
  misc_feature (1)..(631): Ceres Seq. ID no. 12333200
  misc_feature: MA Experiment ID: 108434 Result: Up-regulated in Transcription
  misc_feature: MA Experiment 108434 PARAMETER Experiment Name: At_Root_Tips_cDNA_P Parameter: Tissue Value: Root Tips
  misc_feature: MA Experiment ID: 108462 Result: Down-regulated in Transcription
  misc_feature: MA Experiment 108462 PARAMETER Experiment Name: At_Germinating_Seeds_cDNA_P Parameter: Age (day) Value: 2 vs. 0
  misc_feature: MA Experiment 108462 PARAMETER Experiment Name: At_Germinating_Seeds_cDNA_P Parameter: Tissue Value: Germinating Seeds
  misc_feature: MA Experiment ID: 108463 Result: Down-regulated in Transcription
  misc_feature: MA Experiment 108463 PARAMETER Experiment Name: At_Germinating_Seeds_cDNA_P Parameter: Age (day) Value: 3 vs. 0
  misc_feature: MA Experiment 108463 PARAMETER Experiment Name: At_Germinating_Seeds_cDNA_P Parameter: Tissue Value: Germinating Seeds
  misc_feature: MA Experiment ID: 108464 Result: Down-regulated in Transcription
  misc_feature: MA Experiment 108464 PARAMETER Experiment Name: At_Germinating_Seeds_cDNA_P Parameter: Age (day) Value: 4 vs. 0
  misc_feature: MA Experiment 108464 PARAMETER Experiment Name: At_Germinating_Seeds_cDNA_P Parameter: Tissue Value: Germinating Seeds
  misc_feature: MA Experiment ID: 108488 Result: Down-regulated in Transcription
  misc_feature: MA Experiment ID: 108572 Result: Down-regulated in Transcription
  misc_feature: MA Experiment 108572 PARAMETER Experiment Name: At_Drought_cDNA_P Parameter: Timepoint (hr) Value: 1
  misc_feature: MA Experiment 108572 PARAMETER Experiment Name: At_Drought_cDNA_P Parameter: Tissue Value: Aerial
  misc_feature: MA Experiment 108572 PARAMETER Experiment Name: At_Drought_cDNA_P Parameter: Treatment Value: Drought vs. No Drought
  misc_feature: MA Experiment ID: 108607 Result: Down-regulated in Transcription
  misc_feature: MA Experiment 108607 PARAMETER Experiment Name: At_100uM_ABA_cDNA_P Parameter: Timepoint (hr) Value: 4
  misc_feature: MA Experiment 108607 PARAMETER Experiment Name: At_100uM_ABA_cDNA_P Parameter: Tissue Value: Aerial
  misc_feature: MA Experiment 108607 PARAMETER Experiment Name: At_100uM_ABA_cDNA_P Parameter: Treatment Value: 100uM ABA vs. No Treatment
  misc_feature: MA Experiment ID: 20000070 Result: Up-regulated in Transcription
  misc_feature: MA Experiment 20000070 PARAMETER Experiment Name: At_100uM_ABA_Mutants_cDNA_P Parameter: Plant Line Value: CS24
  misc_feature: MA Experiment 20000070 PARAMETER Experiment Name: At_100uM_ABA_Mutants_cDNA_P Parameter: Timepoint (hr) Value: 6
  misc_feature: MA Experiment 20000070 PARAMETER Experiment Name: At_100uM_ABA_Mutants_cDNA_P Parameter: Tissue Value: Aerial
  misc_feature: MA Experiment 20000070 PARAMETER Experiment Name: At_100uM_ABA_Mutants_cDNA_P Parameter: Treatment Value: 100uM ABA vs. No Treatment
  misc_feature: MA Experiment ID: 20000086 Result: Up-regulated in Transcription
  misc_feature: MA Experiment 20000086 PARAMETER Experiment Name: At_100uM_ABA_Mutants_cDNA_P Parameter: Plant Line Value: CS22
  misc_feature: MA Experiment 20000086 PARAMETER Experiment Name: At_100uM_ABA_Mutants_cDNA_P Parameter: Timepoint (hr) Value: 6
  misc_feature: MA Experiment 20000086 PARAMETER Experiment Name: At_100uM_ABA_Mutants_cDNA_P Parameter: Tissue Value: Aerial
  misc_feature: MA Experiment 20000086 PARAMETER Experiment Name: At_100uM_ABA_Mutants_cDNA_P Parameter: Treatment Value: 100uM ABA vs. No Treatment
  misc_feature: MA Experiment ID: 20000087 Result: Up-regulated in Transcription
  misc_feature: MA Experiment 20000087 PARAMETER Experiment Name: At_100uM_ABA_Mutants_cDNA_P Parameter: Plant Line Value: WS
  misc_feature: MA Experiment 20000087 PARAMETER Experiment Name: At_100uM_ABA_Mutants_cDNA_P Parameter: Timepoint (hr) Value: 6
  misc_feature: MA Experiment 20000087 PARAMETER Experiment Name: At_100uM_ABA_Mutants_cDNA_P Parameter: Tissue Value: Aerial
  misc_feature: MA Experiment 20000087 PARAMETER Experiment Name: At_100uM_ABA_Mutants_cDNA_P Parameter: Treatment Value: 100uM ABA vs. No Treatment
  misc_feature: MA Experiment ID: 20000088 Result: Up-regulated in Transcription
  misc_feature: MA Experiment 20000088 PARAMETER Experiment Name: At_100uM_ABA_Mutants_cDNA_P Parameter: Plant Line Value: Landsberg
  misc_feature: MA Experiment 20000088 PARAMETER Experiment Name: At_100uM_ABA_Mutants_cDNA_P Parameter: Timepoint (hr) Value: 6
  misc_feature: MA Experiment 20000088 PARAMETER Experiment Name: At_100uM_ABA_Mutants_cDNA_P Parameter: Tissue Value: Aerial
  misc_feature: MA Experiment 20000088 PARAMETER Experiment Name: At_100uM_ABA_Mutants_cDNA_P Parameter: Treatment Value: 100uM ABA vs. No Treatment
  misc_feature: MA Experiment ID: 20000090 Result: Up-regulated in Transcription
  misc_feature: MA Experiment ID: 20000213 Result: Up-regulated in Transcription
  misc_feature: MA Experiment 20000213 PARAMETER Experiment Name: At_4deg_Cold_P Parameter: Timepoint (hr) Value: 2
  misc_feature: MA Experiment ID: 20000437 Result: Up-regulated in Transcription
  misc_feature: MA Experiment 20000437 PARAMETER Experiment Name: At_Drought_P Parameter: Age (day) Value: 8
  misc_feature: MA Experiment 20000437 PARAMETER Experiment Name: At_Drought_P Parameter: Organism Value: A. thaliana
  misc_feature: MA Experiment 20000437 PARAMETER Experiment Name: At_Drought_P Parameter: Plant Line Value: WS
  misc_feature: MA Experiment 20000437 PARAMETER Experiment Name: At_Drought_P Parameter: Timepoint (hr) Value: 24
  misc_feature: MA Experiment 20000437 PARAMETER Experiment Name: At_Drought_P Parameter: Tissue Value: Whole Plant
  misc_feature: MA Experiment 20000437 PARAMETER Experiment Name: At_Drought_P Parameter: Treatment Value: Drought vs. No Drought
  misc_feature: MA Experiment ID: 20000438 Result: Down-regulated in Transcription
  misc_feature: MA Experiment 20000438 PARAMETER Experiment Name: At_Shoots__P Parameter: Age (day) Value: 14
  misc_feature: MA Experiment 20000438 PARAMETER Experiment Name: At_Shoots__P Parameter: Tissue Value: Shoots vs. Whole Plant
  misc_feature: MA Experiment ID: 20001451 Result: Up-regulated in Transcription
  misc_feature: MA Experiment 20001451 PARAMETER Experiment Name: At_Far-red-induction_P Parameter: Age (day) Value: 7
  misc_feature: MA Experiment 20001451 PARAMETER Experiment Name: At_Far-red-induction_P Parameter: Light Value: Far-red vs. White
  misc_feature: MA Experiment 20001451 PARAMETER Experiment Name: At_Far-red-induction_P Parameter: Organism Value: A. thaliana
  misc_feature: MA Experiment 20001451 PARAMETER Experiment Name: At_Far-red-induction_P Parameter: Plant Line Value: Columbia
  misc_feature: MA Experiment 20001451 PARAMETER Experiment Name: At_Far-red-induction_P Parameter: Timepoint (hr) Value: 24
  misc_feature: MA Experiment 20001451 PARAMETER Experiment Name: At_Far-red-induction_P Parameter: Tissue Value: Whole Plant
  misc_feature: MA Experiment ID: 20001557 Result: Up-regulated in Transcription
  misc_feature: MA Experiment 20001557 PARAMETER Experiment Name: At_Drought_Soil_Dry_P Parameter: Age (day) Value: 27
  misc_feature: MA Experiment 20001557 PARAMETER Experiment Name: At_Drought_Soil_Dry_P Parameter: Organism Value: A. thaliana
  misc_feature: MA Experiment 20001557 PARAMETER Experiment Name: At_Drought_Soil_Dry_P Parameter: Plant Line Value: WS
  misc_feature: MA Experiment 20001557 PARAMETER Experiment Name: At_Drought_Soil_Dry_P Parameter: Post Timepoint (hr) Value: 3
  misc_feature: MA Experiment 20001557 PARAMETER Experiment Name: At_Drought_Soil_Dry_P Parameter: Post-Treatment Value: Re-Water vs. No Drought
  misc_feature: MA Experiment 20001557 PARAMETER Experiment Name: At_Drought_Soil_Dry_P Parameter: Timepoint (day) Value: 13
  misc_feature: MA Experiment 20001557 PARAMETER Experiment Name: At_Drought_Soil_Dry_P Parameter: Treatment Value: Drought vs. No Drought
ctacacatctcactgctcactactctcactgtaatcccttagatcttcttttcaaatttcaatggcgtccggtgatgttgagtatcggtgcttcgttggaggtctagcatgggccactgatgacagagctcttgagactgccttcgctcaatacggcgacgttattgattccaagatcattaacgatcgtgagactggaagatcaaggggattcggattcgtcaccttcaaggatgagaaagccatgaaggatgcgattgagggaatgaacggacaagatctcgatggccgtagcatcactgttaacgaggctcagtcacgaggaagaggtggtggtggcggaagctacggtggtggaagacgtgagggaggaggaggatacggtggtggtgaaggaggaggttacggaggaagcggtggtggtggaggatggtaattcctttaattaggtttgggattaccaatgaatgttctctctctcgcttgttatgcttctacttggttttgtgtgttctctattttgttctggttctgctttagatttgatgtaacagttcgtgattaggtattttggtatctggaaacgtaatgttaagtcacttgtcattctctaaataacaaatttcttcgg

SEQ ID NO: 26790 - protein, 124 aa, Arabidopsis thaliana
  peptide (1)..(124): Ceres Seq. ID no. 12333201
  misc_feature (10)..(81): Pfam Name: RNA recognition motif. (a.k.a. RRM, RBD, or RNP domain) Pfam Description: RNA recognition motif. (a.k.a. RRM, RBD, or RNP
  misc_feature (1)..(123): Homolog of NCBI NO: 6911144 NR Description: putative glycine-rich RNA binding protein 3
  misc_feature (1)..(123): Homolog of NCBI NO: 6911146 NR Description: putative glycine-rich RNA-binding protein 2
  misc_feature (5)..(123): Homolog of NCBI NO: 2226370 NR Description: RNA-binding protein [Nicotiana glutinosa]
  misc_feature (1)..(123): Homolog of NCBI NO: 2267567 NR Description: glycine-rich RNA binding protein 1 [Pelargonium x
  misc_feature (5)..(124): Homolog of NCBI NO: 2119044 NR Description: glycine-rich RNA-binding protein RGP-1b - wood
  misc_feature (1)..(124): Homolog of NCBI NO: 1346181 NR Description: Glycine-rich RNA-binding protein GRP2A
  misc_feature (1)..(124): Homolog of NCBI NO: 1346180 NR Description: Glycine-rich RNA-binding protein GRP1A
  misc_feature (1)..(123): Homolog of NCBI NO: 21553354 NR Description: glycine-rich RNA binding protein 7 [Arabidopsis
  misc_feature (1)..(123): Homolog of NCBI NO: 15226605 NR Description: glycine-rich RNA binding protein AtGRP7
  misc_feature (1)..(123): Homolog of NCBI NO: 30681492 NR Description: glycine-rich RNA-binding protein (AtGRP7)
MASGDVEYRCFVGGLAWATDDRALETAFAQYGDVIDSKIINDRETGRSRGFGFVTFKDEKAMKDAIEGMNGQDLDGRSITVNEAQSRGRGGGGGSYGGGRREGGGGYGGGEGGGYGGSGGGGGW

SEQ ID NO: 26791 - protein, 63 aa, Arabidopsis thaliana
  peptide (1)..(63): Ceres Seq. ID no. 12333202
  misc_feature (1)..(62): Homolog of NCBI NO: 6911144 NR Description: putative glycine-rich RNA binding protein 3
  misc_feature (1)..(62): Homolog of NCBI NO: 6911146 NR Description: putative glycine-rich RNA-binding protein 2
  misc_feature (1)..(62): Homolog of NCBI NO: 2226370 NR Description: RNA-binding protein [Nicotiana glutinosa]
  misc_feature (1)..(62): Homolog of NCBI NO: 2267567 NR Description: glycine-rich RNA binding protein 1 [Pelargonium x
  misc_feature (1)..(63): Homolog of NCBI NO: 2119044 NR Description: glycine-rich RNA-binding protein RGP-1b - wood
  misc_feature (1)..(63): Homolog of NCBI NO: 1346181 NR Description: Glycine-rich RNA-binding protein GRP2A
  misc_feature (1)..(63): Homolog of NCBI NO: 1346180 NR Description: Glycine-rich RNA-binding protein GRP1A
  misc_feature (1)..(62): Homolog of NCBI NO: 21553354 NR Description: glycine-rich RNA binding protein 7 [Arabidopsis
  misc_feature (1)..(62): Homolog of NCBI NO: 15226605 NR Description: glycine-rich RNA binding protein AtGRP7
  misc_feature (1)..(62): Homolog of NCBI NO: 30681492 NR Description: glycine-rich RNA-binding protein (AtGRP7)
MKDAIEGMNGQDLDGRSITVNEAQSRGRGGGGGSYGGGRREGGGGYGGGEGGGYGGSGGGGGW

SEQ ID NO: 26792 - DNA, 1215 bp, Arabidopsis thaliana
  misc_feature (1)..(1215): Ceres Seq. ID no. 13488695
  misc_feature: MA Experiment ID: 108435 Result: Down-regulated in Transcription
  misc_feature: MA Experiment 108435 PARAMETER Experiment Name: At_stm_Mutants_cDNA_P Parameter: Plant Line Value: wt Landsburg vs stm
  misc_feature: MA Experiment 108435 PARAMETER Experiment Name: At_stm_Mutants_cDNA_P Parameter: Tissue Value: Shoot Apical Meristem Region
  misc_feature: MA Experiment ID: 108461 Result: Up-regulated in Transcription
  misc_feature: MA Experiment 108461 PARAMETER Experiment Name: At_Germinating_Seeds_cDNA_P Parameter: Age (day) Value: 1 vs. 0
  misc_feature: MA Experiment 108461 PARAMETER Experiment Name: At_Germinating_Seeds_cDNA_P Parameter: Tissue Value: Germinating Seeds
  misc_feature: MA Experiment ID: 108462 Result: Up-regulated in Transcription
  misc_feature: MA Experiment 108462 PARAMETER Experiment Name: At_Germinating_Seeds_cDNA_P Parameter: Age (day) Value: 2 vs. 0
  misc_feature: MA Experiment 108462 PARAMETER Experiment Name: At_Germinating_Seeds_cDNA_P Parameter: Tissue Value: Germinating Seeds
  misc_feature: MA Experiment ID: 108463 Result: Up-regulated in Transcription
  misc_feature: MA Experiment 108463 PARAMETER Experiment Name: At_Germinating_Seeds_cDNA_P Parameter: Age (day) Value: 3 vs. 0
  misc_feature: MA Experiment 108463 PARAMETER Experiment Name: At_Germinating_Seeds_cDNA_P Parameter: Tissue Value: Germinating Seeds
  misc_feature: MA Experiment ID: 108464 Result: Up-regulated in Transcription
  misc_feature: MA Experiment 108464 PARAMETER Experiment Name: At_Germinating_Seeds_cDNA_P Parameter: Age (day) Value: 4 vs. 0
  misc_feature: MA Experiment 108464 PARAMETER Experiment Name: At_Germinating_Seeds_cDNA_P Parameter: Tissue Value: Germinating Seeds
  misc_feature: MA Experiment ID: 108474 Result: Up-regulated in Transcription
  misc_feature: MA Experiment 108474 PARAMETER Experiment Name: At_Drought_Flowers_cDNA_P Parameter: Timepoint (hr) Value: null
  misc_feature: MA Experiment 108474 PARAMETER Experiment Name: At_Drought_Flowers_cDNA_P Parameter: Treatment Value: Drought vs. No Drought
  misc_feature: MA Experiment ID: 108573 Result: Down-regulated in Transcription
  misc_feature: MA Experiment 108573 PARAMETER Experiment Name: At_Drought_cDNA_P Parameter: Timepoint (hr) Value: 6
  misc_feature: MA Experiment 108573 PARAMETER Experiment Name: At_Drought_cDNA_P Parameter: Tissue Value: Aerial
  misc_feature: MA Experiment 108573 PARAMETER Experiment Name: At_Drought_cDNA_P Parameter: Treatment Value: Drought vs. No Drought
  misc_feature: MA Experiment ID: 108576 Result: Down-regulated in Transcription
  misc_feature: MA Experiment 108576 PARAMETER Experiment Name: At_42deg_Heat_cDNA_P Parameter: Temperature (deg C) Value: 42 vs. 22
  misc_feature: MA Experiment 108576 PARAMETER Experiment Name: At_42deg_Heat_cDNA_P Parameter: Timepoint (hr) Value: 1
  misc_feature: MA Experiment 108576 PARAMETER Experiment Name: At_42deg_Heat_cDNA_P Parameter: Tissue Value: Aerial
  misc_feature: MA Experiment ID: 108579 Result: Down-regulated in Transcription
  misc_feature: MA Experiment 108579 PARAMETER Experiment Name: At_4deg_Cold_cDNA_P Parameter: Temperature (deg C) Value: 4 vs. 22
  misc_feature: MA Experiment 108579 PARAMETER Experiment Name: At_4deg_Cold_cDNA_P Parameter: Timepoint (hr) Value: 6
  misc_feature: MA Experiment 108579 PARAMETER Experiment Name: At_4deg_Cold_cDNA_P Parameter: Tissue Value: Aerial
  misc_feature: MA Experiment ID: 108585 Result: Down-regulated in Transcription
  misc_feature: MA Experiment 108585 PARAMETER Experiment Name: At_5mM_NaNP_cDNA_P Parameter: Timepoint (hr) Value: 6
  misc_feature: MA Experiment 108585 PARAMETER Experiment Name: At_5mM_NaNP_cDNA_P Parameter: Tissue Value: Aerial
  misc_feature: MA Experiment 108585 PARAMETER Experiment Name: At_5mM_NaNP_cDNA_P Parameter: Treatment Value: null
  misc_feature: MA Experiment ID: 108595 Result: Down-regulated in Transcription
  misc_feature: MA Experiment 108595 PARAMETER Experiment Name: At_Ler-pi_Ovule_cDNA_P Parameter: Plant Line Value: null
  misc_feature: MA Experiment ID: 20000069 Result: Down-regulated in Transcription
  misc_feature: MA Experiment 20000069 PARAMETER Experiment Name: At_100uM_ABA_Mutants_cDNA_P Parameter: Plant Line Value: CS23
  misc_feature: MA Experiment 20000069 PARAMETER Experiment Name: At_100uM_ABA_Mutants_cDNA_P Parameter: Timepoint (hr) Value: 6
  misc_feature: MA Experiment 20000069 PARAMETER Experiment Name: At_100uM_ABA_Mutants_cDNA_P Parameter: Tissue Value: Aerial
  misc_feature: MA Experiment 20000069 PARAMETER Experiment Name: At_100uM_ABA_Mutants_cDNA_P Parameter: Treatment Value: 100uM ABA vs. No Treatment
  misc_feature: MA Experiment ID: 20000086 Result: Down-regulated in Transcription
  misc_feature: MA Experiment 20000086 PARAMETER Experiment Name: At_100uM_ABA_Mutants_cDNA_P Parameter: Plant Line Value: CS22
  misc_feature: MA Experiment 20000086 PARAMETER Experiment Name: At_100uM_ABA_Mutants_cDNA_P Parameter: Timepoint (hr) Value: 6
  misc_feature: MA Experiment 20000086 PARAMETER Experiment Name: At_100uM_ABA_Mutants_cDNA_P Parameter: Tissue Value: Aerial
  misc_feature: MA Experiment 20000086 PARAMETER Experiment Name: At_100uM_ABA_Mutants_cDNA_P Parameter: Treatment Value: 100uM ABA vs. No Treatment
  misc_feature: MA Experiment ID: 20000087 Result: Down-regulated in Transcription
  misc_feature: MA Experiment 20000087 PARAMETER Experiment Name: At_100uM_ABA_Mutants_cDNA_P Parameter: Plant Line Value: WS
  misc_feature: MA Experiment 20000087 PARAMETER Experiment Name: At_100uM_ABA_Mutants_cDNA_P Parameter: Timepoint (hr) Value: 6
  misc_feature: MA Experiment 20000087 PARAMETER Experiment Name: At_100uM_ABA_Mutants_cDNA_P Parameter: Tissue Value: Aerial
  misc_feature: MA Experiment 20000087 PARAMETER Experiment Name: At_100uM_ABA_Mutants_cDNA_P Parameter: Treatment Value: 100uM ABA vs. No Treatment
  misc_feature: MA Experiment ID: 20000089 Result: Down-regulated in Transcription
  misc_feature: MA Experiment ID: 20000093 Result: Down-regulated in Transcription
  misc_feature: MA Experiment 20000093 PARAMETER Experiment Name: At_42deg_Heat_cDNA_P Parameter: Temperature (deg C) Value: 42 vs. 22
  misc_feature: MA Experiment 20000093 PARAMETER Experiment Name: At_42deg_Heat_cDNA_P Parameter: Timepoint (hr) Value: 0.5
  misc_feature: MA Experiment 20000093 PARAMETER Experiment Name: At_42deg_Heat_cDNA_P Parameter: Tissue Value: Aerial
  misc_feature: MA Experiment ID: 20000117 Result: Down-regulated in Transcription
  misc_feature: MA Experiment 20000117 PARAMETER Experiment Name: At_100uM_ABA_Mutants_cDNA_P Parameter: Plant Line Value: Columbia
  misc_feature: MA Experiment 20000117 PARAMETER Experiment Name: At_100uM_ABA_Mutants_cDNA_P Parameter: Timepoint (hr) Value: 6
  misc_feature: MA Experiment 20000117 PARAMETER Experiment Name: At_100uM_ABA_Mutants_cDNA_P Parameter: Tissue Value: Aerial
  misc_feature: MA Experiment 20000117 PARAMETER Experiment Name: At_100uM_ABA_Mutants_cDNA_P Parameter: Treatment Value: 100uM ABA vs. No Treatment
  misc_feature: MA Experiment ID: 20000144 Result: Down-regulated in Transcription
  misc_feature: MA Experiment 20000144 PARAMETER Experiment Name: At_42deg_Heat_cDNA_P Parameter: Temperature (deg C) Value: 42 vs. 22
  misc_feature: MA Experiment 20000144 PARAMETER Experiment Name: At_42deg_Heat_cDNA_P Parameter: Timepoint (hr) Value: 1
  misc_feature: MA Experiment 20000144 PARAMETER Experiment Name: At_42deg_Heat_cDNA_P Parameter: Tissue Value: Aerial
  misc_feature: MA Experiment ID: 20000171 Result: Down-regulated in Transcription
  misc_feature: MA Experiment 20000171 PARAMETER Experiment Name: At_42deg_Heat_P Parameter: Age (day) Value: 14
  misc_feature: MA Experiment 20000171 PARAMETER Experiment Name: At_42deg_Heat_P Parameter: Organism Value: A. thaliana
  misc_feature: MA Experiment 20000171 PARAMETER Experiment Name: At_42deg_Heat_P Parameter: Plant Line Value: WS
  misc_feature: MA Experiment 20000171 PARAMETER Experiment Name: At_42deg_Heat_P Parameter: Temperature (deg C) Value: 42 vs. 22
  misc_feature: MA Experiment 20000171 PARAMETER Experiment Name: At_42deg_Heat_P Parameter: Timepoint (hr) Value: 1
  misc_feature: MA Experiment 20000171 PARAMETER Experiment Name: At_42deg_Heat_P Parameter: Tissue Value: Aerial
  misc_feature: MA Experiment ID: 20000173 Result: Down-regulated in Transcription
  misc_feature: MA Experiment 20000173 PARAMETER Experiment Name: At_42deg_Heat_P Parameter: Age (day) Value: 14
  misc_feature: MA Experiment 20000173 PARAMETER Experiment Name: At_42deg_Heat_P Parameter: Organism Value: A. thaliana
  misc_feature: MA Experiment 20000173 PARAMETER Experiment Name: At_42deg_Heat_P Parameter: Plant Line Value: WS
  misc_feature: MA Experiment 20000173 PARAMETER Experiment Name: At_42deg_Heat_P Parameter: Temperature (deg C) Value: 42 vs. 22
  misc_feature: MA Experiment 20000173 PARAMETER Experiment Name: At_42deg_Heat_P Parameter: Timepoint (hr) Value: 6
  misc_feature: MA Experiment 20000173 PARAMETER Experiment Name: At_42deg_Heat_P Parameter: Tissue Value: Aerial
  misc_feature: MA Experiment ID: 20000180 Result: Up-regulated in Transcription
  misc_feature: MA Experiment 20000180 PARAMETER Experiment Name: At_Germinating_Seeds_P Parameter: Age (hr) Value: 24 vs. 0
  misc_feature: MA Experiment 20000180 PARAMETER Experiment Name: At_Germinating_Seeds_P Parameter: Tissue Value: Germinating Seeds
  misc_feature: MA Experiment ID: 20000182 Result: Down-regulated in Transcription
  misc_feature: MA Experiment 20000182 PARAMETER Experiment Name: At_2mM_SA_P Parameter: Age (day) Value: 14
  misc_feature: MA Experiment 20000182 PARAMETER Experiment Name: At_2mM_SA_P Parameter: Organism Value: A. thaliana
  misc_feature: MA Experiment 20000182 PARAMETER Experiment Name: At_2mM_SA_P Parameter: Plant Line Value: WS
  misc_feature: MA Experiment 20000182 PARAMETER Experiment Name: At_2mM_SA_P Parameter: Timepoint (hr) Value: 6
  misc_feature: MA Experiment 20000182 PARAMETER Experiment Name: At_2mM_SA_P Parameter: Tissue Value: Aerial
  misc_feature: MA Experiment 20000182 PARAMETER Experiment Name: At_2mM_SA_P Parameter: Treatment Value: 2mM SA vs. No Treatment
  misc_feature: MA Experiment ID: 20000436 Result: Down-regulated in Transcription
  misc_feature: MA Experiment 20000436 PARAMETER Experiment Name: At_Drought_P Parameter: Age (day) Value: 7
  misc_feature: MA Experiment 20000436 PARAMETER Experiment Name: At_Drought_P Parameter: Organism Value: A. thaliana
  misc_feature: MA Experiment 20000436 PARAMETER Experiment Name: At_Drought_P Parameter: Plant Line Value: WS
  misc_feature: MA Experiment 20000436 PARAMETER Experiment Name: At_Drought_P Parameter: Timepoint (hr) Value: 12
  misc_feature: MA Experiment 20000436 PARAMETER Experiment Name: At_Drought_P Parameter: Tissue Value: Whole Plant
  misc_feature: MA Experiment 20000436 PARAMETER Experiment Name: At_Drought_P Parameter: Treatment Value: Drought vs. No Drought
  misc_feature: MA Experiment ID: 20000437 Result: Down-regulated in Transcription
  misc_feature: MA Experiment 20000437 PARAMETER Experiment Name: At_Drought_P Parameter: Age (day) Value: 8
  misc_feature: MA Experiment 20000437 PARAMETER Experiment Name: At_Drought_P Parameter: Organism Value: A. thaliana
  misc_feature: MA Experiment 20000437 PARAMETER Experiment Name: At_Drought_P Parameter: Plant Line Value: WS
  misc_feature: MA Experiment 20000437 PARAMETER Experiment Name: At_Drought_P Parameter: Timepoint (hr) Value: 24
  misc_feature: MA Experiment 20000437 PARAMETER Experiment Name: At_Drought_P Parameter: Tissue Value: Whole Plant
  misc_feature: MA Experiment 20000437 PARAMETER Experiment Name: At_Drought_P Parameter: Treatment Value: Drought vs. No Drought
  misc_feature: MA Experiment ID: 20000438 Result: Up-regulated in Transcription
  misc_feature: MA Experiment 20000438 PARAMETER Experiment Name: At_Shoots__P Parameter: Age (day) Value: 14
  misc_feature: MA Experiment 20000438 PARAMETER Experiment Name: At_Shoots__P Parameter: Tissue Value: Shoots vs. Whole Plant
  misc_feature: MA Experiment ID: 20000573 Result: Down-regulated in Transcription
  misc_feature: MA Experiment 20000573 PARAMETER Experiment Name: At_100uM_ABA_Mutants__P Parameter: Organism Value: A. thaliana
  misc_feature: MA Experiment 20000573 PARAMETER Experiment Name: At_100uM_ABA_Mutants__P Parameter: Plant Line Value: CS22 vs. Ler wt
  misc_feature: MA Experiment 20000573 PARAMETER Experiment Name: At_100uM_ABA_Mutants__P Parameter: Timepoint (hr) Value: N/A
  misc_feature: MA Experiment 20000573 PARAMETER Experiment Name: At_100uM_ABA_Mutants__P Parameter: Tissue Value: Whole Plant
  misc_feature: MA Experiment 20000573 PARAMETER Experiment Name: At_100uM_ABA_Mutants__P Parameter: Treatment Value: None
  misc_feature: MA Experiment ID: 20000574 Result: Down-regulated in Transcription
  misc_feature: MA Experiment 20000574 PARAMETER Experiment Name: At_100uM_ABA_Mutants__P Parameter: Organism Value: A. thaliana
  misc_feature: MA Experiment 20000574 PARAMETER Experiment Name: At_100uM_ABA_Mutants__P Parameter: Plant Line Value: CS23 vs. Ler wt
  misc_feature: MA Experiment 20000574 PARAMETER Experiment Name: At_100uM_ABA_Mutants__P Parameter: Timepoint (hr) Value: N/A
  misc_feature: MA Experiment 20000574 PARAMETER Experiment Name: At_100uM_ABA_Mutants__P Parameter: Tissue Value: Whole Plant
  misc_feature: MA Experiment 20000574 PARAMETER Experiment Name: At_100uM_ABA_Mutants__P Parameter: Treatment Value: None
  misc_feature: MA Experiment ID: 20000794 Result: Down-regulated in Transcription
  misc_feature: MA Experiment 20000794 PARAMETER Experiment Name: At_Petals_P Parameter: Age (day) Value: 23-25 days
  misc_feature: MA Experiment 20000794 PARAMETER Experiment Name: At_Petals_P Parameter: Plant Line Value: WS
  misc_feature: MA Experiment 20000794 PARAMETER Experiment Name: At_Petals_P Parameter: Tissue Value: Petals vs. Whole plant
  misc_feature: MA Experiment ID: 20001248 Result: Down-regulated in Transcription
  misc_feature: MA Experiment 20001248 PARAMETER Experiment Name: At_Far-red-induction_P Parameter: Age (day) Value: 7
  misc_feature: MA Experiment 20001248 PARAMETER Experiment Name: At_Far-red-induction_P Parameter: Light Value: Far-red vs. White
  misc_feature: MA Experiment 20001248 PARAMETER Experiment Name: At_Far-red-induction_P Parameter: Organism Value: A. thaliana
  misc_feature: MA Experiment 20001248 PARAMETER Experiment Name: At_Far-red-induction_P Parameter: Plant Line Value: Columbia
  misc_feature: MA Experiment 20001248 PARAMETER Experiment Name: At_Far-red-induction_P Parameter: Timepoint (hr) Value: 4
  misc_feature: MA Experiment 20001248 PARAMETER Experiment Name: At_Far-red-induction_P Parameter: Tissue Value: Whole Plant
  misc_feature: MA Experiment ID: 20001757 Result: Up-regulated in Transcription
  misc_feature: MA Experiment 20001757 PARAMETER Experiment Name: At_50mM_NH4NO3_L-to-H_P Parameter: Timepoint (hr) Value: 6
  misc_feature: MA Experiment 20001757 PARAMETER Experiment Name: At_50mM_NH4NO3_L-to-H_P Parameter: Tissue Value: Leaf
  misc_feature: MA Experiment 20001757 PARAMETER Experiment Name: At_50mM_NH4NO3_L-to-H_P Parameter: Treatment Value: 50mM NH4NO3 vs 100mM Mannitol
  misc_feature: MA Experiment ID: 20001904 Result: Down-regulated in Transcription
  misc_feature: MA Experiment 20001904 PARAMETER Experiment Name: At_Drought_Reproduction_P Parameter: Age (day) Value: 37
  misc_feature: MA Experiment 20001904 PARAMETER Experiment Name: At_Drought_Reproduction_P Parameter: Organism Value: A. thaliana
  misc_feature: MA Experiment 20001904 PARAMETER Experiment Name: At_Drought_Reproduction_P Parameter: Plant Line Value: WS
  misc_feature: MA Experiment 20001904 PARAMETER Experiment Name: At_Drought_Reproduction_P Parameter: Timepoint (day) Value: 7
  misc_feature: MA Experiment 20001904 PARAMETER Experiment Name: At_Drought_Reproduction_P Parameter: Tissue Value: Rosettes
  misc_feature: MA Experiment 20001904 PARAMETER Experiment Name: At_Drought_Reproduction_P Parameter: Treatment Value: Drought vs. No Drought
  misc_feature: MA Experiment ID: 20001906 Result: Down-regulated in Transcription
  misc_feature: MA Experiment 20001906 PARAMETER Experiment Name: At_Drought_Reproduction_P Parameter: Age (day) Value: 35
  misc_feature: MA Experiment 20001906 PARAMETER Experiment Name: At_Drought_Reproduction_P Parameter: Organism Value: A. thaliana
  misc_feature: MA Experiment 20001906 PARAMETER Experiment Name: At_Drought_Reproduction_P Parameter: Plant Line Value: WS
  misc_feature: MA Experiment 20001906 PARAMETER Experiment Name: At_Drought_Reproduction_P Parameter: Timepoint (day) Value: 5
  misc_feature: MA Experiment 20001906 PARAMETER Experiment Name: At_Drought_Reproduction_P Parameter: Tissue Value: Siliques
  misc_feature: MA Experiment 20001906 PARAMETER Experiment Name: At_Drought_Reproduction_P Parameter: Treatment Value: Drought vs. No Drought
tggttgttcaaagcatcaaataagtaaataaaaactcttttatgttcacctttttcactatcctctctttgtgtttcaaatcgtgggaacaaattatcacaatggaggcttctaaagaagctcatcaccttccaaactacatgaaagacgacaacgttagtcaagaaaccaagaacttgatcacttctctaccttcagacaaagatttcatgggttatggtctctacaactacaaaggttgttggtactatccaaacacactccaagccgttcttgacgtccaaaaacacttcaagccacgagatactgatataatcctcgcttctttgcccaaaggtggaaccacttggctcaaatccctaattttcgctgttgtacatagagaaaagtaccgcggaacccctcaaacacatcctttgctcttacaaaaccctcatgaccttgtcccatttcttgaggttgagttatacgctaatagccaaattccggatctcgcaaagtattcttctcctatgatcttttctacacacatgcacttacaagcattgcgtgaagccaccacaaaagcttgcaaaaccgtatatgtgtgtagaggtatcaaagatacgtttgtctccggctggcattatagaaacatgttgcatcgcaccaagatggatcaagccacttttgagctcatgtttgatgcttattgtagaggagttctcttatatggaccttattgggaacatgtattgagctattggaaagggagcttggaagcaaaggagaatgttcttttcatgaagtacgaagagataattgaggagcctcgtgttcaagtcaagagactcgccgagttcttggaatgtccattcaccaaggaagaagaagaaagtggatcggtggaggagatcttgaagttgtgtagtttacgaaatttaagcaatttggaggttaataagaatgggacaacgagaattggtgtagattctcaggtgttctttaggaaaggtgaagttggtgattggaagaatcatcttacgccacaaatggcgaaaacctttgatgagattattgactatagactaggagactccggtttgatatttcaataaggttgtgttgtgttttttttcttttgtcatccgaaaataaattaggactcaaacgagtcattcttgagaaatgttatgttgtattcttagctttgaaattccatgtttcttcttttta

SEQ ID NO: 26793 - protein, 351 aa, Arabidopsis thaliana
  peptide (1)..(351): Ceres Seq. ID no. 13488696
  misc_feature (88)..(347): Pfam Name: Sulfotransferase domain Pfam Description: Sulfotransferase domain
  misc_feature (8)..(351): Homolog of NCBI NO: 9759557 NR Description: steroid sulfotransferase-like protein
  misc_feature (35)..(350): Homolog of NCBI NO: 15226028 NR Description: sulfotransferase family [Arabidopsis thaliana]
  misc_feature (34)..(350): Homolog of NCBI NO: 15230603 NR Description: sulfotransferase family [Arabidopsis thaliana]
  misc_feature (35)..(348): Homolog of NCBI NO: 21553545 NR Description: steroid sulfotransferase, putative [Arabidopsis
  misc_feature (35)..(348): Homolog of NCBI NO: 15222843 NR Description: sulfotransferase family [Arabidopsis thaliana]
  misc_feature (30)..(350): Homolog of NCBI NO: 15217849 NR Description: sulfotransferase family [Arabidopsis thaliana]
  misc_feature (30)..(350): Homolog of NCBI NO: 15239947 NR Description: sulfotransferase family [Arabidopsis thaliana]
  misc_feature (34)..(350): Homolog of NCBI NO: 15230602 NR Description: sulfotransferase family [Arabidopsis thaliana]
  misc_feature (21)..(351): Homolog of NCBI NO: 25288806 NR Description: probable steroid sulfotransferase
  misc_feature (1)..(351): Homolog of NCBI NO: 18395604 NR Description: sulfotransferase family [Arabidopsis thaliana]
MFTFFTILSLCFKSWEQIITMEASKEAHHLPNYMKDDNVSQETKNLITSLPSDKDFMGYGLYNYKGCWYYPNTLQAVLDVQKHFKPRDTDIILASLPKGGTTWLKSLIFAVVHREKYRGTPQTHPLLLQNPHDLVPFLEVELYANSQIPDLAKYSSPMIFSTHMHLQALREATTKACKTVYVCRGIKDTFVSGWHYRNMLHRTKMDQATFELMFDAYCRGVLLYGPYWEHVLSYWKGSLEAKENVLFMKYEEIIEEPRVQVKRLAEFLECPFTKEEEESGSVEEILKLCSLRNLSNLEVNKNGTTRIGVDSQVFFRKGEVGDWKNHLTPQMAKTFDEIIDYRLGDSGLIFQ

SEQ ID NO: 26794 - protein, 331 aa, Arabidopsis thaliana
  peptide (1)..(331): Ceres Seq. ID no. 13488697
  misc_feature (68)..(327): Pfam Name: Sulfotransferase domain Pfam Description: Sulfotransferase domain
  misc_feature (1)..(331): Homolog of NCBI NO: 9759557 NR Description: steroid sulfotransferase-like protein
  misc_feature (15)..(330): Homolog of NCBI NO: 15226028 NR Description: sulfotransferase family [Arabidopsis thaliana]
  misc_feature (14)..(330): Homolog of NCBI NO: 15230603 NR Description: sulfotransferase family [Arabidopsis thaliana]
  misc_feature (15)..(328): Homolog of NCBI NO: 21553545 NR Description: steroid sulfotransferase, putative [Arabidopsis
  misc_feature (15)..(328): Homolog of NCBI NO: 15222843 NR Description: sulfotransferase family [Arabidopsis thaliana]
  misc_feature (10)..(330): Homolog of NCBI NO: 15217849 NR Description: sulfotransferase family [Arabidopsis thaliana]
  misc_feature (10)..(330): Homolog of NCBI NO: 15239947 NR Description: sulfotransferase family [Arabidopsis thaliana]
  misc_feature (14)..(330): Homolog of NCBI NO: 15230602 NR Description: sulfotransferase family [Arabidopsis thaliana]
  misc_feature (1)..(331): Homolog of NCBI NO: 25288806 NR Description: probable steroid sulfotransferase
  misc_feature (1)..(331): Homolog of NCBI NO: 18395604 NR Description: sulfotransferase family [Arabidopsis thaliana]
MEASKEAHHLPNYMKDDNVSQETKNLITSLPSDKDFMGYGLYNYKGCWYYPNTLQAVLDVQKHFKPRDTDIILASLPKGGTTWLKSLIFAVVHREKYRGTPQTHPLLLQNPHDLVPFLEVELYANSQIPDLAKYSSPMIFSTHMHLQALREATTKACKTVYVCRGIKDTFVSGWHYRNMLHRTKMDQATFELMFDAYCRGVLLYGPYWEHVLSYWKGSLEAKENVLFMKYEEIIEEPRVQVKRLAEFLECPFTKEEEESGSVEEILKLCSLRNLSNLEVNKNGTTRIGVDSQVFFRKGEVGDWKNHLTPQMAKTFDEIIDYRLGDSGLIFQ

SEQ ID NO: 26795 - protein, 318 aa, Arabidopsis thaliana
  peptide (1)..(318): Ceres Seq. ID no. 13488698
  misc_feature (55)..(314): Pfam Name: Sulfotransferase domain Pfam Description: Sulfotransferase domain
  misc_feature (1)..(318): Homolog of NCBI NO: 9759557 NR Description: steroid sulfotransferase-like protein
  misc_feature (2)..(317): Homolog of NCBI NO: 15226028 NR Description: sulfotransferase family [Arabidopsis thaliana]
  misc_feature (1)..(317): Homolog of NCBI NO: 15230603 NR Description: sulfotransferase family [Arabidopsis thaliana]
  misc_feature (2)..(315): Homolog of NCBI NO: 21553545 NR Description: steroid sulfotransferase, putative [Arabidopsis
  misc_feature (2)..(315): Homolog of NCBI NO: 15222843 NR Description: sulfotransferase family [Arabidopsis thaliana]
  misc_feature (1)..(317): Homolog of NCBI NO: 15217849 NR Description: sulfotransferase family [Arabidopsis thaliana]
  misc_feature (1)..(317): Homolog of NCBI NO: 15239947 NR Description: sulfotransferase family [Arabidopsis thaliana]
  misc_feature (1)..(317): Homolog of NCBI NO: 15230602 NR Description: sulfotransferase family [Arabidopsis thaliana]
  misc_feature (1)..(318): Homolog of NCBI NO: 25288806 NR Description: probable steroid sulfotransferase
  misc_feature (1)..(318): Homolog of NCBI NO: 18395604 NR Description: sulfotransferase family [Arabidopsis thaliana]
MKDDNVSQETKNLITSLPSDKDFMGYGLYNYKGCWYYPNTLQAVLDVQKHFKPRDTDIILASLPKGGTTWLKSLIFAVVHREKYRGTPQTHPLLLQNPHDLVPFLEVELYANSQIPDLAKYSSPMIFSTHMHLQALREATTKACKTVYVCRGIKDTFVSGWHYRNMLHRTKMDQATFELMFDAYCRGVLLYGPYWEHVLSYWKGSLEAKENVLFMKYEEIIEEPRVQVKRLAEFLECPFTKEEEESGSVEEILKLCSLRNLSNLEVNKNGTTRIGVDSQVFFRKGEVGDWKNHLTPQMAKTFDEIIDYRLGDSGLIFQ

SEQ ID NO: 26796 - DNA, 1309 bp, Arabidopsis thaliana
  misc_feature (1)..(1309): Ceres Seq. ID no. 13490147
  misc_feature: MA Experiment ID: 108461 Result: Up-regulated in Transcription
  misc_feature: MA Experiment 108461 PARAMETER Experiment Name: At_Germinating_Seeds_cDNA_P Parameter: Age (day) Value: 1 vs. 0
  misc_feature: MA Experiment 108461 PARAMETER Experiment Name: At_Germinating_Seeds_cDNA_P Parameter: Tissue Value: Germinating Seeds
  misc_feature: MA Experiment ID: 20000180 Result: Up-regulated in Transcription
  misc_feature: MA Experiment 20000180 PARAMETER Experiment Name: At_Germinating_Seeds_P Parameter: Age (hr) Value: 24 vs. 0
  misc_feature: MA Experiment 20000180 PARAMETER Experiment Name: At_Germinating_Seeds_P Parameter: Tissue Value: Germinating Seeds
  misc_feature: MA Experiment ID: 20000227 Result: Down-regulated in Transcription
  misc_feature: MA Experiment 20000227 PARAMETER Experiment Name: At_Root-Tips-vs-Tops_P Parameter: Tissue Value: Root Tips vs. Root Tops
  misc_feature: MA Experiment ID: 20000264 Result: Down-regulated in Transcription
  misc_feature: MA Experiment 20000264 PARAMETER Experiment Name: At_Open_Flower_P Parameter: Age (day) Value: 21
  misc_feature: MA Experiment 20000264 PARAMETER Experiment Name: At_Open_Flower_P Parameter: Plant Line Value: WS
  misc_feature: MA Experiment 20000264 PARAMETER Experiment Name: At_Open_Flower_P Parameter: Tissue Value: Open Flower vs. Whole Plant
  misc_feature: MA Experiment ID: 20000265 Result: Down-regulated in Transcription
  misc_feature: MA Experiment 20000265 PARAMETER Experiment Name: At_Open_Flower_P Parameter: Age (day) Value: 21
  misc_feature: MA Experiment 20000265 PARAMETER Experiment Name: At_Open_Flower_P Parameter: Plant Line Value: WS
  misc_feature: MA Experiment 20000265 PARAMETER Experiment Name: At_Open_Flower_P Parameter: Tissue Value: Closed Flower vs. Whole Plant
  misc_feature: MA Experiment ID: 20000286 Result: Down-regulated in Transcription
  misc_feature: MA Experiment 20000286 PARAMETER Experiment Name: At_Open_Flower_P Parameter: Age (day) Value: 21
  misc_feature: MA Experiment 20000286 PARAMETER Experiment Name: At_Open_Flower_P Parameter: Plant Line Value: WS
  misc_feature: MA Experiment 20000286 PARAMETER Experiment Name: At_Open_Flower_P Parameter: Tissue Value: Half Open vs. Whole Plant
  misc_feature: MA Experiment ID: 20000438 Result: Down-regulated in Transcription
  misc_feature: MA Experiment 20000438 PARAMETER Experiment Name: At_Shoots__P Parameter: Age (day) Value: 14
  misc_feature: MA Experiment 20000438 PARAMETER Experiment Name: At_Shoots__P Parameter: Tissue Value: Shoots vs. Whole Plant
  misc_feature: MA Experiment ID: 20000444 Result: Up-regulated in Transcription
  misc_feature: MA Experiment 20000444 PARAMETER Experiment Name: At_100uM_NAA__P Parameter: Age (day) Value: 14
  misc_feature: MA Experiment 20000444 PARAMETER Experiment Name: At_100uM_NAA__P Parameter: Organism Value: A. thaliana
  misc_feature: MA Experiment 20000444 PARAMETER Experiment Name: At_100uM_NAA__P Parameter: Plant Line Value: WS
  misc_feature: MA Experiment 20000444 PARAMETER Experiment Name: At_100uM_NAA__P Parameter: Timepoint (hr) Value: 1
  misc_feature: MA Experiment 20000444 PARAMETER Experiment Name: At_100uM_NAA__P Parameter: Tissue Value: Aerial
  misc_feature: MA Experiment 20000444 PARAMETER Experiment Name: At_100uM_NAA__P Parameter: Treatment Value: 100uM NAA vs. No Treatment
  misc_feature: MA Experiment ID: 20000451 Result: Down-regulated in Transcription
  misc_feature: MA Experiment 20000451 PARAMETER Experiment Name: At_CS6879_Shoots-Roots_P Parameter: Age (day) Value: 14
  misc_feature: MA Experiment 20000451 PARAMETER Experiment Name: At_CS6879_Shoots-Roots_P Parameter: Organism Value: A. thaliana
  misc_feature: MA Experiment 20000451 PARAMETER Experiment Name: At_CS6879_Shoots-Roots_P Parameter: Plant Line Value: CS6879 vs. WS
  misc_feature: MA Experiment 20000451 PARAMETER Experiment Name: At_CS6879_Shoots-Roots_P Parameter: Tissue Value: Roots
  misc_feature: MA Experiment ID: 20000495 Result: Up-regulated in Transcription
  misc_feature: MA Experiment 20000495 PARAMETER Experiment Name: At_Guard_Cells_P Parameter: Harvest Date Value: 8/2/2002
  misc_feature: MA Experiment 20000495 PARAMETER Experiment Name: At_Guard_Cells_P Parameter: Organism Value: A. thaliana
  misc_feature: MA Experiment 20000495 PARAMETER Experiment Name: At_Guard_Cells_P Parameter: Tissue Value: Guard Cells vs. Leaves
  misc_feature: MA Experiment ID: 20000794 Result: Down-regulated in Transcription
  misc_feature: MA Experiment 20000794 PARAMETER Experiment Name: At_Petals_P Parameter: Age (day) Value: 23-25 days
  misc_feature: MA Experiment 20000794 PARAMETER Experiment Name: At_Petals_P Parameter: Plant Line Value: WS
  misc_feature: MA Experiment 20000794 PARAMETER Experiment Name: At_Petals_P Parameter: Tissue Value: Petals vs. Whole plant
  misc_feature: MA Experiment ID: 20001247 Result: Up-regulated in Transcription
  misc_feature: MA Experiment 20001247 PARAMETER Experiment Name: At_Far-red-induction_P Parameter: Age (day) Value: 7
  misc_feature: MA Experiment 20001247 PARAMETER Experiment Name: At_Far-red-induction_P Parameter: Light Value: Far-red vs. White
  misc_feature: MA Experiment 20001247 PARAMETER Experiment Name: At_Far-red-induction_P Parameter: Organism Value: A. thaliana
  misc_feature: MA Experiment 20001247 PARAMETER Experiment Name: At_Far-red-induction_P Parameter: Plant Line Value: Columbia
  misc_feature: MA Experiment 20001247 PARAMETER Experiment Name: At_Far-red-induction_P Parameter: Timepoint (hr) Value: 1
  misc_feature: MA Experiment 20001247 PARAMETER Experiment Name: At_Far-red-induction_P Parameter: Tissue Value: Whole Plant
  misc_feature: MA Experiment ID: 20001248 Result: Up-regulated in Transcription
  misc_feature: MA Experiment 20001248 PARAMETER Experiment Name: At_Far-red-induction_P Parameter: Age (day) Value: 7
  misc_feature: MA Experiment 20001248 PARAMETER Experiment Name: At_Far-red-induction_P Parameter: Light Value: Far-red vs. White
  misc_feature: MA Experiment 20001248 PARAMETER Experiment Name: At_Far-red-induction_P Parameter: Organism Value: A. thaliana
  misc_feature: MA Experiment 20001248 PARAMETER Experiment Name: At_Far-red-induction_P Parameter: Plant Line Value: Columbia
  misc_feature: MA Experiment 20001248 PARAMETER Experiment Name: At_Far-red-induction_P Parameter: Timepoint (hr) Value: 4
  misc_feature: MA Experiment 20001248 PARAMETER Experiment Name: At_Far-red-induction_P Parameter: Tissue Value: Whole Plant
  misc_feature: MA Experiment ID: 20001450 Result: Up-regulated in Transcription
  misc_feature: MA Experiment 20001450 PARAMETER Experiment Name: At_Far-red-induction_P Parameter: Age (day) Value: 7
  misc_feature: MA Experiment 20001450 PARAMETER Experiment Name: At_Far-red-induction_P Parameter: Light Value: Far-red vs. White
  misc_feature: MA Experiment 20001450 PARAMETER Experiment Name: At_Far-red-induction_P Parameter: Organism Value: A. thaliana
  misc_feature: MA Experiment 20001450 PARAMETER Experiment Name: At_Far-red-induction_P Parameter: Plant Line Value: Columbia
  misc_feature: MA Experiment 20001450 PARAMETER Experiment Name: At_Far-red-induction_P Parameter: Timepoint (hr) Value: 8
  misc_feature: MA Experiment 20001450 PARAMETER Experiment Name: At_Far-red-induction_P Parameter: Tissue Value: Whole Plant
  misc_feature: MA Experiment ID: 20001556 Result: Down-regulated in Transcription
  misc_feature: MA Experiment 20001556 PARAMETER Experiment Name: At_Drought_Soil_Dry_P Parameter: Age (day) Value: 26
  misc_feature: MA Experiment 20001556 PARAMETER Experiment Name: At_Drought_Soil_Dry_P Parameter: Organism Value: A. thaliana
  misc_feature: MA Experiment 20001556 PARAMETER Experiment Name: At_Drought_Soil_Dry_P Parameter: Plant Line Value: WS
  misc_feature: MA Experiment 20001556 PARAMETER Experiment Name: At_Drought_Soil_Dry_P Parameter: Post Timepoint (hr) Value: None
  misc_feature: MA Experiment 20001556 PARAMETER Experiment Name: At_Drought_Soil_Dry_P Parameter: Post-Treatment Value: None
  misc_feature: MA Experiment 20001556 PARAMETER Experiment Name: At_Drought_Soil_Dry_P Parameter: Timepoint (day) Value: 12
  misc_feature: MA Experiment 20001556 PARAMETER Experiment Name: At_Drought_Soil_Dry_P Parameter: Treatment Value: Drought vs. No Drought
  misc_feature: MA Experiment ID: 20001904 Result: Down-regulated in Transcription
  misc_feature: MA Experiment 20001904 PARAMETER Experiment Name: At_Drought_Reproduction_P Parameter: Age (day) Value: 37
  misc_feature: MA Experiment 20001904 PARAMETER Experiment Name: At_Drought_Reproduction_P Parameter: Organism Value: A. thaliana
  misc_feature: MA Experiment 20001904 PARAMETER Experiment Name: At_Drought_Reproduction_P Parameter: Plant Line Value: WS
  misc_feature: MA Experiment 20001904 PARAMETER Experiment Name: At_Drought_Reproduction_P Parameter: Timepoint (day) Value: 7
  misc_feature: MA Experiment 20001904 PARAMETER Experiment Name: At_Drought_Reproduction_P Parameter: Tissue Value: Rosettes
  misc_feature: MA Experiment 20001904 PARAMETER Experiment Name: At_Drought_Reproduction_P Parameter: Treatment Value: Drought vs. No Drought
  misc_feature: MA Experiment ID: 20001905 Result: Down-regulated in Transcription
  misc_feature: MA Experiment 20001905 PARAMETER Experiment Name: At_Drought_Reproduction_P Parameter: Age (day) Value: 40
  misc_feature: MA Experiment 20001905 PARAMETER Experiment Name: At_Drought_Reproduction_P Parameter: Organism Value: A. thaliana
  misc_feature: MA Experiment 20001905 PARAMETER Experiment Name: At_Drought_Reproduction_P Parameter: Plant Line Value: WS
  misc_feature: MA Experiment 20001905 PARAMETER Experiment Name: At_Drought_Reproduction_P Parameter: Timepoint (day) Value: 10
  misc_feature: MA Experiment 20001905 PARAMETER Experiment Name: At_Drought_Reproduction_P Parameter: Tissue Value: Rosettes
  misc_feature: MA Experiment 20001905 PARAMETER Experiment Name: At_Drought_Reproduction_P Parameter: Treatment Value: Drought vs. No Drought
  misc_feature: Phenotype: COTYLEDONS Other
  misc_feature: Phenotype: COTYLEDONS Other
  misc_feature: Phenotype: COTYLEDONS Other
  misc_feature: Phenotype: COTYLEDONS Other
  misc_feature: Phenotype: COTYLEDONS Other
gtcccatcaccaaacattaagtagcactctttttcctctctatatctctcactcacactttttctctatatcttctcctcaacttggatatgggtgaagccgtagaggtcatgttcggaaatgggttcccggagattcacaaagccacatcacccactcaaaccctccactctaaccagcaagactgccattggtatgaagaaaccatcgatgatgatctcaagtggtcttttgccctcaacagtgttctccatcaaggaactagtgagtaccaagatattgctctgttggacaccaaacgttttggaaaggtgcttgtgattgatgggaaaatgcaaagtgctgagagagatgagtttatctaccatgaatgtttgatccatcccgctctccttttccatcccaaccccaagactgtgtttataatgggaggaggtgaaggctctgctgcaagagaaatactaaaacacacgacgatcgagaaagttgttatgtgtgatattgatcaggaagttgttgatttttgcagaagatttctgaccgttaacagcgatgctttctgtaacaaaaagcttgaacttgtgatcaaagatgcaaaggctgaattagagaaaagggaagagaagtttgatatcatagtgggagatttagctgatccagtggaaggtggaccttgttatcagctctacaccaaatccttctaccaaaacattctcaaacccaagcttagccctaatggcatttttgtcacccaggctggaccagcaggaatattcactcataaggaagtcttcacatcaatctacaacaccatgaagcaagtcttcaagtacgtgaaggcttacacagcacatgtgccatcatttgcggacacatggggatgggtgatggcatcggaccacgagtttgacgttgaagttgatgaaatggatcgaagaatcgaagagagagttaacggagaattgatgtatctaaacgctccttctttcgtctctgctgctactctcaacaaaaccatctctctcgcgctagagaaggagactgaagtttatagtgaagagaatgcgagattcattcatggtcatggtgtggcgtaccggcatatttaaagacgaaccggtttcagtttcagtgttattaccaaacccatgtcacaaaaacaaaaggccggtttcttttctccgcacagaaccgggtgttgtcttgaatcttgattactttggttcggttttattttctacattgctttttgttttcttgttcttccctcaagttattccggtttaacaagactatattgcttactaac

SEQ ID NO: 26797 - protein, 339 aa, Arabidopsis thaliana
  peptide (1)..(339): Ceres Seq. ID no. 13490148
  misc_feature (34)..(279): Pfam Name: Spermine/spermidine synthase Pfam Description: Spermine/spermidine synthase
  misc_feature (50)..(335): Homolog of NCBI NO: 34810901 NR Description: Chain A, Crystal Structure Of Polyamine
  misc_feature (9)..(335): Homolog of NCBI NO: 38603375 NR Description: putative spermine synthase [Taxodium distichum]
  misc_feature (2)..(335): Homolog of NCBI NO: 34146773 NR Description: putative spermine synthase [Cryptomeria japonica]
  misc_feature (11)..(338): Homolog of NCBI NO: 40788039 NR Description: putative spermine synthase [Lycopersicon
  misc_feature (1)..(339): Homolog of NCBI NO: 18150168 NR Description: spermine synthase [Arabis gemmifera]
  misc_feature (1)..(339): Homolog of NCBI NO: 18150156 NR Description: spermine synthase [Arabidopsis thaliana]
  misc_feature (1)..(339): Homolog of NCBI NO: 18150158 NR Description: spermine synthase [Arabidopsis thaliana]
  misc_feature (1)..(339): Homolog of NCBI NO: 18150154 NR Description: spermine synthase [Arabidopsis thaliana]
  misc_feature (1)..(339): Homolog of NCBI NO: 18150150 NR Description: spermine synthase [Arabidopsis thaliana]
  misc_feature (1)..(339): Homolog of NCBI NO: 18419941 NR Description: spermine synthase (ACL5) [Arabidopsis thaliana]
MGEAVEVMFGNGFPEIHKATSPTQTLHSNQQDCHWYEETIDDDLKWSFALNSVLHQGTSEYQDIALLDTKRFGKVLVIDGKMQSAERDEFIYHECLIHPALLFHPNPKTVFIMGGGEGSAAREILKHTTIEKVVMCDIDQEVVDFCRRFLTVNSDAFCNKKLELVIKDAKAELEKREEKFDIIVGDLADPVEGGPCYQLYTKSFYQNILKPKLSPNGIFVTQAGPAGIFTHKEVFTSIYNTMKQVFKYVKAYTAHVPSFADTWGWVMASDHEFDVEVDEMDRRIEERVNGELMYLNAPSFVSAATLNKTISLALEKETEVYSEENARFIHGHGVAYRHI

SEQ ID NO: 26798 - protein, 332 aa, Arabidopsis thaliana
  peptide (1)..(332): Ceres Seq. ID no. 13490149
  misc_feature (27)..(272): Pfam Name: Spermine/spermidine synthase Pfam Description: Spermine/spermidine synthase
  misc_feature (43)..(328): Homolog of NCBI NO: 34810901 NR Description: Chain A, Crystal Structure Of Polyamine
  misc_feature (2)..(328): Homolog of NCBI NO: 38603375 NR Description: putative spermine synthase [Taxodium distichum]
  misc_feature (1)..(328): Homolog of NCBI NO: 34146773 NR Description: putative spermine synthase [Cryptomeria japonica]
  misc_feature (4)..(331): Homolog of NCBI NO: 40788039 NR Description: putative spermine synthase [Lycopersicon
  misc_feature (1)..(332): Homolog of NCBI NO: 18150168 NR Description: spermine synthase [Arabis gemmifera]
  misc_feature (1)..(332): Homolog of NCBI NO: 18150156 NR Description: spermine synthase [Arabidopsis thaliana]
  misc_feature (1)..(332): Homolog of NCBI NO: 18150158 NR Description: spermine synthase [Arabidopsis thaliana]
  misc_feature (1)..(332): Homolog of NCBI NO: 18150154 NR Description: spermine synthase [Arabidopsis thaliana]
  misc_feature (1)..(332): Homolog of NCBI NO: 18150150 NR Description: spermine synthase [Arabidopsis thaliana]
  misc_feature (1)..(332): Homolog of NCBI NO: 18419941 NR Description: spermine synthase (ACL5) [Arabidopsis thaliana]
MFGNGFPEIHKATSPTQTLHSNQQDCHWYEETIDDDLKWSFALNSVLHQGTSEYQDIALLDTKRFGKVLVIDGKMQSAERDEFIYHECLIHPALLFHPNPKTVFIMGGGEGSAAREILKHTTIEKVVMCDIDQEVVDFCRRFLTVNSDAFCNKKLELVIKDAKAELEKREEKFDIIVGDLADPVEGGPCYQLYTKSFYQNILKPKLSPNGIFVTQAGPAGIFTHKEVFTSIYNTMKQVFKYVKAYTAHVPSFADTWGWVMASDHEFDVEVDEMDRRIEERVNGELMYLNAPSFVSAATLNKTISLALEKETEVYSEENARFIHGHGVAYRHI

SEQ ID NO: 26799 - protein, 258 aa, Arabidopsis thaliana
  peptide (1)..(258): Ceres Seq. ID no. 13490150
  misc_feature (1)..(198): Pfam Name: Spermine/spermidine synthase Pfam Description: Spermine/spermidine synthase
  misc_feature (1)..(254): Homolog of NCBI NO: 34810901 NR Description: Chain A, Crystal Structure Of Polyamine
  misc_feature (1)..(254): Homolog of NCBI NO: 38603375 NR Description: putative spermine synthase [Taxodium distichum]
  misc_feature (1)..(254): Homolog of NCBI NO: 34146773 NR Description: putative spermine synthase [Cryptomeria japonica]
  misc_feature (1)..(257): Homolog of NCBI NO: 40788039 NR Description: putative spermine synthase [Lycopersicon
  misc_feature (1)..(258): Homolog of NCBI NO: 18150168 NR Description: spermine synthase [Arabis gemmifera]
  misc_feature (1)..(258): Homolog of NCBI NO: 18150156 NR Description: spermine synthase [Arabidopsis thaliana]
  misc_feature (1)..(258): Homolog of NCBI NO: 18150158 NR Description: spermine synthase [Arabidopsis thaliana]
  misc_feature (1)..(258): Homolog of NCBI NO: 18150154 NR Description: spermine synthase [Arabidopsis thaliana]
  misc_feature (1)..(258): Homolog of NCBI NO: 18150150 NR Description: spermine synthase [Arabidopsis thaliana]
  misc_feature (1)..(258): Homolog of NCBI NO: 18419941 NR Description: spermine synthase (ACL5) [Arabidopsis thaliana]
MQSAERDEFIYHECLIHPALLFHPNPKTVFIMGGGEGSAAREILKHTTIEKVVMCDIDQEVVDFCRRFLTVNSDAFCNKKLELVIKDAKAELEKREEKFDIIVGDLADPVEGGPCYQLYTKSFYQNILKPKLSPNGIFVTQAGPAGIFTHKEVFTSIYNTMKQVFKYVKAYTAHVPSFADTWGWVMASDHEFDVEVDEMDRRIEERVNGELMYLNAPSFVSAATLNKTISLALEKETEVYSEENARFIHGHGVAYRHI

SEQ ID NO: 26800 - DNA, 672 bp, Arabidopsis thaliana
  misc_feature (1)..(672): Ceres Seq. ID no. 12394973
  misc_feature: MA Experiment ID: 108434 Result: Up-regulated in Transcription
  misc_feature: MA Experiment 108434 PARAMETER Experiment Name: At_Root_Tips_cDNA_P Parameter: Tissue Value: Root Tips
  misc_feature: MA Experiment ID: 108569 Result: Up-regulated in Transcription
  misc_feature: MA Experiment 108569 PARAMETER Experiment Name: At_0.001%_MeJA__cDNA_P Parameter: Timepoint (hr) Value: 6
  misc_feature: MA Experiment 108569 PARAMETER Experiment Name: At_0.001%_MeJA__cDNA_P Parameter: Tissue Value: Aerial
  misc_feature: MA Experiment 108569 PARAMETER Experiment Name: At_0.001%_MeJA__cDNA_P Parameter: Treatment Value: 0.001% MeJA vs. No Treatment
  misc_feature: MA Experiment ID: 108573 Result: Up-regulated in Transcription
  misc_feature: MA Experiment 108573 PARAMETER Experiment Name: At_Drought_cDNA_P Parameter: Timepoint (hr) Value: 6
  misc_feature: MA Experiment 108573 PARAMETER Experiment Name: At_Drought_cDNA_P Parameter: Tissue Value: Aerial
  misc_feature: MA Experiment 108573 PARAMETER Experiment Name: At_Drought_cDNA_P Parameter: Treatment Value: Drought vs. No Drought
  misc_feature: MA Experiment ID: 20000185 Result: Up-regulated in Transcription
  misc_feature: MA Experiment 20000185 PARAMETER Experiment Name: At_Roots__P Parameter: Age (day) Value: 7 vs. 21
  misc_feature: MA Experiment 20000185 PARAMETER Experiment Name: At_Roots__P Parameter: Organism Value: A. thaliana
  misc_feature: MA Experiment 20000185 PARAMETER Experiment Name: At_Roots__P Parameter: Tissue Value: Roots vs. Whole Plant
  misc_feature: MA Experiment ID: 20001451 Result: Down-regulated in Transcription
  misc_feature: MA Experiment 20001451 PARAMETER Experiment Name: At_Far-red-induction_P Parameter: Age (day) Value: 7
  misc_feature: MA Experiment 20001451 PARAMETER Experiment Name: At_Far-red-induction_P Parameter: Light Value: Far-red vs. White
  misc_feature: MA Experiment 20001451 PARAMETER Experiment Name: At_Far-red-induction_P Parameter: Organism Value: A. thaliana
  misc_feature: MA Experiment 20001451 PARAMETER Experiment Name: At_Far-red-induction_P Parameter: Plant Line Value: Columbia
  misc_feature: MA Experiment 20001451 PARAMETER Experiment Name: At_Far-red-induction_P Parameter: Timepoint (hr) Value: 24
  misc_feature: MA Experiment 20001451 PARAMETER Experiment Name: At_Far-red-induction_P Parameter: Tissue Value: Whole Plant
gtgtagactgagaaataaagaagcccttgattttgcccattgcagtcatctctctcgaatctctctctataatccgatctgagaaatttcgccggagctaggttttgttgtttaccgatcaatcctttaatcaatggcaatggctgttttccgtcgcgaagggaggcgtctcctcccttcaatcgccgctcgcccaatcgctgctatccgatctcctctctcttctgaccaggaggaaggacttcttggagttcgatctatctcaactcaagtggtgcgtaaccgcatgaagagtgttaagaacatccaaaagatcacaaaggcaatgaagatggttgctgcttccaagcttagagcagttcaaggccgagctgagaactcccgtggactttggcagccatttactgcacttctaggagataatcccagcattgatgtaaagaagagtgtgttaaaattttactgaatcagtttcctttgctggcttcttgttgagacctaccaatgtttgctcaacgatttttaataaacatacctgtaatttccagcaggatttcgaataattgcattaacattttgttctgattcagactcgcttcctccagagtctgtagtgttgttttgtgcaaacaccatgtactccggtttatttgatatttttttacctgagcc

SEQ ID NO: 26801 - protein, 110 aa, Arabidopsis thaliana
  peptide (1)..(110): Ceres Seq. ID no. 12394974
  misc_feature (43)..(107): Pfam Name: ATP synthase Pfam Description: ATP synthase
  misc_feature (46)..(107): Homolog of NCBI NO: 37532654 NR Description: putative ATP SYNTHASE GAMMA CHAIN, MITOCHONDRIAL
  misc_feature (1)..(107): Homolog of NCBI NO: 543867 NR Description: ATP synthase gamma chain, mitochondrial precursor
  misc_feature (3)..(107): Homolog of NCBI NO: 7436158 NR Description: probable H+-transporting two-sector ATPase (EC
  misc_feature (1)..(107): Homolog of NCBI NO: 22530902 NR Description: mitochondrial F1-ATPase, gamma subunit
  misc_feature (1)..(107): Homolog of NCBI NO: 15227257 NR Description: mitochondrial F1-ATPase, gamma subunit
MAMAVFRREGRRLLPSIAARPIAAIRSPLSSDQEEGLLGVRSISTQVVRNRMKSVKNIQKITKAMKMVAASKLRAVQGRAENSRGLWQPFTALLGDNPSIDVKKSVLKFY

SEQ ID NO: 26802 - protein, 108 aa, Arabidopsis thaliana
  peptide (1)..(108): Ceres Seq. ID no. 12394975
  misc_feature (41)..(105): Pfam Name: ATP synthase Pfam Description: ATP synthase
  misc_feature (44)..(105): Homolog of NCBI NO: 37532654 NR Description: putative ATP SYNTHASE GAMMA CHAIN, MITOCHONDRIAL
  misc_feature (1)..(105): Homolog of NCBI NO: 543867 NR Description: ATP synthase gamma chain, mitochondrial precursor
  misc_feature (1)..(105): Homolog of NCBI NO: 7436158 NR Description: probable H+-transporting two-sector ATPase (EC
  misc_feature (1)..(105): Homolog of NCBI NO: 22530902 NR Description: mitochondrial F1-ATPase, gamma subunit
  misc_feature (1)..(105): Homolog of NCBI NO: 15227257 NR Description: mitochondrial F1-ATPase, gamma subunit
MAVFRREGRRLLPSIAARPIAAIRSPLSSDQEEGLLGVRSISTQVVRNRMKSVKNIQKITKAMKMVAASKLRAVQGRAENSRGLWQPFTALLGDNPSIDVKKSVLKFY

SEQ ID NO: 26803 - protein, 59 aa, Arabidopsis thaliana
  peptide (1)..(59): Ceres Seq. ID no. 12394976
  misc_feature (1)..(56): Pfam Name: ATP synthase Pfam Description: ATP synthase
  misc_feature (1)..(56): Homolog of NCBI NO: 37532654 NR Description: putative ATP SYNTHASE GAMMA CHAIN, MITOCHONDRIAL
  misc_feature (1)..(56): Homolog of NCBI NO: 543867 NR Description: ATP synthase gamma chain, mitochondrial precursor
  misc_feature (1)..(56): Homolog of NCBI NO: 7436158 NR Description: probable H+-transporting two-sector ATPase (EC
  misc_feature (1)..(56): Homolog of NCBI NO: 22530902 NR Description: mitochondrial F1-ATPase, gamma subunit
  misc_feature (1)..(56): Homolog of NCBI NO: 15227257 NR Description: mitochondrial F1-ATPase, gamma subunit
MKSVKNIQKITKAMKMVAASKLRAVQGRAENSRGLWQPFTALLGDNPSIDVKKSVLKFY

SEQ ID NO: 26804 - DNA, 1417 bp, Arabidopsis thaliana
  misc_feature (1)..(1417): Ceres Seq. ID no. 13499793
  misc_feature: MA Experiment ID: 108461 Result: Up-regulated in Transcription
  misc_feature: MA Experiment 108461 PARAMETER Experiment Name: At_Germinating_Seeds_cDNA_P Parameter: Age (day) Value: 1 vs. 0
  misc_feature: MA Experiment 108461 PARAMETER Experiment Name: At_Germinating_Seeds_cDNA_P Parameter: Tissue Value: Germinating Seeds
  misc_feature: MA Experiment ID: 108463 Result: Up-regulated in Transcription
  misc_feature: MA Experiment 108463 PARAMETER Experiment Name: At_Germinating_Seeds_cDNA_P Parameter: Age (day) Value: 3 vs. 0
  misc_feature: MA Experiment 108463 PARAMETER Experiment Name: At_Germinating_Seeds_cDNA_P Parameter: Tissue Value: Germinating Seeds
  misc_feature: MA Experiment ID: 108464 Result: Up-regulated in Transcription
  misc_feature: MA Experiment 108464 PARAMETER Experiment Name: At_Germinating_Seeds_cDNA_P Parameter: Age (day) Value: 4 vs. 0
  misc_feature: MA Experiment 108464 PARAMETER Experiment Name: At_Germinating_Seeds_cDNA_P Parameter: Tissue Value: Germinating Seeds
  misc_feature: MA Experiment ID: 108579 Result: Down-regulated in Transcription
  misc_feature: MA Experiment 108579 PARAMETER Experiment Name: At_4deg_Cold_cDNA_P Parameter: Temperature (deg C) Value: 4 vs. 22
  misc_feature: MA Experiment 108579 PARAMETER Experiment Name: At_4deg_Cold_cDNA_P Parameter: Timepoint (hr) Value: 6
  misc_feature: MA Experiment 108579 PARAMETER Experiment Name: At_4deg_Cold_cDNA_P Parameter: Tissue Value: Aerial
  misc_feature: MA Experiment ID: 20000111 Result: Down-regulated in Transcription
  misc_feature: MA Experiment 20000111 PARAMETER Experiment Name: At_42deg_Heat_cDNA_P Parameter: Temperature (deg C) Value: 42 vs. 22
  misc_feature: MA Experiment 20000111 PARAMETER Experiment Name: At_42deg_Heat_cDNA_P Parameter: Timepoint (hr) Value: 6
  misc_feature: MA Experiment 20000111 PARAMETER Experiment Name: At_42deg_Heat_cDNA_P Parameter: Tissue Value: Aerial
  misc_feature: MA Experiment ID: 20000173 Result: Down-regulated in Transcription
  misc_feature: MA Experiment 20000173 PARAMETER Experiment Name: At_42deg_Heat_P Parameter: Age (day) Value: 14
  misc_feature: MA Experiment 20000173 PARAMETER Experiment Name: At_42deg_Heat_P Parameter: Organism Value: A. thaliana
  misc_feature: MA Experiment 20000173 PARAMETER Experiment Name: At_42deg_Heat_P Parameter: Plant Line Value: WS
  misc_feature: MA Experiment 20000173 PARAMETER Experiment Name: At_42deg_Heat_P Parameter: Temperature (deg C) Value: 42 vs. 22
  misc_feature: MA Experiment 20000173 PARAMETER Experiment Name: At_42deg_Heat_P Parameter: Timepoint (hr) Value: 6
  misc_feature: MA Experiment 20000173 PARAMETER Experiment Name: At_42deg_Heat_P Parameter: Tissue Value: Aerial
  misc_feature: MA Experiment ID: 20000179 Result: Up-regulated in Transcription
  misc_feature: MA Experiment 20000179 PARAMETER Experiment Name: At_Germinating_Seeds_P Parameter: Age (hr) Value: 6 vs. 0
  misc_feature: MA Experiment 20000179 PARAMETER Experiment Name: At_Germinating_Seeds_P Parameter: Tissue Value: Germinating Seeds
  misc_feature: MA Experiment ID: 20000180 Result: Up-regulated in Transcription
  misc_feature: MA Experiment 20000180 PARAMETER Experiment Name: At_Germinating_Seeds_P Parameter: Age (hr) Value: 24 vs. 0
  misc_feature: MA Experiment 20000180 PARAMETER Experiment Name: At_Germinating_Seeds_P Parameter: Tissue Value: Germinating Seeds
  misc_feature: MA Experiment ID: 20000185 Result: Down-regulated in Transcription
  misc_feature: MA Experiment 20000185 PARAMETER Experiment Name: At_Roots__P Parameter: Age (day) Value: 7 vs. 21
  misc_feature: MA Experiment 20000185 PARAMETER Experiment Name: At_Roots__P Parameter: Organism Value: A. thaliana
  misc_feature: MA Experiment 20000185 PARAMETER Experiment Name: At_Roots__P Parameter: Tissue Value: Roots vs. Whole Plant
  misc_feature: MA Experiment ID: 20000437 Result: Down-regulated in Transcription
  misc_feature: MA Experiment 20000437 PARAMETER Experiment Name: At_Drought_P Parameter: Age (day) Value: 8
  misc_feature: MA Experiment 20000437 PARAMETER Experiment Name: At_Drought_P Parameter: Organism Value: A. thaliana
  misc_feature: MA Experiment 20000437 PARAMETER Experiment Name: At_Drought_P Parameter: Plant Line Value: WS
  misc_feature: MA Experiment 20000437 PARAMETER Experiment Name: At_Drought_P Parameter: Timepoint (hr) Value: 24
  misc_feature: MA Experiment 20000437 PARAMETER Experiment Name: At_Drought_P Parameter: Tissue Value: Whole Plant
  misc_feature: MA Experiment 20000437 PARAMETER Experiment Name: At_Drought_P Parameter: Treatment Value: Drought vs. No Drought
  misc_feature: MA Experiment ID: 20000439 Result: Down-regulated in Transcription
  misc_feature: MA Experiment 20000439 PARAMETER Experiment Name: At_Roots__P Parameter: Age (day) Value: 14 vs. 21
  misc_feature: MA Experiment 20000439 PARAMETER Experiment Name: At_Roots__P Parameter: Organism Value: A. thaliana
  misc_feature: MA Experiment 20000439 PARAMETER Experiment Name: At_Roots__P Parameter: Tissue Value: Roots vs. Whole Plant
  misc_feature: MA Experiment ID: 20000495 Result: Up-regulated in Transcription
  misc_feature: MA Experiment 20000495 PARAMETER Experiment Name: At_Guard_Cells_P Parameter: Harvest Date Value: 8/2/2002
  misc_feature: MA Experiment 20000495 PARAMETER Experiment Name: At_Guard_Cells_P Parameter: Organism Value: A. thaliana
  misc_feature: MA Experiment 20000495 PARAMETER Experiment Name: At_Guard_Cells_P Parameter: Tissue Value: Guard Cells vs. Leaves
  misc_feature: MA Experiment ID: 20000794 Result: Up-regulated in Transcription
  misc_feature: MA Experiment 20000794 PARAMETER Experiment Name: At_Petals_P Parameter: Age (day) Value: 23-25 days
  misc_feature: MA Experiment 20000794 PARAMETER Experiment Name: At_Petals_P Parameter: Plant Line Value: WS
  misc_feature: MA Experiment 20000794 PARAMETER Experiment Name: At_Petals_P Parameter: Tissue Value: Petals vs. Whole plant
  misc_feature: MA Experiment ID: 20001450 Result: Up-regulated in Transcription
  misc_feature: MA Experiment 20001450 PARAMETER Experiment Name: At_Far-red-induction_P Parameter: Age (day) Value: 7
  misc_feature: MA Experiment 20001450 PARAMETER Experiment Name: At_Far-red-induction_P Parameter: Light Value: Far-red vs. White
  misc_feature: MA Experiment 20001450 PARAMETER Experiment Name: At_Far-red-induction_P Parameter: Organism Value: A. thaliana
  misc_feature: MA Experiment 20001450 PARAMETER Experiment Name: At_Far-red-induction_P Parameter: Plant Line Value: Columbia
  misc_feature: MA Experiment 20001450 PARAMETER Experiment Name: At_Far-red-induction_P Parameter: Timepoint (hr) Value: 8
  misc_feature: MA Experiment 20001450 PARAMETER Experiment Name: At_Far-red-induction_P Parameter: Tissue Value: Whole Plant
  misc_feature: MA Experiment ID: 20001451 Result: Up-regulated in Transcription
  misc_feature: MA Experiment 20001451 PARAMETER Experiment Name: At_Far-red-induction_P Parameter: Age (day) Value: 7
  misc_feature: MA Experiment 20001451 PARAMETER Experiment Name: At_Far-red-induction_P Parameter: Light Value: Far-red vs. White
  misc_feature: MA Experiment 20001451 PARAMETER Experiment Name: At_Far-red-induction_P Parameter: Organism Value: A. thaliana
  misc_feature: MA Experiment 20001451 PARAMETER Experiment Name: At_Far-red-induction_P Parameter: Plant Line Value: Columbia
  misc_feature: MA Experiment 20001451 PARAMETER Experiment Name: At_Far-red-induction_P Parameter: Timepoint (hr) Value: 24
  misc_feature: MA Experiment 20001451 PARAMETER Experiment Name: At_Far-red-induction_P Parameter: Tissue Value: Whole Plant
  misc_feature: MA Experiment ID: 20001556 Result: Down-regulated in Transcription
  misc_feature: MA Experiment 20001556 PARAMETER Experiment Name: At_Drought_Soil_Dry_P Parameter: Age (day) Value: 26
  misc_feature: MA Experiment 20001556 PARAMETER Experiment Name: At_Drought_Soil_Dry_P Parameter: Organism Value: A. thaliana
  misc_feature: MA Experiment 20001556 PARAMETER Experiment Name: At_Drought_Soil_Dry_P Parameter: Plant Line Value: WS
  misc_feature: MA Experiment 20001556 PARAMETER Experiment Name: At_Drought_Soil_Dry_P Parameter: Post Timepoint (hr) Value: None
  misc_feature: MA Experiment 20001556 PARAMETER Experiment Name: At_Drought_Soil_Dry_P Parameter: Post-Treatment Value: None
  misc_feature: MA Experiment 20001556 PARAMETER Experiment Name: At_Drought_Soil_Dry_P Parameter: Timepoint (day) Value: 12
  misc_feature: MA Experiment 20001556 PARAMETER Experiment Name: At_Drought_Soil_Dry_P Parameter: Treatment Value: Drought vs. No Drought
  misc_feature: MA Experiment ID: 20001557 Result: Down-regulated in Transcription
  misc_feature: MA Experiment 20001557 PARAMETER Experiment Name: At_Drought_Soil_Dry_P Parameter: Age (day) Value: 27
  misc_feature: MA Experiment 20001557 PARAMETER Experiment Name: At_Drought_Soil_Dry_P Parameter: Organism Value: A. thaliana
  misc_feature: MA Experiment 20001557 PARAMETER Experiment Name: At_Drought_Soil_Dry_P Parameter: Plant Line Value: WS
  misc_feature: MA Experiment 20001557 PARAMETER Experiment Name: At_Drought_Soil_Dry_P Parameter: Post Timepoint (hr) Value: 3
  misc_feature: MA Experiment 20001557 PARAMETER Experiment Name: At_Drought_Soil_Dry_P Parameter: Post-Treatment Value: Re-Water vs. No Drought
  misc_feature: MA Experiment 20001557 PARAMETER Experiment Name: At_Drought_Soil_Dry_P Parameter: Timepoint (day) Value: 13
  misc_feature: MA Experiment 20001557 PARAMETER Experiment Name: At_Drought_Soil_Dry_P Parameter: Treatment Value: Drought vs. No Drought
  misc_feature: MA Experiment ID: 20001558 Result: Down-regulated in Transcription
  misc_feature: MA Experiment 20001558 PARAMETER Experiment Name: At_Drought_Soil_Dry_P Parameter: Age (day) Value: 27
  misc_feature: MA Experiment 20001558 PARAMETER Experiment Name: At_Drought_Soil_Dry_P Parameter: Organism Value: A. thaliana
  misc_feature: MA Experiment 20001558 PARAMETER Experiment Name: At_Drought_Soil_Dry_P Parameter: Plant Line Value: WS
  misc_feature: MA Experiment 20001558 PARAMETER Experiment Name: At_Drought_Soil_Dry_P Parameter: Post Timepoint (hr) Value: 6
  misc_feature: MA Experiment 20001558 PARAMETER Experiment Name: At_Drought_Soil_Dry_P Parameter: Post-Treatment Value: Re-Water vs. No Drought
  misc_feature: MA Experiment 20001558 PARAMETER Experiment Name: At_Drought_Soil_Dry_P Parameter: Timepoint (day) Value: 13
  misc_feature: MA Experiment 20001558 PARAMETER Experiment Name: At_Drought_Soil_Dry_P Parameter: Treatment Value: Drought vs. No Drought
  misc_feature: MA Experiment ID: 20001559 Result: Down-regulated in Transcription
  misc_feature: MA Experiment 20001559 PARAMETER Experiment Name: At_Drought_Soil_Dry_P Parameter: Age (day) Value: 28
  misc_feature: MA Experiment 20001559 PARAMETER Experiment Name: At_Drought_Soil_Dry_P Parameter: Organism Value: A. thaliana
  misc_feature: MA Experiment 20001559 PARAMETER Experiment Name: At_Drought_Soil_Dry_P Parameter: Plant Line Value: WS
  misc_feature: MA Experiment 20001559 PARAMETER Experiment Name: At_Drought_Soil_Dry_P Parameter: Post Timepoint (hr) Value: 29
  misc_feature: MA Experiment 20001559 PARAMETER Experiment Name: At_Drought_Soil_Dry_P Parameter: Post-Treatment Value: Re-Water vs. No Drought
  misc_feature: MA Experiment 20001559 PARAMETER Experiment Name: At_Drought_Soil_Dry_P Parameter: Timepoint (day) Value: 14
  misc_feature: MA Experiment 20001559 PARAMETER Experiment Name: At_Drought_Soil_Dry_P Parameter: Treatment Value: Drought vs. No Drought
  misc_feature: MA Experiment ID: 20001904 Result: Down-regulated in Transcription
  misc_feature: MA Experiment 20001904 PARAMETER Experiment Name: At_Drought_Reproduction_P Parameter: Age (day) Value: 37
  misc_feature: MA Experiment 20001904 PARAMETER Experiment Name: At_Drought_Reproduction_P Parameter: Organism Value: A. thaliana
  misc_feature: MA Experiment 20001904 PARAMETER Experiment Name: At_Drought_Reproduction_P Parameter: Plant Line Value: WS
  misc_feature: MA Experiment 20001904 PARAMETER Experiment Name: At_Drought_Reproduction_P Parameter: Timepoint (day) Value: 7
  misc_feature: MA Experiment 20001904 PARAMETER Experiment Name: At_Drought_Reproduction_P Parameter: Tissue Value: Rosettes
  misc_feature: MA Experiment 20001904 PARAMETER Experiment Name: At_Drought_Reproduction_P Parameter: Treatment Value: Drought vs. No Drought
  misc_feature: MA Experiment ID: 20001905 Result: Down-regulated in Transcription
  misc_feature: MA Experiment 20001905 PARAMETER Experiment Name: At_Drought_Reproduction_P Parameter: Age (day) Value: 40
  misc_feature: MA Experiment 20001905 PARAMETER Experiment Name: At_Drought_Reproduction_P Parameter: Organism Value: A. thaliana
  misc_feature: MA Experiment 20001905 PARAMETER Experiment Name: At_Drought_Reproduction_P Parameter: Plant Line Value: WS
  misc_feature: MA Experiment 20001905 PARAMETER Experiment Name: At_Drought_Reproduction_P Parameter: Timepoint (day) Value: 10
  misc_feature: MA Experiment 20001905 PARAMETER Experiment Name: At_Drought_Reproduction_P Parameter: Tissue Value: Rosettes
  misc_feature: MA Experiment 20001905 PARAMETER Experiment Name: At_Drought_Reproduction_P Parameter: Treatment Value: Drought vs. No Drought
  misc_feature: MA Experiment ID: 20001906 Result: Down-regulated in Transcription
  misc_feature: MA Experiment 20001906 PARAMETER Experiment Name: At_Drought_Reproduction_P Parameter: Age (day) Value: 35
  misc_feature: MA Experiment 20001906 PARAMETER Experiment Name: At_Drought_Reproduction_P Parameter: Organism Value: A. thaliana
  misc_feature: MA Experiment 20001906 PARAMETER Experiment Name: At_Drought_Reproduction_P Parameter: Plant Line Value: WS
  misc_feature: MA Experiment 20001906 PARAMETER Experiment Name: At_Drought_Reproduction_P Parameter: Timepoint (day) Value: 5
  misc_feature: MA Experiment 20001906 PARAMETER Experiment Name: At_Drought_Reproduction_P Parameter: Tissue Value: Siliques
  misc_feature: MA Experiment 20001906 PARAMETER Experiment Name: At_Drought_Reproduction_P Parameter: Treatment Value: Drought vs. No Drought
  misc_feature: MA Experiment ID: 20001908 Result: Down-regulated in Transcription
  misc_feature: MA Experiment 20001908 PARAMETER Experiment Name: At_Drought_Reproduction_P Parameter: Age (day) Value: 40
  misc_feature: MA Experiment 20001908 PARAMETER Experiment Name: At_Drought_Reproduction_P Parameter: Organism Value: A. thaliana
  misc_feature: MA Experiment 20001908 PARAMETER Experiment Name: At_Drought_Reproduction_P Parameter: Plant Line Value: WS
  misc_feature: MA Experiment 20001908 PARAMETER Experiment Name: At_Drought_Reproduction_P Parameter: Timepoint (day) Value: 10
  misc_feature: MA Experiment 20001908 PARAMETER Experiment Name: At_Drought_Reproduction_P Parameter: Tissue Value: Siliques
  misc_feature: MA Experiment 20001908 PARAMETER Experiment Name: At_Drought_Reproduction_P Parameter: Treatment Value: Drought vs. No Drought
aatctagtaatcgttaaaaaagccactttgttagtattgcttaatactctctctctctctctgttcccaaggagatgaaaagcttcaatctcaaaacatagcagctctctcaataaaccaaacccaaatgcaagctgtgtagagagaaacggagtgaggaaggaaggagatgggaggggtgacgtcatcggtggcggcgaagtttgccttcttcccgccgagtccaccgtcttacaaggtggtgaccgacgagctcaccggactgttgcttctcagccctttcccccaccgcgaaaacgtagaaatcgtaaagcttcggaccaggagaggcacagagatcgtgggcatgtacgtgaggcatccgatggctacctccacgctcctctactcccatggcaacgccgccgatctgggacagatgtatgagctcttcattgagcttagcatccatctcaaggttaatcttatgggatacgattactccgggtatggacaatctactggaaagccgagtgagcataacacgtatgctgatatcgaagctgtttataagtgtcttgaagaaacctttggctctaagcaggaaggtgtcatcctctacggccaatctgtaggcagcggacctacgttagatcttgcttcccggttgcctcaacttagagccgtcgtccttcacagccccattctctccggtttaagagttatgtattccgtcaagaaaacctactggttcgacatctacaagaatatcgacaaaatcccatatgtcgattgcccggttctcatcattcatggaacttcggatgaggtagtggattgttctcatgggaaacaactatgggaactctgcaaagacaagtacgagccgctctgggtgaaaggagggaaccactgtgatcttgaacactaccctgaatacattagacacctcaagaagttcatagcaacagtagagagattaccatgtccgaggatgagcagcgaccaatcagagagagtgagagatgcgcccccgaggagaagtatggacaggagagtgaagccgaggcagagcacagagcgtagagagaaagagaagccaccaaagagtcagtcgaagatgagtagcagcagcagcaagctcaagatctcgtttgatcaacttgatcgctcgcggaggagcgttgactgccatgaaaagactcggaagagcgttgaccagattgagagggggaggaagagtgtggataggttggatagagttcgctccgagtaaaaaccacacactcacactcacacacgtataatacgtatgtagatgaaaagagtacataactgtttctatttaccgaacaaaataacatgtggatgtcgctcctcatattattgatttgtaatcttttatgcaatttgggatctctctcgccatctccttttg

SEQ ID NO: 26805 - protein, 361 aa, Arabidopsis thaliana
  peptide (1)..(361): Ceres Seq. ID no. 13499794
  misc_feature (100)..(168): Pfam Name: alpha/beta hydrolase fold Pfam Description: alpha/beta hydrolase fold
  misc_feature (1)..(358): Homolog of NCBI NO: 9802758 NR Description: Hypothetical protein [Arabidopsis thaliana]
  misc_feature (1)..(261): Homolog of NCBI NO: 22330474 NR Description: expressed protein [Arabidopsis thaliana]
  misc_feature (1)..(230): Homolog of NCBI NO: 18175921 NR Description: unknown protein [Arabidopsis thaliana]
  misc_feature (1)..(35): Homolog of NCBI NO: 34911338 NR Description: P0519D04.38 [Oryza sativa (japonica
  misc_feature (36)..(330): Homolog of NCBI NO: 34911338 NR Description: P0519D04.38 [Oryza sativa (japonica
  misc_feature (1)..(342): Homolog of NCBI NO: 10177798 NR Description: emb|CAB87778.1~gene_id:MXA21.9~strong similarity
  misc_feature (1)..(354): Homolog of NCBI NO: 15230760 NR Description: hypothetical protein [Arabidopsis thaliana]
  misc_feature (1)..(360): Homolog of NCBI NO: 15233975 NR Description: expressed protein [Arabidopsis thaliana]
  misc_feature (1)..(361): Homolog of NCBI NO: 15241394 NR Description: expressed protein [Arabidopsis thaliana]
  misc_feature (1)..(361): Homolog of NCBI NO: 15232168 NR Description: expressed protein [Arabidopsis thaliana]
MGGVTSSVAAKFAFFPPSPPSYKVVTDELTGLLLLSPFPHRENVEIVKLRTRRGTEIVGMYVRHPMATSTLLYSHGNAADLGQMYELFIELSIHLKVNLMGYDYSGYGQSTGKPSEHNTYADIEAVYKCLEETFGSKQEGVILYGQSVGSGPTLDLASRLPQLRAVVLHSPILSGLRVMYSVKKTYWFDIYKNIDKIPYVDCPVLIIHGTSDEVVDCSHGKQLWELCKDKYEPLWVKGGNHCDLEHYPEYIRHLKKFIATVERLPCPRMSSDQSERVRDAPPRRSMDRRVKPRQSTERREKEKPPKSQSKMSSSSSKLKISFDQLDRSRRSVDCHEKTRKSVDQIERGRKSVDRLDRVRSE

SEQ ID NO: 26806 - protein, 302 aa, Arabidopsis thaliana
  peptide (1)..(302): Ceres Seq. ID no. 13499795
  misc_feature (41)..(109): Pfam Name: alpha/beta hydrolase fold Pfam Description: alpha/beta hydrolase fold
  misc_feature (1)..(286): Homolog of NCBI NO: 25352159 NR Description: F21F23.4 protein - Arabidopsis thaliana
  misc_feature (1)..(299): Homolog of NCBI NO: 9802758 NR Description: Hypothetical protein [Arabidopsis thaliana]
  misc_feature (1)..(202): Homolog of NCBI NO: 22330474 NR Description: expressed protein [Arabidopsis thaliana]
  misc_feature (1)..(171): Homolog of NCBI NO: 18175921 NR Description: unknown protein [Arabidopsis thaliana]
  misc_feature (1)..(271): Homolog of NCBI NO: 34911338 NR Description: P0519D04.38 [Oryza sativa (japonica
  misc_feature (1)..(283): Homolog of NCBI NO: 10177798 NR Description: emb|CAB87778.1~gene_id:MXA21.9~strong similarity
  misc_feature (1)..(295): Homolog of NCBI NO: 15230760 NR Description: hypothetical protein [Arabidopsis thaliana]
  misc_feature (1)..(301): Homolog of NCBI NO: 15233975 NR Description: expressed protein [Arabidopsis thaliana]
  misc_feature (1)..(302): Homolog of NCBI NO: 15241394 NR Description: expressed protein [Arabidopsis thaliana]
  misc_feature (1)..(302): Homolog of NCBI NO: 15232168 NR Description: expressed protein [Arabidopsis thaliana]
MYVRHPMATSTLLYSHGNAADLGQMYELFIELSIHLKVNLMGYDYSGYGQSTGKPSEHNTYADIEAVYKCLEETFGSKQEGVILYGQSVGSGPTLDLASRLPQLRAVVLHSPILSGLRVMYSVKKTYWFDIYKNIDKIPYVDCPVLIIHGTSDEVVDCSHGKQLWELCKDKYEPLWVKGGNHCDLEHYPEYIRHLKKFIATVERLPCPRMSSDQSERVRDAPPRRSMDRRVKPRQSTERREKEKPPKSQSKMSSSSSKLKISFDQLDRSRRSVDCHEKTRKSVDQIERGRKSVDRLDRVRSE

SEQ ID NO: 26807 - protein, 296 aa, Arabidopsis thaliana
  peptide (1)..(296): Ceres Seq. ID no. 13499796
  misc_feature (35)..(103): Pfam Name: alpha/beta hydrolase fold Pfam Description: alpha/beta hydrolase fold
  misc_feature (1)..(280): Homolog of NCBI NO: 25352159 NR Description: F21F23.4 protein - Arabidopsis thaliana
  misc_feature (1)..(293): Homolog of NCBI NO: 9802758 NR Description: Hypothetical protein [Arabidopsis thaliana]
  misc_feature (1)..(196): Homolog of NCBI NO: 22330474 NR Description: expressed protein [Arabidopsis thaliana]
  misc_feature (1)..(165): Homolog of NCBI NO: 18175921 NR Description: unknown protein [Arabidopsis thaliana]
  misc_feature (1)..(265): Homolog of NCBI NO: 34911338 NR Description: P0519D04.38 [Oryza sativa (japonica
  misc_feature (1)..(277): Homolog of NCBI NO: 10177798 NR Description: emb|CAB87778.1~gene_id:MXA21.9~strong similarity
  misc_feature (1)..(289): Homolog of NCBI NO: 15230760 NR Description: hypothetical protein [Arabidopsis thaliana]
  misc_feature (1)..(295): Homolog of NCBI NO: 15233975 NR Description: expressed protein [Arabidopsis thaliana]
  misc_feature (1)..(296): Homolog of NCBI NO: 15241394 NR Description: expressed protein [Arabidopsis thaliana]
  misc_feature (1)..(296): Homolog of NCBI NO: 15232168 NR Description: expressed protein [Arabidopsis thaliana]
MATSTLLYSHGNAADLGQMYELFIELSIHLKVNLMGYDYSGYGQSTGKPSEHNTYADIEAVYKCLEETFGSKQEGVILYGQSVGSGPTLDLASRLPQLRAVVLHSPILSGLRVMYSVKKTYWFDIYKNIDKIPYVDCPVLIIHGTSDEVVDCSHGKQLWELCKDKYEPLWVKGGNHCDLEHYPEYIRHLKKFIATVERLPCPRMSSDQSERVRDAPPRRSMDRRVKPRQSTERREKEKPPKSQSKMSSSSSKLKISFDQLDRSRRSVDCHEKTRKSVDQIERGRKSVDRLDRVRSE

SEQ ID NO: 26808 - DNA, 755 bp, Arabidopsis thaliana
  misc_feature (1)..(755): Ceres Seq. ID no. 13499790
  misc_feature: MA Experiment ID: 108434 Result: Up-regulated in Transcription
  misc_feature: MA Experiment 108434 PARAMETER Experiment Name: At_Root_Tips_cDNA_P Parameter: Tissue Value: Root Tips
  misc_feature: MA Experiment ID: 108585 Result: Down-regulated in Transcription
  misc_feature: MA Experiment 108585 PARAMETER Experiment Name: At_5mM_NaNP_cDNA_P Parameter: Timepoint (hr) Value: 6
  misc_feature: MA Experiment 108585 PARAMETER Experiment Name: At_5mM_NaNP_cDNA_P Parameter: Tissue Value: Aerial
  misc_feature: MA Experiment 108585 PARAMETER Experiment Name: At_5mM_NaNP_cDNA_P Parameter: Treatment Value: null
  misc_feature: MA Experiment ID: 20000069 Result: Down-regulated in Transcription
  misc_feature: MA Experiment 20000069 PARAMETER Experiment Name: At_100uM_ABA_Mutants_cDNA_P Parameter: Plant Line Value: CS23
  misc_feature: MA Experiment 20000069 PARAMETER Experiment Name: At_100uM_ABA_Mutants_cDNA_P Parameter: Timepoint (hr) Value: 6
  misc_feature: MA Experiment 20000069 PARAMETER Experiment Name: At_100uM_ABA_Mutants_cDNA_P Parameter: Tissue Value: Aerial
  misc_feature: MA Experiment 20000069 PARAMETER Experiment Name: At_100uM_ABA_Mutants_cDNA_P Parameter: Treatment Value: 100uM ABA vs. No Treatment
aaagaccagggtgttttttttctgacaaaacaaattgtaacactcactaggcatagcattctagttagttctgcagaaatttatagcgacactggtccaaattaggaggagcgagagcgaaggtacgagtgaggatttacaattgtcgatcgttttcacctagaaaccctaatttcgggggctcgcacgccctctctgattagaagcgacttcattatcggtcactagaatctgctgcttcttttctgaaactagcattgtcaggaacatggacactaagaagaaatctaaggaacatggcctataccgtatagtcaatgctatcggttatgcatttggagcgggagctgttggaggttctgtatatcatttcgtgagaggggcatacaattccccaataggtgctcgatatgttggaggaacacaagcggctagcatgaatgctcctcgcttgggaggcacttttgctgtatttggaggattgctctcaacatttgactatgcattggtgcgcatcaggaagaaggaagatccatggaactccatcgtagcgggtgctgctacaggtggagttctgtctatccgaaaaggggttgttgcagcttcaacatcagcggttatgtttggtttttttttggctgtactcaaccctccgttcgggagcaagtaagctttttgggttgtctttgatgagaatgtcatttagactttcatgataattgccttttcgttatcaattcttcaaaattactgtt

SEQ ID NO: 26809 - protein, 133 aa, Arabidopsis thaliana
  peptide (1)..(133): Ceres Seq. ID no. 13499791
  misc_feature (4)..(133): Pfam Name: Tim17/Tim22/Tim23 family Pfam Description: Tim17/Tim22/Tim23 family
  misc_feature (13)..(126): Homolog of NCBI NO: 5032181 NR Description: translocase of inner mitochondrial membrane 17
  misc_feature (13)..(126): Homolog of NCBI NO: 34933423 NR Description: similar to mitochondrial inner membrane
  misc_feature (1)..(126): Homolog of NCBI NO: 15217923 NR Description: mitochondrial inner membrane translocase
  misc_feature (1)..(126): Homolog of NCBI NO: 34394571 NR Description: translocase inner membrane-like protein
  misc_feature (1)..(126): Homolog of NCBI NO: 6103722 NR Description: TIM17 [Arabidopsis thaliana]
  misc_feature (1)..(126): Homolog of NCBI NO: 38678772 NR Description: mitochondrial inner membrane translocase TM17-2
  misc_feature (1)..(126): Homolog of NCBI NO: 15228131 NR Description: protein translocase -related [Arabidopsis
  misc_feature (1)..(133): Homolog of NCBI NO: 38678774 NR Description: mitochondrial inner membrane translocase TM17-3
  misc_feature (1)..(133): Homolog of NCBI NO: 21593521 NR Description: membrane translocase-like protein [Arabidopsis
  misc_feature (1)..(133): Homolog of NCBI NO: 15239150 NR Description: membrane translocase - like protein [Arabidopsis
MDTKKKSKEHGLYRIVNAIGYAFGAGAVGGSVYHFVRGAYNSPIGARYVGGTQAASMNAPRLGGTFAVFGGLLSTFDYALVRIRKKEDPWNSIVAGAATGGVLSIRKGVVAASTSAVMFGFFLAVLNPPFGSK

SEQ ID NO: 26810 - protein, 77 aa, Arabidopsis thaliana
  peptide (1)..(77): Ceres Seq. ID no. 13499792
  misc_feature (1)..(77): Pfam Name: Tim17/Tim22/Tim23 family Pfam Description: Tim17/Tim22/Tim23 family
  misc_feature (1)..(70): Homolog of NCBI NO: 5032181 NR Description: translocase of inner mitochondrial membrane 17
  misc_feature (1)..(70): Homolog of NCBI NO: 34933423 NR Description: similar to mitochondrial inner membrane
  misc_feature (1)..(70): Homolog of NCBI NO: 15217923 NR Description: mitochondrial inner membrane translocase
  misc_feature (1)..(70): Homolog of NCBI NO: 34394571 NR Description: translocase inner membrane-like protein
  misc_feature (1)..(70): Homolog of NCBI NO: 6103722 NR Description: TIM17 [Arabidopsis thaliana]
  misc_feature (1)..(70): Homolog of NCBI NO: 38678772 NR Description: mitochondrial inner membrane translocase TM17-2
  misc_feature (1)..(70): Homolog of NCBI NO: 15228131 NR Description: protein translocase -related [Arabidopsis
  misc_feature (1)..(77): Homolog of NCBI NO: 38678774 NR Description: mitochondrial inner membrane translocase TM17-3
  misc_feature (1)..(77): Homolog of NCBI NO: 21593521 NR Description: membrane translocase-like protein [Arabidopsis
  misc_feature (1)..(77): Homolog of NCBI NO: 15239150 NR Description: membrane translocase - like protein [Arabidopsis
MNAPRLGGTFAVFGGLLSTFDYALVRIRKKEDPWNSIVAGAATGGVLSIRKGVVAASTSAVMFGFFLAVLNPPFGSK

SEQ ID NO: 26811 - DNA, 1125 bp, Arabidopsis thaliana
  misc_feature (1)..(1125): Ceres Seq. ID no. 13489937
  misc_feature: MA Experiment ID: 108434 Result: Down-regulated in Transcription
  misc_feature: MA Experiment 108434 PARAMETER Experiment Name: At_Root_Tips_cDNA_P Parameter: Tissue Value: Root Tips
  misc_feature: MA Experiment ID: 108462 Result: Up-regulated in Transcription
  misc_feature: MA Experiment 108462 PARAMETER Experiment Name: At_Germinating_Seeds_cDNA_P Parameter: Age (day) Value: 2 vs. 0
  misc_feature: MA Experiment 108462 PARAMETER Experiment Name: At_Germinating_Seeds_cDNA_P Parameter: Tissue Value: Germinating Seeds
  misc_feature: MA Experiment ID: 108463 Result: Up-regulated in Transcription
  misc_feature: MA Experiment 108463 PARAMETER Experiment Name: At_Germinating_Seeds_cDNA_P Parameter: Age (day) Value: 3 vs. 0
  misc_feature: MA Experiment 108463 PARAMETER Experiment Name: At_Germinating_Seeds_cDNA_P Parameter: Tissue Value: Germinating Seeds
  misc_feature: MA Experiment ID: 108464 Result: Up-regulated in Transcription
  misc_feature: MA Experiment 108464 PARAMETER Experiment Name: At_Germinating_Seeds_cDNA_P Parameter: Age (day) Value: 4 vs. 0
  misc_feature: MA Experiment 108464 PARAMETER Experiment Name: At_Germinating_Seeds_cDNA_P Parameter: Tissue Value: Germinating Seeds
  misc_feature: MA Experiment ID: 108474 Result: Down-regulated in Transcription
  misc_feature: MA Experiment 108474 PARAMETER Experiment Name: At_Drought_Flowers_cDNA_P Parameter: Timepoint (hr) Value: null
  misc_feature: MA Experiment 108474 PARAMETER Experiment Name: At_Drought_Flowers_cDNA_P Parameter: Treatment Value: Drought vs. No Drought
  misc_feature: MA Experiment ID: 108488 Result: Up-regulated in Transcription
  misc_feature: MA Experiment ID: 108489 Result: Down-regulated in Transcription
  misc_feature: MA Experiment ID: 108572 Result: Up-regulated in Transcription
  misc_feature: MA Experiment 108572 PARAMETER Experiment Name: At_Drought_cDNA_P Parameter: Timepoint (hr) Value: 1
  misc_feature: MA Experiment 108572 PARAMETER Experiment Name: At_Drought_cDNA_P Parameter: Tissue Value: Aerial
  misc_feature: MA Experiment 108572 PARAMETER Experiment Name: At_Drought_cDNA_P Parameter: Treatment Value: Drought vs. No Drought
  misc_feature: MA Experiment ID: 108573 Result: Up-regulated in Transcription
  misc_feature: MA Experiment 108573 PARAMETER Experiment Name: At_Drought_cDNA_P Parameter: Timepoint (hr) Value: 6
  misc_feature: MA Experiment 108573 PARAMETER Experiment Name: At_Drought_cDNA_P Parameter: Tissue Value: Aerial
  misc_feature: MA Experiment 108573 PARAMETER Experiment Name: At_Drought_cDNA_P Parameter: Treatment Value: Drought vs. No Drought
  misc_feature: MA Experiment ID: 108594 Result: Down-regulated in Transcription
  misc_feature: MA Experiment 108594 PARAMETER Experiment Name: At_Ler-rhl_Root_cDNA_P Parameter: Plant Line Value: null
  misc_feature: MA Experiment ID: 108595 Result: Down-regulated in Transcription
  misc_feature: MA Experiment 108595 PARAMETER Experiment Name: At_Ler-pi_Ovule_cDNA_P Parameter: Plant Line Value: null
  misc_feature: MA Experiment ID: 20000072 Result: Down-regulated in Transcription
  misc_feature: MA Experiment 20000072 PARAMETER Experiment Name: At_100uM_ABA_Mutants_cDNA_P Parameter: Plant Line Value: CS8105
  misc_feature: MA Experiment 20000072 PARAMETER Experiment Name: At_100uM_ABA_Mutants_cDNA_P Parameter: Timepoint (hr) Value: 6
  misc_feature: MA Experiment 20000072 PARAMETER Experiment Name: At_100uM_ABA_Mutants_cDNA_P Parameter: Tissue Value: Aerial
  misc_feature: MA Experiment 20000072 PARAMETER Experiment Name: At_100uM_ABA_Mutants_cDNA_P Parameter: Treatment Value: 100uM ABA vs. No Treatment
  misc_feature: MA Experiment ID: 20000087 Result: Down-regulated in Transcription
  misc_feature: MA Experiment 20000087 PARAMETER Experiment Name: At_100uM_ABA_Mutants_cDNA_P Parameter: Plant Line Value: WS
  misc_feature: MA Experiment 20000087 PARAMETER Experiment Name: At_100uM_ABA_Mutants_cDNA_P Parameter: Timepoint (hr) Value: 6
  misc_feature: MA Experiment 20000087 PARAMETER Experiment Name: At_100uM_ABA_Mutants_cDNA_P Parameter: Tissue Value: Aerial
  misc_feature: MA Experiment 20000087 PARAMETER Experiment Name: At_100uM_ABA_Mutants_cDNA_P Parameter: Treatment Value: 100uM ABA vs. No Treatment
  misc_feature: MA Experiment ID: 20000090 Result: Down-regulated in Transcription
  misc_feature: MA Experiment ID: 20000113 Result: Up-regulated in Transcription
  misc_feature: MA Experiment 20000113 PARAMETER Experiment Name: At_42deg_Heat_cDNA_P Parameter: Temperature (deg C) Value: 42 vs. 22
  misc_feature: MA Experiment 20000113 PARAMETER Experiment Name: At_42deg_Heat_cDNA_P Parameter: Timepoint (hr) Value: 8
  misc_feature: MA Experiment 20000113 PARAMETER Experiment Name: At_42deg_Heat_cDNA_P Parameter: Tissue Value: Aerial
  misc_feature: MA Experiment ID: 20000182 Result: Down-regulated in Transcription
  misc_feature: MA Experiment 20000182 PARAMETER Experiment Name: At_2mM_SA_P Parameter: Age (day) Value: 14
  misc_feature: MA Experiment 20000182 PARAMETER Experiment Name: At_2mM_SA_P Parameter: Organism Value: A. thaliana
  misc_feature: MA Experiment 20000182 PARAMETER Experiment Name: At_2mM_SA_P Parameter: Plant Line Value: WS
  misc_feature: MA Experiment 20000182 PARAMETER Experiment Name: At_2mM_SA_P Parameter: Timepoint (hr) Value: 6
  misc_feature: MA Experiment 20000182 PARAMETER Experiment Name: At_2mM_SA_P Parameter: Tissue Value: Aerial
  misc_feature: MA Experiment 20000182 PARAMETER Experiment Name: At_2mM_SA_P Parameter: Treatment Value: 2mM SA vs. No Treatment
  misc_feature: MA Experiment ID: 20000234 Result: Down-regulated in Transcription
  misc_feature: MA Experiment 20000234 PARAMETER Experiment Name: At_Siliques_P Parameter: Age (day) Value: 21
  misc_feature: MA Experiment 20000234 PARAMETER Experiment Name: At_Siliques_P Parameter: Organism Value: A. thaliana
  misc_feature: MA Experiment 20000234 PARAMETER Experiment Name: At_Siliques_P Parameter: Plant Line Value: WS
  misc_feature: MA Experiment 20000234 PARAMETER Experiment Name: At_Siliques_P Parameter: Tissue Value: Less Than 5mm Siliques vs. Whole Plant
  misc_feature: MA Experiment ID: 20000264 Result: Down-regulated in Transcription
  misc_feature: MA Experiment 20000264 PARAMETER Experiment Name: At_Open_Flower_P Parameter: Age (day) Value: 21
  misc_feature: MA Experiment 20000264 PARAMETER Experiment Name: At_Open_Flower_P Parameter: Plant Line Value: WS
  misc_feature: MA Experiment 20000264 PARAMETER Experiment Name: At_Open_Flower_P Parameter: Tissue Value: Open Flower vs. Whole Plant
  misc_feature: MA Experiment ID: 20000265 Result: Down-regulated in Transcription
  misc_feature: MA Experiment 20000265 PARAMETER Experiment Name: At_Open_Flower_P Parameter: Age (day) Value: 21
  misc_feature: MA Experiment 20000265 PARAMETER Experiment Name: At_Open_Flower_P Parameter: Plant Line Value: WS
  misc_feature: MA Experiment 20000265 PARAMETER Experiment Name: At_Open_Flower_P Parameter: Tissue Value: Closed Flower vs. Whole Plant
  misc_feature: MA Experiment ID: 20000267 Result: Down-regulated in Transcription
  misc_feature: MA Experiment 20000267 PARAMETER Experiment Name: At_Drought_P Parameter: Age (day) Value: 7
  misc_feature: MA Experiment 20000267 PARAMETER Experiment Name: At_Drought_P Parameter: Organism Value: A. thaliana
  misc_feature: MA Experiment 20000267 PARAMETER Experiment Name: At_Drought_P Parameter: Plant Line Value: WS
  misc_feature: MA Experiment 20000267 PARAMETER Experiment Name: At_Drought_P Parameter: Timepoint (hr) Value: 6
  misc_feature: MA Experiment 20000267 PARAMETER Experiment Name: At_Drought_P Parameter: Tissue Value: Whole Plant
  misc_feature: MA Experiment 20000267 PARAMETER Experiment Name: At_Drought_P Parameter: Treatment Value: Drought vs. No Drought
  misc_feature: MA Experiment ID: 20000268 Result: Down-regulated in Transcription
  misc_feature: MA Experiment 20000268 PARAMETER Experiment Name: At_100mM_NaCl__P Parameter: Age (day) Value: 14
  misc_feature: MA Experiment 20000268 PARAMETER Experiment Name: At_100mM_NaCl__P Parameter: Organism Value: A. thaliana
  misc_feature: MA Experiment 20000268 PARAMETER Experiment Name: At_100mM_NaCl__P Parameter: Plant Line Value: WS
  misc_feature: MA Experiment 20000268 PARAMETER Experiment Name: At_100mM_NaCl__P Parameter: Timepoint (hr) Value: 6
  misc_feature: MA Experiment 20000268 PARAMETER Experiment Name: At_100mM_NaCl__P Parameter: Tissue Value: Whole Plant
  misc_feature: MA Experiment 20000268 PARAMETER Experiment Name: At_100mM_NaCl__P Parameter: Treatment Value: 100mM NaCl vs. No Treatment
  misc_feature: MA Experiment ID: 20000436 Result: Down-regulated in Transcription
  misc_feature: MA Experiment 20000436 PARAMETER Experiment Name: At_Drought_P Parameter: Age (day) Value: 7
  misc_feature: MA Experiment 20000436 PARAMETER Experiment Name: At_Drought_P Parameter: Organism Value: A. thaliana
  misc_feature: MA Experiment 20000436 PARAMETER Experiment Name: At_Drought_P Parameter: Plant Line Value: WS
  misc_feature: MA Experiment 20000436 PARAMETER Experiment Name: At_Drought_P Parameter: Timepoint (hr) Value: 12
  misc_feature: MA Experiment 20000436 PARAMETER Experiment Name: At_Drought_P Parameter: Tissue Value: Whole Plant
  misc_feature: MA Experiment 20000436 PARAMETER Experiment Name: At_Drought_P Parameter: Treatment Value: Drought vs. No Drought
  misc_feature: MA Experiment ID: 20000437 Result: Down-regulated in Transcription
  misc_feature: MA Experiment 20000437 PARAMETER Experiment Name: At_Drought_P Parameter: Age (day) Value: 8
  misc_feature: MA Experiment 20000437 PARAMETER Experiment Name: At_Drought_P Parameter: Organism Value: A. thaliana
  misc_feature: MA Experiment 20000437 PARAMETER Experiment Name: At_Drought_P Parameter: Plant Line Value: WS
  misc_feature: MA Experiment 20000437 PARAMETER Experiment Name: At_Drought_P Parameter: Timepoint (hr) Value: 24
  misc_feature: MA Experiment 20000437 PARAMETER Experiment Name: At_Drought_P Parameter: Tissue Value: Whole Plant
  misc_feature: MA Experiment 20000437 PARAMETER Experiment Name: At_Drought_P Parameter: Treatment Value: Drought vs. No Drought
  misc_feature: MA Experiment ID: 20000438 Result: Down-regulated in Transcription
  misc_feature: MA Experiment 20000438 PARAMETER Experiment Name: At_Shoots__P Parameter: Age (day) Value: 14
  misc_feature: MA Experiment 20000438 PARAMETER Experiment Name: At_Shoots__P Parameter: Tissue Value: Shoots vs. Whole Plant
  misc_feature: MA Experiment ID: 20000451 Result: Down-regulated in Transcription
  misc_feature: MA Experiment 20000451 PARAMETER Experiment Name: At_CS6879_Shoots-Roots_P Parameter: Age (day) Value: 14
  misc_feature: MA Experiment 20000451 PARAMETER Experiment Name: At_CS6879_Shoots-Roots_P Parameter: Organism Value: A. thaliana
  misc_feature: MA Experiment 20000451 PARAMETER Experiment Name: At_CS6879_Shoots-Roots_P Parameter: Plant Line Value: CS6879 vs. WS
  misc_feature: MA Experiment 20000451 PARAMETER Experiment Name: At_CS6879_Shoots-Roots_P Parameter: Tissue Value: Roots
  misc_feature: MA Experiment ID: 20000495 Result: Down-regulated in Transcription
  misc_feature: MA Experiment 20000495 PARAMETER Experiment Name: At_Guard_Cells_P Parameter: Harvest Date Value: 8/2/2002
  misc_feature: MA Experiment 20000495 PARAMETER Experiment Name: At_Guard_Cells_P Parameter: Organism Value: A. thaliana
  misc_feature: MA Experiment 20000495 PARAMETER Experiment Name: At_Guard_Cells_P Parameter: Tissue Value: Guard Cells vs. Leaves
  misc_feature: MA Experiment ID: 20001554 Result: Down-regulated in Transcription
  misc_feature: MA Experiment 20001554 PARAMETER Experiment Name: At_Drought_Soil_Dry_P Parameter: Age (day) Value: 21
  misc_feature: MA Experiment 20001554 PARAMETER Experiment Name: At_Drought_Soil_Dry_P Parameter: Organism Value: A. thaliana
  misc_feature: MA Experiment 20001554 PARAMETER Experiment Name: At_Drought_Soil_Dry_P Parameter: Plant Line Value: WS
  misc_feature: MA Experiment 20001554 PARAMETER Experiment Name: At_Drought_Soil_Dry_P Parameter: Post Timepoint (hr) Value: None
  misc_feature: MA Experiment 20001554 PARAMETER Experiment Name: At_Drought_Soil_Dry_P Parameter: Post-Treatment Value: None
  misc_feature: MA Experiment 20001554 PARAMETER Experiment Name: At_Drought_Soil_Dry_P Parameter: Timepoint (day) Value: 7
  misc_feature: MA Experiment 20001554 PARAMETER Experiment Name: At_Drought_Soil_Dry_P Parameter: Treatment Value: Drought vs. No Drought
  misc_feature: MA Experiment ID: 20001555 Result: Down-regulated in Transcription
  misc_feature: MA Experiment 20001555 PARAMETER Experiment Name: At_Drought_Soil_Dry_P Parameter: Age (day) Value: 24
  misc_feature: MA Experiment 20001555 PARAMETER Experiment Name: At_Drought_Soil_Dry_P Parameter: Organism Value: A. thaliana
  misc_feature: MA Experiment 20001555 PARAMETER Experiment Name: At_Drought_Soil_Dry_P Parameter: Plant Line Value: WS
  misc_feature: MA Experiment 20001555 PARAMETER Experiment Name: At_Drought_Soil_Dry_P Parameter: Post Timepoint (hr) Value: None
  misc_feature: MA Experiment 20001555 PARAMETER Experiment Name: At_Drought_Soil_Dry_P Parameter: Post-Treatment Value: None
  misc_feature: MA Experiment 20001555 PARAMETER Experiment Name: At_Drought_Soil_Dry_P Parameter: Timepoint (day) Value: 10
  misc_feature: MA Experiment 20001555 PARAMETER Experiment Name: At_Drought_Soil_Dry_P Parameter: Treatment Value: Drought vs. No Drought
  misc_feature: MA Experiment ID: 20001556 Result: Down-regulated in Transcription
  misc_feature: MA Experiment 20001556 PARAMETER Experiment Name: At_Drought_Soil_Dry_P Parameter: Age (day) Value: 26
  misc_feature: MA Experiment 20001556 PARAMETER Experiment Name: At_Drought_Soil_Dry_P Parameter: Organism Value: A. thaliana
  misc_feature: MA Experiment 20001556 PARAMETER Experiment Name: At_Drought_Soil_Dry_P Parameter: Plant Line Value: WS
  misc_feature: MA Experiment 20001556 PARAMETER Experiment Name: At_Drought_Soil_Dry_P Parameter: Post Timepoint (hr) Value: None
  misc_feature: MA Experiment 20001556 PARAMETER Experiment Name: At_Drought_Soil_Dry_P Parameter: Post-Treatment Value: None
  misc_feature: MA Experiment 20001556 PARAMETER Experiment Name: At_Drought_Soil_Dry_P Parameter: Timepoint (day) Value: 12
  misc_feature: MA Experiment 20001556 PARAMETER Experiment Name: At_Drought_Soil_Dry_P Parameter: Treatment Value: Drought vs. No Drought
  misc_feature: MA Experiment ID: 20001559 Result: Down-regulated in Transcription
  misc_feature: MA Experiment 20001559 PARAMETER Experiment Name: At_Drought_Soil_Dry_P Parameter: Age (day) Value: 28
  misc_feature: MA Experiment 20001559 PARAMETER Experiment Name: At_Drought_Soil_Dry_P Parameter: Organism Value: A. thaliana
  misc_feature: MA Experiment 20001559 PARAMETER Experiment Name: At_Drought_Soil_Dry_P Parameter: Plant Line Value: WS
  misc_feature: MA Experiment 20001559 PARAMETER Experiment Name: At_Drought_Soil_Dry_P Parameter: Post Timepoint (hr) Value: 29
  misc_feature: MA Experiment 20001559 PARAMETER Experiment Name: At_Drought_Soil_Dry_P Parameter: Post-Treatment Value: Re-Water vs. No Drought
  misc_feature: MA Experiment 20001559 PARAMETER Experiment Name: At_Drought_Soil_Dry_P Parameter: Timepoint (day) Value: 14
  misc_feature: MA Experiment 20001559 PARAMETER Experiment Name: At_Drought_Soil_Dry_P Parameter: Treatment Value: Drought vs. No Drought
  misc_feature: MA Experiment ID: 20001904 Result: Down-regulated in Transcription
  misc_feature: MA Experiment 20001904 PARAMETER Experiment Name: At_Drought_Reproduction_P Parameter: Age (day) Value: 37
  misc_feature: MA Experiment 20001904 PARAMETER Experiment Name: At_Drought_Reproduction_P Parameter: Organism Value: A. thaliana
  misc_feature: MA Experiment 20001904 PARAMETER Experiment Name: At_Drought_Reproduction_P Parameter: Plant Line Value: WS
  misc_feature: MA Experiment 20001904 PARAMETER Experiment Name: At_Drought_Reproduction_P Parameter: Timepoint (day) Value: 7
  misc_feature: MA Experiment 20001904 PARAMETER Experiment Name: At_Drought_Reproduction_P Parameter: Tissue Value: Rosettes
  misc_feature: MA Experiment 20001904 PARAMETER Experiment Name: At_Drought_Reproduction_P Parameter: Treatment Value: Drought vs. No Drought
  misc_feature: MA Experiment ID: 20001905 Result: Down-regulated in Transcription
  misc_feature: MA Experiment 20001905 PARAMETER Experiment Name: At_Drought_Reproduction_P Parameter: Age (day) Value: 40
  misc_feature: MA Experiment 20001905 PARAMETER Experiment Name: At_Drought_Reproduction_P Parameter: Organism Value: A. thaliana
  misc_feature: MA Experiment 20001905 PARAMETER Experiment Name: At_Drought_Reproduction_P Parameter: Plant Line Value: WS
  misc_feature: MA Experiment 20001905 PARAMETER Experiment Name: At_Drought_Reproduction_P Parameter: Timepoint (day) Value: 10
  misc_feature: MA Experiment 20001905 PARAMETER Experiment Name: At_Drought_Reproduction_P Parameter: Tissue Value: Rosettes
  misc_feature: MA Experiment 20001905 PARAMETER Experiment Name: At_Drought_Reproduction_P Parameter: Treatment Value: Drought vs. No Drought
  misc_feature: MA Experiment ID: 20001906 Result: Down-regulated in Transcription
  misc_feature: MA Experiment 20001906 PARAMETER Experiment Name: At_Drought_Reproduction_P Parameter: Age (day) Value: 35
  misc_feature: MA Experiment 20001906 PARAMETER Experiment Name: At_Drought_Reproduction_P Parameter: Organism Value: A. thaliana
  misc_feature: MA Experiment 20001906 PARAMETER Experiment Name: At_Drought_Reproduction_P Parameter: Plant Line Value: WS
  misc_feature: MA Experiment 20001906 PARAMETER Experiment Name: At_Drought_Reproduction_P Parameter: Timepoint (day) Value: 5
  misc_feature: MA Experiment 20001906 PARAMETER Experiment Name: At_Drought_Reproduction_P Parameter: Tissue Value: Siliques
  misc_feature: MA Experiment 20001906 PARAMETER Experiment Name: At_Drought_Reproduction_P Parameter: Treatment Value: Drought vs. No Drought
  misc_feature: MA Experiment ID: 20001911 Result: Down-regulated in Transcription
  misc_feature: MA Experiment 20001911 PARAMETER Experiment Name: At_Drought_Reproduction_P Parameter: Age (day) Value: 40
  misc_feature: MA Experiment 20001911 PARAMETER Experiment Name: At_Drought_Reproduction_P Parameter: Organism Value: A. thaliana
  misc_feature: MA Experiment 20001911 PARAMETER Experiment Name: At_Drought_Reproduction_P Parameter: Plant Line Value: WS
  misc_feature: MA Experiment 20001911 PARAMETER Experiment Name: At_Drought_Reproduction_P Parameter: Timepoint (day) Value: 10
  misc_feature: MA Experiment 20001911 PARAMETER Experiment Name: At_Drought_Reproduction_P Parameter: Tissue Value: Flowers
  misc_feature: MA Experiment 20001911 PARAMETER Experiment Name: At_Drought_Reproduction_P Parameter: Treatment Value: Drought vs. No Drought
tgacagagacaacaaactaaagttggtggtgatagagtgagagagaaacatggaaggcaaagaagaagacgtcaatgttggagccaacaagttcccagagagacagccgatcggtacggcggctcagacggagagcaaggactataaggaaccaccaccggcgccgtttttcgaacccggcgagctcaaatcttggtctttctacagagcagggatagctgagttcatagccactttccttttcctctacgtcaccgttttgacagtcatgggtgttaagagagctcccaatatgtgtgcctctgttggaatccaaggcatcgcttgggcttttggtggcatgatctttgctcttgtttactgtactgctggaatctcaggaggacatattaatccggcggtgacttttggtttgttcttggcgaggaagctatctttaaccagagctctgttctacatagtaatgcagtgccttggagctatatgtggtgctggtgtggttaaagggtttcaaccagggctgtaccagacgaatggcggtggagctaatgtggtggctcatggttacacaaagggttcaggtcttggtgcagagattgttggaacttttgttctggtttacactgttttctcagctactgatgctaagagaagtgccagagactctcatgtccctatcttggctccgcttccaattgggtttgctgtcttcttggtgcacttggctaccatcccaattactggaactggcattaacccggccaggagtctcggagctgccatcatctacaacaaggatcatgcttgggatgaccattggatcttctgggtcggtccattcattggtgctgcgcttgctgctctgtaccatcagatagtcatcagagctattcctttcaagtccaagacataaagtttcctacatattctctgatcatcatcaagctaagaatatatcaatctttaattctatatgctttcttcttgtttcctatgtcatgtgtgatgatctctatatgtaccactagagctttgatcttgtaacagtgtaaatgtgtaatctattatgtatcaatggcattgtatcttgtaacattaattatgtcaatggaagaatacattgtg

SEQ ID NO: 26812 - protein, 287 aa, Arabidopsis thaliana
  peptide (1)..(287): Ceres Seq. ID no. 13489938
  misc_feature (1)..(287): Homolog of NCBI NO: 2373401 NR Description: transmembrane protein [Arabidopsis thaliana]
  misc_feature (1)..(287): Homolog of NCBI NO: 472873 NR Description: plasma membrane intrinsic protein 1a [Arabidopsis
  misc_feature (1)..(287): Homolog of NCBI NO: 15233109 NR Description: plasma membrane intrinsic protein 1A [Arabidopsis
  misc_feature (1)..(287): Homolog of NCBI NO: 7441247 NR Description: probable plasma membrane intrinsic protein 1c -
  misc_feature (1)..(287): Homolog of NCBI NO: 472875 NR Description: plasma membrane intrinsic protein 1c [Arabidopsis
  misc_feature (1)..(287): Homolog of NCBI NO: 18411332 NR Description: transmembrane protein (MIP family) [Arabidopsis
  misc_feature (1)..(287): Homolog of NCBI NO: 17065068 NR Description: plasma membrane intrinsic protein 1C
  misc_feature (1)..(287): Homolog of NCBI NO: 15223438 NR Description: plasma membrane intrinsic protein 1c [Arabidopsis
  misc_feature (1)..(287): Homolog of NCBI NO: 21593526 NR Description: water channel-like protein [Arabidopsis thaliana]
  misc_feature (1)..(287): Homolog of NCBI NO: 15236485 NR Description: major intrinsic protein (MIP) family [Arabidopsis
MEGKEEDVNVGANKFPERQPIGTAAQTESKDYKEPPPAPFFEPGELKSWSFYRAGIAEFIATFLFLYVTVLTVMGVKRAPNMCASVGIQGIAWAFGGMIFALVYCTAGISGGHINPAVTFGLFLARKLSLTRALFYIVMQCLGAICGAGVVKGFQPGLYQTNGGGANVVAHGYTKGSGLGAEIVGTFVLVYTVFSATDAKRSARDSHVPILAPLPIGFAVFLVHLATIPITGTGINPARSLGAAIIYNKDHAWDDHWIFWVGPFIGAALAALYHQIVIRAIPFKSKT

SEQ ID NO: 26813 - protein, 214 aa, Arabidopsis thaliana
  peptide (1)..(214): Ceres Seq. ID no. 13489939
  misc_feature (1)..(214): Homolog of NCBI NO: 2373401 NR Description: transmembrane protein [Arabidopsis thaliana]
  misc_feature (1)..(214): Homolog of NCBI NO: 472873 NR Description: plasma membrane intrinsic protein 1a [Arabidopsis
  misc_feature (1)..(214): Homolog of NCBI NO: 15233109 NR Description: plasma membrane intrinsic protein 1A [Arabidopsis
  misc_feature (1)..(214): Homolog of NCBI NO: 7441247 NR Description: probable plasma membrane intrinsic protein 1c -
  misc_feature (1)..(214): Homolog of NCBI NO: 472875 NR Description: plasma membrane intrinsic protein 1c [Arabidopsis
  misc_feature (1)..(214): Homolog of NCBI NO: 18411332 NR Description: transmembrane protein (MIP family) [Arabidopsis
  misc_feature (1)..(214): Homolog of NCBI NO: 17065068 NR Description: plasma membrane intrinsic protein 1C
  misc_feature (1)..(214): Homolog of NCBI NO: 15223438 NR Description: plasma membrane intrinsic protein 1c [Arabidopsis
  misc_feature (1)..(214): Homolog of NCBI NO: 21593526 NR Description: water channel-like protein [Arabidopsis thaliana]
  misc_feature (1)..(214): Homolog of NCBI NO: 15236485 NR Description: major intrinsic protein (MIP) family [Arabidopsis
MGVKRAPNMCASVGIQGIAWAFGGMIFALVYCTAGISGGHINPAVTFGLFLARKLSLTRALFYIVMQCLGAICGAGVVKGFQPGLYQTNGGGANVVAHGYTKGSGLGAEIVGTFVLVYTVFSATDAKRSARDSHVPILAPLPIGFAVFLVHLATIPITGTGINPARSLGAAIIYNKDHAWDDHWIFWVGPFIGAALAALYHQIVIRAIPFKSKT

SEQ ID NO: 26814 - protein, 206 aa, Arabidopsis thaliana
  peptide (1)..(206): Ceres Seq. ID no. 13489940
  misc_feature (1)..(206): Homolog of NCBI NO: 17065068 NR Description: plasma membrane intrinsic protein 1C
  misc_feature (1)..(206): Homolog of NCBI NO: 15223438 NR Description: plasma membrane intrinsic protein 1c [Arabidopsis
  misc_feature (1)..(206): Homolog of NCBI NO: 21593526 NR Description: water channel-like protein [Arabidopsis thaliana]
  misc_feature (1)..(206): Homolog of NCBI NO: 15236485 NR Description: major intrinsic protein (MIP) family [Arabidopsis
  misc_feature (1)..(206): Homolog of NCBI NO: 2373401 NR Description: transmembrane protein [Arabidopsis thaliana]
  misc_feature (1)..(206): Homolog of NCBI NO: 472873 NR Description: plasma membrane intrinsic protein 1a [Arabidopsis
  misc_feature (1)..(206): Homolog of NCBI NO: 15233109 NR Description: plasma membrane intrinsic protein 1A [Arabidopsis
  misc_feature (1)..(206): Homolog of NCBI NO: 7441247 NR Description: probable plasma membrane intrinsic protein 1c -
  misc_feature (1)..(206): Homolog of NCBI NO: 472875 NR Description: plasma membrane intrinsic protein 1c [Arabidopsis
  misc_feature (1)..(206): Homolog of NCBI NO: 18411332 NR Description: transmembrane protein (MIP family) [Arabidopsis
MCASVGIQGIAWAFGGMIFALVYCTAGISGGHINPAVTFGLFLARKLSLTRALFYIVMQCLGAICGAGVVKGFQPGLYQTNGGGANVVAHGYTKGSGLGAEIVGTFVLVYTVFSATDAKRSARDSHVPILAPLPIGFAVFLVHLATIPITGTGINPARSLGAAIIYNKDHAWDDHWIFWVGPFIGAALAALYHQIVIRAIPFKSKT

SEQ ID NO: 26815 - DNA, 1474 bp, Arabidopsis thaliana
  misc_feature (1)..(1474): Ceres Seq. ID no. 13490135
  misc_feature: MA Experiment ID: 20000184 Result: Down-regulated in Transcription
  misc_feature: MA Experiment 20000184 PARAMETER Experiment Name: At_Shoots__P Parameter: Age (day) Value: 7
  misc_feature: MA Experiment 20000184 PARAMETER Experiment Name: At_Shoots__P Parameter: Tissue Value: Shoots vs. Whole Plant
  misc_feature: MA Experiment ID: 20000227 Result: Down-regulated in Transcription
  misc_feature: MA Experiment 20000227 PARAMETER Experiment Name: At_Root-Tips-vs-Tops_P Parameter: Tissue Value: Root Tips vs. Root Tops
  misc_feature: MA Experiment ID: 20000234 Result: Down-regulated in Transcription
  misc_feature: MA Experiment 20000234 PARAMETER Experiment Name: At_Siliques_P Parameter: Age (day) Value: 21
  misc_feature: MA Experiment 20000234 PARAMETER Experiment Name: At_Siliques_P Parameter: Organism Value: A. thaliana
  misc_feature: MA Experiment 20000234 PARAMETER Experiment Name: At_Siliques_P Parameter: Plant Line Value: WS
  misc_feature: MA Experiment 20000234 PARAMETER Experiment Name: At_Siliques_P Parameter: Tissue Value: Less Than 5mm Siliques vs. Whole Plant
  misc_feature: MA Experiment ID: 20000265 Result: Down-regulated in Transcription
  misc_feature: MA Experiment 20000265 PARAMETER Experiment Name: At_Open_Flower_P Parameter: Age (day) Value: 21
  misc_feature: MA Experiment 20000265 PARAMETER Experiment Name: At_Open_Flower_P Parameter: Plant Line Value: WS
  misc_feature: MA Experiment 20000265 PARAMETER Experiment Name: At_Open_Flower_P Parameter: Tissue Value: Closed Flower vs. Whole Plant
  misc_feature: MA Experiment ID: 20000286 Result: Down-regulated in Transcription
  misc_feature: MA Experiment 20000286 PARAMETER Experiment Name: At_Open_Flower_P Parameter: Age (day) Value: 21
  misc_feature: MA Experiment 20000286 PARAMETER Experiment Name: At_Open_Flower_P Parameter: Plant Line Value: WS
  misc_feature: MA Experiment 20000286 PARAMETER Experiment Name: At_Open_Flower_P Parameter: Tissue Value: Half Open vs. Whole Plant
  misc_feature: MA Experiment ID: 20000437 Result: Up-regulated in Transcription
  misc_feature: MA Experiment 20000437 PARAMETER Experiment Name: At_Drought_P Parameter: Age (day) Value: 8
  misc_feature: MA Experiment 20000437 PARAMETER Experiment Name: At_Drought_P Parameter: Organism Value: A. thaliana
  misc_feature: MA Experiment 20000437 PARAMETER Experiment Name: At_Drought_P Parameter: Plant Line Value: WS
  misc_feature: MA Experiment 20000437 PARAMETER Experiment Name: At_Drought_P Parameter: Timepoint (hr) Value: 24
  misc_feature: MA Experiment 20000437 PARAMETER Experiment Name: At_Drought_P Parameter: Tissue Value: Whole Plant
  misc_feature: MA Experiment 20000437 PARAMETER Experiment Name: At_Drought_P Parameter: Treatment Value: Drought vs. No Drought
  misc_feature: MA Experiment ID: 20000438 Result: Down-regulated in Transcription
  misc_feature: MA Experiment 20000438 PARAMETER Experiment Name: At_Shoots__P Parameter: Age (day) Value: 14
  misc_feature: MA Experiment 20000438 PARAMETER Experiment Name: At_Shoots__P Parameter: Tissue Value: Shoots vs. Whole Plant
  misc_feature: MA Experiment ID: 20000439 Result: Down-regulated in Transcription
  misc_feature: MA Experiment 20000439 PARAMETER Experiment Name: At_Roots__P Parameter: Age (day) Value: 14 vs. 21
  misc_feature: MA Experiment 20000439 PARAMETER Experiment Name: At_Roots__P Parameter: Organism Value: A. thaliana
  misc_feature: MA Experiment 20000439 PARAMETER Experiment Name: At_Roots__P Parameter: Tissue Value: Roots vs. Whole Plant
  misc_feature: MA Experiment ID: 20001248 Result: Up-regulated in Transcription
  misc_feature: MA Experiment 20001248 PARAMETER Experiment Name: At_Far-red-induction_P Parameter: Age (day) Value: 7
  misc_feature: MA Experiment 20001248 PARAMETER Experiment Name: At_Far-red-induction_P Parameter: Light Value: Far-red vs. White
  misc_feature: MA Experiment 20001248 PARAMETER Experiment Name: At_Far-red-induction_P Parameter: Organism Value: A. thaliana
  misc_feature: MA Experiment 20001248 PARAMETER Experiment Name: At_Far-red-induction_P Parameter: Plant Line Value: Columbia
  misc_feature: MA Experiment 20001248 PARAMETER Experiment Name: At_Far-red-induction_P Parameter: Timepoint (hr) Value: 4
  misc_feature: MA Experiment 20001248 PARAMETER Experiment Name: At_Far-red-induction_P Parameter: Tissue Value: Whole Plant
  misc_feature: MA Experiment ID: 20001558 Result: Down-regulated in Transcription
  misc_feature: MA Experiment 20001558 PARAMETER Experiment Name: At_Drought_Soil_Dry_P Parameter: Age (day) Value: 27
  misc_feature: MA Experiment 20001558 PARAMETER Experiment Name: At_Drought_Soil_Dry_P Parameter: Organism Value: A. thaliana
  misc_feature: MA Experiment 20001558 PARAMETER Experiment Name: At_Drought_Soil_Dry_P Parameter: Plant Line Value: WS
  misc_feature: MA Experiment 20001558 PARAMETER Experiment Name: At_Drought_Soil_Dry_P Parameter: Post Timepoint (hr) Value: 6
  misc_feature: MA Experiment 20001558 PARAMETER Experiment Name: At_Drought_Soil_Dry_P Parameter: Post-Treatment Value: Re-Water vs. No Drought
  misc_feature: MA Experiment 20001558 PARAMETER Experiment Name: At_Drought_Soil_Dry_P Parameter: Timepoint (day) Value: 13
  misc_feature: MA Experiment 20001558 PARAMETER Experiment Name: At_Drought_Soil_Dry_P Parameter: Treatment Value: Drought vs. No Drought
ctttgtctttctcattcgtcgttgatccatctttttcccccaaattcatatccttccttagatatttttctccttcttcttcttctagattccagctactccagaagattcttcgacttaatctgatgtgattaggaagagcaatagaggaagagaagaatcagaaaaaatggatccggcgactaattcaccgattatgccgattgatttaccgattatgcacgacagtgatcgttacgacttcgttaaagatattggctctggtaatttcggcgttgctcgtctcatgaccgatagagtcaccaaggagcttgttgctgttaaatacatcgagagaggagaaaagattgatgaaaatgttcagagggagattatcaatcatagatcattgagacatcctaatattgttaggtttaaagaggtgattttgacgccttcccatttggctattgttatggaatatgctgctggtggagaactttatgagcggatttgtaatgccggacggtttagtgaagatgaggctcggttcttctttcagcagcttatatctggagttagctattgtcatgcaatgcaaatatgccatcgggatctgaagctggaaaatacattgttagatggaagtccggcacctcgtttgaaaatatgtgattttggttattccaagtcttctgtttcttcattcccaaccaaagtcaactgttggtactcctgcatacattgcaccagagattcttcttcgacaggaatatgatggcaagcttgcagatgtatggtcttgcggtgtaacattatatgtaatgttggttggagcttatccattcgaggatccacaggagccacgagattatcgaaagacaatacaaagaatccttagtgtcacatactcgatcccagaggacttacacctctcaccagaatgtcgccatctaatatcgaggatcttcgtggctgatccggcaacaagaatcactattccggagatcacatccgataaatggttcttgaagaatctaccaggtgatttgatggatgagaaccgaatgggaagtcagtttcaagagcctgagcagccaatgcagagccttgacacgattatgcagataatatcggaggctacgattccgactgttcgtaatcgttgcctcgatgatttcatggcggataatcttgatctagacgatgacatggatgactttgattccgaatctgagattgatgttgacagtagtggagagatagtttatgctctctgagattcctgaggacaaagtctgttttgtccgtactgttgagacacaccactggagttttgtcttagctccacgcactccatcgttcatttttggatcgtttgttgttttttactctacaagctttggattcacatacatatatatgtattgtaatgtaatatgtaatatattctatgtatttctctttgtttaataactattggcacattttatac

SEQ ID NO: 26816 - protein, 195 aa, Arabidopsis thaliana
  peptide (1)..(195): Ceres Seq. ID no. 13490136
  misc_feature (23)..(170): Pfam Name: Protein kinase domain Pfam Description: Protein kinase domain
  misc_feature (21)..(170): Homolog of NCBI NO: 19568098 NR Description: osmotic stress-activated protein kinase
  misc_feature (21)..(170): Homolog of NCBI NO: 34906840 NR Description: putative protein kinase HvPKABA1(Abcisic
  misc_feature (21)..(170): Homolog of NCBI NO: 29164823 NR Description: abcisic acid-inducible protein kinanase
  misc_feature (10)..(170): Homolog of NCBI NO: 6739629 NR Description: abscisic acid-activated protein kinase [Vicia
  misc_feature (1)..(170): Homolog of NCBI NO: 7446439 NR Description: probable serine/threonine-specific protein kinase
  misc_feature (1)..(170): Homolog of NCBI NO: 18418337 NR Description: protein kinase, putative [Arabidopsis thaliana]
  misc_feature (14)..(170): Homolog of NCBI NO: 20260398 NR Description: putative protein [Arabidopsis thaliana]
  misc_feature (11)..(170): Homolog of NCBI NO: 15240124 NR Description: serine/threonine protein kinase, putative
  misc_feature (1)..(170): Homolog of NCBI NO: 21593534 NR Description: protein kinase SPK-2 [Arabidopsis thaliana]
  misc_feature (1)..(170): Homolog of NCBI NO: 15229772 NR Description: protein kinase, putative [Arabidopsis thaliana]
MDPATNSPIMPIDLPIMHDSDRYDFVKDIGSGNFGVARLMTDRVTKELVAVKYIERGEKIDENVQREIINHRSLRHPNIVRFKEVILTPSHLAIVMEYAAGGELYERICNAGRFSEDEARFFFQQLISGVSYCHAMQICHRDLKLENTLLDGSPAPRLKICDFGYSKSSVSSFPTKVNCWYSCIHCTRDSSSTGI

SEQ ID NO: 26817 - protein, 186 aa, Arabidopsis thaliana
  peptide (1)..(186): Ceres Seq. ID no. 13490137
  misc_feature (14)..(161): Pfam Name: Protein kinase domain Pfam Description: Protein kinase domain
  misc_feature (12)..(161): Homolog of NCBI NO: 19568098 NR Description: osmotic stress-activated protein kinase
  misc_feature (12)..(161): Homolog of NCBI NO: 34906840 NR Description: putative protein kinase HvPKABA1(Abcisic
  misc_feature (12)..(161): Homolog of NCBI NO: 29164823 NR Description: abcisic acid-inducible protein kinanase
  misc_feature (1)..(161): Homolog of NCBI NO: 6739629 NR Description: abscisic acid-activated protein kinase [Vicia
  misc_feature (1)..(161): Homolog of NCBI NO: 7446439 NR Description: probable serine/threonine-specific protein kinase
  misc_feature (1)..(161): Homolog of NCBI NO: 18418337 NR Description: protein kinase, putative [Arabidopsis thaliana]
  misc_feature (5)..(161): Homolog of NCBI NO: 20260398 NR Description: putative protein [Arabidopsis thaliana]
  misc_feature (2)..(161): Homolog of NCBI NO: 15240124 NR Description: serine/threonine protein kinase, putative
  misc_feature (1)..(161): Homolog of NCBI NO: 21593534 NR Description: protein kinase SPK-2 [Arabidopsis thaliana]
  misc_feature (1)..(161): Homolog of NCBI NO: 15229772 NR Description: protein kinase, putative [Arabidopsis thaliana]
MPIDLPIMHDSDRYDFVKDIGSGNFGVARLMTDRVTKELVAVKYIERGEKIDENVQREIINHRSLRHPNIVRFKEVILTPSHLAIVMEYAAGGELYERICNAGRFSEDEARFFFQQLISGVSYCHAMQICHRDLKLENTLLDGSPAPRLKICDFGYSKSSVSSFPTKVNCWYSCIHCTRDSSSTGI

SEQ ID NO: 26818 - protein, 179 aa, Arabidopsis thaliana
  peptide (1)..(179): Ceres Seq. ID no. 13490138
  misc_feature (7)..(154): Pfam Name: Protein kinase domain Pfam Description: Protein kinase domain
  misc_feature (5)..(154): Homolog of NCBI NO: 19568098 NR Description: osmotic stress-activated protein kinase
  misc_feature (5)..(154): Homolog of NCBI NO: 34906840 NR Description: putative protein kinase HvPKABA1(Abcisic
  misc_feature (5)..(154): Homolog of NCBI NO: 29164823 NR Description: abcisic acid-inducible protein kinanase
  misc_feature (1)..(154): Homolog of NCBI NO: 6739629 NR Description: abscisic acid-activated protein kinase [Vicia
  misc_feature (1)..(154): Homolog of NCBI NO: 7446439 NR Description: probable serine/threonine-specific protein kinase
  misc_feature (1)..(154): Homolog of NCBI NO: 18418337 NR Description: protein kinase, putative [Arabidopsis thaliana]
  misc_feature (1)..(154): Homolog of NCBI NO: 20260398 NR Description: putative protein [Arabidopsis thaliana]
  misc_feature (1)..(154): Homolog of NCBI NO: 15240124 NR Description: serine/threonine protein kinase, putative
  misc_feature (1)..(154): Homolog of NCBI NO: 21593534 NR Description: protein kinase SPK-2 [Arabidopsis thaliana]
  misc_feature (1)..(154): Homolog of NCBI NO: 15229772 NR Description: protein kinase, putative [Arabidopsis thaliana]
MHDSDRYDFVKDIGSGNFGVARLMTDRVTKELVAVKYIERGEKIDENVQREIINHRSLRHPNIVRFKEVILTPSHLAIVMEYAAGGELYERICNAGRFSEDEARFFFQQLISGVSYCHAMQICHRDLKLENTLLDGSPAPRLKICDFGYSKSSVSSFPTKVNCWYSCIHCTRDSSSTGI

SEQ ID NO: 26819 - DNA, 1221 bp, Arabidopsis thaliana
  misc_feature (1)..(1221): Ceres Seq. ID no. 12324762
  misc_feature: MA Experiment ID: 108435 Result: Up-regulated in Transcription
  misc_feature: MA Experiment 108435 PARAMETER Experiment Name: At_stm_Mutants_cDNA_P Parameter: Plant Line Value: wt Landsburg vs stm
  misc_feature: MA Experiment 108435 PARAMETER Experiment Name: At_stm_Mutants_cDNA_P Parameter: Tissue Value: Shoot Apical Meristem Region
  misc_feature: MA Experiment ID: 108595 Result: Up-regulated in Transcription
  misc_feature: MA Experiment 108595 PARAMETER Experiment Name: At_Ler-pi_Ovule_cDNA_P Parameter: Plant Line Value: null
  misc_feature: MA Experiment ID: 20000117 Result: Up-regulated in Transcription
  misc_feature: MA Experiment 20000117 PARAMETER Experiment Name: At_100uM_ABA_Mutants_cDNA_P Parameter: Plant Line Value: Columbia
  misc_feature: MA Experiment 20000117 PARAMETER Experiment Name: At_100uM_ABA_Mutants_cDNA_P Parameter: Timepoint (hr) Value: 6
  misc_feature: MA Experiment 20000117 PARAMETER Experiment Name: At_100uM_ABA_Mutants_cDNA_P Parameter: Tissue Value: Aerial
  misc_feature: MA Experiment 20000117 PARAMETER Experiment Name: At_100uM_ABA_Mutants_cDNA_P Parameter: Treatment Value: 100uM ABA vs. No Treatment
  misc_feature: MA Experiment ID: 20000173 Result: Up-regulated in Transcription
  misc_feature: MA Experiment 20000173 PARAMETER Experiment Name: At_42deg_Heat_P Parameter: Age (day) Value: 14
  misc_feature: MA Experiment 20000173 PARAMETER Experiment Name: At_42deg_Heat_P Parameter: Organism Value: A. thaliana
  misc_feature: MA Experiment 20000173 PARAMETER Experiment Name: At_42deg_Heat_P Parameter: Plant Line Value: WS
  misc_feature: MA Experiment 20000173 PARAMETER Experiment Name: At_42deg_Heat_P Parameter: Temperature (deg C) Value: 42 vs. 22
  misc_feature: MA Experiment 20000173 PARAMETER Experiment Name: At_42deg_Heat_P Parameter: Timepoint (hr) Value: 6
  misc_feature: MA Experiment 20000173 PARAMETER Experiment Name: At_42deg_Heat_P Parameter: Tissue Value: Aerial
  misc_feature: MA Experiment ID: 20000184 Result: Down-regulated in Transcription
  misc_feature: MA Experiment 20000184 PARAMETER Experiment Name: At_Shoots__P Parameter: Age (day) Value: 7
  misc_feature: MA Experiment 20000184 PARAMETER Experiment Name: At_Shoots__P Parameter: Tissue Value: Shoots vs. Whole Plant
  misc_feature: MA Experiment ID: 20000234 Result: Up-regulated in Transcription
  misc_feature: MA Experiment 20000234 PARAMETER Experiment Name: At_Siliques_P Parameter: Age (day) Value: 21
  misc_feature: MA Experiment 20000234 PARAMETER Experiment Name: At_Siliques_P Parameter: Organism Value: A. thaliana
  misc_feature: MA Experiment 20000234 PARAMETER Experiment Name: At_Siliques_P Parameter: Plant Line Value: WS
  misc_feature: MA Experiment 20000234 PARAMETER Experiment Name: At_Siliques_P Parameter: Tissue Value: Less Than 5mm Siliques vs. Whole Plant
  misc_feature: MA Experiment ID: 20000264 Result: Up-regulated in Transcription
  misc_feature: MA Experiment 20000264 PARAMETER Experiment Name: At_Open_Flower_P Parameter: Age (day) Value: 21
  misc_feature: MA Experiment 20000264 PARAMETER Experiment Name: At_Open_Flower_P Parameter: Plant Line Value: WS
  misc_feature: MA Experiment 20000264 PARAMETER Experiment Name: At_Open_Flower_P Parameter: Tissue Value: Open Flower vs. Whole Plant
  misc_feature: MA Experiment ID: 20000265 Result: Up-regulated in Transcription
  misc_feature: MA Experiment 20000265 PARAMETER Experiment Name: At_Open_Flower_P Parameter: Age (day) Value: 21
  misc_feature: MA Experiment 20000265 PARAMETER Experiment Name: At_Open_Flower_P Parameter: Plant Line Value: WS
  misc_feature: MA Experiment 20000265 PARAMETER Experiment Name: At_Open_Flower_P Parameter: Tissue Value: Closed Flower vs. Whole Plant
  misc_feature: MA Experiment ID: 20000286 Result: Up-regulated in Transcription
  misc_feature: MA Experiment 20000286 PARAMETER Experiment Name: At_Open_Flower_P Parameter: Age (day) Value: 21
  misc_feature: MA Experiment 20000286 PARAMETER Experiment Name: At_Open_Flower_P Parameter: Plant Line Value: WS
  misc_feature: MA Experiment 20000286 PARAMETER Experiment Name: At_Open_Flower_P Parameter: Tissue Value: Half Open vs. Whole Plant
  misc_feature: MA Experiment ID: 20000438 Result: Down-regulated in Transcription
  misc_feature: MA Experiment 20000438 PARAMETER Experiment Name: At_Shoots__P Parameter: Age (day) Value: 14
  misc_feature: MA Experiment 20000438 PARAMETER Experiment Name: At_Shoots__P Parameter: Tissue Value: Shoots vs. Whole Plant
  misc_feature: MA Experiment ID: 20000453 Result: Up-regulated in Transcription
  misc_feature: MA Experiment 20000453 PARAMETER Experiment Name: At_100uM_ABA_P Parameter: Age (day) Value: 15
  misc_feature: MA Experiment 20000453 PARAMETER Experiment Name: At_100uM_ABA_P Parameter: Organism Value: A. thaliana
  misc_feature: MA Experiment 20000453 PARAMETER Experiment Name: At_100uM_ABA_P Parameter: Plant Line Value: WS
  misc_feature: MA Experiment 20000453 PARAMETER Experiment Name: At_100uM_ABA_P Parameter: Timepoint (hr) Value: 24
  misc_feature: MA Experiment 20000453 PARAMETER Experiment Name: At_100uM_ABA_P Parameter: Tissue Value: Aerial
  misc_feature: MA Experiment 20000453 PARAMETER Experiment Name: At_100uM_ABA_P Parameter: Treatment Value: 100uM ABA vs. No Treatment
  misc_feature: MA Experiment ID: 20000495 Result: Up-regulated in Transcription
  misc_feature: MA Experiment 20000495 PARAMETER Experiment Name: At_Guard_Cells_P Parameter: Harvest Date Value: 8/2/2002
  misc_feature: MA Experiment 20000495 PARAMETER Experiment Name: At_Guard_Cells_P Parameter: Organism Value: A. thaliana
  misc_feature: MA Experiment 20000495 PARAMETER Experiment Name: At_Guard_Cells_P Parameter: Tissue Value: Guard Cells vs. Leaves
  misc_feature: MA Experiment ID: 20000794 Result: Up-regulated in Transcription
  misc_feature: MA Experiment 20000794 PARAMETER Experiment Name: At_Petals_P Parameter: Age (day) Value: 23-25 days
  misc_feature: MA Experiment 20000794 PARAMETER Experiment Name: At_Petals_P Parameter: Plant Line Value: WS
  misc_feature: MA Experiment 20000794 PARAMETER Experiment Name: At_Petals_P Parameter: Tissue Value: Petals vs. Whole plant
  misc_feature: MA Experiment ID: 20001554 Result: Up-regulated in Transcription
  misc_feature: MA Experiment 20001554 PARAMETER Experiment Name: At_Drought_Soil_Dry_P Parameter: Age (day) Value: 21
  misc_feature: MA Experiment 20001554 PARAMETER Experiment Name: At_Drought_Soil_Dry_P Parameter: Organism Value: A. thaliana
  misc_feature: MA Experiment 20001554 PARAMETER Experiment Name: At_Drought_Soil_Dry_P Parameter: Plant Line Value: WS
  misc_feature: MA Experiment 20001554 PARAMETER Experiment Name: At_Drought_Soil_Dry_P Parameter: Post Timepoint (hr) Value: None
  misc_feature: MA Experiment 20001554 PARAMETER Experiment Name: At_Drought_Soil_Dry_P Parameter: Post-Treatment Value: None
  misc_feature: MA Experiment 20001554 PARAMETER Experiment Name: At_Drought_Soil_Dry_P Parameter: Timepoint (day) Value: 7
  misc_feature: MA Experiment 20001554 PARAMETER Experiment Name: At_Drought_Soil_Dry_P Parameter: Treatment Value: Drought vs. No Drought
  misc_feature: MA Experiment ID: 20001555 Result: Up-regulated in Transcription
  misc_feature: MA Experiment 20001555 PARAMETER Experiment Name: At_Drought_Soil_Dry_P Parameter: Age (day) Value: 24
  misc_feature: MA Experiment 20001555 PARAMETER Experiment Name: At_Drought_Soil_Dry_P Parameter: Organism Value: A. thaliana
  misc_feature: MA Experiment 20001555 PARAMETER Experiment Name: At_Drought_Soil_Dry_P Parameter: Plant Line Value: WS
  misc_feature: MA Experiment 20001555 PARAMETER Experiment Name: At_Drought_Soil_Dry_P Parameter: Post Timepoint (hr) Value: None
  misc_feature: MA Experiment 20001555 PARAMETER Experiment Name: At_Drought_Soil_Dry_P Parameter: Post-Treatment Value: None
  misc_feature: MA Experiment 20001555 PARAMETER Experiment Name: At_Drought_Soil_Dry_P Parameter: Timepoint (day) Value: 10
  misc_feature: MA Experiment 20001555 PARAMETER Experiment Name: At_Drought_Soil_Dry_P Parameter: Treatment Value: Drought vs. No Drought
  misc_feature: MA Experiment ID: 20001557 Result: Up-regulated in Transcription
  misc_feature: MA Experiment 20001557 PARAMETER Experiment Name: At_Drought_Soil_Dry_P Parameter: Age (day) Value: 27
  misc_feature: MA Experiment 20001557 PARAMETER Experiment Name: At_Drought_Soil_Dry_P Parameter: Organism Value: A. thaliana
  misc_feature: MA Experiment 20001557 PARAMETER Experiment Name: At_Drought_Soil_Dry_P Parameter: Plant Line Value: WS
  misc_feature: MA Experiment 20001557 PARAMETER Experiment Name: At_Drought_Soil_Dry_P Parameter: Post Timepoint (hr) Value: 3
  misc_feature: MA Experiment 20001557 PARAMETER Experiment Name: At_Drought_Soil_Dry_P Parameter: Post-Treatment Value: Re-Water vs. No Drought
  misc_feature: MA Experiment 20001557 PARAMETER Experiment Name: At_Drought_Soil_Dry_P Parameter: Timepoint (day) Value: 13
  misc_feature: MA Experiment 20001557 PARAMETER Experiment Name: At_Drought_Soil_Dry_P Parameter: Treatment Value: Drought vs. No Drought
  misc_feature: MA Experiment ID: 20001558 Result: Up-regulated in Transcription
  misc_feature: MA Experiment 20001558 PARAMETER Experiment Name: At_Drought_Soil_Dry_P Parameter: Age (day) Value: 27
  misc_feature: MA Experiment 20001558 PARAMETER Experiment Name: At_Drought_Soil_Dry_P Parameter: Organism Value: A. thaliana
  misc_feature: MA Experiment 20001558 PARAMETER Experiment Name: At_Drought_Soil_Dry_P Parameter: Plant Line Value: WS
  misc_feature: MA Experiment 20001558 PARAMETER Experiment Name: At_Drought_Soil_Dry_P Parameter: Post Timepoint (hr) Value: 6
  misc_feature: MA Experiment 20001558 PARAMETER Experiment Name: At_Drought_Soil_Dry_P Parameter: Post-Treatment Value: Re-Water vs. No Drought
  misc_feature: MA Experiment 20001558 PARAMETER Experiment Name: At_Drought_Soil_Dry_P Parameter: Timepoint (day) Value: 13
  misc_feature: MA Experiment 20001558 PARAMETER Experiment Name: At_Drought_Soil_Dry_P Parameter: Treatment Value: Drought vs. No Drought
  misc_feature: MA Experiment ID: 20001771 Result: Up-regulated in Transcription
  misc_feature: MA Experiment 20001771 PARAMETER Experiment Name: At_Far-red-enriched-adult_P Parameter: Age (day) Value: 28
  misc_feature: MA Experiment 20001771 PARAMETER Experiment Name: At_Far-red-enriched-adult_P Parameter: Light Value: Far-red enriched vs. White
  misc_feature: MA Experiment 20001771 PARAMETER Experiment Name: At_Far-red-enriched-adult_P Parameter: Organism Value: A. thaliana
  misc_feature: MA Experiment 20001771 PARAMETER Experiment Name: At_Far-red-enriched-adult_P Parameter: Plant Line Value: Columbia
  misc_feature: MA Experiment 20001771 PARAMETER Experiment Name: At_Far-red-enriched-adult_P Parameter: Timepoint (hr) Value: 16
  misc_feature: MA Experiment 20001771 PARAMETER Experiment Name: At_Far-red-enriched-adult_P Parameter: Tissue Value: Aerial
  misc_feature: MA Experiment ID: 20001773 Result: Up-regulated in Transcription
  misc_feature: MA Experiment 20001773 PARAMETER Experiment Name: At_Far-red-enriched-adult_P Parameter: Age (day) Value: 30
  misc_feature: MA Experiment 20001773 PARAMETER Experiment Name: At_Far-red-enriched-adult_P Parameter: Light Value: Far-red enriched vs. White
  misc_feature: MA Experiment 20001773 PARAMETER Experiment Name: At_Far-red-enriched-adult_P Parameter: Organism Value: A. thaliana
  misc_feature: MA Experiment 20001773 PARAMETER Experiment Name: At_Far-red-enriched-adult_P Parameter: Plant Line Value: Columbia
  misc_feature: MA Experiment 20001773 PARAMETER Experiment Name: At_Far-red-enriched-adult_P Parameter: Timepoint (hr) Value: 48
  misc_feature: MA Experiment 20001773 PARAMETER Experiment Name: At_Far-red-enriched-adult_P Parameter: Tissue Value: Aerial
  misc_feature: MA Experiment ID: 20001905 Result: Up-regulated in Transcription
  misc_feature: MA Experiment 20001905 PARAMETER Experiment Name: At_Drought_Reproduction_P Parameter: Age (day) Value: 40
  misc_feature: MA Experiment 20001905 PARAMETER Experiment Name: At_Drought_Reproduction_P Parameter: Organism Value: A. thaliana
  misc_feature: MA Experiment 20001905 PARAMETER Experiment Name: At_Drought_Reproduction_P Parameter: Plant Line Value: WS
  misc_feature: MA Experiment 20001905 PARAMETER Experiment Name: At_Drought_Reproduction_P Parameter: Timepoint (day) Value: 10
  misc_feature: MA Experiment 20001905 PARAMETER Experiment Name: At_Drought_Reproduction_P Parameter: Tissue Value: Rosettes
  misc_feature: MA Experiment 20001905 PARAMETER Experiment Name: At_Drought_Reproduction_P Parameter: Treatment Value: Drought vs. No Drought
  misc_feature: MA Experiment ID: 20001911 Result: Down-regulated in Transcription
  misc_feature: MA Experiment 20001911 PARAMETER Experiment Name: At_Drought_Reproduction_P Parameter: Age (day) Value: 40
  misc_feature: MA Experiment 20001911 PARAMETER Experiment Name: At_Drought_Reproduction_P Parameter: Organism Value: A. thaliana
  misc_feature: MA Experiment 20001911 PARAMETER Experiment Name: At_Drought_Reproduction_P Parameter: Plant Line Value: WS
  misc_feature: MA Experiment 20001911 PARAMETER Experiment Name: At_Drought_Reproduction_P Parameter: Timepoint (day) Value: 10
  misc_feature: MA Experiment 20001911 PARAMETER Experiment Name: At_Drought_Reproduction_P Parameter: Tissue Value: Flowers
  misc_feature: MA Experiment 20001911 PARAMETER Experiment Name: At_Drought_Reproduction_P Parameter: Treatment Value: Drought vs. No Drought
ctcttccccttcgctctcgaatcaatcactctctcttctttagcgtttttattttgtcttcctcgttttcttctacctttttatattttctctcttttcagttttctctagaaaaaaacactagtaatcagtttgcgtttgataaatatttgatgtggcaaaactcttgtggatcttgatgttcaaacattcatgtctccggtgattagtgaaatccttagatcaggtttaactatagactcgtctcttagacgcaggacccatcttgttcaatctttctccgtcgtctttctctactggttctatgttttctcataaatcagctctcctttagccctttattattatatattctataaccataataatatatcaaaactatatactataatctttttacataataaactttgggtcctgcgtcttaatcatagtacttaattttctctgtgtgtgttttaatatgaataataaaactgaaatgggatcttccacaagtggaaattgctcgtcggtttcaaccactggtttagctaactccggttcagaatctgatctccggcaacgtgatctaatcgacgagcggaagagaaagaggaaacagtcgaacagagaatctgcgaggaggtcgaggatgaggaagcagaagcatttggatgatctcactgctcaggtgactcatctacgtaaagaaaacgctcagatcgtcgccggaatcgccgtcacgacgcagcactacgtcactatcgaggcggagaacgacattctcagagctcaggttcttgaacttaaccaccgtctccaatctcttaacgagatcgttgatttcgtcgaatcttcttcttcaggattcggtatggagaccggtcagggattattcgacggtggattattcgacggcgtgatgaatcctatgaatctagggttttataatcaaccaatcatggcttctgcttctactgctggtgatgttttcaactgttagaaaacttcacatcattatcatcgtgagtgagactaatcatcgcagcaggggtaaaactgtaattttcttaaaaattatgtgatgatgctttgtttctttattttataagatggttaattagtgtttaaaactgattgtaatgatagacagtgtaagaaatgtgtgatatcatggagatggtgatgtgagtttggtacaaatattttaagatcttttctttctatatattaaaagtg

SEQ ID NO: 26820 - protein, 173 aa, Arabidopsis thaliana
  peptide (1)..(173): Ceres Seq. ID no. 12324763
  misc_feature (34)..(101): Pfam Name: bZIP transcription factor Pfam Description: bZIP transcription factor
  misc_feature (7)..(173): Homolog of NCBI NO: 15222223 NR Description: bZIP transcription factor ATB2, putative; protein
MNNKTEMGSSTSGNCSSVSTTGLANSGSESDLRQRDLIDERKRKRKQSNRESARRSRMRKQKHLDDLTAQVTHLRKENAQIVAGIAVTTQHYVTIEAENDILRAQVLELNHRLQSLNEIVDFVESSSSGFGMETGQGLFDGGLFDGVMNPMNLGFYNQPIMASASTAGDVFNC

SEQ ID NO: 26821 - protein, 167 aa, Arabidopsis thaliana
  peptide (1)..(167): Ceres Seq. ID no. 12324764
  misc_feature (28)..(95): Pfam Name: bZIP transcription factor Pfam Description: bZIP transcription factor
  misc_feature (1)..(167): Homolog of NCBI NO: 15222223 NR Description: bZIP transcription factor ATB2, putative; protein
MGSSTSGNCSSVSTTGLANSGSESDLRQRDLIDERKRKRKQSNRESARRSRMRKQKHLDDLTAQVTHLRKENAQIVAGIAVTTQHYVTIEAENDILRAQVLELNHRLQSLNEIVDFVESSSSGFGMETGQGLFDGGLFDGVMNPMNLGFYNQPIMASASTAGDVFNC

SEQ ID NO: 26822 - protein, 116 aa, Arabidopsis thaliana
  peptide (1)..(116): Ceres Seq. ID no. 12324765
  misc_feature (1)..(116): Homolog of NCBI NO: 15222223 NR Description: bZIP transcription factor ATB2, putative; protein
MRKQKHLDDLTAQVTHLRKENAQIVAGIAVTTQHYVTIEAENDILRAQVLELNHRLQSLNEIVDFVESSSSGFGMETGQGLFDGGLFDGVMNPMNLGFYNQPIMASASTAGDVFNC

SEQ ID NO: 26823 - DNA, 626 bp, Arabidopsis thaliana
  misc_feature (1)..(626): Ceres Seq. ID no. 12339956
  misc_feature: MA Experiment ID: 108434 Result: Up-regulated in Transcription
  misc_feature: MA Experiment 108434 PARAMETER Experiment Name: At_Root_Tips_cDNA_P Parameter: Tissue Value: Root Tips
tttcagcgagagcaccagactcgtgaagaagagaaaaagaagaagcaggagaaaagtttgcttgctgtgcctgtgttggtcagtctttgaagaaatggtgaaatcgactagtaaggatgctcaggatctcttccattctcttcactctgcttataccgctacaccaacgaatctcaagatcatcgacctttatgtttgtttcgcggtcttcacagctttgattcaggttgcttacatggctcttgttggatcgtttcctttcaactcatttctctctggagttctctcgtgtatcgggacagcggttcttgctgtctgcctccggattcaagtgaacaaagaaaacaaggaatttaaggatttagcaccggagcgagcttttgctgattttgtcctctgcaacttagtcctccacctagtgatcataaacttcttgggataaactaaacacctctcaagccggacataaatctcatgagatttttgagaacaatcactgcacttgctttccatacatcataaactttatttctgatatttgagattttatcatcttagtagcccttatgtgaagagcttgtttttcttttgttaatgctactttctcatagtgattgagccaactc

SEQ ID NO: 26824 - protein, 146 aa, Arabidopsis thaliana
  peptide (1)..(146): Ceres Seq. ID no. 12339957
  misc_feature (35)..(146): Pfam Name: DAD family Pfam Description: DAD family
  misc_feature (35)..(146): Homolog of NCBI NO: 20137609 NR Description: Defender against cell death 1 (DAD-1) (Peadad)
  misc_feature (32)..(146): Homolog of NCBI NO: 20138029 NR Description: Defender against cell death 1 (DAD-1)
  misc_feature (32)..(146): Homolog of NCBI NO: 20138097 NR Description: Defender against cell death 1 (DAD-1)
  misc_feature (32)..(146): Homolog of NCBI NO: 4106446 NR Description: defender against apoptotic death 1 homolog
  misc_feature (32)..(146): Homolog of NCBI NO: 29423681 NR Description: DAD1 [Petunia x hybrida]
  misc_feature (32)..(146): Homolog of NCBI NO: 6014897 NR Description: Defender against cell death 1 (DAD-1) (AtDAD1)
  misc_feature (32)..(146): Homolog of NCBI NO: 15222602 NR Description: defender against cell death protein, putative
  misc_feature (32)..(146): Homolog of NCBI NO: 30686440 NR Description: defender against cell death protein [Arabidopsis
  misc_feature (32)..(146): Homolog of NCBI NO: 18403864 NR Description: defender against cell death protein
  misc_feature (1)..(146): Homolog of NCBI NO: 25313138 NR Description: defender against cell death protein
FSESTRLVKKRKRRSRRKVCLLCLCWSVFEEMVKSTSKDAQDLFHSLHSAYTATPTNLKIIDLYVCFAVFTALIQVAYMALVGSFPFNSFLSGVLSCIGTAVLAVCLRIQVNKENKEFKDLAPERAFADFVLCNLVLHLVIINFLG

SEQ ID NO: 26825 - protein, 115 aa, Arabidopsis thaliana
  peptide (1)..(115): Ceres Seq. ID no. 12339958
  misc_feature (4)..(115): Pfam Name: DAD family Pfam Description: DAD family
  misc_feature (4)..(115): Homolog of NCBI NO: 20137609 NR Description: Defender against cell death 1 (DAD-1) (Peadad)
  misc_feature (1)..(115): Homolog of NCBI NO: 20138029 NR Description: Defender against cell death 1 (DAD-1)
  misc_feature (1)..(115): Homolog of NCBI NO: 20138097 NR Description: Defender against cell death 1 (DAD-1)
  misc_feature (1)..(115): Homolog of NCBI NO: 4106446 NR Description: defender against apoptotic death 1 homolog
  misc_feature (1)..(115): Homolog of NCBI NO: 29423681 NR Description: DAD1 [Petunia x hybrida]
  misc_feature (1)..(115): Homolog of NCBI NO: 6014897 NR Description: Defender against cell death 1 (DAD-1) (AtDAD1)
  misc_feature (1)..(115): Homolog of NCBI NO: 15222602 NR Description: defender against cell death protein, putative
  misc_feature (1)..(115): Homolog of NCBI NO: 30686440 NR Description: defender against cell death protein [Arabidopsis
  misc_feature (1)..(115): Homolog of NCBI NO: 18403864 NR Description: defender against cell death protein
  misc_feature (1)..(115): Homolog of NCBI NO: 25313138 NR Description: defender against cell death protein
MVKSTSKDAQDLFHSLHSAYTATPTNLKIIDLYVCFAVFTALIQVAYMALVGSFPFNSFLSGVLSCIGTAVLAVCLRIQVNKENKEFKDLAPERAFADFVLCNLVLHLVIINFLG

SEQ ID NO: 26826 - DNA, 1632 bp, Arabidopsis thaliana
  misc_feature (1)..(1632): Ceres Seq. ID no. 12661996
  misc_feature: MA Experiment ID: 108434 Result: Up-regulated in Transcription
  misc_feature: MA Experiment 108434 PARAMETER Experiment Name: At_Root_Tips_cDNA_P Parameter: Tissue Value: Root Tips
  misc_feature: MA Experiment ID: 108461 Result: Down-regulated in Transcription
  misc_feature: MA Experiment 108461 PARAMETER Experiment Name: At_Germinating_Seeds_cDNA_P Parameter: Age (day) Value: 1 vs. 0
  misc_feature: MA Experiment 108461 PARAMETER Experiment Name: At_Germinating_Seeds_cDNA_P Parameter: Tissue Value: Germinating Seeds
  misc_feature: MA Experiment ID: 108462 Result: Down-regulated in Transcription
  misc_feature: MA Experiment 108462 PARAMETER Experiment Name: At_Germinating_Seeds_cDNA_P Parameter: Age (day) Value: 2 vs. 0
  misc_feature: MA Experiment 108462 PARAMETER Experiment Name: At_Germinating_Seeds_cDNA_P Parameter: Tissue Value: Germinating Seeds
  misc_feature: MA Experiment ID: 108463 Result: Down-regulated in Transcription
  misc_feature: MA Experiment 108463 PARAMETER Experiment Name: At_Germinating_Seeds_cDNA_P Parameter: Age (day) Value: 3 vs. 0
  misc_feature: MA Experiment 108463 PARAMETER Experiment Name: At_Germinating_Seeds_cDNA_P Parameter: Tissue Value: Germinating Seeds
  misc_feature: MA Experiment ID: 108464 Result: Down-regulated in Transcription
  misc_feature: MA Experiment 108464 PARAMETER Experiment Name: At_Germinating_Seeds_cDNA_P Parameter: Age (day) Value: 4 vs. 0
  misc_feature: MA Experiment 108464 PARAMETER Experiment Name: At_Germinating_Seeds_cDNA_P Parameter: Tissue Value: Germinating Seeds
  misc_feature: MA Experiment ID: 108573 Result: Up-regulated in Transcription
  misc_feature: MA Experiment 108573 PARAMETER Experiment Name: At_Drought_cDNA_P Parameter: Timepoint (hr) Value: 6
  misc_feature: MA Experiment 108573 PARAMETER Experiment Name: At_Drought_cDNA_P Parameter: Tissue Value: Aerial
  misc_feature: MA Experiment 108573 PARAMETER Experiment Name: At_Drought_cDNA_P Parameter: Treatment Value: Drought vs. No Drought
  misc_feature: MA Experiment ID: 108576 Result: Down-regulated in Transcription
  misc_feature: MA Experiment 108576 PARAMETER Experiment Name: At_42deg_Heat_cDNA_P Parameter: Temperature (deg C) Value: 42 vs. 22
  misc_feature: MA Experiment 108576 PARAMETER Experiment Name: At_42deg_Heat_cDNA_P Parameter: Timepoint (hr) Value: 1
  misc_feature: MA Experiment 108576 PARAMETER Experiment Name: At_42deg_Heat_cDNA_P Parameter: Tissue Value: Aerial
  misc_feature: MA Experiment ID: 108577 Result: Down-regulated in Transcription
  misc_feature: MA Experiment 108577 PARAMETER Experiment Name: At_42deg_Heat_cDNA_P Parameter: Temperature (deg C) Value: 42 vs. 22
  misc_feature: MA Experiment 108577 PARAMETER Experiment Name: At_42deg_Heat_cDNA_P Parameter: Timepoint (hr) Value: 6
  misc_feature: MA Experiment 108577 PARAMETER Experiment Name: At_42deg_Heat_cDNA_P Parameter: Tissue Value: Aerial
  misc_feature: MA Experiment ID: 108585 Result: Up-regulated in Transcription
  misc_feature: MA Experiment 108585 PARAMETER Experiment Name: At_5mM_NaNP_cDNA_P Parameter: Timepoint (hr) Value: 6
  misc_feature: MA Experiment 108585 PARAMETER Experiment Name: At_5mM_NaNP_cDNA_P Parameter: Tissue Value: Aerial
  misc_feature: MA Experiment 108585 PARAMETER Experiment Name: At_5mM_NaNP_cDNA_P Parameter: Treatment Value: null
tctacctcaatttatattatttgcttcaatcttctctttatcgctccaccagatccaagttcgcgagatttcaagctctctaacaaagttcttcacttttactctcaaagctttcatctttcattcaactacttaagctccaagtatggcaggatccgcaccggaaggaacacaatttgatacgcgtcagtttgaccagaggctgaatgaagttctcgatggacaggatgagttcttcacctcatatgatgaggtccatgagagctttgatgccatgggtttgcaagagaatcttcttaggggtatctatgcttacggtttcgaaaagccttctgctattcagcaaagaggaattgtacccttttgcaagggtcttgatgtgatccagcaggcacagtctggtactggaaaaaccgccactttctgctctggtgtcttgcagcagcttgactatgcccttctccagtgccaggctctcgttttggctcccaccagagagcttgctcagcagattgagaaggtcatgcgtgcccttggtgactaccaaggtgtcaaggttcatgcctgtgttggtggaaccagtgtccgtgaggatcagcgcattctccaggctggtgttcatgttgtcgttggaactcccggtcgtgtttttgacatgcttagaagacaatctctccgccctgactgcatcaagatgtttgtccttgatgaagctgatgaaatgctctcccgtggtttcaaggatcagatctatgacatattccagcttctcccaccaaagattcaggttggagtgttctctgcgacaatgcctccggaagctttggagatcacaagaaaattcatgagcaaaccagtgagaatcttggtgaaacgtgatgagctcacacttgaaggtatcaagcaattctacgtgaacgtggagaaagaagactggaagcttgagactctctgcgatctctacgagactctagccatcactcagagtgtcatctttgtcaacactcgtcgcaaggtcgactggctcacagacaaaatgagaagccgtgaccacacagtctcagcaactcatggagacatggaccaaaacaccagagacatcatcatgagagagttcaggtctggctcgtctcgtgttctaatcacaaccgatctcttggctcgtggtatcgatgtgcagcaagtctctctagtcataaactttgacctcccaactcagccagagaattaccttcaccgtatcggaagaagtggaaggttcgggagaaagggtgtggcgattaactttgtgactcttgatgatcagagaatgctgtttgatattcagaaattctacaatgtggttgttgaggagcttccctcaaacgtggctgatttgctgtgaagaagaagaagaagaagaagaagaaaggttgcttgtttcgcaaatttcttatttgatttttgacccgtctctctctctctgaatcatcgatacatctttttcattctctagtattcttcatcaactctatcgaacatatatatgtctcttctgaccatatttcttttttatcaaatgcaatatttatttcttctcttgtatgatccaaaaatctttcgtaattacaagtctattcacagcaattctat

SEQ ID NO: 26827 - protein, 412 aa, Arabidopsis thaliana
  peptide (1)..(412): Ceres Seq. ID no. 12661997
  misc_feature (52)..(255): Pfam Name: DEAD/DEAH box helicase Pfam Description: DEAD/DEAH box helicase
  misc_feature (1)..(412): Homolog of NCBI NO: 2119933 NR Description: translation initiation factor eIF-4A.11 - common
  misc_feature (1)..(412): Homolog of NCBI NO: 1170511 NR Description: Eukaryotic initiation factor 4A-10 (eIF-4A-10)
  misc_feature (1)..(412): Homolog of NCBI NO: 2500518 NR Description: Eukaryotic initiation factor 4A-11 (eIF-4A-11)
  misc_feature (1)..(412): Homolog of NCBI NO: 2500520 NR Description: Eukaryotic initiation factor 4A-14 (eIF-4A-14)
  misc_feature (1)..(412): Homolog of NCBI NO: 2119938 NR Description: translation initiation factor eIF-4A.14 - common
  misc_feature (1)..(412): Homolog of NCBI NO: 1170506 NR Description: Eukaryotic initiation factor 4A-2 (eIF-4A-2)
  misc_feature (1)..(412): Homolog of NCBI NO: 21555870 NR Description: Eukaryotic initiation factor 4A, putative
  misc_feature (1)..(412): Homolog of NCBI NO: 19698881 NR Description: eukaryotic translation initiation factor
  misc_feature (1)..(412): Homolog of NCBI NO: 18400210 NR Description: eukaryotic translation initiation factor 4A-1
  misc_feature (1)..(412): Homolog of NCBI NO: 15221761 NR Description: eukaryotic translation initiation factor 4A-2
MAGSAPEGTQFDTRQFDQRLNEVLDGQDEFFTSYDEVHESFDAMGLQENLLRGIYAYGFEKPSAIQQRGIVPFCKGLDVIQQAQSGTGKTATFCSGVLQQLDYALLQCQALVLAPTRELAQQIEKVMRALGDYQGVKVHACVGGTSVREDQRILQAGVHVVVGTPGRVFDMLRRQSLRPDCIKMFVLDEADEMLSRGFKDQIYDIFQLLPPKIQVGVFSATMPPEALEITRKFMSKPVRILVKRDELTLEGIKQFYVNVEKEDWKLETLCDLYETLAITQSVIFVNTRRKVDWLTDKMRSRDHTVSATHGDMDQNTRDIIMREFRSGSSRVLITTDLLARGIDVQQVSLVINFDLPTQPENYLHRIGRSGRFGRKGVAINFVTLDDQRMLFDIQKFYNVVVEELPSNVADLL

SEQ ID NO: 26828 - protein, 369 aa, Arabidopsis thaliana
  peptide (1)..(369): Ceres Seq. ID no. 12661998
  misc_feature (9)..(212): Pfam Name: DEAD/DEAH box helicase Pfam Description: DEAD/DEAH box helicase
  misc_feature (1)..(369): Homolog of NCBI NO: 2500518 NR Description: Eukaryotic initiation factor 4A-11 (eIF-4A-11)
  misc_feature (1)..(369): Homolog of NCBI NO: 2500520 NR Description: Eukaryotic initiation factor 4A-14 (eIF-4A-14)
  misc_feature (1)..(369): Homolog of NCBI NO: 2119938 NR Description: translation initiation factor eIF-4A.14 - common
  misc_feature (1)..(369): Homolog of NCBI NO: 1170506 NR Description: Eukaryotic initiation factor 4A-2 (eIF-4A-2)
  misc_feature (1)..(369): Homolog of NCBI NO: 2119933 NR Description: translation initiation factor eIF-4A.11 - common
  misc_feature (1)..(369): Homolog of NCBI NO: 1170511 NR Description: Eukaryotic initiation factor 4A-10 (eIF-4A-10)
  misc_feature (1)..(369): Homolog of NCBI NO: 21555870 NR Description: Eukaryotic initiation factor 4A, putative
  misc_feature (1)..(369): Homolog of NCBI NO: 19698881 NR Description: eukaryotic translation initiation factor
  misc_feature (1)..(369): Homolog of NCBI NO: 18400210 NR Description: eukaryotic translation initiation factor 4A-1
  misc_feature (1)..(369): Homolog of NCBI NO: 15221761 NR Description: eukaryotic translation initiation factor 4A-2
MGLQENLLRGIYAYGFEKPSAIQQRGIVPFCKGLDVIQQAQSGTGKTATFCSGVLQQLDYALLQCQALVLAPTRELAQQIEKVMRALGDYQGVKVHACVGGTSVREDQRILQAGVHVVVGTPGRVFDMLRRQSLRPDCIKMFVLDEADEMLSRGFKDQIYDIFQLLPPKIQVGVFSATMPPEALEITRKFMSKPVRILVKRDELTLEGIKQFYVNVEKEDWKLETLCDLYETLAITQSVIFVNTRRKVDWLTDKMRSRDHTVSATHGDMDQNTRDIIMREFRSGSSRVLITTDLLARGIDVQQVSLVINFDLPTQPENYLHRIGRSGRFGRKGVAINFVTLDDQRMLFDIQKFYNVVVEELPSNVADLL

SEQ ID NO: 26829 - protein, 286 aa, Arabidopsis thaliana
  peptide (1)..(286): Ceres Seq. ID no. 12661999
  misc_feature (1)..(129): Pfam Name: DEAD/DEAH box helicase Pfam Description: DEAD/DEAH box helicase
  misc_feature (1)..(286): Homolog of NCBI NO: 2119933 NR Description: translation initiation factor eIF-4A.11 - common
  misc_feature (1)..(286): Homolog of NCBI NO: 1170511 NR Description: Eukaryotic initiation factor 4A-10 (eIF-4A-10)
  misc_feature (1)..(286): Homolog of NCBI NO: 2500518 NR Description: Eukaryotic initiation factor 4A-11 (eIF-4A-11)
  misc_feature (1)..(286): Homolog of NCBI NO: 2500520 NR Description: Eukaryotic initiation factor 4A-14 (eIF-4A-14)
  misc_feature (1)..(286): Homolog of NCBI NO: 2119938 NR Description: translation initiation factor eIF-4A.14 - common
  misc_feature (1)..(286): Homolog of NCBI NO: 1170506 NR Description: Eukaryotic initiation factor 4A-2 (eIF-4A-2)
  misc_feature (1)..(286): Homolog of NCBI NO: 21555870 NR Description: Eukaryotic initiation factor 4A, putative
  misc_feature (1)..(286): Homolog of NCBI NO: 19698881 NR Description: eukaryotic translation initiation factor
  misc_feature (1)..(286): Homolog of NCBI NO: 18400210 NR Description: eukaryotic translation initiation factor 4A-1
  misc_feature (1)..(286): Homolog of NCBI NO: 15221761 NR Description: eukaryotic translation initiation factor 4A-2
MRALGDYQGVKVHACVGGTSVREDQRILQAGVHVVVGTPGRVFDMLRRQSLRPDCIKMFVLDEADEMLSRGFKDQIYDIFQLLPPKIQVGVFSATMPPEALEITRKFMSKPVRILVKRDELTLEGIKQFYVNVEKEDWKLETLCDLYETLAITQSVIFVNTRRKVDWLTDKMRSRDHTVSATHGDMDQNTRDIIMREFRSGSSRVLITTDLLARGIDVQQVSLVINFDLPTQPENYLHRIGRSGRFGRKGVAINFVTLDDQRMLFDIQKFYNVVVEELPSNVADLL

SEQ ID NO: 26830 - DNA, 939 bp, Arabidopsis thaliana
  misc_feature (1)..(939): Ceres Seq. ID no. 12331560
  misc_feature: MA Experiment ID: 108462 Result: Up-regulated in Transcription
  misc_feature: MA Experiment 108462 PARAMETER Experiment Name: At_Germinating_Seeds_cDNA_P Parameter: Age (day) Value: 2 vs. 0
  misc_feature: MA Experiment 108462 PARAMETER Experiment Name: At_Germinating_Seeds_cDNA_P Parameter: Tissue Value: Germinating Seeds
  misc_feature: MA Experiment ID: 108464 Result: Up-regulated in Transcription
  misc_feature: MA Experiment 108464 PARAMETER Experiment Name: At_Germinating_Seeds_cDNA_P Parameter: Age (day) Value: 4 vs. 0
  misc_feature: MA Experiment 108464 PARAMETER Experiment Name: At_Germinating_Seeds_cDNA_P Parameter: Tissue Value: Germinating Seeds
  misc_feature: MA Experiment ID: 108488 Result: Down-regulated in Transcription
  misc_feature: MA Experiment ID: 108572 Result: Up-regulated in Transcription
  misc_feature: MA Experiment 108572 PARAMETER Experiment Name: At_Drought_cDNA_P Parameter: Timepoint (hr) Value: 1
  misc_feature: MA Experiment 108572 PARAMETER Experiment Name: At_Drought_cDNA_P Parameter: Tissue Value: Aerial
  misc_feature: MA Experiment 108572 PARAMETER Experiment Name: At_Drought_cDNA_P Parameter: Treatment Value: Drought vs. No Drought
  misc_feature: MA Experiment ID: 108573 Result: Up-regulated in Transcription
  misc_feature: MA Experiment 108573 PARAMETER Experiment Name: At_Drought_cDNA_P Parameter: Timepoint (hr) Value: 6
  misc_feature: MA Experiment 108573 PARAMETER Experiment Name: At_Drought_cDNA_P Parameter: Tissue Value: Aerial
  misc_feature: MA Experiment 108573 PARAMETER Experiment Name: At_Drought_cDNA_P Parameter: Treatment Value: Drought vs. No Drought
  misc_feature: MA Experiment ID: 108577 Result: Up-regulated in Transcription
  misc_feature: MA Experiment 108577 PARAMETER Experiment Name: At_42deg_Heat_cDNA_P Parameter: Temperature (deg C) Value: 42 vs. 22
  misc_feature: MA Experiment 108577 PARAMETER Experiment Name: At_42deg_Heat_cDNA_P Parameter: Timepoint (hr) Value: 6
  misc_feature: MA Experiment 108577 PARAMETER Experiment Name: At_42deg_Heat_cDNA_P Parameter: Tissue Value: Aerial
  misc_feature: MA Experiment ID: 108608 Result: Up-regulated in Transcription
  misc_feature: MA Experiment 108608 PARAMETER Experiment Name: At_100uM_ABA_cDNA_P Parameter: Timepoint (hr) Value: 1
  misc_feature: MA Experiment 108608 PARAMETER Experiment Name: At_100uM_ABA_cDNA_P Parameter: Tissue Value: Aerial
  misc_feature: MA Experiment 108608 PARAMETER Experiment Name: At_100uM_ABA_cDNA_P Parameter: Treatment Value: 100uM ABA vs. No Treatment
  misc_feature: MA Experiment ID: 20000069 Result: Up-regulated in Transcription
  misc_feature: MA Experiment 20000069 PARAMETER Experiment Name: At_100uM_ABA_Mutants_cDNA_P Parameter: Plant Line Value: CS23
  misc_feature: MA Experiment 20000069 PARAMETER Experiment Name: At_100uM_ABA_Mutants_cDNA_P Parameter: Timepoint (hr) Value: 6
  misc_feature: MA Experiment 20000069 PARAMETER Experiment Name: At_100uM_ABA_Mutants_cDNA_P Parameter: Tissue Value: Aerial
  misc_feature: MA Experiment 20000069 PARAMETER Experiment Name: At_100uM_ABA_Mutants_cDNA_P Parameter: Treatment Value: 100uM ABA vs. No Treatment
  misc_feature: MA Experiment ID: 20000070 Result: Up-regulated in Transcription
  misc_feature: MA Experiment 20000070 PARAMETER Experiment Name: At_100uM_ABA_Mutants_cDNA_P Parameter: Plant Line Value: CS24
  misc_feature: MA Experiment 20000070 PARAMETER Experiment Name: At_100uM_ABA_Mutants_cDNA_P Parameter: Timepoint (hr) Value: 6
  misc_feature: MA Experiment 20000070 PARAMETER Experiment Name: At_100uM_ABA_Mutants_cDNA_P Parameter: Tissue Value: Aerial
  misc_feature: MA Experiment 20000070 PARAMETER Experiment Name: At_100uM_ABA_Mutants_cDNA_P Parameter: Treatment Value: 100uM ABA vs. No Treatment
  misc_feature: MA Experiment ID: 20000071 Result: Up-regulated in Transcription
  misc_feature: MA Experiment 20000071 PARAMETER Experiment Name: At_100uM_ABA_Mutants_cDNA_P Parameter: Plant Line Value: CS8104
  misc_feature: MA Experiment 20000071 PARAMETER Experiment Name: At_100uM_ABA_Mutants_cDNA_P Parameter: Timepoint (hr) Value: 6
  misc_feature: MA Experiment 20000071 PARAMETER Experiment Name: At_100uM_ABA_Mutants_cDNA_P Parameter: Tissue Value: Aerial
  misc_feature: MA Experiment 20000071 PARAMETER Experiment Name: At_100uM_ABA_Mutants_cDNA_P Parameter: Treatment Value: 100uM ABA vs. No Treatment
  misc_feature: MA Experiment ID: 20000072 Result: Up-regulated in Transcription
  misc_feature: MA Experiment 20000072 PARAMETER Experiment Name: At_100uM_ABA_Mutants_cDNA_P Parameter: Plant Line Value: CS8105
  misc_feature: MA Experiment 20000072 PARAMETER Experiment Name: At_100uM_ABA_Mutants_cDNA_P Parameter: Timepoint (hr) Value: 6
  misc_feature: MA Experiment 20000072 PARAMETER Experiment Name: At_100uM_ABA_Mutants_cDNA_P Parameter: Tissue Value: Aerial
  misc_feature: MA Experiment 20000072 PARAMETER Experiment Name: At_100uM_ABA_Mutants_cDNA_P Parameter: Treatment Value: 100uM ABA vs. No Treatment
  misc_feature: MA Experiment ID: 20000086 Result: Up-regulated in Transcription
  misc_feature: MA Experiment 20000086 PARAMETER Experiment Name: At_100uM_ABA_Mutants_cDNA_P Parameter: Plant Line Value: CS22
  misc_feature: MA Experiment 20000086 PARAMETER Experiment Name: At_100uM_ABA_Mutants_cDNA_P Parameter: Timepoint (hr) Value: 6
  misc_feature: MA Experiment 20000086 PARAMETER Experiment Name: At_100uM_ABA_Mutants_cDNA_P Parameter: Tissue Value: Aerial
  misc_feature: MA Experiment 20000086 PARAMETER Experiment Name: At_100uM_ABA_Mutants_cDNA_P Parameter: Treatment Value: 100uM ABA vs. No Treatment
  misc_feature: MA Experiment ID: 20000087 Result: Up-regulated in Transcription
  misc_feature: MA Experiment 20000087 PARAMETER Experiment Name: At_100uM_ABA_Mutants_cDNA_P Parameter: Plant Line Value: WS
  misc_feature: MA Experiment 20000087 PARAMETER Experiment Name: At_100uM_ABA_Mutants_cDNA_P Parameter: Timepoint (hr) Value: 6
  misc_feature: MA Experiment 20000087 PARAMETER Experiment Name: At_100uM_ABA_Mutants_cDNA_P Parameter: Tissue Value: Aerial
  misc_feature: MA Experiment 20000087 PARAMETER Experiment Name: At_100uM_ABA_Mutants_cDNA_P Parameter: Treatment Value: 100uM ABA vs. No Treatment
  misc_feature: MA Experiment ID: 20000088 Result: Up-regulated in Transcription
  misc_feature: MA Experiment 20000088 PARAMETER Experiment Name: At_100uM_ABA_Mutants_cDNA_P Parameter: Plant Line Value: Landsberg
  misc_feature: MA Experiment 20000088 PARAMETER Experiment Name: At_100uM_ABA_Mutants_cDNA_P Parameter: Timepoint (hr) Value: 6
  misc_feature: MA Experiment 20000088 PARAMETER Experiment Name: At_100uM_ABA_Mutants_cDNA_P Parameter: Tissue Value: Aerial
  misc_feature: MA Experiment 20000088 PARAMETER Experiment Name: At_100uM_ABA_Mutants_cDNA_P Parameter: Treatment Value: 100uM ABA vs. No Treatment
  misc_feature: MA Experiment ID: 20000117 Result: Up-regulated in Transcription
  misc_feature: MA Experiment 20000117 PARAMETER Experiment Name: At_100uM_ABA_Mutants_cDNA_P Parameter: Plant Line Value: Columbia
  misc_feature: MA Experiment 20000117 PARAMETER Experiment Name: At_100uM_ABA_Mutants_cDNA_P Parameter: Timepoint (hr) Value: 6
  misc_feature: MA Experiment 20000117 PARAMETER Experiment Name: At_100uM_ABA_Mutants_cDNA_P Parameter: Tissue Value: Aerial
  misc_feature: MA Experiment 20000117 PARAMETER Experiment Name: At_100uM_ABA_Mutants_cDNA_P Parameter: Treatment Value: 100uM ABA vs. No Treatment
  misc_feature: MA Experiment ID: 20000166 Result: Up-regulated in Transcription
  misc_feature: MA Experiment 20000166 PARAMETER Experiment Name: At_100uM_ABA_P Parameter: Age (day) Value: 14
  misc_feature: MA Experiment 20000166 PARAMETER Experiment Name: At_100uM_ABA_P Parameter: Organism Value: A. thaliana
  misc_feature: MA Experiment 20000166 PARAMETER Experiment Name: At_100uM_ABA_P Parameter: Plant Line Value: WS
  misc_feature: MA Experiment 20000166 PARAMETER Experiment Name: At_100uM_ABA_P Parameter: Timepoint (hr) Value: 1
  misc_feature: MA Experiment 20000166 PARAMETER Experiment Name: At_100uM_ABA_P Parameter: Tissue Value: Aerial
  misc_feature: MA Experiment 20000166 PARAMETER Experiment Name: At_100uM_ABA_P Parameter: Treatment Value: 100uM ABA vs. No Treatment
  misc_feature: MA Experiment ID: 20000173 Result: Up-regulated in Transcription
  misc_feature: MA Experiment 20000173 PARAMETER Experiment Name: At_42deg_Heat_P Parameter: Age (day) Value: 14
  misc_feature: MA Experiment 20000173 PARAMETER Experiment Name: At_42deg_Heat_P Parameter: Organism Value: A. thaliana
  misc_feature: MA Experiment 20000173 PARAMETER Experiment Name: At_42deg_Heat_P Parameter: Plant Line Value: WS
  misc_feature: MA Experiment 20000173 PARAMETER Experiment Name: At_42deg_Heat_P Parameter: Temperature (deg C) Value: 42 vs. 22
  misc_feature: MA Experiment 20000173 PARAMETER Experiment Name: At_42deg_Heat_P Parameter: Timepoint (hr) Value: 6
  misc_feature: MA Experiment 20000173 PARAMETER Experiment Name: At_42deg_Heat_P Parameter: Tissue Value: Aerial
  misc_feature: MA Experiment ID: 20000184 Result: Down-regulated in Transcription
  misc_feature: MA Experiment 20000184 PARAMETER Experiment Name: At_Shoots__P Parameter: Age (day) Value: 7
  misc_feature: MA Experiment 20000184 PARAMETER Experiment Name: At_Shoots__P Parameter: Tissue Value: Shoots vs. Whole Plant
  misc_feature: MA Experiment ID: 20000234 Result: Down-regulated in Transcription
  misc_feature: MA Experiment 20000234 PARAMETER Experiment Name: At_Siliques_P Parameter: Age (day) Value: 21
  misc_feature: MA Experiment 20000234 PARAMETER Experiment Name: At_Siliques_P Parameter: Organism Value: A. thaliana
  misc_feature: MA Experiment 20000234 PARAMETER Experiment Name: At_Siliques_P Parameter: Plant Line Value: WS
  misc_feature: MA Experiment 20000234 PARAMETER Experiment Name: At_Siliques_P Parameter: Tissue Value: Less Than 5mm Siliques vs. Whole Plant
  misc_feature: MA Experiment ID: 20000437 Result: Up-regulated in Transcription
  misc_feature: MA Experiment 20000437 PARAMETER Experiment Name: At_Drought_P Parameter: Age (day) Value: 8
  misc_feature: MA Experiment 20000437 PARAMETER Experiment Name: At_Drought_P Parameter: Organism Value: A. thaliana
  misc_feature: MA Experiment 20000437 PARAMETER Experiment Name: At_Drought_P Parameter: Plant Line Value: WS
  misc_feature: MA Experiment 20000437 PARAMETER Experiment Name: At_Drought_P Parameter: Timepoint (hr) Value: 24
  misc_feature: MA Experiment 20000437 PARAMETER Experiment Name: At_Drought_P Parameter: Tissue Value: Whole Plant
  misc_feature: MA Experiment 20000437 PARAMETER Experiment Name: At_Drought_P Parameter: Treatment Value: Drought vs. No Drought
  misc_feature: MA Experiment ID: 20001557 Result: Down-regulated in Transcription
  misc_feature: MA Experiment 20001557 PARAMETER Experiment Name: At_Drought_Soil_Dry_P Parameter: Age (day) Value: 27
  misc_feature: MA Experiment 20001557 PARAMETER Experiment Name: At_Drought_Soil_Dry_P Parameter: Organism Value: A. thaliana
  misc_feature: MA Experiment 20001557 PARAMETER Experiment Name: At_Drought_Soil_Dry_P Parameter: Plant Line Value: WS
  misc_feature: MA Experiment 20001557 PARAMETER Experiment Name: At_Drought_Soil_Dry_P Parameter: Post Timepoint (hr) Value: 3
  misc_feature: MA Experiment 20001557 PARAMETER Experiment Name: At_Drought_Soil_Dry_P Parameter: Post-Treatment Value: Re-Water vs. No Drought
  misc_feature: MA Experiment 20001557 PARAMETER Experiment Name: At_Drought_Soil_Dry_P Parameter: Timepoint (day) Value: 13
  misc_feature: MA Experiment 20001557 PARAMETER Experiment Name: At_Drought_Soil_Dry_P Parameter: Treatment Value: Drought vs. No Drought
  misc_feature: MA Experiment ID: 20001558 Result: Down-regulated in Transcription
  misc_feature: MA Experiment 20001558 PARAMETER Experiment Name: At_Drought_Soil_Dry_P Parameter: Age (day) Value: 27
  misc_feature: MA Experiment 20001558 PARAMETER Experiment Name: At_Drought_Soil_Dry_P Parameter: Organism Value: A. thaliana
  misc_feature: MA Experiment 20001558 PARAMETER Experiment Name: At_Drought_Soil_Dry_P Parameter: Plant Line Value: WS
  misc_feature: MA Experiment 20001558 PARAMETER Experiment Name: At_Drought_Soil_Dry_P Parameter: Post Timepoint (hr) Value: 6
  misc_feature: MA Experiment 20001558 PARAMETER Experiment Name: At_Drought_Soil_Dry_P Parameter: Post-Treatment Value: Re-Water vs. No Drought
  misc_feature: MA Experiment 20001558 PARAMETER Experiment Name: At_Drought_Soil_Dry_P Parameter: Timepoint (day) Value: 13
  misc_feature: MA Experiment 20001558 PARAMETER Experiment Name: At_Drought_Soil_Dry_P Parameter: Treatment Value: Drought vs. No Drought
  misc_feature: MA Experiment ID: 20001560 Result: Down-regulated in Transcription
  misc_feature: MA Experiment 20001560 PARAMETER Experiment Name: At_Drought_Soil_Dry_P Parameter: Age (day) Value: 28
  misc_feature: MA Experiment 20001560 PARAMETER Experiment Name: At_Drought_Soil_Dry_P Parameter: Organism Value: A. thaliana
  misc_feature: MA Experiment 20001560 PARAMETER Experiment Name: At_Drought_Soil_Dry_P Parameter: Plant Line Value: WS
  misc_feature: MA Experiment 20001560 PARAMETER Experiment Name: At_Drought_Soil_Dry_P Parameter: Post Timepoint (hr) Value: None
  misc_feature: MA Experiment 20001560 PARAMETER Experiment Name: At_Drought_Soil_Dry_P Parameter: Post-Treatment Value: None
  misc_feature: MA Experiment 20001560 PARAMETER Experiment Name: At_Drought_Soil_Dry_P Parameter: Timepoint (day) Value: 14
  misc_feature: MA Experiment 20001560 PARAMETER Experiment Name: At_Drought_Soil_Dry_P Parameter: Treatment Value: Drought vs. No Drought
gttttggcataacgaagcatcttcttcttcttccttgtatttattatccatttccagagattctcccttgtgagataacaacgaagaacgaaagagagagagagagagagagatatgatggacggcgttgaagacggcacggcgatgtacggtggtctcgagacggtgcaatacgtacggacgcatcatcaacatctgtgcagagaaaaccagtgtacctctgctcttgtcaaacacatcaaagctcctcttcatctcgtttggtcacttgtacggagatttgatcaaccgcagaaatacaaaccgtttgtgagcagatgtacagtaatcggtgatcctgaaatcggcagtcttagagaagtcaatgttaaatctggtcttcctgcaacaacatctactgagagattagaacttcttgatgatgaagaacacatcctcggtatcaaaatcatcggtggtgatcacagacttaagaattactcgtcgattttgacggttcatccggagataatcgagggaagagcaggaacgatggtgattgaatcgtttgtagttgatgttcctcaaggtaacacaaaggatgagacttgctactttgttgaagcacttatcagatgtaatctcaagtcactagcagatgtttctgaaagattggcttctcaggacattactcagtgaactacataatcaatgaacaagggcattgaagtgaagtatcaattccagtttgtgatataatcaatattcttcaggatttttttggtttggcctagatatatatatagatatctatcctcggtaatgaccagtctaaaaagatgtacatattgtcccaatggtgaagttttgatgtaagatatctcctggtggtttgttatttgtagatatttttgtaaacaatgtaaatgtgaatggtttatgatgtataatatatagttc

SEQ ID NO: 26831 - protein, 187 aa, Arabidopsis thaliana
  peptide (1)..(187): Ceres Seq. ID no. 12331561
  misc_feature (32)..(171): Pfam Name: Pathogenesis-related protein Bet v I family Pfam Description: Pathogenesis-related protein Bet v I family
  misc_feature (25)..(183): Homolog of NCBI NO: 18404709 NR Description: expressed protein
  misc_feature (19)..(185): Homolog of NCBI NO: 7486961 NR Description: hypothetical protein T13J8.30 - Arabidopsis
  misc_feature (19)..(185): Homolog of NCBI NO: 30687786 NR Description: expressed protein [Arabidopsis thaliana]
  misc_feature (19)..(187): Homolog of NCBI NO: 15238661 NR Description: putative protein; protein id: At5g53160.1
  misc_feature (49)..(186): Homolog of NCBI NO: 7486358 NR Description: hypothetical protein F3I3.40 - Arabidopsis
  misc_feature (1)..(186): Homolog of NCBI NO: 21593105 NR Description: unknown [Arabidopsis thaliana]
  misc_feature (1)..(186): Homolog of NCBI NO: 18411513 NR Description: Expressed protein
  misc_feature (2)..(187): Homolog of NCBI NO: 25348264 NR Description: hypothetical protein F6F3.16 - Arabidopsis
  misc_feature (1)..(187): Homolog of NCBI NO: 18378830 NR Description: expressed protein
  misc_feature (2)..(187): Homolog of NCBI NO: 21593547 NR Description: unknown [Arabidopsis thaliana]
MMDGVEDGTAMYGGLETVQYVRTHHQHLCRENQCTSALVKHIKAPLHLVWSLVRRFDQPQKYKPFVSRCTVIGDPEIGSLREVNVKSGLPATTSTERLELLDDEEHILGIKIIGGDHRLKNYSSILTVHPEIIEGRAGTMVIESFVVDVPQGNTKDETCYFVEALIRCNLKSLADVSERLASQDITQ

SEQ ID NO: 26832 - protein, 186 aa, Arabidopsis thaliana
  peptide (1)..(186): Ceres Seq. ID no. 12331562
  misc_feature (31)..(170): Pfam Name: Pathogenesis-related protein Bet v I family Pfam Description: Pathogenesis-related protein Bet v I family
  misc_feature (24)..(182): Homolog of NCBI NO: 18404709 NR Description: expressed protein
  misc_feature (18)..(184): Homolog of NCBI NO: 7486961 NR Description: hypothetical protein T13J8.30 - Arabidopsis
  misc_feature (18)..(184): Homolog of NCBI NO: 30687786 NR Description: expressed protein [Arabidopsis thaliana]
  misc_feature (18)..(186): Homolog of NCBI NO: 15238661 NR Description: putative protein; protein id: At5g53160.1
  misc_feature (48)..(185): Homolog of NCBI NO: 7486358 NR Description: hypothetical protein F3I3.40 - Arabidopsis
  misc_feature (1)..(185): Homolog of NCBI NO: 21593105 NR Description: unknown [Arabidopsis thaliana]
  misc_feature (1)..(185): Homolog of NCBI NO: 18411513 NR Description: Expressed protein
  misc_feature (1)..(186): Homolog of NCBI NO: 25348264 NR Description: hypothetical protein F6F3.16 - Arabidopsis
  misc_feature (1)..(186): Homolog of NCBI NO: 18378830 NR Description: expressed protein
  misc_feature (1)..(186): Homolog of NCBI NO: 21593547 NR Description: unknown [Arabidopsis thaliana]
MDGVEDGTAMYGGLETVQYVRTHHQHLCRENQCTSALVKHIKAPLHLVWSLVRRFDQPQKYKPFVSRCTVIGDPEIGSLREVNVKSGLPATTSTERLELLDDEEHILGIKIIGGDHRLKNYSSILTVHPEIIEGRAGTMVIESFVVDVPQGNTKDETCYFVEALIRCNLKSLADVSERLASQDITQ

SEQ ID NO: 26833 - protein, 177 aa, Arabidopsis thaliana
  peptide (1)..(177): Ceres Seq. ID no. 12331563
  misc_feature (22)..(161): Pfam Name: Pathogenesis-related protein Bet v I family Pfam Description: Pathogenesis-related protein Bet v I family
  misc_feature (15)..(173): Homolog of NCBI NO: 18404709 NR Description: expressed protein
  misc_feature (9)..(175): Homolog of NCBI NO: 7486961 NR Description: hypothetical protein T13J8.30 - Arabidopsis
  misc_feature (9)..(175): Homolog of NCBI NO: 30687786 NR Description: expressed protein [Arabidopsis thaliana]
  misc_feature (9)..(177): Homolog of NCBI NO: 15238661 NR Description: putative protein; protein id: At5g53160.1
  misc_feature (39)..(176): Homolog of NCBI NO: 7486358 NR Description: hypothetical protein F3I3.40 - Arabidopsis
  misc_feature (1)..(176): Homolog of NCBI NO: 21593105 NR Description: unknown [Arabidopsis thaliana]
  misc_feature (1)..(176): Homolog of NCBI NO: 18411513 NR Description: Expressed protein
  misc_feature (1)..(177): Homolog of NCBI NO: 25348264 NR Description: hypothetical protein F6F3.16 - Arabidopsis
  misc_feature (1)..(177): Homolog of NCBI NO: 18378830 NR Description: expressed protein
  misc_feature (1)..(177): Homolog of NCBI NO: 21593547 NR Description: unknown [Arabidopsis thaliana]
MYGGLETVQYVRTHHQHLCRENQCTSALVKHIKAPLHLVWSLVRRFDQPQKYKPFVSRCTVIGDPEIGSLREVNVKSGLPATTSTERLELLDDEEHILGIKIIGGDHRLKNYSSILTVHPEIIEGRAGTMVIESFVVDVPQGNTKDETCYFVEALIRCNLKSLADVSERLASQDITQ

SEQ ID NO: 26834 - DNA, 1361 bp, Arabidopsis thaliana
  misc_feature (1)..(1361): Ceres Seq. ID no. 12335864
  misc_feature: MA Experiment ID: 108488 Result: Down-regulated in Transcription
  misc_feature: MA Experiment ID: 20000086 Result: Up-regulated in Transcription
  misc_feature: MA Experiment 20000086 PARAMETER Experiment Name: At_100uM_ABA_Mutants_cDNA_P Parameter: Plant Line Value: CS22
  misc_feature: MA Experiment 20000086 PARAMETER Experiment Name: At_100uM_ABA_Mutants_cDNA_P Parameter: Timepoint (hr) Value: 6
  misc_feature: MA Experiment 20000086 PARAMETER Experiment Name: At_100uM_ABA_Mutants_cDNA_P Parameter: Tissue Value: Aerial
  misc_feature: MA Experiment 20000086 PARAMETER Experiment Name: At_100uM_ABA_Mutants_cDNA_P Parameter: Treatment Value: 100uM ABA vs. No Treatment
  misc_feature: MA Experiment ID: 20000184 Result: Down-regulated in Transcription
  misc_feature: MA Experiment 20000184 PARAMETER Experiment Name: At_Shoots__P Parameter: Age (day) Value: 7
  misc_feature: MA Experiment 20000184 PARAMETER Experiment Name: At_Shoots__P Parameter: Tissue Value: Shoots vs. Whole Plant
  misc_feature: MA Experiment ID: 20000437 Result: Up-regulated in Transcription
  misc_feature: MA Experiment 20000437 PARAMETER Experiment Name: At_Drought_P Parameter: Age (day) Value: 8
  misc_feature: MA Experiment 20000437 PARAMETER Experiment Name: At_Drought_P Parameter: Organism Value: A. thaliana
  misc_feature: MA Experiment 20000437 PARAMETER Experiment Name: At_Drought_P Parameter: Plant Line Value: WS
  misc_feature: MA Experiment 20000437 PARAMETER Experiment Name: At_Drought_P Parameter: Timepoint (hr) Value: 24
  misc_feature: MA Experiment 20000437 PARAMETER Experiment Name: At_Drought_P Parameter: Tissue Value: Whole Plant
  misc_feature: MA Experiment 20000437 PARAMETER Experiment Name: At_Drought_P Parameter: Treatment Value: Drought vs. No Drought
  misc_feature: MA Experiment ID: 20000794 Result: Up-regulated in Transcription
  misc_feature: MA Experiment 20000794 PARAMETER Experiment Name: At_Petals_P Parameter: Age (day) Value: 23-25 days
  misc_feature: MA Experiment 20000794 PARAMETER Experiment Name: At_Petals_P Parameter: Plant Line Value: WS
  misc_feature: MA Experiment 20000794 PARAMETER Experiment Name: At_Petals_P Parameter: Tissue Value: Petals vs. Whole plant
aaattcatcttctcttcttccttcgattccatctttctccgtttccggcgataatcttcatcgcttcttcagttgattatctttagaatggagctaaagaatgtcaaagatgcgtttgatcgtgttaccaaaaagcagaaactatgctatagcaaaacgcatgaagtggtagaaaaaatgtctcaagaaatcgacaaggcattgaaaacgatacaggaggataatcatgaatctgttgttgctgatctgaagaaaacttttgaggagattgctccaatcaatctactagaagcgtctcagaaagaaataaatggggttcttaccaaatacccgaaagctcttgacaaaactctgaatccagatatatcgacggcttacagaaacgttaagtttgatactcatacagttcatcagatactagctcagtttttctacaggcaaggcatgtacggcgttggtgactgtttcatttccgagactggtgaggttaagcctgaatcttctgttactaaagctttcatggaaatgaatatgatacttgaagccatgaaagaacgggatctcggaccagctttgaaatgggtagcttcaaactctgacaagctaaaggaagcaaagtcagatcttgagttgaaacttcacagccttcactttttggagatagctaaagacaaaacctccgaagaagctatcaactacgcgagaaaacactttgctacgtattcagcagatagctgctgtttccctgagatacagaaactcatgtgctctctcttatggaacagaaacctcaataaatccccatactcagagttcctctcacctgtattgtggaccaacgctgccaaggaactaacccgacaatactgcatcctactcggtgaatcaccagagagtcctttaagtgtaacagttgcagcaggttcacaagttttaccgacgtttttgaagtatttgaacgtgctgccggagaaaagaaaagagtggcaaacaatggagcaacttcttgtacctgtggaactctctgaagagtatcgcttctactcggtctttgtctgccctgtctctaaagaacactcgagtgaagataatccgccgatgagattggcttgcggtcatgtcctttgcaagcagtctatcaacagaatgtcgaggaatggttcaaggtcgttcaagtgtccttattgtccaacagatattgatgcttcgcagtgtaagcagttatatttttagactagctttacaacttcttatgcagcatttctaaagaaagtagacaaatgtttcttatcttttcttttatgaacttgaattgggttcgtgtacaaaaactatagtttgaaataaaaccttttataccc

SEQ ID NO: 26835 - protein, 381 aa, Arabidopsis thaliana
  peptide (1)..(381): Ceres Seq. ID no. 12335865
  misc_feature (47)..(381): Homolog of NCBI NO: 37595352 NR Description: hypothetical protein FLJ22318 [Danio rerio]
  misc_feature (64)..(381): Homolog of NCBI NO: 31044429 NR Description: hypothetical protein MGC59617 [Mus musculus]
  misc_feature (64)..(381): Homolog of NCBI NO: 10434433 NR Description: unnamed protein product [Homo sapiens]
  misc_feature (64)..(381): Homolog of NCBI NO: 12232469 NR Description: hypothetical protein FLJ13910 [Homo sapiens]
  misc_feature (47)..(381): Homolog of NCBI NO: 37590378 NR Description: Unknown (protein for MGC:73277) [Danio rerio]
  misc_feature (1)..(381): Homolog of NCBI NO: 28829262 NR Description: similar to Arabidopsis thaliana (Mouse-ear
  misc_feature (6)..(381): Homolog of NCBI NO: 15242463 NR Description: putative protein
  misc_feature (1)..(381): Homolog of NCBI NO: 15235735 NR Description: putative protein; protein id: At4g37880.1
  misc_feature (1)..(381): Homolog of NCBI NO: 18400050 NR Description: expressed protein
  misc_feature (1)..(381): Homolog of NCBI NO: 21593562 NR Description: unknown [Arabidopsis thaliana]
MELKNVKDAFDRVTKKQKLCYSKTHEVVEKMSQEIDKALKTIQEDNHESVVADLKKTFEEIAPINLLEASQKEINGVLTKYPKALDKTLNPDISTAYRNVKFDTHTVHQILAQFFYRQGMYGVGDCFISETGEVKPESSVTKAFMEMNMILEAMKERDLGPALKWVASNSDKLKEAKSDLELKLHSLHFLEIAKDKTSEEAINYARKHFATYSADSCCFPEIQKLMCSLLWNRNLNKSPYSEFLSPVLWTNAAKELTRQYCILLGESPESPLSVTVAAGSQVLPTFLKYLNVLPEKRKEWQTMEQLLVPVELSEEYRFYSVFVCPVSKEHSSEDNPPMRLACGHVLCKQSINRMSRNGSRSFKCPYCPTDIDASQCKQLYF

SEQ ID NO: 26836 - protein, 351 aa, Arabidopsis thaliana
  peptide (1)..(351): Ceres Seq. ID no. 12335866
  misc_feature (17)..(351): Homolog of NCBI NO: 37595352 NR Description: hypothetical protein FLJ22318 [Danio rerio]
  misc_feature (34)..(351): Homolog of NCBI NO: 31044429 NR Description: hypothetical protein MGC59617 [Mus musculus]
  misc_feature (34)..(351): Homolog of NCBI NO: 10434433 NR Description: unnamed protein product [Homo sapiens]
  misc_feature (34)..(351): Homolog of NCBI NO: 12232469 NR Description: hypothetical protein FLJ13910 [Homo sapiens]
  misc_feature (17)..(351): Homolog of NCBI NO: 37590378 NR Description: Unknown (protein for MGC:73277) [Danio rerio]
  misc_feature (1)..(351): Homolog of NCBI NO: 28829262 NR Description: similar to Arabidopsis thaliana (Mouse-ear
  misc_feature (1)..(351): Homolog of NCBI NO: 15242463 NR Description: putative protein
  misc_feature (1)..(351): Homolog of NCBI NO: 15235735 NR Description: putative protein; protein id: At4g37880.1
  misc_feature (1)..(351): Homolog of NCBI NO: 18400050 NR Description: expressed protein
  misc_feature (1)..(351): Homolog of NCBI NO: 21593562 NR Description: unknown [Arabidopsis thaliana]
MSQEIDKALKTIQEDNHESVVADLKKTFEEIAPINLLEASQKEINGVLTKYPKALDKTLNPDISTAYRNVKFDTHTVHQILAQFFYRQGMYGVGDCFISETGEVKPESSVTKAFMEMNMILEAMKERDLGPALKWVASNSDKLKEAKSDLELKLHSLHFLEIAKDKTSEEAINYARKHFATYSADSCCFPEIQKLMCSLLWNRNLNKSPYSEFLSPVLWTNAAKELTRQYCILLGESPESPLSVTVAAGSQVLPTFLKYLNVLPEKRKEWQTMEQLLVPVELSEEYRFYSVFVCPVSKEHSSEDNPPMRLACGHVLCKQSINRMSRNGSRSFKCPYCPTDIDASQCKQLYF

SEQ ID NO: 26837 - protein, 262 aa, Arabidopsis thaliana
  peptide (1)..(262): Ceres Seq. ID no. 12335867
  misc_feature (1)..(262): Homolog of NCBI NO: 37595352 NR Description: hypothetical protein FLJ22318 [Danio rerio]
  misc_feature (1)..(262): Homolog of NCBI NO: 31044429 NR Description: hypothetical protein MGC59617 [Mus musculus]
  misc_feature (1)..(262): Homolog of NCBI NO: 10434433 NR Description: unnamed protein product [Homo sapiens]
  misc_feature (1)..(262): Homolog of NCBI NO: 12232469 NR Description: hypothetical protein FLJ13910 [Homo sapiens]
  misc_feature (1)..(262): Homolog of NCBI NO: 37590378 NR Description: Unknown (protein for MGC:73277) [Danio rerio]
  misc_feature (1)..(262): Homolog of NCBI NO: 28829262 NR Description: similar to Arabidopsis thaliana (Mouse-ear
  misc_feature (1)..(262): Homolog of NCBI NO: 15242463 NR Description: putative protein
  misc_feature (1)..(262): Homolog of NCBI NO: 15235735 NR Description: putative protein; protein id: At4g37880.1
  misc_feature (1)..(262): Homolog of NCBI NO: 18400050 NR Description: expressed protein
  misc_feature (1)..(262): Homolog of NCBI NO: 21593562 NR Description: unknown [Arabidopsis thaliana]
MYGVGDCFISETGEVKPESSVTKAFMEMNMILEAMKERDLGPALKWVASNSDKLKEAKSDLELKLHSLHFLEIAKDKTSEEAINYARKHFATYSADSCCFPEIQKLMCSLLWNRNLNKSPYSEFLSPVLWTNAAKELTRQYCILLGESPESPLSVTVAAGSQVLPTFLKYLNVLPEKRKEWQTMEQLLVPVELSEEYRFYSVFVCPVSKEHSSEDNPPMRLACGHVLCKQSINRMSRNGSRSFKCPYCPTDIDASQCKQLYF

SEQ ID NO: 26838 - DNA, 1139 bp, Arabidopsis thaliana
  misc_feature (1)..(1139): Ceres Seq. ID no. 12331207
  misc_feature: MA Experiment ID: 20000173 Result: Down-regulated in Transcription
  misc_feature: MA Experiment 20000173 PARAMETER Experiment Name: At_42deg_Heat_P Parameter: Age (day) Value: 14
  misc_feature: MA Experiment 20000173 PARAMETER Experiment Name: At_42deg_Heat_P Parameter: Organism Value: A. thaliana
  misc_feature: MA Experiment 20000173 PARAMETER Experiment Name: At_42deg_Heat_P Parameter: Plant Line Value: WS
  misc_feature: MA Experiment 20000173 PARAMETER Experiment Name: At_42deg_Heat_P Parameter: Temperature (deg C) Value: 42 vs. 22
  misc_feature: MA Experiment 20000173 PARAMETER Experiment Name: At_42deg_Heat_P Parameter: Timepoint (hr) Value: 6
  misc_feature: MA Experiment 20000173 PARAMETER Experiment Name: At_42deg_Heat_P Parameter: Tissue Value: Aerial
  misc_feature: MA Experiment ID: 20000185 Result: Down-regulated in Transcription
  misc_feature: MA Experiment 20000185 PARAMETER Experiment Name: At_Roots__P Parameter: Age (day) Value: 7 vs. 21
  misc_feature: MA Experiment 20000185 PARAMETER Experiment Name: At_Roots__P Parameter: Organism Value: A. thaliana
  misc_feature: MA Experiment 20000185 PARAMETER Experiment Name: At_Roots__P Parameter: Tissue Value: Roots vs. Whole Plant
  misc_feature: MA Experiment ID: 20000227 Result: Down-regulated in Transcription
  misc_feature: MA Experiment 20000227 PARAMETER Experiment Name: At_Root-Tips-vs-Tops_P Parameter: Tissue Value: Root Tips vs. Root Tops
  misc_feature: MA Experiment ID: 20000573 Result: Down-regulated in Transcription
  misc_feature: MA Experiment 20000573 PARAMETER Experiment Name: At_100uM_ABA_Mutants__P Parameter: Organism Value: A. thaliana
  misc_feature: MA Experiment 20000573 PARAMETER Experiment Name: At_100uM_ABA_Mutants__P Parameter: Plant Line Value: CS22 vs. Ler wt
  misc_feature: MA Experiment 20000573 PARAMETER Experiment Name: At_100uM_ABA_Mutants__P Parameter: Timepoint (hr) Value: N/A
  misc_feature: MA Experiment 20000573 PARAMETER Experiment Name: At_100uM_ABA_Mutants__P Parameter: Tissue Value: Whole Plant
  misc_feature: MA Experiment 20000573 PARAMETER Experiment Name: At_100uM_ABA_Mutants__P Parameter: Treatment Value: None
  misc_feature: MA Experiment ID: 20000574 Result: Down-regulated in Transcription
  misc_feature: MA Experiment 20000574 PARAMETER Experiment Name: At_100uM_ABA_Mutants__P Parameter: Organism Value: A. thaliana
  misc_feature: MA Experiment 20000574 PARAMETER Experiment Name: At_100uM_ABA_Mutants__P Parameter: Plant Line Value: CS23 vs. Ler wt
  misc_feature: MA Experiment 20000574 PARAMETER Experiment Name: At_100uM_ABA_Mutants__P Parameter: Timepoint (hr) Value: N/A
  misc_feature: MA Experiment 20000574 PARAMETER Experiment Name: At_100uM_ABA_Mutants__P Parameter: Tissue Value: Whole Plant
  misc_feature: MA Experiment 20000574 PARAMETER Experiment Name: At_100uM_ABA_Mutants__P Parameter: Treatment Value: None
  misc_feature: MA Experiment ID: 20000709 Result: Down-regulated in Transcription
  misc_feature: MA Experiment 20000709 PARAMETER Experiment Name: At_15mM_NH4NO3_L-to-H_P Parameter: Age (hr) Value: 14
  misc_feature: MA Experiment 20000709 PARAMETER Experiment Name: At_15mM_NH4NO3_L-to-H_P Parameter: Organism Value: A. thaliana
  misc_feature: MA Experiment 20000709 PARAMETER Experiment Name: At_15mM_NH4NO3_L-to-H_P Parameter: Plant Line Value: WS
  misc_feature: MA Experiment 20000709 PARAMETER Experiment Name: At_15mM_NH4NO3_L-to-H_P Parameter: Timepoint (hr) Value: 4
  misc_feature: MA Experiment 20000709 PARAMETER Experiment Name: At_15mM_NH4NO3_L-to-H_P Parameter: Tissue Value: Aerial
  misc_feature: MA Experiment 20000709 PARAMETER Experiment Name: At_15mM_NH4NO3_L-to-H_P Parameter: Treatment Value: 15mM NH4NO3 vs. 30mM Mannitol
  misc_feature: MA Experiment ID: 20000794 Result: Down-regulated in Transcription
  misc_feature: MA Experiment 20000794 PARAMETER Experiment Name: At_Petals_P Parameter: Age (day) Value: 23-25 days
  misc_feature: MA Experiment 20000794 PARAMETER Experiment Name: At_Petals_P Parameter: Plant Line Value: WS
  misc_feature: MA Experiment 20000794 PARAMETER Experiment Name: At_Petals_P Parameter: Tissue Value: Petals vs. Whole plant
  misc_feature: MA Experiment ID: 20001557 Result: Down-regulated in Transcription
  misc_feature: MA Experiment 20001557 PARAMETER Experiment Name: At_Drought_Soil_Dry_P Parameter: Age (day) Value: 27
  misc_feature: MA Experiment 20001557 PARAMETER Experiment Name: At_Drought_Soil_Dry_P Parameter: Organism Value: A. thaliana
  misc_feature: MA Experiment 20001557 PARAMETER Experiment Name: At_Drought_Soil_Dry_P Parameter: Plant Line Value: WS
  misc_feature: MA Experiment 20001557 PARAMETER Experiment Name: At_Drought_Soil_Dry_P Parameter: Post Timepoint (hr) Value: 3
  misc_feature: MA Experiment 20001557 PARAMETER Experiment Name: At_Drought_Soil_Dry_P Parameter: Post-Treatment Value: Re-Water vs. No Drought
  misc_feature: MA Experiment 20001557 PARAMETER Experiment Name: At_Drought_Soil_Dry_P Parameter: Timepoint (day) Value: 13
  misc_feature: MA Experiment 20001557 PARAMETER Experiment Name: At_Drought_Soil_Dry_P Parameter: Treatment Value: Drought vs. No Drought
  misc_feature: MA Experiment ID: 20001558 Result: Down-regulated in Transcription
  misc_feature: MA Experiment 20001558 PARAMETER Experiment Name: At_Drought_Soil_Dry_P Parameter: Age (day) Value: 27
  misc_feature: MA Experiment 20001558 PARAMETER Experiment Name: At_Drought_Soil_Dry_P Parameter: Organism Value: A. thaliana
  misc_feature: MA Experiment 20001558 PARAMETER Experiment Name: At_Drought_Soil_Dry_P Parameter: Plant Line Value: WS
  misc_feature: MA Experiment 20001558 PARAMETER Experiment Name: At_Drought_Soil_Dry_P Parameter: Post Timepoint (hr) Value: 6
  misc_feature: MA Experiment 20001558 PARAMETER Experiment Name: At_Drought_Soil_Dry_P Parameter: Post-Treatment Value: Re-Water vs. No Drought
  misc_feature: MA Experiment 20001558 PARAMETER Experiment Name: At_Drought_Soil_Dry_P Parameter: Timepoint (day) Value: 13
  misc_feature: MA Experiment 20001558 PARAMETER Experiment Name: At_Drought_Soil_Dry_P Parameter: Treatment Value: Drought vs. No Drought
  misc_feature: MA Experiment ID: 20001560 Result: Down-regulated in Transcription
  misc_feature: MA Experiment 20001560 PARAMETER Experiment Name: At_Drought_Soil_Dry_P Parameter: Age (day) Value: 28
  misc_feature: MA Experiment 20001560 PARAMETER Experiment Name: At_Drought_Soil_Dry_P Parameter: Organism Value: A. thaliana
  misc_feature: MA Experiment 20001560 PARAMETER Experiment Name: At_Drought_Soil_Dry_P Parameter: Plant Line Value: WS
  misc_feature: MA Experiment 20001560 PARAMETER Experiment Name: At_Drought_Soil_Dry_P Parameter: Post Timepoint (hr) Value: None
  misc_feature: MA Experiment 20001560 PARAMETER Experiment Name: At_Drought_Soil_Dry_P Parameter: Post-Treatment Value: None
  misc_feature: MA Experiment 20001560 PARAMETER Experiment Name: At_Drought_Soil_Dry_P Parameter: Timepoint (day) Value: 14
  misc_feature: MA Experiment 20001560 PARAMETER Experiment Name: At_Drought_Soil_Dry_P Parameter: Treatment Value: Drought vs. No Drought
  misc_feature: MA Experiment ID: 20001904 Result: Down-regulated in Transcription
  misc_feature: MA Experiment 20001904 PARAMETER Experiment Name: At_Drought_Reproduction_P Parameter: Age (day) Value: 37
  misc_feature: MA Experiment 20001904 PARAMETER Experiment Name: At_Drought_Reproduction_P Parameter: Organism Value: A. thaliana
  misc_feature: MA Experiment 20001904 PARAMETER Experiment Name: At_Drought_Reproduction_P Parameter: Plant Line Value: WS
  misc_feature: MA Experiment 20001904 PARAMETER Experiment Name: At_Drought_Reproduction_P Parameter: Timepoint (day) Value: 7
  misc_feature: MA Experiment 20001904 PARAMETER Experiment Name: At_Drought_Reproduction_P Parameter: Tissue Value: Rosettes
  misc_feature: MA Experiment 20001904 PARAMETER Experiment Name: At_Drought_Reproduction_P Parameter: Treatment Value: Drought vs. No Drought
  misc_feature: MA Experiment ID: 20001905 Result: Down-regulated in Transcription
  misc_feature: MA Experiment 20001905 PARAMETER Experiment Name: At_Drought_Reproduction_P Parameter: Age (day) Value: 40
  misc_feature: MA Experiment 20001905 PARAMETER Experiment Name: At_Drought_Reproduction_P Parameter: Organism Value: A. thaliana
  misc_feature: MA Experiment 20001905 PARAMETER Experiment Name: At_Drought_Reproduction_P Parameter: Plant Line Value: WS
  misc_feature: MA Experiment 20001905 PARAMETER Experiment Name: At_Drought_Reproduction_P Parameter: Timepoint (day) Value: 10
  misc_feature: MA Experiment 20001905 PARAMETER Experiment Name: At_Drought_Reproduction_P Parameter: Tissue Value: Rosettes
  misc_feature: MA Experiment 20001905 PARAMETER Experiment Name: At_Drought_Reproduction_P Parameter: Treatment Value: Drought vs. No Drought
caatcatctgatctttccctctctcagcaatgcatgatcttcgattttctatcagtgttcaaagctgaaaaaaatcgaactgggtctgttgatttcttcaggtctaaaatcagattagattagagaagaagaagaagaatgctggaagctgtagatagctcaggagtggtgaatggaggattcccgcagattcagagcttttacggcgattgcagtagtgaagaagagttatcggtattgccacgtcatacaaaagtggtggtcaccggaaacaaccggacgaaatcggtgcttgttggtcttcaaggtgttgtcaaaaaagctgtcggtctcggtggttggcattggctggttttgacaaatggaatagaagtaaagttgcagaggaatgcgcttagtgtccttgaacctcctactggaaacgaagaagacgatgatcttgatttcgaaaacacacagaggaatggctctgatatgattgtttcttttccagcatctgaggacacactgaagcctcataagtcgaagctaagagggcagagatcatctcggtcatctcacaagacgatgagcaggtctctatcatctgactcgcaatcaaaaagttcgggttttactcctcctgaaaacatgaaggttgatcttagcaaattggaaatgcctgctttactgaattattggcgacattttaaccttgtggatgcaattccaaatccatcaaaggagcaactaattgacattgttcaaaggcacttcatgtctcagcaaatggatgagcttcaggttattgtggggtttgtccaagctgcaaagagaatgaagaaggcttgcaagtttcaatccaaagaatccagaaacactgatcttaactgcatcagctaaagaaaagccctgactcttaacaaatcctgtatgtacggtacatcaacttgtttaaccatttgtggcttgctaagtttagttcttctagtgatgtttggctaaagggtagatgttgtttcttctttgcttctgttgtttagccaatgtaagtaccatcaaaaaacccaaataactctctaaagctccctattggaaactatcttgtctgatacgatctggagtgaccggtatgttgttagaatgtaaatatgtttggt

SEQ ID NO: 26839 - protein, 247 aa, Arabidopsis thaliana
  peptide (1)..(247): Ceres Seq. ID no. 12331208
  misc_feature (209)..(228): Homolog of NCBI NO: 38567956 NR Description: OSJNBb0115I21.12 [Oryza sativa (japonica
  misc_feature (26)..(98): Homolog of NCBI NO: 38567956 NR Description: OSJNBb0115I21.12 [Oryza sativa (japonica
  misc_feature (26)..(228): Homolog of NCBI NO: 38346468 NR Description: OSJNBa0019G23.16 [Oryza sativa (japonica
  misc_feature (2)..(218): Homolog of NCBI NO: 18767383 NR Description: Hypothetical protein [Oryza sativa]
  misc_feature (1)..(218): Homolog of NCBI NO: 37533376 NR Description: hypothetical protein [Oryza sativa (japonica
  misc_feature (1)..(239): Homolog of NCBI NO: 15222092 NR Description: hypothetical protein; protein id: At1g75060.1
  misc_feature (1)..(247): Homolog of NCBI NO: 25372870 NR Description: protein F18O14.5 [imported] - Arabidopsis
  misc_feature (1)..(247): Homolog of NCBI NO: 18394724 NR Description: expressed protein
MLEAVDSSGVVNGGFPQIQSFYGDCSSEEELSVLPRHTKVVVTGNNRTKSVLVGLQGVVKKAVGLGGWHWLVLTNGIEVKLQRNALSVLEPPTGNEEDDDLDFENTQRNGSDMIVSFPASEDTLKPHKSKLRGQRSSRSSHKTMSRSLSSDSQSKSSGFTPPENMKVDLSKLEMPALLNYWRHFNLVDAIPNPSKEQLIDIVQRHFMSQQMDELQVIVGFVQAAKRMKKACKFQSKESRNTDLNCIS

SEQ ID NO: 26840 - protein, 135 aa, Arabidopsis thaliana
  peptide (1)..(135): Ceres Seq. ID no. 12331209
  misc_feature (1)..(106): Homolog of NCBI NO: 37533376 NR Description: hypothetical protein [Oryza sativa (japonica
  misc_feature (1)..(127): Homolog of NCBI NO: 15222092 NR Description: hypothetical protein; protein id: At1g75060.1
  misc_feature (1)..(135): Homolog of NCBI NO: 25372870 NR Description: protein F18O14.5 [imported] - Arabidopsis
  misc_feature (1)..(135): Homolog of NCBI NO: 18394724 NR Description: expressed protein
  misc_feature (97)..(116): Homolog of NCBI NO: 38567956 NR Description: OSJNBb0115I21.12 [Oryza sativa (japonica
  misc_feature (1)..(116): Homolog of NCBI NO: 38346468 NR Description: OSJNBa0019G23.16 [Oryza sativa (japonica
  misc_feature (1)..(106): Homolog of NCBI NO: 18767383 NR Description: Hypothetical protein [Oryza sativa]
MIVSFPASEDTLKPHKSKLRGQRSSRSSHKTMSRSLSSDSQSKSSGFTPPENMKVDLSKLEMPALLNYWRHFNLVDAIPNPSKEQLIDIVQRHFMSQQMDELQVIVGFVQAAKRMKKACKFQSKESRNTDLNCIS

SEQ ID NO: 26841 - DNA, 1399 bp, Arabidopsis thaliana
  misc_feature (1)..(1399): Ceres Seq. ID no. 12325047
  misc_feature: MA Experiment ID: 20000179 Result: Down-regulated in Transcription
  misc_feature: MA Experiment 20000179 PARAMETER Experiment Name: At_Germinating_Seeds_P Parameter: Age (hr) Value: 6 vs. 0
  misc_feature: MA Experiment 20000179 PARAMETER Experiment Name: At_Germinating_Seeds_P Parameter: Tissue Value: Germinating Seeds
  misc_feature: MA Experiment ID: 20000267 Result: Up-regulated in Transcription
  misc_feature: MA Experiment 20000267 PARAMETER Experiment Name: At_Drought_P Parameter: Age (day) Value: 7
  misc_feature: MA Experiment 20000267 PARAMETER Experiment Name: At_Drought_P Parameter: Organism Value: A. thaliana
  misc_feature: MA Experiment 20000267 PARAMETER Experiment Name: At_Drought_P Parameter: Plant Line Value: WS
  misc_feature: MA Experiment 20000267 PARAMETER Experiment Name: At_Drought_P Parameter: Timepoint (hr) Value: 6
  misc_feature: MA Experiment 20000267 PARAMETER Experiment Name: At_Drought_P Parameter: Tissue Value: Whole Plant
  misc_feature: MA Experiment 20000267 PARAMETER Experiment Name: At_Drought_P Parameter: Treatment Value: Drought vs. No Drought
  misc_feature: MA Experiment ID: 20000268 Result: Up-regulated in Transcription
  misc_feature: MA Experiment 20000268 PARAMETER Experiment Name: At_100mM_NaCl__P Parameter: Age (day) Value: 14
  misc_feature: MA Experiment 20000268 PARAMETER Experiment Name: At_100mM_NaCl__P Parameter: Organism Value: A. thaliana
  misc_feature: MA Experiment 20000268 PARAMETER Experiment Name: At_100mM_NaCl__P Parameter: Plant Line Value: WS
  misc_feature: MA Experiment 20000268 PARAMETER Experiment Name: At_100mM_NaCl__P Parameter: Timepoint (hr) Value: 6
  misc_feature: MA Experiment 20000268 PARAMETER Experiment Name: At_100mM_NaCl__P Parameter: Tissue Value: Whole Plant
  misc_feature: MA Experiment 20000268 PARAMETER Experiment Name: At_100mM_NaCl__P Parameter: Treatment Value: 100mM NaCl vs. No Treatment
  misc_feature: MA Experiment ID: 20000308 Result: Up-regulated in Transcription
  misc_feature: MA Experiment 20000308 PARAMETER Experiment Name: At_100mM_NaCl__P Parameter: Age (day) Value: 17
  misc_feature: MA Experiment 20000308 PARAMETER Experiment Name: At_100mM_NaCl__P Parameter: Organism Value: A. thaliana
  misc_feature: MA Experiment 20000308 PARAMETER Experiment Name: At_100mM_NaCl__P Parameter: Plant Line Value: WS
  misc_feature: MA Experiment 20000308 PARAMETER Experiment Name: At_100mM_NaCl__P Parameter: Timepoint (hr) Value: 72
  misc_feature: MA Experiment 20000308 PARAMETER Experiment Name: At_100mM_NaCl__P Parameter: Tissue Value: Whole Plant
  misc_feature: MA Experiment 20000308 PARAMETER Experiment Name: At_100mM_NaCl__P Parameter: Treatment Value: 100mM NaCl vs. No Treatment
  misc_feature: MA Experiment ID: 20000436 Result: Up-regulated in Transcription
  misc_feature: MA Experiment 20000436 PARAMETER Experiment Name: At_Drought_P Parameter: Age (day) Value: 7
  misc_feature: MA Experiment 20000436 PARAMETER Experiment Name: At_Drought_P Parameter: Organism Value: A. thaliana
  misc_feature: MA Experiment 20000436 PARAMETER Experiment Name: At_Drought_P Parameter: Plant Line Value: WS
  misc_feature: MA Experiment 20000436 PARAMETER Experiment Name: At_Drought_P Parameter: Timepoint (hr) Value: 12
  misc_feature: MA Experiment 20000436 PARAMETER Experiment Name: At_Drought_P Parameter: Tissue Value: Whole Plant
  misc_feature: MA Experiment 20000436 PARAMETER Experiment Name: At_Drought_P Parameter: Treatment Value: Drought vs. No Drought
  misc_feature: MA Experiment ID: 20000437 Result: Up-regulated in Transcription
  misc_feature: MA Experiment 20000437 PARAMETER Experiment Name: At_Drought_P Parameter: Age (day) Value: 8
  misc_feature: MA Experiment 20000437 PARAMETER Experiment Name: At_Drought_P Parameter: Organism Value: A. thaliana
  misc_feature: MA Experiment 20000437 PARAMETER Experiment Name: At_Drought_P Parameter: Plant Line Value: WS
  misc_feature: MA Experiment 20000437 PARAMETER Experiment Name: At_Drought_P Parameter: Timepoint (hr) Value: 24
  misc_feature: MA Experiment 20000437 PARAMETER Experiment Name: At_Drought_P Parameter: Tissue Value: Whole Plant
  misc_feature: MA Experiment 20000437 PARAMETER Experiment Name: At_Drought_P Parameter: Treatment Value: Drought vs. No Drought
  misc_feature: MA Experiment ID: 20000441 Result: Down-regulated in Transcription
  misc_feature: MA Experiment 20000441 PARAMETER Experiment Name: At_1uM_BR-BRZ__P Parameter: Tissue Value: Shoot Apices
  misc_feature: MA Experiment 20000441 PARAMETER Experiment Name: At_1uM_BR-BRZ__P Parameter: Treatment Value: 1uM BR vs. No Treatment
  misc_feature: MA Experiment ID: 20000443 Result: Down-regulated in Transcription
  misc_feature: MA Experiment 20000443 PARAMETER Experiment Name: At_1uM_BR-BRZ__P Parameter: Tissue Value: Shoot Apices
  misc_feature: MA Experiment 20000443 PARAMETER Experiment Name: At_1uM_BR-BRZ__P Parameter: Treatment Value: 1uM BRZ vs. No Treatment
  misc_feature: MA Experiment ID: 20000451 Result: Up-regulated in Transcription
  misc_feature: MA Experiment 20000451 PARAMETER Experiment Name: At_CS6879_Shoots-Roots_P Parameter: Age (day) Value: 14
  misc_feature: MA Experiment 20000451 PARAMETER Experiment Name: At_CS6879_Shoots-Roots_P Parameter: Organism Value: A. thaliana
  misc_feature: MA Experiment 20000451 PARAMETER Experiment Name: At_CS6879_Shoots-Roots_P Parameter: Plant Line Value: CS6879 vs. WS
  misc_feature: MA Experiment 20000451 PARAMETER Experiment Name: At_CS6879_Shoots-Roots_P Parameter: Tissue Value: Roots
  misc_feature: MA Experiment ID: 20000460 Result: Down-regulated in Transcription
  misc_feature: MA Experiment 20000460 PARAMETER Experiment Name: At_10percent_PEG_P Parameter: Age (day) Value: 12
  misc_feature: MA Experiment 20000460 PARAMETER Experiment Name: At_10percent_PEG_P Parameter: Organism Value: A. thaliana
  misc_feature: MA Experiment 20000460 PARAMETER Experiment Name: At_10percent_PEG_P Parameter: Plant Line Value: WS
  misc_feature: MA Experiment 20000460 PARAMETER Experiment Name: At_10percent_PEG_P Parameter: Timepoint (day) Value: 12
  misc_feature: MA Experiment 20000460 PARAMETER Experiment Name: At_10percent_PEG_P Parameter: Tissue Value: Whole Plant
  misc_feature: MA Experiment 20000460 PARAMETER Experiment Name: At_10percent_PEG_P Parameter: Treatment Value: 10percent PEG vs. No Treatment
  misc_feature: MA Experiment ID: 20000527 Result: Down-regulated in Transcription
  misc_feature: MA Experiment 20000527 PARAMETER Experiment Name: At_10percent_PEG_P Parameter: Age (day) Value: 20
  misc_feature: MA Experiment 20000527 PARAMETER Experiment Name: At_10percent_PEG_P Parameter: Organism Value: A. thaliana
  misc_feature: MA Experiment 20000527 PARAMETER Experiment Name: At_10percent_PEG_P Parameter: Plant Line Value: WS
  misc_feature: MA Experiment 20000527 PARAMETER Experiment Name: At_10percent_PEG_P Parameter: Timepoint (day) Value: 20
  misc_feature: MA Experiment 20000527 PARAMETER Experiment Name: At_10percent_PEG_P Parameter: Tissue Value: Whole Plant
  misc_feature: MA Experiment 20000527 PARAMETER Experiment Name: At_10percent_PEG_P Parameter: Treatment Value: 10percent PEG vs. No Treatment
  misc_feature: MA Experiment ID: 20001557 Result: Up-regulated in Transcription
  misc_feature: MA Experiment 20001557 PARAMETER Experiment Name: At_Drought_Soil_Dry_P Parameter: Age (day) Value: 27
  misc_feature: MA Experiment 20001557 PARAMETER Experiment Name: At_Drought_Soil_Dry_P Parameter: Organism Value: A. thaliana
  misc_feature: MA Experiment 20001557 PARAMETER Experiment Name: At_Drought_Soil_Dry_P Parameter: Plant Line Value: WS
  misc_feature: MA Experiment 20001557 PARAMETER Experiment Name: At_Drought_Soil_Dry_P Parameter: Post Timepoint (hr) Value: 3
  misc_feature: MA Experiment 20001557 PARAMETER Experiment Name: At_Drought_Soil_Dry_P Parameter: Post-Treatment Value: Re-Water vs. No Drought
  misc_feature: MA Experiment 20001557 PARAMETER Experiment Name: At_Drought_Soil_Dry_P Parameter: Timepoint (day) Value: 13
  misc_feature: MA Experiment 20001557 PARAMETER Experiment Name: At_Drought_Soil_Dry_P Parameter: Treatment Value: Drought vs. No Drought
  misc_feature: MA Experiment ID: 20001905 Result: Up-regulated in Transcription
  misc_feature: MA Experiment 20001905 PARAMETER Experiment Name: At_Drought_Reproduction_P Parameter: Age (day) Value: 40
  misc_feature: MA Experiment 20001905 PARAMETER Experiment Name: At_Drought_Reproduction_P Parameter: Organism Value: A. thaliana
  misc_feature: MA Experiment 20001905 PARAMETER Experiment Name: At_Drought_Reproduction_P Parameter: Plant Line Value: WS
  misc_feature: MA Experiment 20001905 PARAMETER Experiment Name: At_Drought_Reproduction_P Parameter: Timepoint (day) Value: 10
  misc_feature: MA Experiment 20001905 PARAMETER Experiment Name: At_Drought_Reproduction_P Parameter: Tissue Value: Rosettes
  misc_feature: MA Experiment 20001905 PARAMETER Experiment Name: At_Drought_Reproduction_P Parameter: Treatment Value: Drought vs. No Drought
  misc_feature: MA Experiment ID: 20001906 Result: Up-regulated in Transcription
  misc_feature: MA Experiment 20001906 PARAMETER Experiment Name: At_Drought_Reproduction_P Parameter: Age (day) Value: 35
  misc_feature: MA Experiment 20001906 PARAMETER Experiment Name: At_Drought_Reproduction_P Parameter: Organism Value: A. thaliana
  misc_feature: MA Experiment 20001906 PARAMETER Experiment Name: At_Drought_Reproduction_P Parameter: Plant Line Value: WS
  misc_feature: MA Experiment 20001906 PARAMETER Experiment Name: At_Drought_Reproduction_P Parameter: Timepoint (day) Value: 5
  misc_feature: MA Experiment 20001906 PARAMETER Experiment Name: At_Drought_Reproduction_P Parameter: Tissue Value: Siliques
  misc_feature: MA Experiment 20001906 PARAMETER Experiment Name: At_Drought_Reproduction_P Parameter: Treatment Value: Drought vs. No Drought
  misc_feature: MA Experiment ID: 20001908 Result: Up-regulated in Transcription
  misc_feature: MA Experiment 20001908 PARAMETER Experiment Name: At_Drought_Reproduction_P Parameter: Age (day) Value: 40
  misc_feature: MA Experiment 20001908 PARAMETER Experiment Name: At_Drought_Reproduction_P Parameter: Organism Value: A. thaliana
  misc_feature: MA Experiment 20001908 PARAMETER Experiment Name: At_Drought_Reproduction_P Parameter: Plant Line Value: WS
  misc_feature: MA Experiment 20001908 PARAMETER Experiment Name: At_Drought_Reproduction_P Parameter: Timepoint (day) Value: 10
  misc_feature: MA Experiment 20001908 PARAMETER Experiment Name: At_Drought_Reproduction_P Parameter: Tissue Value: Siliques
  misc_feature: MA Experiment 20001908 PARAMETER Experiment Name: At_Drought_Reproduction_P Parameter: Treatment Value: Drought vs. No Drought
  misc_feature: MA Experiment ID: 20001910 Result: Up-regulated in Transcription
  misc_feature: MA Experiment 20001910 PARAMETER Experiment Name: At_Drought_Reproduction_P Parameter: Age (day) Value: 37
  misc_feature: MA Experiment 20001910 PARAMETER Experiment Name: At_Drought_Reproduction_P Parameter: Organism Value: A. thaliana
  misc_feature: MA Experiment 20001910 PARAMETER Experiment Name: At_Drought_Reproduction_P Parameter: Plant Line Value: WS
  misc_feature: MA Experiment 20001910 PARAMETER Experiment Name: At_Drought_Reproduction_P Parameter: Timepoint (day) Value: 7
  misc_feature: MA Experiment 20001910 PARAMETER Experiment Name: At_Drought_Reproduction_P Parameter: Tissue Value: Flowers
  misc_feature: MA Experiment 20001910 PARAMETER Experiment Name: At_Drought_Reproduction_P Parameter: Treatment Value: Drought vs. No Drought
  misc_feature: MA Experiment ID: 20001911 Result: Up-regulated in Transcription
  misc_feature: MA Experiment 20001911 PARAMETER Experiment Name: At_Drought_Reproduction_P Parameter: Age (day) Value: 40
  misc_feature: MA Experiment 20001911 PARAMETER Experiment Name: At_Drought_Reproduction_P Parameter: Organism Value: A. thaliana
  misc_feature: MA Experiment 20001911 PARAMETER Experiment Name: At_Drought_Reproduction_P Parameter: Plant Line Value: WS
  misc_feature: MA Experiment 20001911 PARAMETER Experiment Name: At_Drought_Reproduction_P Parameter: Timepoint (day) Value: 10
  misc_feature: MA Experiment 20001911 PARAMETER Experiment Name: At_Drought_Reproduction_P Parameter: Tissue Value: Flowers
  misc_feature: MA Experiment 20001911 PARAMETER Experiment Name: At_Drought_Reproduction_P Parameter: Treatment Value: Drought vs. No Drought
aacatcacaatcacacaaaactaacaaaagatcaaaagcaagttcttcactgttgataatgtctaccaccggacagattattcgatgcaaagctgctgtggcatgggaagccggaaagccactggtgatcgaggaagtggaggttgctccaccgcagaaacacgaagttcgtatcaagattctcttcacttctctctgtcacaccgatgtttacttctgggaagctaagggacaaacaccgttgtttccacgtatcttcggccatgaagctggagggattgttgagagtgttggagaaggagtgactgatcttcagccaggagatcatgtgttgccgatctttaccggagaatgtggggagtgtcgtcattgccactcggaggaatcaaacatgtgtgatcttctcaggatcaacaccgagcgaggagggatgattcacgatggtgaatcaagattctccattaatggcaaaccaatttaccatttccttgggacttccacgttcagtgagtacacagtggttcactctggtcaggttgctaagatcaatccggatgctcctcttgacaaggtctgtattgtcagttgtggtttgtctactgggttaggagcaactttgaatgtggctaaacccaagaaaggtcaaagtgttgccatttttggtcttggtgctgttggtttaggcgctgcagaaggtgctagaatcgctggtgcttctaggatcatcggtgttgattttaactctaaaagattcgaccaagctaaggaattcggtgtgaccgagtgtgtgaacccgaaagaccatgacaagccaattcaacaggtgatcgctgagatgacggatggtggggtggacaggagtgtggaatgcaccggaagcgttcaggccatgattcaagcatttgaatgtgtccacgatggctggggtgttgcagtgctggtgggtgtgccaagcaaagacgatgccttcaagactcatccgatgaatttcttgaatgagaggactcttaagggtactttcttcgggaactacaaacccaaaactgacattcccggggttgtggaaaagtacatgaacaaggagctggagcttgagaaattcatcactcacacagtgccattctcggaaatcaacaaggcctttgattacatgctgaagggagagagtattcgttgcatcatcaccatgggtgcttgaagccattctctcgcagatgatgttcactttgtgttttacttcctttatgcattcacagcaataaaagaaagaaatctccatcgcttttggttttcttctctgtcttaagttagtcgttttcgtgtctaatctattacttatcattgtaatagactcttcttctattgagatttgaatataaactaaaacacattccatttc

SEQ ID NO: 26842 - protein, 398 aa, Arabidopsis thaliana
  peptide (1)..(398): Ceres Seq. ID no. 12325048
  misc_feature (20)..(398): Homolog of NCBI NO: 21593589 NR Description: alcohol dehydrogenase [Arabidopsis thaliana]
  misc_feature (20)..(398): Homolog of NCBI NO: 1944211 NR Description: alcohol dehydrogenase [Arabidopsis thaliana]
  misc_feature (20)..(398): Homolog of NCBI NO: 113412 NR Description: Alcohol dehydrogenase
  misc_feature (20)..(398): Homolog of NCBI NO: 12862754 NR Description: alcohol dehydrogenase [Arabidopsis thaliana]
  misc_feature (20)..(398): Homolog of NCBI NO: 12862752 NR Description: alcohol dehydrogenase [Arabidopsis thaliana]
  misc_feature (20)..(398): Homolog of NCBI NO: 2570190 NR Description: alcohol dehydrogenase [Arabidopsis thaliana]
  misc_feature (20)..(398): Homolog of NCBI NO: 1944216 NR Description: alcohol dehydrogenase [Arabidopsis thaliana]
  misc_feature (20)..(398): Homolog of NCBI NO: 1944212 NR Description: alcohol dehydrogenase [Arabidopsis thaliana]
  misc_feature (20)..(398): Homolog of NCBI NO: 1944215 NR Description: alcohol dehydrogenase [Arabidopsis thaliana]
  misc_feature (20)..(398): Homolog of NCBI NO: 15223838 NR Description: alcohol dehydrogenase
TSQSHKTNKRSKASSSLLIMSTTGQIIRCKAAVAWEAGKPLVIEEVEVAPPQKHEVRIKILFTSLCHTDVYFWEAKGQTPLFPRIFGHEAGGIVESVGEGVTDLQPGDHVLPIFTGECGECRHCHSEESNMCDLLRINTERGGMIHDGESRFSINGKPIYHFLGTSTFSEYTVVHSGQVAKINPDAPLDKVCIVSCGLSTGLGATLNVAKPKKGQSVAIFGLGAVGLGAAEGARIAGASRIIGVDFNSKRFDQAKEFGVTECVNPKDHDKPIQQVIAEMTDGGVDRSVECTGSVQAMIQAFECVHDGWGVAVLVGVPSKDDAFKTHPMNFLNERTLKGTFFGNYKPKTDIPGVVEKYMNKELELEKFITHTVPFSEINKAFDYMLKGESIRCIITMGA

SEQ ID NO: 26843 - protein, 379 aa, Arabidopsis thaliana
  peptide (1)..(379): Ceres Seq. ID no. 12325049
  misc_feature (1)..(379): Homolog of NCBI NO: 21593589 NR Description: alcohol dehydrogenase [Arabidopsis thaliana]
  misc_feature (1)..(379): Homolog of NCBI NO: 1944211 NR Description: alcohol dehydrogenase [Arabidopsis thaliana]
  misc_feature (1)..(379): Homolog of NCBI NO: 113412 NR Description: Alcohol dehydrogenase
  misc_feature (1)..(379): Homolog of NCBI NO: 12862754 NR Description: alcohol dehydrogenase [Arabidopsis thaliana]
  misc_feature (1)..(379): Homolog of NCBI NO: 1944216 NR Description: alcohol dehydrogenase [Arabidopsis thaliana]
  misc_feature (1)..(379): Homolog of NCBI NO: 2570190 NR Description: alcohol dehydrogenase [Arabidopsis thaliana]
  misc_feature (1)..(379): Homolog of NCBI NO: 12862752 NR Description: alcohol dehydrogenase [Arabidopsis thaliana]
  misc_feature (1)..(379): Homolog of NCBI NO: 1944212 NR Description: alcohol dehydrogenase [Arabidopsis thaliana]
  misc_feature (1)..(379): Homolog of NCBI NO: 1944215 NR Description: alcohol dehydrogenase [Arabidopsis thaliana]
  misc_feature (1)..(379): Homolog of NCBI NO: 15223838 NR Description: alcohol dehydrogenase
MSTTGQIIRCKAAVAWEAGKPLVIEEVEVAPPQKHEVRIKILFTSLCHTDVYFWEAKGQTPLFPRIFGHEAGGIVESVGEGVTDLQPGDHVLPIFTGECGECRHCHSEESNMCDLLRINTERGGMIHDGESRFSINGKPIYHFLGTSTFSEYTVVHSGQVAKINPDAPLDKVCIVSCGLSTGLGATLNVAKPKKGQSVAIFGLGAVGLGAAEGARIAGASRIIGVDFNSKRFDQAKEFGVTECVNPKDHDKPIQQVIAEMTDGGVDRSVECTGSVQAMIQAFECVHDGWGVAVLVGVPSKDDAFKTHPMNFLNERTLKGTFFGNYKPKTDIPGVVEKYMNKELELEKFITHTVPFSEINKAFDYMLKGESIRCIITMGA

SEQ ID NO: 26844 - protein, 268 aa, Arabidopsis thaliana
  peptide (1)..(268): Ceres Seq. ID no. 12325050
  misc_feature (1)..(268): Homolog of NCBI NO: 21593589 NR Description: alcohol dehydrogenase [Arabidopsis thaliana]
  misc_feature (1)..(268): Homolog of NCBI NO: 1944211 NR Description: alcohol dehydrogenase [Arabidopsis thaliana]
  misc_feature (1)..(268): Homolog of NCBI NO: 113412 NR Description: Alcohol dehydrogenase
  misc_feature (1)..(268): Homolog of NCBI NO: 12862754 NR Description: alcohol dehydrogenase [Arabidopsis thaliana]
  misc_feature (1)..(268): Homolog of NCBI NO: 1944216 NR Description: alcohol dehydrogenase [Arabidopsis thaliana]
  misc_feature (1)..(268): Homolog of NCBI NO: 12862752 NR Description: alcohol dehydrogenase [Arabidopsis thaliana]
  misc_feature (1)..(268): Homolog of NCBI NO: 2570190 NR Description: alcohol dehydrogenase [Arabidopsis thaliana]
  misc_feature (1)..(268): Homolog of NCBI NO: 1944212 NR Description: alcohol dehydrogenase [Arabidopsis thaliana]
  misc_feature (1)..(268): Homolog of NCBI NO: 1944215 NR Description: alcohol dehydrogenase [Arabidopsis thaliana]
  misc_feature (1)..(268): Homolog of NCBI NO: 15223838 NR Description: alcohol dehydrogenase
MCDLLRINTERGGMIHDGESRFSINGKPIYHFLGTSTFSEYTVVHSGQVAKINPDAPLDKVCIVSCGLSTGLGATLNVAKPKKGQSVAIFGLGAVGLGAAEGARIAGASRIIGVDFNSKRFDQAKEFGVTECVNPKDHDKPIQQVIAEMTDGGVDRSVECTGSVQAMIQAFECVHDGWGVAVLVGVPSKDDAFKTHPMNFLNERTLKGTFFGNYKPKTDIPGVVEKYMNKELELEKFITHTVPFSEINKAFDYMLKGESIRCIITMGA

SEQ ID NO: 26845 - DNA, 528 bp, Arabidopsis thaliana
  misc_feature (1)..(528): Ceres Seq. ID no. 12330060
  misc_feature: MA Experiment ID: 108595 Result: Up-regulated in Transcription
  misc_feature: MA Experiment 108595 PARAMETER Experiment Name: At_Ler-pi_Ovule_cDNA_P Parameter: Plant Line Value: null
  misc_feature: MA Experiment ID: 20000111 Result: Up-regulated in Transcription
  misc_feature: MA Experiment 20000111 PARAMETER Experiment Name: At_42deg_Heat_cDNA_P Parameter: Temperature (deg C) Value: 42 vs. 22
  misc_feature: MA Experiment 20000111 PARAMETER Experiment Name: At_42deg_Heat_cDNA_P Parameter: Timepoint (hr) Value: 6
  misc_feature: MA Experiment 20000111 PARAMETER Experiment Name: At_42deg_Heat_cDNA_P Parameter: Tissue Value: Aerial
  misc_feature: MA Experiment ID: 20000184 Result: Up-regulated in Transcription
  misc_feature: MA Experiment 20000184 PARAMETER Experiment Name: At_Shoots__P Parameter: Age (day) Value: 7
  misc_feature: MA Experiment 20000184 PARAMETER Experiment Name: At_Shoots__P Parameter: Tissue Value: Shoots vs. Whole Plant
  misc_feature: Phenotype: ROSETTE LEAVES Curled-Curled 3
  misc_feature: Phenotype: WHOLE PLANT Color-Yellow-Green Viable 1
  misc_feature: Phenotype: WHOLE PLANT Color-Yellow-Green Viable 1
  misc_feature: Phenotype: WHOLE PLANT Size-Small
  misc_feature: Phenotype: WHOLE PLANT Size-Small
  misc_feature: Phenotype: ROSETTE LEAVES Shape-Lanceolate
  misc_feature: Phenotype: WHOLE PLANT Color-Yellow-Green Viable 1
  misc_feature: Phenotype: WHOLE PLANT Size-Small
  misc_feature: Phenotype: WHOLE PLANT Size-Small
  misc_feature: Phenotype: ROSETTE LEAVES Curled-Curled 2
  misc_feature: Phenotype: ROSETTE LEAVES Other
  misc_feature: Phenotype: WHOLE PLANT Color-Yellow-Green Viable 1
  misc_feature: Phenotype: WHOLE PLANT Size-Small
aaataacaaaaaaatggagattaacaaatttctggccgtagtcgtagtcgtcgtggtcctctactccgtcgaagcgacggcacaaggaggaagccctcagttgacggcttgtctgcacaaactgctgccgtgtcagccgtacatacactcattgaatccgcctcctccgccatcgtgttgcgggccaatgaaagagatcgtagagaaagacgcaccgtgtttatgcaccgcttttaacaatccggaggtgctcaaagccctaaacctcaccaaagagaacgctctcctacttcccaatgcatgtggagttaatcctgacgtttcactctgctccaaaatagccactccttcgcctattgcgtcgccgggatcaaccaatggaacttcttcagcttcaactatcagcttcaatcgatttagctttctgtctgcttttgtggcaatgatcttcttctgattatgtcattttttaatttataattatatgtgtgatgactgtgtaattcggtcatcagaatgtgtttaagt

SEQ ID NO: 26846 - protein, 151 aa, Arabidopsis thaliana
  peptide (1)..(151): Ceres Seq. ID no. 12330061
  misc_feature (37)..(110): Pfam Name: Protease inhibitor/seed storage/LTP family Pfam Description: Protease inhibitor/seed storage/LTP family
  misc_feature (12)..(133): Homolog of NCBI NO: 25553602 NR Description: OJ1656_E11.34 [Oryza sativa (japonica
  misc_feature (14)..(111): Homolog of NCBI NO: 15223104 NR Description: lipid transfer protein, putative; protein id:
  misc_feature (10)..(140): Homolog of NCBI NO: 15221585 NR Description: unknown protein; protein id: At1g62790.1
  misc_feature (10)..(151): Homolog of NCBI NO: 30696757 NR Description: protease inhibitor/seed storage/lipid transfer
  misc_feature (5)..(135): Homolog of NCBI NO: 15221052 NR Description: lipid transfer protein, putative
  misc_feature (5)..(122): Homolog of NCBI NO: 25406275 NR Description: hypothetical protein F6D5.6 [imported] -
  misc_feature (5)..(127): Homolog of NCBI NO: 15219496 NR Description: hypothetical protein; protein id: At1g73550.1
  misc_feature (5)..(115): Homolog of NCBI NO: 25406276 NR Description: probable lipid transfer protein F6D5.5
  misc_feature (5)..(151): Homolog of NCBI NO: 18410388 NR Description: lipid transfer protein, putative
  misc_feature (5)..(151): Homolog of NCBI NO: 21593596 NR Description: lipid transfer protein, putative [Arabidopsis
NNKKMEINKFLAVVVVVVVLYSVEATAQGGSPQLTACLHKLLPCQPYIHSLNPPPPPSCCGPMKEIVEKDAPCLCTAFNNPEVLKALNLTKENALLLPNACGVNPDVSLCSKIATPSPIASPGSTNGTSSASTISFNRFSFLSAFVAMIFF

SEQ ID NO: 26847 - protein, 147 aa, Arabidopsis thaliana
  peptide (1)..(147): Ceres Seq. ID no. 12330062
  misc_feature (33)..(106): Pfam Name: Protease inhibitor/seed storage/LTP family Pfam Description: Protease inhibitor/seed storage/LTP family
  misc_feature (8)..(129): Homolog of NCBI NO: 25553602 NR Description: OJ1656_E11.34 [Oryza sativa (japonica
  misc_feature (10)..(107): Homolog of NCBI NO: 15223104 NR Description: lipid transfer protein, putative; protein id:
  misc_feature (6)..(136): Homolog of NCBI NO: 15221585 NR Description: unknown protein; protein id: At1g62790.1
  misc_feature (6)..(147): Homolog of NCBI NO: 30696757 NR Description: protease inhibitor/seed storage/lipid transfer
  misc_feature (1)..(131): Homolog of NCBI NO: 15221052 NR Description: lipid transfer protein, putative
  misc_feature (1)..(118): Homolog of NCBI NO: 25406275 NR Description: hypothetical protein F6D5.6 [imported] -
  misc_feature (1)..(123): Homolog of NCBI NO: 15219496 NR Description: hypothetical protein; protein id: At1g73550.1
  misc_feature (1)..(111): Homolog of NCBI NO: 25406276 NR Description: probable lipid transfer protein F6D5.5
  misc_feature (1)..(147): Homolog of NCBI NO: 18410388 NR Description: lipid transfer protein, putative
  misc_feature (1)..(147): Homolog of NCBI NO: 21593596 NR Description: lipid transfer protein, putative [Arabidopsis
MEINKFLAVVVVVVVLYSVEATAQGGSPQLTACLHKLLPCQPYIHSLNPPPPPSCCGPMKEIVEKDAPCLCTAFNNPEVLKALNLTKENALLLPNACGVNPDVSLCSKIATPSPIASPGSTNGTSSASTISFNRFSFLSAFVAMIFF

SEQ ID NO: 26848 - protein, 89 aa, Arabidopsis thaliana
  peptide (1)..(89): Ceres Seq. ID no. 12330063
  misc_feature (1)..(71): Homolog of NCBI NO: 25553602 NR Description: OJ1656_E11.34 [Oryza sativa (japonica
  misc_feature (1)..(49): Homolog of NCBI NO: 15223104 NR Description: lipid transfer protein, putative; protein id:
  misc_feature (1)..(78): Homolog of NCBI NO: 15221585 NR Description: unknown protein; protein id: At1g62790.1
  misc_feature (1)..(89): Homolog of NCBI NO: 30696757 NR Description: protease inhibitor/seed storage/lipid transfer
  misc_feature (1)..(73): Homolog of NCBI NO: 15221052 NR Description: lipid transfer protein, putative
  misc_feature (1)..(60): Homolog of NCBI NO: 25406275 NR Description: hypothetical protein F6D5.6 [imported] -
  misc_feature (1)..(65): Homolog of NCBI NO: 15219496 NR Description: hypothetical protein; protein id: At1g73550.1
  misc_feature (1)..(53): Homolog of NCBI NO: 25406276 NR Description: probable lipid transfer protein F6D5.5
  misc_feature (1)..(89): Homolog of NCBI NO: 18410388 NR Description: lipid transfer protein, putative
  misc_feature (1)..(89): Homolog of NCBI NO: 21593596 NR Description: lipid transfer protein, putative [Arabidopsis
MKEIVEKDAPCLCTAFNNPEVLKALNLTKENALLLPNACGVNPDVSLCSKIATPSPIASPGSTNGTSSASTISFNRFSFLSAFVAMIFF

SEQ ID NO: 26849 - DNA, 883 bp, Arabidopsis thaliana
  misc_feature (1)..(883): Ceres Seq. ID no. 13491346
  misc_feature: MA Experiment ID: 108434 Result: Up-regulated in Transcription
  misc_feature: MA Experiment 108434 PARAMETER Experiment Name: At_Root_Tips_cDNA_P Parameter: Tissue Value: Root Tips
  misc_feature: MA Experiment ID: 108462 Result: Up-regulated in Transcription
  misc_feature: MA Experiment 108462 PARAMETER Experiment Name: At_Germinating_Seeds_cDNA_P Parameter: Age (day) Value: 2 vs. 0
  misc_feature: MA Experiment 108462 PARAMETER Experiment Name: At_Germinating_Seeds_cDNA_P Parameter: Tissue Value: Germinating Seeds
  misc_feature: MA Experiment ID: 108608 Result: Up-regulated in Transcription
  misc_feature: MA Experiment 108608 PARAMETER Experiment Name: At_100uM_ABA_cDNA_P Parameter: Timepoint (hr) Value: 1
  misc_feature: MA Experiment 108608 PARAMETER Experiment Name: At_100uM_ABA_cDNA_P Parameter: Tissue Value: Aerial
  misc_feature: MA Experiment 108608 PARAMETER Experiment Name: At_100uM_ABA_cDNA_P Parameter: Treatment Value: 100uM ABA vs. No Treatment
  misc_feature: MA Experiment ID: 20000087 Result: Down-regulated in Transcription
  misc_feature: MA Experiment 20000087 PARAMETER Experiment Name: At_100uM_ABA_Mutants_cDNA_P Parameter: Plant Line Value: WS
  misc_feature: MA Experiment 20000087 PARAMETER Experiment Name: At_100uM_ABA_Mutants_cDNA_P Parameter: Timepoint (hr) Value: 6
  misc_feature: MA Experiment 20000087 PARAMETER Experiment Name: At_100uM_ABA_Mutants_cDNA_P Parameter: Tissue Value: Aerial
  misc_feature: MA Experiment 20000087 PARAMETER Experiment Name: At_100uM_ABA_Mutants_cDNA_P Parameter: Treatment Value: 100uM ABA vs. No Treatment
  misc_feature: MA Experiment ID: 20000090 Result: Down-regulated in Transcription
  misc_feature: MA Experiment ID: 20000166 Result: Up-regulated in Transcription
  misc_feature: MA Experiment 20000166 PARAMETER Experiment Name: At_100uM_ABA_P Parameter: Age (day) Value: 14
  misc_feature: MA Experiment 20000166 PARAMETER Experiment Name: At_100uM_ABA_P Parameter: Organism Value: A. thaliana
  misc_feature: MA Experiment 20000166 PARAMETER Experiment Name: At_100uM_ABA_P Parameter: Plant Line Value: WS
  misc_feature: MA Experiment 20000166 PARAMETER Experiment Name: At_100uM_ABA_P Parameter: Timepoint (hr) Value: 1
  misc_feature: MA Experiment 20000166 PARAMETER Experiment Name: At_100uM_ABA_P Parameter: Tissue Value: Aerial
  misc_feature: MA Experiment 20000166 PARAMETER Experiment Name: At_100uM_ABA_P Parameter: Treatment Value: 100uM ABA vs. No Treatment
  misc_feature: MA Experiment ID: 20000179 Result: Up-regulated in Transcription
  misc_feature: MA Experiment 20000179 PARAMETER Experiment Name: At_Germinating_Seeds_P Parameter: Age (hr) Value: 6 vs. 0
  misc_feature: MA Experiment 20000179 PARAMETER Experiment Name: At_Germinating_Seeds_P Parameter: Tissue Value: Germinating Seeds
  misc_feature: MA Experiment ID: 20000180 Result: Up-regulated in Transcription
  misc_feature: MA Experiment 20000180 PARAMETER Experiment Name: At_Germinating_Seeds_P Parameter: Age (hr) Value: 24 vs. 0
  misc_feature: MA Experiment 20000180 PARAMETER Experiment Name: At_Germinating_Seeds_P Parameter: Tissue Value: Germinating Seeds
  misc_feature: MA Experiment ID: 20000213 Result: Up-regulated in Transcription
  misc_feature: MA Experiment 20000213 PARAMETER Experiment Name: At_4deg_Cold_P Parameter: Timepoint (hr) Value: 2
  misc_feature: MA Experiment ID: 20000224 Result: Up-regulated in Transcription
  misc_feature: MA Experiment ID: 20000235 Result: Up-regulated in Transcription
  misc_feature: MA Experiment 20000235 PARAMETER Experiment Name: At_Siliques_P Parameter: Age (day) Value: 21
  misc_feature: MA Experiment 20000235 PARAMETER Experiment Name: At_Siliques_P Parameter: Organism Value: A. thaliana
  misc_feature: MA Experiment 20000235 PARAMETER Experiment Name: At_Siliques_P Parameter: Plant Line Value: WS
  misc_feature: MA Experiment 20000235 PARAMETER Experiment Name: At_Siliques_P Parameter: Tissue Value: 5-10mm Siliques vs. Whole Plant
  misc_feature: MA Experiment ID: 20000794 Result: Down-regulated in Transcription
  misc_feature: MA Experiment 20000794 PARAMETER Experiment Name: At_Petals_P Parameter: Age (day) Value: 23-25 days
  misc_feature: MA Experiment 20000794 PARAMETER Experiment Name: At_Petals_P Parameter: Plant Line Value: WS
  misc_feature: MA Experiment 20000794 PARAMETER Experiment Name: At_Petals_P Parameter: Tissue Value: Petals vs. Whole plant
  misc_feature: MA Experiment ID: 20001248 Result: Down-regulated in Transcription
  misc_feature: MA Experiment 20001248 PARAMETER Experiment Name: At_Far-red-induction_P Parameter: Age (day) Value: 7
  misc_feature: MA Experiment 20001248 PARAMETER Experiment Name: At_Far-red-induction_P Parameter: Light Value: Far-red vs. White
  misc_feature: MA Experiment 20001248 PARAMETER Experiment Name: At_Far-red-induction_P Parameter: Organism Value: A. thaliana
  misc_feature: MA Experiment 20001248 PARAMETER Experiment Name: At_Far-red-induction_P Parameter: Plant Line Value: Columbia
  misc_feature: MA Experiment 20001248 PARAMETER Experiment Name: At_Far-red-induction_P Parameter: Timepoint (hr) Value: 4
  misc_feature: MA Experiment 20001248 PARAMETER Experiment Name: At_Far-red-induction_P Parameter: Tissue Value: Whole Plant
ctcccgacacaacacaaagttcatataataagaaaaacagagagaaacacacagagagctagaggagagtgagtgtcatgggttgtgttcgctgcaaatcatcagatccatggcaaacatctgccaatgcctttgaatccgtcgatgaatccggaatcaacgaagcctgggttgagatctccagccgcagatgttgtcgccggcgaaggtagttggaagaagctagagaggaagaagagccaagtgttactggaaggttacgttgagactgcttcttcttcctcggtggatgatcaaaaggacgatctgacgagatccaagagtttgacggatgacgacctcgaagatcttagaggttgtttagatctagggtttggttttagctacgacgagatccctgagctctgcaacactttacctgctttggagctttgctattcaatgagccagaagttcttagacgataagcaaaataaatcaccggaaacttcgtcggtggaagattgtccgtcgcctccactggtcaccgccactccgattgccaattggaagatctctagtcccggtgataatccggatgatgtgaaagctaggctcaaatactgggcacaagccgttgcctgtactgtccaattgtgcagctgaatgaatcattgtcacgtctgaaccaggaatactagcgaatgagcaatatctcaagcattggtagcggaggaggagatttcagaaagtggcattggaaggtctaaaattgaactgaatatcaacaatggttctcacttaattccatgtatgtgtactagtagttagtagtatctagtctaatgattttatgaacggaaataaaagatatcacttgaataaaaccatcaaattctttccc

SEQ ID NO: 26850 - protein, 172 aa, Arabidopsis thaliana
  peptide (1)..(172): Ceres Seq. ID no. 13491347
  misc_feature (34)..(168): Homolog of NCBI NO: 15241882 NR Description: hypothetical protein [Arabidopsis thaliana]
  misc_feature (67)..(168): Homolog of NCBI NO: 15228829 NR Description: pentatricopeptide (PPR) repeat-containing protein
  misc_feature (11)..(147): Homolog of NCBI NO: 34907664 NR Description: P0506A10.18 [Oryza sativa (japonica
  misc_feature (106)..(172): Homolog of NCBI NO: 26451183 NR Description: unknown protein [Arabidopsis thaliana]
  misc_feature (25)..(148): Homolog of NCBI NO: 25408168 NR Description: hypothetical protein At2g31560 [imported] -
  misc_feature (23)..(169): Homolog of NCBI NO: 25408860 NR Description: hypothetical protein At2g43340 [imported] -
  misc_feature (23)..(172): Homolog of NCBI NO: 30689349 NR Description: expressed protein [Arabidopsis thaliana]
  misc_feature (25)..(172): Homolog of NCBI NO: 30684991 NR Description: expressed protein [Arabidopsis thaliana]
  misc_feature (24)..(165): Homolog of NCBI NO: 15221309 NR Description: expressed protein [Arabidopsis thaliana]
  misc_feature (24)..(172): Homolog of NCBI NO: 25406874 NR Description: hypothetical protein [imported] - Arabidopsis
MPLNPSMNPESTKPGLRSPAADVVAGEGSWKKLERKKSQVLLEGYVETASSSSVDDQKDDLTRSKSLTDDDLEDLRGCLDLGFGFSYDEIPELCNTLPALELCYSMSQKFLDDKQNKSPETSSVEDCPSPPLVTATPIANWKISSPGDNPDDVKARLKYWAQAVACTVQLCS

SEQ ID NO: 26851 - protein, 166 aa, Arabidopsis thaliana
  peptide (1)..(166): Ceres Seq. ID no. 13491348
  misc_feature (28)..(162): Homolog of NCBI NO: 15241882 NR Description: hypothetical protein [Arabidopsis thaliana]
  misc_feature (61)..(162): Homolog of NCBI NO: 15228829 NR Description: pentatricopeptide (PPR) repeat-containing protein
  misc_feature (5)..(141): Homolog of NCBI NO: 34907664 NR Description: P0506A10.18 [Oryza sativa (japonica
  misc_feature (100)..(166): Homolog of NCBI NO: 26451183 NR Description: unknown protein [Arabidopsis thaliana]
  misc_feature (19)..(142): Homolog of NCBI NO: 25408168 NR Description: hypothetical protein At2g31560 [imported] -
  misc_feature (17)..(163): Homolog of NCBI NO: 25408860 NR Description: hypothetical protein At2g43340 [imported] -
  misc_feature (17)..(166): Homolog of NCBI NO: 30689349 NR Description: expressed protein [Arabidopsis thaliana]
  misc_feature (19)..(166): Homolog of NCBI NO: 30684991 NR Description: expressed protein [Arabidopsis thaliana]
  misc_feature (18)..(159): Homolog of NCBI NO: 15221309 NR Description: expressed protein [Arabidopsis thaliana]
  misc_feature (18)..(166): Homolog of NCBI NO: 25406874 NR Description: hypothetical protein [imported] - Arabidopsis
MNPESTKPGLRSPAADVVAGEGSWKKLERKKSQVLLEGYVETASSSSVDDQKDDLTRSKSLTDDDLEDLRGCLDLGFGFSYDEIPELCNTLPALELCYSMSQKFLDDKQNKSPETSSVEDCPSPPLVTATPIANWKISSPGDNPDDVKARLKYWAQAVACTVQLCS

SEQ ID NO: 26852 - DNA, 719 bp, Arabidopsis thaliana
  misc_feature (1)..(719): Ceres Seq. ID no. 13499538
  misc_feature: MA Experiment ID: 108434 Result: Up-regulated in Transcription
  misc_feature: MA Experiment 108434 PARAMETER Experiment Name: At_Root_Tips_cDNA_P Parameter: Tissue Value: Root Tips
  misc_feature: MA Experiment ID: 108462 Result: Down-regulated in Transcription
  misc_feature: MA Experiment 108462 PARAMETER Experiment Name: At_Germinating_Seeds_cDNA_P Parameter: Age (day) Value: 2 vs. 0
  misc_feature: MA Experiment 108462 PARAMETER Experiment Name: At_Germinating_Seeds_cDNA_P Parameter: Tissue Value: Germinating Seeds
  misc_feature: MA Experiment ID: 108463 Result: Down-regulated in Transcription
  misc_feature: MA Experiment 108463 PARAMETER Experiment Name: At_Germinating_Seeds_cDNA_P Parameter: Age (day) Value: 3 vs. 0
  misc_feature: MA Experiment 108463 PARAMETER Experiment Name: At_Germinating_Seeds_cDNA_P Parameter: Tissue Value: Germinating Seeds
  misc_feature: MA Experiment ID: 20000173 Result: Up-regulated in Transcription
  misc_feature: MA Experiment 20000173 PARAMETER Experiment Name: At_42deg_Heat_P Parameter: Age (day) Value: 14
  misc_feature: MA Experiment 20000173 PARAMETER Experiment Name: At_42deg_Heat_P Parameter: Organism Value: A. thaliana
  misc_feature: MA Experiment 20000173 PARAMETER Experiment Name: At_42deg_Heat_P Parameter: Plant Line Value: WS
  misc_feature: MA Experiment 20000173 PARAMETER Experiment Name: At_42deg_Heat_P Parameter: Temperature (deg C) Value: 42 vs. 22
  misc_feature: MA Experiment 20000173 PARAMETER Experiment Name: At_42deg_Heat_P Parameter: Timepoint (hr) Value: 6
  misc_feature: MA Experiment 20000173 PARAMETER Experiment Name: At_42deg_Heat_P Parameter: Tissue Value: Aerial
  misc_feature: MA Experiment ID: 20000184 Result: Up-regulated in Transcription
  misc_feature: MA Experiment 20000184 PARAMETER Experiment Name: At_Shoots__P Parameter: Age (day) Value: 7
  misc_feature: MA Experiment 20000184 PARAMETER Experiment Name: At_Shoots__P Parameter: Tissue Value: Shoots vs. Whole Plant
  misc_feature: MA Experiment ID: 20000234 Result: Up-regulated in Transcription
  misc_feature: MA Experiment 20000234 PARAMETER Experiment Name: At_Siliques_P Parameter: Age (day) Value: 21
  misc_feature: MA Experiment 20000234 PARAMETER Experiment Name: At_Siliques_P Parameter: Organism Value: A. thaliana
  misc_feature: MA Experiment 20000234 PARAMETER Experiment Name: At_Siliques_P Parameter: Plant Line Value: WS
  misc_feature: MA Experiment 20000234 PARAMETER Experiment Name: At_Siliques_P Parameter: Tissue Value: Less Than 5mm Siliques vs. Whole Plant
  misc_feature: MA Experiment ID: 20000437 Result: Down-regulated in Transcription
  misc_feature: MA Experiment 20000437 PARAMETER Experiment Name: At_Drought_P Parameter: Age (day) Value: 8
  misc_feature: MA Experiment 20000437 PARAMETER Experiment Name: At_Drought_P Parameter: Organism Value: A. thaliana
  misc_feature: MA Experiment 20000437 PARAMETER Experiment Name: At_Drought_P Parameter: Plant Line Value: WS
  misc_feature: MA Experiment 20000437 PARAMETER Experiment Name: At_Drought_P Parameter: Timepoint (hr) Value: 24
  misc_feature: MA Experiment 20000437 PARAMETER Experiment Name: At_Drought_P Parameter: Tissue Value: Whole Plant
  misc_feature: MA Experiment 20000437 PARAMETER Experiment Name: At_Drought_P Parameter: Treatment Value: Drought vs. No Drought
  misc_feature: MA Experiment ID: 20000495 Result: Up-regulated in Transcription
  misc_feature: MA Experiment 20000495 PARAMETER Experiment Name: At_Guard_Cells_P Parameter: Harvest Date Value: 8/2/2002
  misc_feature: MA Experiment 20000495 PARAMETER Experiment Name: At_Guard_Cells_P Parameter: Organism Value: A. thaliana
  misc_feature: MA Experiment 20000495 PARAMETER Experiment Name: At_Guard_Cells_P Parameter: Tissue Value: Guard Cells vs. Leaves
  misc_feature: MA Experiment ID: 20001558 Result: Up-regulated in Transcription
  misc_feature: MA Experiment 20001558 PARAMETER Experiment Name: At_Drought_Soil_Dry_P Parameter: Age (day) Value: 27
  misc_feature: MA Experiment 20001558 PARAMETER Experiment Name: At_Drought_Soil_Dry_P Parameter: Organism Value: A. thaliana
  misc_feature: MA Experiment 20001558 PARAMETER Experiment Name: At_Drought_Soil_Dry_P Parameter: Plant Line Value: WS
  misc_feature: MA Experiment 20001558 PARAMETER Experiment Name: At_Drought_Soil_Dry_P Parameter: Post Timepoint (hr) Value: 6
  misc_feature: MA Experiment 20001558 PARAMETER Experiment Name: At_Drought_Soil_Dry_P Parameter: Post-Treatment Value: Re-Water vs. No Drought
  misc_feature: MA Experiment 20001558 PARAMETER Experiment Name: At_Drought_Soil_Dry_P Parameter: Timepoint (day) Value: 13
  misc_feature: MA Experiment 20001558 PARAMETER Experiment Name: At_Drought_Soil_Dry_P Parameter: Treatment Value: Drought vs. No Drought
  misc_feature: MA Experiment ID: 20001757 Result: Up-regulated in Transcription
  misc_feature: MA Experiment 20001757 PARAMETER Experiment Name: At_50mM_NH4NO3_L-to-H_P Parameter: Timepoint (hr) Value: 6
  misc_feature: MA Experiment 20001757 PARAMETER Experiment Name: At_50mM_NH4NO3_L-to-H_P Parameter: Tissue Value: Leaf
  misc_feature: MA Experiment 20001757 PARAMETER Experiment Name: At_50mM_NH4NO3_L-to-H_P Parameter: Treatment Value: 50mM NH4NO3 vs 100mM Mannitol
agccagaattagggtttctctttgtcttcagcagtcagtgcgcatccgtaggagaaaagtgtgagaatctgccaccatgggtcgtatgcacagtcgaggaaagggtatttcagcctctgcgttgccttacaagagatcgtctccgagctggctcaagaccacctctcaggatgttgatgaatcaatctgcaaatttgccaaaaagggattgaccccttcccagattggtgtgattctccgtgactctcacggtatccctcaggtcaagagtgttactggaagcaagatcttgaggatactcaaagctcatggccttgctcctgagatccctgaggatctgtaccatctaattaagaaggctgttgccatccgtaaacatctcgagaggaacaggaaggacaaggattccaagttcaggctcatcttggttgagagcaggattcaccgcctcgctcgctattacaagaagaccaagaagctccctcccgtctggaagtacgaatccactaccgcgagcacccttgtggcttaagctggagtctggaggaggattctactagtctgttgcttcccttttgttttgatgaattctcaactttagtcttaatgtgtcagcaggatttttgtgtttgcctctcttttttttccggaatcttatgctcccttgtttaagagaatcgtatgatcttgaatttactattgaatatgcttttgcatct

SEQ ID NO: 26853 - protein, 151 aa, Arabidopsis thaliana [sequence omitted]

SEQ ID NO: 26854 - protein, 148 aa, Arabidopsis thaliana
  peptide (1)..(148): Ceres Seq. ID no. 13499540
  misc_feature (1)..(115): Homolog of NCBI NO: 34857390 NR Description: similar to Rps13 protein [Rattus norvegicus]
  misc_feature (1)..(148): Homolog of NCBI NO: 4506685 NR Description: ribosomal protein S13; 40S ribosomal protein S13
  misc_feature (1)..(148): Homolog of NCBI NO: 464705 NR Description: 40S RIBOSOMAL PROTEIN S13
  misc_feature (1)..(148): Homolog of NCBI NO: 1173198 NR Description: 40S RIBOSOMAL PROTEIN S13
  misc_feature (1)..(148): Homolog of NCBI NO: 8131699 NR Description: cytoplasmic ribosomal protein S13 [Panax ginseng]
  misc_feature (1)..(148): Homolog of NCBI NO: 11276609 NR Description: ribosomal protein S13-like - Arabidopsis thaliana
  misc_feature (1)..(148): Homolog of NCBI NO: 7440402 NR Description: ribosomal protein S13, cytosolic - Arabidopsis
  misc_feature (1)..(148): Homolog of NCBI NO: 14190367 NR Description: AT3g60770/T4C21_180 [Arabidopsis thaliana]
  misc_feature (1)..(148): Homolog of NCBI NO: 18411716 NR Description: 40S ribosomal protein S13 (RPS13A) [Arabidopsis
  misc_feature (1)..(148): Homolog of NCBI NO: 18411224 NR Description: 40S ribosomal protein S13 (RPS13B) [Arabidopsis
MHSRGKGISASALPYKRSSPSWLKTTSQDVDESICKFAKKGLTPSQIGVILRDSHGIPQVKSVTGSKILRILKAHGLAPEIPEDLYHLIKKAVAIRKHLERNRKDKDSKFRLILVESRIHRLARYYKKTKKLPPVWKYESTTASTLVA

SEQ ID NO: 26855 - DNA, 746 bp, Arabidopsis thaliana
  misc_feature (1)..(746): Ceres Seq. ID no. 13487320
  misc_feature: MA Experiment ID: 108434 Result: Up-regulated in Transcription
  misc_feature: MA Experiment 108434 PARAMETER Experiment Name: At_Root_Tips_cDNA_P Parameter: Tissue Value: Root Tips
  misc_feature: MA Experiment ID: 108462 Result: Down-regulated in Transcription
  misc_feature: MA Experiment 108462 PARAMETER Experiment Name: At_Germinating_Seeds_cDNA_P Parameter: Age (day) Value: 2 vs. 0
  misc_feature: MA Experiment 108462 PARAMETER Experiment Name: At_Germinating_Seeds_cDNA_P Parameter: Tissue Value: Germinating Seeds
  misc_feature: MA Experiment ID: 108463 Result: Down-regulated in Transcription
  misc_feature: MA Experiment 108463 PARAMETER Experiment Name: At_Germinating_Seeds_cDNA_P Parameter: Age (day) Value: 3 vs. 0
  misc_feature: MA Experiment 108463 PARAMETER Experiment Name: At_Germinating_Seeds_cDNA_P Parameter: Tissue Value: Germinating Seeds
  misc_feature: MA Experiment ID: 20000184 Result: Down-regulated in Transcription
  misc_feature: MA Experiment 20000184 PARAMETER Experiment Name: At_Shoots__P Parameter: Age (day) Value: 7
  misc_feature: MA Experiment 20000184 PARAMETER Experiment Name: At_Shoots__P Parameter: Tissue Value: Shoots vs. Whole Plant
  misc_feature: MA Experiment ID: 20000224 Result: Up-regulated in Transcription
catcgactgctccttggtggatctgcgagttttcaataaaccaccggagtgaggaagaagcagacgacgacgacgaagatgagttcatcgactgttcgtgatttgcagagagacctagaaaacaaggctaatgatctcggcaaaatccagaaagatatcgggaagaatcatcagctgagaaagaagtatacgatccaactcggtgagaatgagctcgtgcttaaggagttagatttgctggaagaagatgctaacgtctacaaattgattggtccggtgttagtgaagcaggatttggctgaagctaatgcaaatgttcgtaaacgaattgagtacatctctgctgaattgaaacggcttgatgcaattcttcaagatatggaagaaaaacaaaacaacaagagagaaacgataatgaagttacaacaaaggctacaaactatccaggcaggaaaagcaaaggcttgattgagctactcagttgcaaccacacttgttaaaccctttccactgtgctcggccttgtctcaatggtgtcatattcagttactgagggttcttgtggtttcagtttattgggtgattgatgtctctttgtgtcactaatctttttttgttgacaactagacttaagtgtgtaacttatacatgatcttgtcgccctttatgaagttatgagtttggagatttacaaaaaaaatattgtgtgtgtgcgcctaatttggtcttcatacatacttcaagcc

SEQ ID NO: 26856 - protein, 129 aa, Arabidopsis thaliana
  peptide (1)..(129): Ceres Seq. ID no. 13487321
  misc_feature (13)..(120): Pfam Name: KE2 family protein Pfam Description: KE2 family protein
  misc_feature (1)..(124): Homolog of NCBI NO: 31196111 NR Description: ENSANGP00000016422 [Anopheles gambiae]
  misc_feature (1)..(124): Homolog of NCBI NO: 24667085 NR Description: CG7770-PA [Drosophila melanogaster]
  misc_feature (14)..(129): Homolog of NCBI NO: 17506717 NR Description: KE2 family protein (14.7 kD) [Caenorhabditis
  misc_feature (9)..(127): Homolog of NCBI NO: 27704620 NR Description: similar to H2-K region expressed gene 2
  misc_feature (9)..(129): Homolog of NCBI NO: 33585747 NR Description: Unknown (protein for MGC:66282) [Danio rerio]
  misc_feature (9)..(127): Homolog of NCBI NO: 6754128 NR Description: H2-K region expressed gene 2 [Mus musculus]
  misc_feature (9)..(129): Homolog of NCBI NO: 7657162 NR Description: HLA class II region expressed gene KE2; KE2
  misc_feature (1)..(91): Homolog of NCBI NO: 25403096 NR Description: probable hydrophilic protein, 29542-30030
  misc_feature (1)..(129): Homolog of NCBI NO: 26450257 NR Description: unknown protein [Arabidopsis thaliana]
  misc_feature (1)..(129): Homolog of NCBI NO: 30691134 NR Description: hydrophilic protein -related [Arabidopsis
MSSSTVRDLQRDLENKANDLGKIQKDIGKNHQLRKKYTIQLGENELVLKELDLLEEDANVYKLIGPVLVKQDLAEANANVRKRIEYISAELKRLDAILQDMEEKQNNKRETIMKLQQRLQTIQAGKAKA

SEQ ID NO: 26857 - DNA, 904 bp, Arabidopsis thaliana
  misc_feature (1)..(904): Ceres Seq. ID no. 12394316
  misc_feature: MA Experiment ID: 108573 Result: Up-regulated in Transcription
  misc_feature: MA Experiment 108573 PARAMETER Experiment Name: At_Drought_cDNA_P Parameter: Timepoint (hr) Value: 6
  misc_feature: MA Experiment 108573 PARAMETER Experiment Name: At_Drought_cDNA_P Parameter: Tissue Value: Aerial
  misc_feature: MA Experiment 108573 PARAMETER Experiment Name: At_Drought_cDNA_P Parameter: Treatment Value: Drought vs. No Drought
  misc_feature: MA Experiment ID: 108579 Result: Down-regulated in Transcription
  misc_feature: MA Experiment 108579 PARAMETER Experiment Name: At_4deg_Cold_cDNA_P Parameter: Temperature (deg C) Value: 4 vs. 22
  misc_feature: MA Experiment 108579 PARAMETER Experiment Name: At_4deg_Cold_cDNA_P Parameter: Timepoint (hr) Value: 6
  misc_feature: MA Experiment 108579 PARAMETER Experiment Name: At_4deg_Cold_cDNA_P Parameter: Tissue Value: Aerial
  misc_feature: MA Experiment ID: 20000437 Result: Up-regulated in Transcription
  misc_feature: MA Experiment 20000437 PARAMETER Experiment Name: At_Drought_P Parameter: Age (day) Value: 8
  misc_feature: MA Experiment 20000437 PARAMETER Experiment Name: At_Drought_P Parameter: Organism Value: A. thaliana
  misc_feature: MA Experiment 20000437 PARAMETER Experiment Name: At_Drought_P Parameter: Plant Line Value: WS
  misc_feature: MA Experiment 20000437 PARAMETER Experiment Name: At_Drought_P Parameter: Timepoint (hr) Value: 24
  misc_feature: MA Experiment 20000437 PARAMETER Experiment Name: At_Drought_P Parameter: Tissue Value: Whole Plant
  misc_feature: MA Experiment 20000437 PARAMETER Experiment Name: At_Drought_P Parameter: Treatment Value: Drought vs. No Drought
aggaatattccggtgatggctgaagatttttcggcttgtgttggcttctgatctaggaattgacgctagacccttcttgacgagaagcgatgacgttgatgaacaagaaaactggcatgattgtccccaatacttaggagatgaagatttctctgatctcgatcttctccagttctttactctccagggcttggataggtccggtaaccggattttccgcatcgtcggaaagtatttccctgctcgtgtagtgagtgcggagcggctgaagaagtatatatcccagaagataagcaaccaatgtcctgagggacccttgtgcttggtttacatgcatagcacagtccaaaaggacgacaattcaccgggaattaccatcttacggtggatttacgaggaccttccttcagaaagcaaagacaggcttcaacttgtttatttcatccaccctggtcttcgttcaagacttgtcattgccactcttggccgccttcttttaagtggaggactgtactggaagattaagtacgtgagcaggttgcagtacctttgggaggacataaagaaaggcgaggtggaaattcccgactttgtgaagaaccatgacaatgtgctcgagcatagaccattaacggactatggaatcgaaccggatcctttccagttaagcgaggttcaatcttcatcgttctctctcaaccgctacgagaacagatgggtctcatagtacacatttgctctttgttgagctagaacctctatgtttttgtctgttgtatagagtaatctaatgtactaaacactcgtgtatcatcaatctgctttttgattgattttggaccgaaccagtaccagtattagatttgttttcaaaaccgggtcgaattttgctctttgttgagct

SEQ ID NO: 26858 - protein, 131 aa, Arabidopsis thaliana
  peptide (1)..(131): Ceres Seq. ID no. 12394317
  misc_feature (1)..(92): Homolog of NCBI NO: 37534804 NR Description: unknown protein [Oryza sativa (japonica
  misc_feature (1)..(106): Homolog of NCBI NO: 38345848 NR Description: OSJNBa0084K11.12 [Oryza sativa (japonica
  misc_feature (1)..(131): Homolog of NCBI NO: 21553817 NR Description: unknown [Arabidopsis thaliana]
  misc_feature (1)..(131): Homolog of NCBI NO: 15237117 NR Description: putative protein
  misc_feature (1)..(129): Homolog of NCBI NO: 22830926 NR Description: P0466H10.24 [Oryza sativa (japonica
  misc_feature (1)..(131): Homolog of NCBI NO: 18398797 NR Description: expressed protein
  misc_feature (1)..(131): Homolog of NCBI NO: 21593697 NR Description: unknown [Arabidopsis thaliana]
MHSTVQKDDNSPGITILRWIYEDLPSESKDRLQLVYFIHPGLRSRLVIATLGRLLLSGGLYWKIKYVSRLQYLWEDIKKGEVEIPDFVKNHDNVLEHRPLTDYGIEPDPFQLSEVQSSSFSLNRYENRWVS

SEQ ID NO: 26859 - DNA, 2317 bp, Arabidopsis thaliana
  misc_feature (1)..(2317): Ceres Seq. ID no. 12325322
  misc_feature: MA Experiment ID: 108573 Result: Up-regulated in Transcription
  misc_feature: MA Experiment 108573 PARAMETER Experiment Name: At_Drought_cDNA_P Parameter: Timepoint (hr) Value: 6
  misc_feature: MA Experiment 108573 PARAMETER Experiment Name: At_Drought_cDNA_P Parameter: Tissue Value: Aerial
  misc_feature: MA Experiment 108573 PARAMETER Experiment Name: At_Drought_cDNA_P Parameter: Treatment Value: Drought vs. No Drought
  misc_feature: MA Experiment ID: 20000069 Result: Up-regulated in Transcription
  misc_feature: MA Experiment 20000069 PARAMETER Experiment Name: At_100uM_ABA_Mutants_cDNA_P Parameter: Plant Line Value: CS23
  misc_feature: MA Experiment 20000069 PARAMETER Experiment Name: At_100uM_ABA_Mutants_cDNA_P Parameter: Timepoint (hr) Value: 6
  misc_feature: MA Experiment 20000069 PARAMETER Experiment Name: At_100uM_ABA_Mutants_cDNA_P Parameter: Tissue Value: Aerial
  misc_feature: MA Experiment 20000069 PARAMETER Experiment Name: At_100uM_ABA_Mutants_cDNA_P Parameter: Treatment Value: 100uM ABA vs. No Treatment
  misc_feature: MA Experiment ID: 20000070 Result: Up-regulated in Transcription
  misc_feature: MA Experiment 20000070 PARAMETER Experiment Name: At_100uM_ABA_Mutants_cDNA_P Parameter: Plant Line Value: CS24
  misc_feature: MA Experiment 20000070 PARAMETER Experiment Name: At_100uM_ABA_Mutants_cDNA_P Parameter: Timepoint (hr) Value: 6
  misc_feature: MA Experiment 20000070 PARAMETER Experiment Name: At_100uM_ABA_Mutants_cDNA_P Parameter: Tissue Value: Aerial
  misc_feature: MA Experiment 20000070 PARAMETER Experiment Name: At_100uM_ABA_Mutants_cDNA_P Parameter: Treatment Value: 100uM ABA vs. No Treatment
  misc_feature: MA Experiment ID: 20000071 Result: Up-regulated in Transcription
  misc_feature: MA Experiment 20000071 PARAMETER Experiment Name: At_100uM_ABA_Mutants_cDNA_P Parameter: Plant Line Value: CS8104
  misc_feature: MA Experiment 20000071 PARAMETER Experiment Name: At_100uM_ABA_Mutants_cDNA_P Parameter: Timepoint (hr) Value: 6
  misc_feature: MA Experiment 20000071 PARAMETER Experiment Name: At_100uM_ABA_Mutants_cDNA_P Parameter: Tissue Value: Aerial
  misc_feature: MA Experiment 20000071 PARAMETER Experiment Name: At_100uM_ABA_Mutants_cDNA_P Parameter: Treatment Value: 100uM ABA vs. No Treatment
  misc_feature: MA Experiment ID: 20000072 Result: Up-regulated in Transcription
  misc_feature: MA Experiment 20000072 PARAMETER Experiment Name: At_100uM_ABA_Mutants_cDNA_P Parameter: Plant Line Value: CS8105
  misc_feature: MA Experiment 20000072 PARAMETER Experiment Name: At_100uM_ABA_Mutants_cDNA_P Parameter: Timepoint (hr) Value: 6
  misc_feature: MA Experiment 20000072 PARAMETER Experiment Name: At_100uM_ABA_Mutants_cDNA_P Parameter: Tissue Value: Aerial
  misc_feature: MA Experiment 20000072 PARAMETER Experiment Name: At_100uM_ABA_Mutants_cDNA_P Parameter: Treatment Value: 100uM ABA vs. No Treatment
  misc_feature: MA Experiment ID: 20000088 Result: Up-regulated in Transcription
  misc_feature: MA Experiment 20000088 PARAMETER Experiment Name: At_100uM_ABA_Mutants_cDNA_P Parameter: Plant Line Value: Landsberg
  misc_feature: MA Experiment 20000088 PARAMETER Experiment Name: At_100uM_ABA_Mutants_cDNA_P Parameter: Timepoint (hr) Value: 6
  misc_feature: MA Experiment 20000088 PARAMETER Experiment Name: At_100uM_ABA_Mutants_cDNA_P Parameter: Tissue Value: Aerial
  misc_feature: MA Experiment 20000088 PARAMETER Experiment Name: At_100uM_ABA_Mutants_cDNA_P Parameter: Treatment Value: 100uM ABA vs. No Treatment
  misc_feature: MA Experiment ID: 20000111 Result: Down-regulated in Transcription
  misc_feature: MA Experiment 20000111 PARAMETER Experiment Name: At_42deg_Heat_cDNA_P Parameter: Temperature (deg C) Value: 42 vs. 22
  misc_feature: MA Experiment 20000111 PARAMETER Experiment Name: At_42deg_Heat_cDNA_P Parameter: Timepoint (hr) Value: 6
  misc_feature: MA Experiment 20000111 PARAMETER Experiment Name: At_42deg_Heat_cDNA_P Parameter: Tissue Value: Aerial
  misc_feature: MA Experiment ID: 20000113 Result: Down-regulated in Transcription
  misc_feature: MA Experiment 20000113 PARAMETER Experiment Name: At_42deg_Heat_cDNA_P Parameter: Temperature (deg C) Value: 42 vs. 22
  misc_feature: MA Experiment 20000113 PARAMETER Experiment Name: At_42deg_Heat_cDNA_P Parameter: Timepoint (hr) Value: 8
  misc_feature: MA Experiment 20000113 PARAMETER Experiment Name: At_42deg_Heat_cDNA_P Parameter: Tissue Value: Aerial
  misc_feature: MA Experiment ID: 20000117 Result: Up-regulated in Transcription
  misc_feature: MA Experiment 20000117 PARAMETER Experiment Name: At_100uM_ABA_Mutants_cDNA_P Parameter: Plant Line Value: Columbia
  misc_feature: MA Experiment 20000117 PARAMETER Experiment Name: At_100uM_ABA_Mutants_cDNA_P Parameter: Timepoint (hr) Value: 6
  misc_feature: MA Experiment 20000117 PARAMETER Experiment Name: At_100uM_ABA_Mutants_cDNA_P Parameter: Tissue Value: Aerial
  misc_feature: MA Experiment 20000117 PARAMETER Experiment Name: At_100uM_ABA_Mutants_cDNA_P Parameter: Treatment Value: 100uM ABA vs. No Treatment
  misc_feature: MA Experiment ID: 20000437 Result: Up-regulated in Transcription
  misc_feature: MA Experiment 20000437 PARAMETER Experiment Name: At_Drought_P Parameter: Age (day) Value: 8
  misc_feature: MA Experiment 20000437 PARAMETER Experiment Name: At_Drought_P Parameter: Organism Value: A. thaliana
  misc_feature: MA Experiment 20000437 PARAMETER Experiment Name: At_Drought_P Parameter: Plant Line Value: WS
  misc_feature: MA Experiment 20000437 PARAMETER Experiment Name: At_Drought_P Parameter: Timepoint (hr) Value: 24
  misc_feature: MA Experiment 20000437 PARAMETER Experiment Name: At_Drought_P Parameter: Tissue Value: Whole Plant
  misc_feature: MA Experiment 20000437 PARAMETER Experiment Name: At_Drought_P Parameter: Treatment Value: Drought vs. No Drought
  misc_feature: MA Experiment ID: 20000438 Result: Down-regulated in Transcription
  misc_feature: MA Experiment 20000438 PARAMETER Experiment Name: At_Shoots__P Parameter: Age (day) Value: 14
  misc_feature: MA Experiment 20000438 PARAMETER Experiment Name: At_Shoots__P Parameter: Tissue Value: Shoots vs. Whole Plant
  misc_feature: MA Experiment ID: 20001247 Result: Down-regulated in Transcription
  misc_feature: MA Experiment 20001247 PARAMETER Experiment Name: At_Far-red-induction_P Parameter: Age (day) Value: 7
  misc_feature: MA Experiment 20001247 PARAMETER Experiment Name: At_Far-red-induction_P Parameter: Light Value: Far-red vs. White
  misc_feature: MA Experiment 20001247 PARAMETER Experiment Name: At_Far-red-induction_P Parameter: Organism Value: A. thaliana
  misc_feature: MA Experiment 20001247 PARAMETER Experiment Name: At_Far-red-induction_P Parameter: Plant Line Value: Columbia
  misc_feature: MA Experiment 20001247 PARAMETER Experiment Name: At_Far-red-induction_P Parameter: Timepoint (hr) Value: 1
  misc_feature: MA Experiment 20001247 PARAMETER Experiment Name: At_Far-red-induction_P Parameter: Tissue Value: Whole Plant
tttcccagaaacctttgtttcatttgcttcgtgtgcgatcgcgagaacaagggaaaattagggtttatatcctcaagctttttcgaacaccattgatcgttgatctaagatttttcttctagtcgagtttcttaaggggctttgatcaaactcaaaattgaagaccaatactttgaaggattctggtaaagctaagcaactatgagttcaaattcatgggctgatgtttctgaatcagagagggcaccatctggtggtggttggggttattctcgtccgtctcgaaccaactatgttcctccacatcttaggagccgtacaccatcttcggagtttgttgctccttcacctggtaataatgatcgtgggggatatggtggtgcaaatagtggttatggtggtcgaggccaaggttatggtggtcgaggttcgggctatggtggtagaggaggtcctgtgggcggttggaatgccagaagtggaggttgggaccgtcgggatactgaaactaacccgtttggtaatgatggaaatgcagacccggctgttaacgagcaggaaaacactgtcattaactttgaggcctatgaagatattcccatcgagacaagtggggataatgtgccacctcctgttaatacatttgcagagatagacctcggagaagctctcaatctaaatatccagaggtgcaaatacgtgaagccgacccctgtgcagcgtaatgcaattcccatattggctgcaggaagggatttgatggcttgtgctcagacaggctctgggaagacagctgccttttgttttccgattattagtgggattatgaaggatcagcatatagagagaccacgtggagttcggggagtctatcctcttgctgtcattctctcaccaacaagggaattggcttgccagatacatgatgaagccagaaagttctcctatcaaactggagtgaaagttgtggttgcttacggaggaacaccagtcaaccaacagattagggagcttgaaagaggagttgatattcttgttgcaactcctgggagattaaatgatttgcttgagagaggtagagtctcattacagatggtaagattcttggcacttgatgaggcggacagaatgctggacatgggttttgaaccacaaatcaggaagatcgttcagcagatggacatgcctcctcctggtgtccggcagacaatgttgttcagtgctacatttcctagggagatacagagacttgcatctgattttctttcaaattacatatttctggctgttggaagagtgggttcaagtacggatttaattgtccaaagagtagagtttgttcatgattctgacaaaagaagccatctaatggaccttcttcatgcccagagggagaatggtaaccaaggaaagcaagctttgactctagtttttgtggagacaaagaagggagctgactctttggagaattggttgtgcatcaatggtttcccagcaacgaccattcatggtgataggtcacaacaggaaagagaagtggcactgagatcattcaagactgggcggacacctattttggttgcaaccgatgtggcagcacgtggtcttgacattccgcacgtggctcatgtagtgaactttgatctaccaaacgacattgatgactatgtccaccgtatcggacgaacaggacgtgcaggaaattcaggactagcaactgctttcttcaatgacaacaacacaacaatggccaagccactggctgagctaatgcaagaagctaaccaggaggtccctgactggctgactcgatacgcatctcgtgcttcatttggaggtggtaagaaccggcggtctggtggacggtttggtggtcgtgacttcaggagagaatcttttagtcgaggcggtggtggtgctgactactatggtggaggtggtggatatggaggcgttcctggtggtggctatggagcaatgcctggtgggtacggacccgtaccaggtggtggatatggaaatgttccgggtggtggttatgcaccttatggtagaggtggtggtgcttactatggtcctggaggatatggaaccgttcctaaccaagggtatggtcctggagtggctagtgcgtgggactaagctttaacttcaattcttcaagaaccgattatgttctctttctctctcacttatctctattgtttattattagggagcagccacagatgtgtatgtttgctctttaaatggttatgtagtagacacgaatcgtctctttgttcaatgtgaaaaaagaaaaccccctagtagaccc

SEQ ID NO: 26860 - protein, 646 aa, Arabidopsis thaliana
  peptide (1)..(646): Ceres Seq. ID no. 12325323
  misc_feature (159)..(376): Pfam Name: DEAD/DEAH box helicase Pfam Description: DEAD/DEAH box helicase
  misc_feature (27)..(111): Homolog of NCBI NO: 113825 NR Description: Putative ATP-dependent RNA helicase An3
  misc_feature (53)..(606): Homolog of NCBI NO: 113825 NR Description: Putative ATP-dependent RNA helicase An3
  misc_feature (27)..(110): Homolog of NCBI NO: 27924277 NR Description: Unknown (protein for MGC:52935) [Xenopus laevis]
  misc_feature (53)..(606): Homolog of NCBI NO: 27924277 NR Description: Unknown (protein for MGC:52935) [Xenopus laevis]
  misc_feature (1)..(645): Homolog of NCBI NO: 11267519 NR Description: probable ATP-dependent RNA helicase DED1
  misc_feature (187)..(606): Homolog of NCBI NO: 17064740 NR Description: ATP-dependent RNA helicase-like protein
  misc_feature (3)..(606): Homolog of NCBI NO: 11267530 NR Description: ATP-dependent RNA helicase-like protein -
  misc_feature (3)..(606): Homolog of NCBI NO: 18410973 NR Description: DEAD/DEAH box RNA helicase protein, putative
  misc_feature (3)..(625): Homolog of NCBI NO: 28393424 NR Description: putative DEAD/DEAH box RNA helicase [Arabidopsis
  misc_feature (3)..(625): Homolog of NCBI NO: 15227951 NR Description: DEAD/DEAH box RNA helicase, putative; protein id:
MSSNSWADVSESERAPSGGGWGYSRPSRTNYVPPHLRSRTPSSEFVAPSPGNNDRGGYGGANSGYGGRGQGYGGRGSGYGGRGGPVGGWNARSGGWDRRDTETNPFGNDGNADPAVNEQENTVINFEAYEDIPIETSGDNVPPPVNTFAEIDLGEALNLNIQRCKYVKPTPVQRNAIPILAAGRDLMACAQTGSGKTAAFCFPIISGIMKDQHIERPRGVRGVYPLAVILSPTRELACQIHDEARKFSYQTGVKVVVAYGGTPVNQQIRELERGVDILVATPGRLNDLLERGRVSLQMVRFLALDEADRMLDMGFEPQIRKIVQQMDMPPPGVRQTMLFSATFPREIQRLASDFLSNYIFLAVGRVGSSTDLIVQRVEFVHDSDKRSHLMDLLHAQRENGNQGKQALTLVFVETKKGADSLENWLCINGFPATTIHGDRSQQEREVALRSFKTGRTPILVATDVAARGLDIPHVAHVVNFDLPNDIDDYVHRIGRTGRAGNSGLATAFFNDNNTTMAKPLAELMQEANQEVPDWLTRYASRASFGGGKNRRSGGRFGGRDFRRESFSRGGGGADYYGGGGGYGGVPGGGYGAMPGGYGPVPGGGYGNVPGGGYAPYGRGGGAYYGPGGYGTVPNQGYGPGVASAWD

SEQ ID NO: 26861 - protein, 460 aa, Arabidopsis thaliana
  peptide (1)..(460): Ceres Seq. ID no. 12325324
  misc_feature (1)..(190): Pfam Name: DEAD/DEAH box helicase Pfam Description: DEAD/DEAH box helicase
  misc_feature (1)..(453): Homolog of NCBI NO: 19528473 NR Description: RE28061p [Drosophila melanogaster]
  misc_feature (1)..(453): Homolog of NCBI NO: 17985987 NR Description: belle CG9748-PA
  misc_feature (1)..(420): Homolog of NCBI NO: 113825 NR Description: Putative ATP-dependent RNA helicase An3
  misc_feature (1)..(420): Homolog of NCBI NO: 27924277 NR Description: Unknown (protein for MGC:52935) [Xenopus laevis]
  misc_feature (1)..(459): Homolog of NCBI NO: 11267519 NR Description: probable ATP-dependent RNA helicase DED1
  misc_feature (1)..(420): Homolog of NCBI NO: 17064740 NR Description: ATP-dependent RNA helicase-like protein
  misc_feature (1)..(420): Homolog of NCBI NO: 11267530 NR Description: ATP-dependent RNA helicase-like protein -
  misc_feature (1)..(420): Homolog of NCBI NO: 18410973 NR Description: DEAD/DEAH box RNA helicase protein, putative
  misc_feature (1)..(439): Homolog of NCBI NO: 28393424 NR Description: putative DEAD/DEAH box RNA helicase [Arabidopsis
  misc_feature (1)..(439): Homolog of NCBI NO: 15227951 NR Description: DEAD/DEAH box RNA helicase, putative; protein id:
MACAQTGSGKTAAFCFPIISGIMKDQHIERPRGVRGVYPLAVILSPTRELACQIHDEARKFSYQTGVKVVVAYGGTPVNQQIRELERGVDILVATPGRLNDLLERGRVSLQMVRFLALDEADRMLDMGFEPQIRKIVQQMDMPPPGVRQTMLFSATFPREIQRLASDFLSNYIFLAVGRVGSSTDLIVQRVEFVHDSDKRSHLMDLLHAQRENGNQGKQALTLVFVETKKGADSLENWLCINGFPATTIHGDRSQQEREVALRSFKTGRTPILVATDVAARGLDIPHVAHVVNFDLPNDIDDYVHRIGRTGRAGNSGLATAFFNDNNTTMAKPLAELMQEANQEVPDWLTRYASRASFGGGKNRRSGGRFGGRDFRRESFSRGGGGADYYGGGGGYGGVPGGGYGAMPGGYGPVPGGGYGNVPGGGYAPYGRGGGAYYGPGGYGTVPNQGYGPGVASAWD

SEQ ID NO: 26862 - protein, 438 aa, Arabidopsis thaliana
  peptide (1)..(438): Ceres Seq. ID no. 12325325
  misc_feature (1)..(168): Pfam Name: DEAD/DEAH box helicase Pfam Description: DEAD/DEAH box helicase
  misc_feature (1)..(431): Homolog of NCBI NO: 19528473 NR Description: RE28061p [Drosophila melanogaster]
  misc_feature (1)..(431): Homolog of NCBI NO: 17985987 NR Description: belle CG9748-PA
  misc_feature (1)..(398): Homolog of NCBI NO: 113825 NR Description: Putative ATP-dependent RNA helicase An3
  misc_feature (1)..(398): Homolog of NCBI NO: 27924277 NR Description: Unknown (protein for MGC:52935) [Xenopus laevis]
  misc_feature (1)..(437): Homolog of NCBI NO: 11267519 NR Description: probable ATP-dependent RNA helicase DED1
  misc_feature (1)..(398): Homolog of NCBI NO: 17064740 NR Description: ATP-dependent RNA helicase-like protein
  misc_feature (1)..(398): Homolog of NCBI NO: 11267530 NR Description: ATP-dependent RNA helicase-like protein -
  misc_feature (1)..(398): Homolog of NCBI NO: 18410973 NR Description: DEAD/DEAH box RNA helicase protein, putative
  misc_feature (1)..(417): Homolog of NCBI NO: 28393424 NR Description: putative DEAD/DEAH box RNA helicase [Arabidopsis
  misc_feature (1)..(417): Homolog of NCBI NO: 15227951 NR Description: DEAD/DEAH box RNA helicase, putative; protein id:
MKDQHIERPRGVRGVYPLAVILSPTRELACQIHDEARKFSYQTGVKVVVAYGGTPVNQQIRELERGVDILVATPGRLNDLLERGRVSLQMVRFLALDEADRMLDMGFEPQIRKIVQQMDMPPPGVRQTMLFSATFPREIQRLASDFLSNYIFLAVGRVGSSTDLIVQRVEFVHDSDKRSHLMDLLHAQRENGNQGKQALTLVFVETKKGADSLENWLCINGFPATTIHGDRSQQEREVALRSFKTGRTPILVATDVAARGLDIPHVAHVVNFDLPNDIDDYVHRIGRTGRAGNSGLATAFFNDNNTTMAKPLAELMQEANQEVPDWLTRYASRASFGGGKNRRSGGRFGGRDFRRESFSRGGGGADYYGGGGGYGGVPGGGYGAMPGGYGPVPGGGYGNVPGGGYAPYGRGGGAYYGPGGYGTVPNQGYGPGVASAWD

SEQ ID NO: 26863 - DNA, 1460 bp, Arabidopsis thaliana
  misc_feature (1)..(1460): Ceres Seq. ID no. 12394994
  misc_feature: MA Experiment ID: 108461 Result: Up-regulated in Transcription
  misc_feature: MA Experiment 108461 PARAMETER Experiment Name: At_Germinating_Seeds_cDNA_P Parameter: Age (day) Value: 1 vs. 0
  misc_feature: MA Experiment 108461 PARAMETER Experiment Name: At_Germinating_Seeds_cDNA_P Parameter: Tissue Value: Germinating Seeds
  misc_feature: MA Experiment ID: 108462 Result: Up-regulated in Transcription
  misc_feature: MA Experiment 108462 PARAMETER Experiment Name: At_Germinating_Seeds_cDNA_P Parameter: Age (day) Value: 2 vs. 0
  misc_feature: MA Experiment 108462 PARAMETER Experiment Name: At_Germinating_Seeds_cDNA_P Parameter: Tissue Value: Germinating Seeds
  misc_feature: MA Experiment ID: 108489 Result: Down-regulated in Transcription
  misc_feature: MA Experiment ID: 108576 Result: Up-regulated in Transcription
  misc_feature: MA Experiment 108576 PARAMETER Experiment Name: At_42deg_Heat_cDNA_P Parameter: Temperature (deg C) Value: 42 vs. 22
  misc_feature: MA Experiment 108576 PARAMETER Experiment Name: At_42deg_Heat_cDNA_P Parameter: Timepoint (hr) Value: 1
  misc_feature: MA Experiment 108576 PARAMETER Experiment Name: At_42deg_Heat_cDNA_P Parameter: Tissue Value: Aerial
  misc_feature: MA Experiment ID: 108595 Result: Up-regulated in Transcription
  misc_feature: MA Experiment 108595 PARAMETER Experiment Name: At_Ler-pi_Ovule_cDNA_P Parameter: Plant Line Value: null
  misc_feature: MA Experiment ID: 20000086 Result: Down-regulated in Transcription
  misc_feature: MA Experiment 20000086 PARAMETER Experiment Name: At_100uM_ABA_Mutants_cDNA_P Parameter: Plant Line Value: CS22
  misc_feature: MA Experiment 20000086 PARAMETER Experiment Name: At_100uM_ABA_Mutants_cDNA_P Parameter: Timepoint (hr) Value: 6
  misc_feature: MA Experiment 20000086 PARAMETER Experiment Name: At_100uM_ABA_Mutants_cDNA_P Parameter: Tissue Value: Aerial
  misc_feature: MA Experiment 20000086 PARAMETER Experiment Name: At_100uM_ABA_Mutants_cDNA_P Parameter: Treatment Value: 100uM ABA vs. No Treatment
  misc_feature: MA Experiment ID: 20000087 Result: Down-regulated in Transcription
  misc_feature: MA Experiment 20000087 PARAMETER Experiment Name: At_100uM_ABA_Mutants_cDNA_P Parameter: Plant Line Value: WS
  misc_feature: MA Experiment 20000087 PARAMETER Experiment Name: At_100uM_ABA_Mutants_cDNA_P Parameter: Timepoint (hr) Value: 6
  misc_feature: MA Experiment 20000087 PARAMETER Experiment Name: At_100uM_ABA_Mutants_cDNA_P Parameter: Tissue Value: Aerial
  misc_feature: MA Experiment 20000087 PARAMETER Experiment Name: At_100uM_ABA_Mutants_cDNA_P Parameter: Treatment Value: 100uM ABA vs. No Treatment
  misc_feature: MA Experiment ID: 20000112 Result: Up-regulated in Transcription
  misc_feature: MA Experiment 20000112 PARAMETER Experiment Name: At_42deg_Heat_cDNA_P Parameter: Temperature (deg C) Value: 42 vs. 22
  misc_feature: MA Experiment 20000112 PARAMETER Experiment Name: At_42deg_Heat_cDNA_P Parameter: Timepoint (hr) Value: 2
  misc_feature: MA Experiment 20000112 PARAMETER Experiment Name: At_42deg_Heat_cDNA_P Parameter: Tissue Value: Aerial
  misc_feature: MA Experiment ID: 20000224 Result: Up-regulated in Transcription
  misc_feature: MA Experiment ID: 20000286 Result: Up-regulated in Transcription
  misc_feature: MA Experiment 20000286 PARAMETER Experiment Name: At_Open_Flower_P Parameter: Age (day) Value: 21
  misc_feature: MA Experiment 20000286 PARAMETER Experiment Name: At_Open_Flower_P Parameter: Plant Line Value: WS
  misc_feature: MA Experiment 20000286 PARAMETER Experiment Name: At_Open_Flower_P Parameter: Tissue Value: Half Open vs. Whole Plant
  misc_feature: MA Experiment ID: 20000441 Result: Down-regulated in Transcription
  misc_feature: MA Experiment 20000441 PARAMETER Experiment Name: At_1uM_BR-BRZ__P Parameter: Tissue Value: Shoot Apices
  misc_feature: MA Experiment 20000441 PARAMETER Experiment Name: At_1uM_BR-BRZ__P Parameter: Treatment Value: 1uM BR vs. No Treatment
  misc_feature: MA Experiment ID: 20001771 Result: Up-regulated in Transcription
  misc_feature: MA Experiment 20001771 PARAMETER Experiment Name: At_Far-red-enriched-adult_P Parameter: Age (day) Value: 28
  misc_feature: MA Experiment 20001771 PARAMETER Experiment Name: At_Far-red-enriched-adult_P Parameter: Light Value: Far-red enriched vs. White
  misc_feature: MA Experiment 20001771 PARAMETER Experiment Name: At_Far-red-enriched-adult_P Parameter: Organism Value: A. thaliana
  misc_feature: MA Experiment 20001771 PARAMETER Experiment Name: At_Far-red-enriched-adult_P Parameter: Plant Line Value: Columbia
  misc_feature: MA Experiment 20001771 PARAMETER Experiment Name: At_Far-red-enriched-adult_P Parameter: Timepoint (hr) Value: 16
  misc_feature: MA Experiment 20001771 PARAMETER Experiment Name: At_Far-red-enriched-adult_P Parameter: Tissue Value: Aerial
  misc_feature: MA Experiment ID: 20001910 Result: Down-regulated in Transcription
  misc_feature: MA Experiment 20001910 PARAMETER Experiment Name: At_Drought_Reproduction_P Parameter: Age (day) Value: 37
  misc_feature: MA Experiment 20001910 PARAMETER Experiment Name: At_Drought_Reproduction_P Parameter: Organism Value: A. thaliana
  misc_feature: MA Experiment 20001910 PARAMETER Experiment Name: At_Drought_Reproduction_P Parameter: Plant Line Value: WS
  misc_feature: MA Experiment 20001910 PARAMETER Experiment Name: At_Drought_Reproduction_P Parameter: Timepoint (day) Value: 7
  misc_feature: MA Experiment 20001910 PARAMETER Experiment Name: At_Drought_Reproduction_P Parameter: Tissue Value: Flowers
  misc_feature: MA Experiment 20001910 PARAMETER Experiment Name: At_Drought_Reproduction_P Parameter: Treatment Value: Drought vs. No Drought
agcattgcctgcatcatggccaaaccctcgcagccaacgcgagactcccacgtggcagttctcgttttccccttcggcactcatgcagctcctctcctcgccgtcacgtgccgtctcgccaccgctgctccctccaccgtcttctccttcttcagcaccgcacgatccaactcgtcgttactctcctccgatatccccacaaacattcgtgtccacaacgtcgatgacggtgttcctgagggattcgtgttgacggggaatccacagcacgctgttgagctgtttcttgaagcggcgccagagattttccgaagagaaatcaaggcggccgagaccgaagttggtaggaagttcaagtgcatccttacggatgcgttcctctggttagcagcggagacggcggctgcggagatgaaagcgtcgtgggttgcgtactatggaggcggagcaacctcgctcactgctcatctctacacagatgccatcagagaaaacgtcggtgtcaaagaagtaggtgagcgtatggaggagacaatagggtttatctcaggaatggagaagatcagagtcaaagacacacaagaaggcgttgtgtttgggaacttagactctgttttctctaaaacgttgcaccaaatgggtcttgctttacctcgtgccactgctgttttcatcaattcctttgaagaattggatcctacgtttacaaatgatttcagatcggaattcaaacgttacctaaacatcggtcctctcgctttattatcttctccatcgcaaacatcaacgctagtgcacgatcctcacggttgcttggcttggatcgagaagcggtccactgcttctgtagcgtacattgcctttggtagagtcgcgacaccgcctcctgtagagcttgtggcgatagcacaaggattggaatcgagtaaagtgccttttgtttggtcgctacaagagatgaaaatgactcatttaccagaaggctttttggatcggaccagagagcaagggatggtggttccatgggcaccacaagtggagctgctaaaccatgaagcaatgggtgtgtttgtttcgcatggtgggtggaactcagtgttggagagtgtgtcggcaggtgtaccgatgatttgtagaccgattttcggggatcatgcaatcaatgcaagatctgtggaagctgtgtgggagatcggagtgacgattagtagtggagtcttcacgaaggatggatttgaggagagtttggatcgggttttggttcaagatgatggcaagaagatgaaggttaatgctaaaaagcttgaagaactagcacaagaagctgtctctaccaaaggaagctcctttgagaattttggaggattgttggacgaagttgtgaactttggataaacatgtaaacaacacctactagttgttatcttgcattgtgggcgggaataataaattattgacgt

SEQ ID NO: 26864 - protein, 464 aa, Arabidopsis thaliana
  peptide (1)..(464): Ceres Seq. ID no. 12394995
  misc_feature (18)..(464): Pfam Name: UDP-glucoronosyl and UDP-glucosyl transferase Pfam Description: UDP-glucoronosyl and UDP-glucosyl transferase
  misc_feature (5)..(463): Homolog of NCBI NO: 18408251 NR Description: glucosyltransferase-like protein
  misc_feature (10)..(460): Homolog of NCBI NO: 2564114 NR Description: UDP glucose:flavonoid 3-o-glucosyltransferase
  misc_feature (10)..(460): Homolog of NCBI NO: 13620859 NR Description: UDP-glucose:flavonoid 3-O-glucosyltransferase
  misc_feature (10)..(460): Homolog of NCBI NO: 13620855 NR Description: UDP-glucose:flavonoid 3-O-glucosyltransferase
  misc_feature (10)..(460): Homolog of NCBI NO: 13620869 NR Description: UDP-glucose:flavonoid 3-O-glucosyltransferase
  misc_feature (10)..(460): Homolog of NCBI NO: 13620861 NR Description: UDP-glucose:flavonoid 3-O-glucosyltransferase
  misc_feature (6)..(461): Homolog of NCBI NO: 21593372 NR Description: UDP glucose:flavonoid 3-o-glucosyltransferase,
  misc_feature (6)..(461): Homolog of NCBI NO: 18397552 NR Description: UDP glucose:flavonoid 3-o-glucosyltransferase,
  misc_feature (6)..(462): Homolog of NCBI NO: 15237899 NR Description: UDP glucose:flavonoid 3-o-glucosyltransferase
  misc_feature (6)..(464): Homolog of NCBI NO: 15237895 NR Description: UDP glucose:flavonoid 3-o-glucosyltransferase
SIACIMAKPSQPTRDSHVAVLVFPFGTHAAPLLAVTCRLATAAPSTVFSFFSTARSNSSLLSSDIPTNIRVHNVDDGVPEGFVLTGNPQHAVELFLEAAPEIFRREIKAAETEVGRKFKCILTDAFLWLAAETAAAEMKASWVAYYGGGATSLTAHLYTDAIRENVGVKEVGERMEETIGFISGMEKIRVKDTQEGVVFGNLDSVFSKTLHQMGLALPRATAVFINSFEELDPTFTNDFRSEFKRYLNIGPLALLSSPSQTSTLVHDPHGCLAWIEKRSTASVAYIAFGRVATPPPVELVAIAQGLESSKVPFVWSLQEMKMTHLPEGFLDRTREQGMVVPWAPQVELLNHEAMGVFVSHGGWNSVLESVSAGVPMICRPIFGDHAINARSVEAVWEIGVTISSGVFTKDGFEESLDRVLVQDDGKKMKVNAKKLEELAQEAVSTKGSSFENFGGLLDEVVNFG

SEQ ID NO: 26865 - protein, 459 aa, Arabidopsis thaliana
  peptide (1)..(459): Ceres Seq. ID no. 12394996
  misc_feature (13)..(459): Pfam Name: UDP-glucoronosyl and UDP-glucosyl transferase Pfam Description: UDP-glucoronosyl and UDP-glucosyl transferase
  misc_feature (5)..(455): Homolog of NCBI NO: 13620859 NR Description: UDP-glucose:flavonoid 3-O-glucosyltransferase
  misc_feature (5)..(455): Homolog of NCBI NO: 13620855 NR Description: UDP-glucose:flavonoid 3-O-glucosyltransferase
  misc_feature (5)..(455): Homolog of NCBI NO: 13620869 NR Description: UDP-glucose:flavonoid 3-O-glucosyltransferase
  misc_feature (5)..(455): Homolog of NCBI NO: 13620861 NR Description: UDP-glucose:flavonoid 3-O-glucosyltransferase
  misc_feature (1)..(458): Homolog of NCBI NO: 18408251 NR Description: glucosyltransferase-like protein
  misc_feature (5)..(455): Homolog of NCBI NO: 2564114 NR Description: UDP glucose:flavonoid 3-o-glucosyltransferase
  misc_feature (1)..(456): Homolog of NCBI NO: 21593372 NR Description: UDP glucose:flavonoid 3-o-glucosyltransferase,
  misc_feature (1)..(456): Homolog of NCBI NO: 18397552 NR Description: UDP glucose:flavonoid 3-o-glucosyltransferase,
  misc_feature (1)..(457): Homolog of NCBI NO: 15237899 NR Description: UDP glucose:flavonoid 3-o-glucosyltransferase
  misc_feature (1)..(459): Homolog of NCBI NO: 15237895 NR Description: UDP glucose:flavonoid 3-o-glucosyltransferase
MAKPSQPTRDSHVAVLVFPFGTHAAPLLAVTCRLATAAPSTVFSFFSTARSNSSLLSSDIPTNIRVHNVDDGVPEGFVLTGNPQHAVELFLEAAPEIFRREIKAAETEVGRKFKCILTDAFLWLAAETAAAEMKASWVAYYGGGATSLTAHLYTDAIRENVGVKEVGERMEETIGFISGMEKIRVKDTQEGVVFGNLDSVFSKTLHQMGLALPRATAVFINSFEELDPTFTNDFRSEFKRYLNIGPLALLSSPSQTSTLVHDPHGCLAWIEKRSTASVAYIAFGRVATPPPVELVAIAQGLESSKVPFVWSLQEMKMTHLPEGFLDRTREQGMVVPWAPQVELLNHEAMGVFVSHGGWNSVLESVSAGVPMICRPIFGDHAINARSVEAVWEIGVTISSGVFTKDGFEESLDRVLVQDDGKKMKVNAKKLEELAQEAVSTKGSSFENFGGLLDEVVNFG

SEQ ID NO: 26866 - protein, 327 aa, Arabidopsis thaliana
  peptide (1)..(327): Ceres Seq. ID no. 12394997
  misc_feature (1)..(327): Pfam Name: UDP-glucoronosyl and UDP-glucosyl transferase Pfam Description: UDP-glucoronosyl and UDP-glucosyl transferase
  misc_feature (1)..(326): Homolog of NCBI NO: 18408251 NR Description: glucosyltransferase-like protein
  misc_feature (1)..(323): Homolog of NCBI NO: 2564114 NR Description: UDP glucose:flavonoid 3-o-glucosyltransferase
  misc_feature (1)..(323): Homolog of NCBI NO: 13620859 NR Description: UDP-glucose:flavonoid 3-O-glucosyltransferase
  misc_feature (1)..(323): Homolog of NCBI NO: 13620855 NR Description: UDP-glucose:flavonoid 3-O-glucosyltransferase
  misc_feature (1)..(323): Homolog of NCBI NO: 13620869 NR Description: UDP-glucose:flavonoid 3-O-glucosyltransferase
  misc_feature (1)..(323): Homolog of NCBI NO: 13620861 NR Description: UDP-glucose:flavonoid 3-O-glucosyltransferase
  misc_feature (1)..(324): Homolog of NCBI NO: 21593372 NR Description: UDP glucose:flavonoid 3-o-glucosyltransferase,
  misc_feature (1)..(324): Homolog of NCBI NO: 18397552 NR Description: UDP glucose:flavonoid 3-o-glucosyltransferase,
  misc_feature (1)..(325): Homolog of NCBI NO: 15237899 NR Description: UDP glucose:flavonoid 3-o-glucosyltransferase
  misc_feature (1)..(327): Homolog of NCBI NO: 15237895 NR Description: UDP glucose:flavonoid 3-o-glucosyltransferase
MKASWVAYYGGGATSLTAHLYTDAIRENVGVKEVGERMEETIGFISGMEKIRVKDTQEGVVFGNLDSVFSKTLHQMGLALPRATAVFINSFEELDPTFTNDFRSEFKRYLNIGPLALLSSPSQTSTLVHDPHGCLAWIEKRSTASVAYIAFGRVATPPPVELVAIAQGLESSKVPFVWSLQEMKMTHLPEGFLDRTREQGMVVPWAPQVELLNHEAMGVFVSHGGWNSVLESVSAGVPMICRPIFGDHAINARSVEAVWEIGVTISSGVFTKDGFEESLDRVLVQDDGKKMKVNAKKLEELAQEAVSTKGSSFENFGGLLDEVVNFG

SEQ ID NO: 26867 - DNA, 1200 bp, Arabidopsis thaliana
  misc_feature (1)..(1200): Ceres Seq. ID no. 12394998
  misc_feature: MA Experiment ID: 108434 Result: Down-regulated in Transcription
  misc_feature: MA Experiment 108434 PARAMETER Experiment Name: At_Root_Tips_cDNA_P Parameter: Tissue Value: Root Tips
  misc_feature: MA Experiment ID: 108462 Result: Up-regulated in Transcription
  misc_feature: MA Experiment 108462 PARAMETER Experiment Name: At_Germinating_Seeds_cDNA_P Parameter: Age (day) Value: 2 vs. 0
  misc_feature: MA Experiment 108462 PARAMETER Experiment Name: At_Germinating_Seeds_cDNA_P Parameter: Tissue Value: Germinating Seeds
  misc_feature: MA Experiment ID: 108469 Result: Up-regulated in Transcription
  misc_feature: MA Experiment ID: 108488 Result: Down-regulated in Transcription
  misc_feature: MA Experiment ID: 108573 Result: Up-regulated in Transcription
  misc_feature: MA Experiment 108573 PARAMETER Experiment Name: At_Drought_cDNA_P Parameter: Timepoint (hr) Value: 6
  misc_feature: MA Experiment 108573 PARAMETER Experiment Name: At_Drought_cDNA_P Parameter: Tissue Value: Aerial
  misc_feature: MA Experiment 108573 PARAMETER Experiment Name: At_Drought_cDNA_P Parameter: Treatment Value: Drought vs. No Drought
  misc_feature: MA Experiment ID: 108574 Result: Up-regulated in Transcription
  misc_feature: MA Experiment 108574 PARAMETER Experiment Name: At_Wounding__cDNA_P Parameter: Timepoint (hr) Value: 1
  misc_feature: MA Experiment 108574 PARAMETER Experiment Name: At_Wounding__cDNA_P Parameter: Tissue Value: Aerial
  misc_feature: MA Experiment 108574 PARAMETER Experiment Name: At_Wounding__cDNA_P Parameter: Treatment Value: Wounding vs. No Wounding
  misc_feature: MA Experiment ID: 108576 Result: Up-regulated in Transcription
  misc_feature: MA Experiment 108576 PARAMETER Experiment Name: At_42deg_Heat_cDNA_P Parameter: Temperature (deg C) Value: 42 vs. 22
  misc_feature: MA Experiment 108576 PARAMETER Experiment Name: At_42deg_Heat_cDNA_P Parameter: Timepoint (hr) Value: 1
  misc_feature: MA Experiment 108576 PARAMETER Experiment Name: At_42deg_Heat_cDNA_P Parameter: Tissue Value: Aerial
  misc_feature: MA Experiment ID: 108577 Result: Up-regulated in Transcription
  misc_feature: MA Experiment 108577 PARAMETER Experiment Name: At_42deg_Heat_cDNA_P Parameter: Temperature (deg C) Value: 42 vs. 22
  misc_feature: MA Experiment 108577 PARAMETER Experiment Name: At_42deg_Heat_cDNA_P Parameter: Timepoint (hr) Value: 6
  misc_feature: MA Experiment 108577 PARAMETER Experiment Name: At_42deg_Heat_cDNA_P Parameter: Tissue Value: Aerial
  misc_feature: MA Experiment ID: 108579 Result: Up-regulated in Transcription
  misc_feature: MA Experiment 108579 PARAMETER Experiment Name: At_4deg_Cold_cDNA_P Parameter: Temperature (deg C) Value: 4 vs. 22
  misc_feature: MA Experiment 108579 PARAMETER Experiment Name: At_4deg_Cold_cDNA_P Parameter: Timepoint (hr) Value: 6
  misc_feature: MA Experiment 108579 PARAMETER Experiment Name: At_4deg_Cold_cDNA_P Parameter: Tissue Value: Aerial
  misc_feature: MA Experiment ID: 108585 Result: Up-regulated in Transcription
  misc_feature: MA Experiment 108585 PARAMETER Experiment Name: At_5mM_NaNP_cDNA_P Parameter: Timepoint (hr) Value: 6
  misc_feature: MA Experiment 108585 PARAMETER Experiment Name: At_5mM_NaNP_cDNA_P Parameter: Tissue Value: Aerial
  misc_feature: MA Experiment 108585 PARAMETER Experiment Name: At_5mM_NaNP_cDNA_P Parameter: Treatment Value: null
  misc_feature: MA Experiment ID: 108595 Result: Up-regulated in Transcription
  misc_feature: MA Experiment 108595 PARAMETER Experiment Name: At_Ler-pi_Ovule_cDNA_P Parameter: Plant Line Value: null
  misc_feature: MA Experiment ID: 20000070 Result: Down-regulated in Transcription
  misc_feature: MA Experiment 20000070 PARAMETER Experiment Name: At_100uM_ABA_Mutants_cDNA_P Parameter: Plant Line Value: CS24
  misc_feature: MA Experiment 20000070 PARAMETER Experiment Name: At_100uM_ABA_Mutants_cDNA_P Parameter: Timepoint (hr) Value: 6
  misc_feature: MA Experiment 20000070 PARAMETER Experiment Name: At_100uM_ABA_Mutants_cDNA_P Parameter: Tissue Value: Aerial
  misc_feature: MA Experiment 20000070 PARAMETER Experiment Name: At_100uM_ABA_Mutants_cDNA_P Parameter: Treatment Value: 100uM ABA vs. No Treatment
  misc_feature: MA Experiment ID: 20000089 Result: Down-regulated in Transcription
  misc_feature: MA Experiment ID: 20000093 Result: Up-regulated in Transcription
  misc_feature: MA Experiment 20000093 PARAMETER Experiment Name: At_42deg_Heat_cDNA_P Parameter: Temperature (deg C) Value: 42 vs. 22
  misc_feature: MA Experiment 20000093 PARAMETER Experiment Name: At_42deg_Heat_cDNA_P Parameter: Timepoint (hr) Value: 0.5
  misc_feature: MA Experiment 20000093 PARAMETER Experiment Name: At_42deg_Heat_cDNA_P Parameter: Tissue Value: Aerial
  misc_feature: MA Experiment ID: 20000111 Result: Up-regulated in Transcription
  misc_feature: MA Experiment 20000111 PARAMETER Experiment Name: At_42deg_Heat_cDNA_P Parameter: Temperature (deg C) Value: 42 vs. 22
  misc_feature: MA Experiment 20000111 PARAMETER Experiment Name: At_42deg_Heat_cDNA_P Parameter: Timepoint (hr) Value: 6
  misc_feature: MA Experiment 20000111 PARAMETER Experiment Name: At_42deg_Heat_cDNA_P Parameter: Tissue Value: Aerial
  misc_feature: MA Experiment ID: 20000113 Result: Up-regulated in Transcription
  misc_feature: MA Experiment 20000113 PARAMETER Experiment Name: At_42deg_Heat_cDNA_P Parameter: Temperature (deg C) Value: 42 vs. 22
  misc_feature: MA Experiment 20000113 PARAMETER Experiment Name: At_42deg_Heat_cDNA_P Parameter: Timepoint (hr) Value: 8
  misc_feature: MA Experiment 20000113 PARAMETER Experiment Name: At_42deg_Heat_cDNA_P Parameter: Tissue Value: Aerial
  misc_feature: MA Experiment ID: 20000224 Result: Down-regulated in Transcription
acttttcttttcctcatcataaaaaacattctcagagcaaatttcaagtttatttcattcaatttcgatccgattaaccatggagtgtagatcattggatctgacgattatatctgcggaagatctcaaagacgttcaattgatcggtaaacaagacttgtacgccgtcgtttccatcaacggcgacgctaggacgaagcagaagacaaaggttgataaagattgcggcaccaaacctaaatggaagcatcaaatgaagctcaccgtcgatgacgcatcggcgcgtgacaatcgtcttactcttgttttcgagatcgtggcggatcgtcccatcgctggtgataaacctgtcggtgaggttagcgttccgctgaaggagcttttggatcagaataaaggtgacgaggagaaaacggttacttacgccgtgaggttgcctaacgggaaggcgaaaggatctctcaaattctcgttcaaatttggggaaaagtatacttatggatcttcgagtggtcctcacgcgccggtcccttcggctatggatcataagactatggatcagcccgtcaccgcttacccgcccggacacggtgcaccgtctgcataccctgctcctcccgcgggtccttcttccggatatccaccacaaggacatgacgataagcacggtggtgtttatggatacccgcagcaggctggatatccagctggaaccggtggttatccgccacctggtgcatacccacaacagggaggttaccctgtatatccgcctcagcaacagggtggatacccgggttatccgccacagggtccatatggttacccgcaacaaggttatccaccacagggtccatacggttacccgcaacagcaagctcatggtaaaccgcagaaaccgaagaagcatggtaaggctggagctgggatgggactaggacttgggcttggagctggtttattgggtgggttgttggttggtgaagcggtttctgacatcgctgatatgggtgacatgggtgacatgggtggtttcgatttctgattgctgtgttatcaagttttaatttcttaggataattgctctaatgtttttcgtttgatgaatcatgtgaagaacgtgagagatcaagttttatcttgtgtttatgtctccggttacttattttcttctaatgaatgtaacattatgatatttcc

SEQ ID NO: 26868 - protein, 321 aa, Arabidopsis thaliana
  peptide (1)..(321): Ceres Seq. ID no. 12394999
  misc_feature (6)..(95): Pfam Name: C2 domain Pfam Description: C2 domain
  misc_feature (1)..(321): Homolog of NCBI NO: 18390977 NR Description: expressed protein
  misc_feature (1)..(321): Homolog of NCBI NO: 11358845 NR Description: shock protein SRC2 homolog [imported] -
MECRSLDLTIISAEDLKDVQLIGKQDLYAVVSINGDARTKQKTKVDKDCGTKPKWKHQMKLTVDDASARDNRLTLVFEIVADRPIAGDKPVGEVSVPLKELLDQNKGDEEKTVTYAVRLPNGKAKGSLKFSFKFGEKYTYGSSSGPHAPVPSAMDHKTMDQPVTAYPPGHGAPSAYPAPPAGPSSGYPPQGHDDKHGGVYGYPQQAGYPAGTGGYPPPGAYPQQGGYPVYPPQQQGGYPGYPPQGPYGYPQQGYPPQGPYGYPQQQAHGKPQKPKKHGKAGAGMGLGLGLGAGLLGGLLVGEAVSDIADMGDMGDMGGFDF

SEQ ID NO: 26869 - protein, 263 aa, Arabidopsis thaliana
  peptide (1)..(263): Ceres Seq. ID no. 12395000
  misc_feature (88)..(231): Pfam Name: High molecular weight glutenin subunit Pfam Description: High molecular weight glutenin subunit
  misc_feature (1)..(263): Homolog of NCBI NO: 18390977 NR Description: expressed protein
  misc_feature (1)..(263): Homolog of NCBI NO: 11358845 NR Description: shock protein SRC2 homolog [imported] -
MKLTVDDASARDNRLTLVFEIVADRPIAGDKPVGEVSVPLKELLDQNKGDEEKTVTYAVRLPNGKAKGSLKFSFKFGEKYTYGSSSGPHAPVPSAMDHKTMDQPVTAYPPGHGAPSAYPAPPAGPSSGYPPQGHDDKHGGVYGYPQQAGYPAGTGGYPPPGAYPQQGGYPVYPPQQQGGYPGYPPQGPYGYPQQGYPPQGPYGYPQQQAHGKPQKPKKHGKAGAGMGLGLGLGAGLLGGLLVGEAVSDIADMGDMGDMGGFDF

SEQ ID NO: 26870 - protein, 168 aa, Arabidopsis thaliana
  peptide (1)..(168): Ceres Seq. ID no. 12395001
  misc_feature (1)..(136): Pfam Name: High molecular weight glutenin subunit Pfam Description: High molecular weight glutenin subunit
  misc_feature (1)..(168): Homolog of NCBI NO: 18390977 NR Description: expressed protein
  misc_feature (1)..(168): Homolog of NCBI NO: 11358845 NR Description: shock protein SRC2 homolog [imported] -
MDHKTMDQPVTAYPPGHGAPSAYPAPPAGPSSGYPPQGHDDKHGGVYGYPQQAGYPAGTGGYPPPGAYPQQGGYPVYPPQQQGGYPGYPPQGPYGYPQQGYPPQGPYGYPQQQAHGKPQKPKKHGKAGAGMGLGLGLGAGLLGGLLVGEAVSDIADMGDMGDMGGFDF

SEQ ID NO: 26871 - DNA, 907 bp, Arabidopsis thaliana
  misc_feature (1)..(907): Ceres Seq. ID no. 12421693
  misc_feature: MA Experiment ID: 108608 Result: Up-regulated in Transcription
  misc_feature: MA Experiment 108608 PARAMETER Experiment Name: At_100uM_ABA_cDNA_P Parameter: Timepoint (hr) Value: 1
  misc_feature: MA Experiment 108608 PARAMETER Experiment Name: At_100uM_ABA_cDNA_P Parameter: Tissue Value: Aerial
  misc_feature: MA Experiment 108608 PARAMETER Experiment Name: At_100uM_ABA_cDNA_P Parameter: Treatment Value: 100uM ABA vs. No Treatment
  misc_feature: MA Experiment ID: 20000166 Result: Up-regulated in Transcription
  misc_feature: MA Experiment 20000166 PARAMETER Experiment Name: At_100uM_ABA_P Parameter: Age (day) Value: 14
  misc_feature: MA Experiment 20000166 PARAMETER Experiment Name: At_100uM_ABA_P Parameter: Organism Value: A. thaliana
  misc_feature: MA Experiment 20000166 PARAMETER Experiment Name: At_100uM_ABA_P Parameter: Plant Line Value: WS
  misc_feature: MA Experiment 20000166 PARAMETER Experiment Name: At_100uM_ABA_P Parameter: Timepoint (hr) Value: 1
  misc_feature: MA Experiment 20000166 PARAMETER Experiment Name: At_100uM_ABA_P Parameter: Tissue Value: Aerial
  misc_feature: MA Experiment 20000166 PARAMETER Experiment Name: At_100uM_ABA_P Parameter: Treatment Value: 100uM ABA vs. No Treatment
  misc_feature: MA Experiment ID: 20000179 Result: Up-regulated in Transcription
  misc_feature: MA Experiment 20000179 PARAMETER Experiment Name: At_Germinating_Seeds_P Parameter: Age (hr) Value: 6 vs. 0
  misc_feature: MA Experiment 20000179 PARAMETER Experiment Name: At_Germinating_Seeds_P Parameter: Tissue Value: Germinating Seeds
  misc_feature: MA Experiment ID: 20000180 Result: Up-regulated in Transcription
  misc_feature: MA Experiment 20000180 PARAMETER Experiment Name: At_Germinating_Seeds_P Parameter: Age (hr) Value: 24 vs. 0
  misc_feature: MA Experiment 20000180 PARAMETER Experiment Name: At_Germinating_Seeds_P Parameter: Tissue Value: Germinating Seeds
  misc_feature: MA Experiment ID: 20000182 Result: Up-regulated in Transcription
  misc_feature: MA Experiment 20000182 PARAMETER Experiment Name: At_2mM_SA_P Parameter: Age (day) Value: 14
  misc_feature: MA Experiment 20000182 PARAMETER Experiment Name: At_2mM_SA_P Parameter: Organism Value: A. thaliana
  misc_feature: MA Experiment 20000182 PARAMETER Experiment Name: At_2mM_SA_P Parameter: Plant Line Value: WS
  misc_feature: MA Experiment 20000182 PARAMETER Experiment Name: At_2mM_SA_P Parameter: Timepoint (hr) Value: 6
  misc_feature: MA Experiment 20000182 PARAMETER Experiment Name: At_2mM_SA_P Parameter: Tissue Value: Aerial
  misc_feature: MA Experiment 20000182 PARAMETER Experiment Name: At_2mM_SA_P Parameter: Treatment Value: 2mM SA vs. No Treatment
  misc_feature: MA Experiment ID: 20000227 Result: Down-regulated in Transcription
  misc_feature: MA Experiment 20000227 PARAMETER Experiment Name: At_Root-Tips-vs-Tops_P Parameter: Tissue Value: Root Tips vs. Root Tops
  misc_feature: MA Experiment ID: 20000234 Result: Down-regulated in Transcription
  misc_feature: MA Experiment 20000234 PARAMETER Experiment Name: At_Siliques_P Parameter: Age (day) Value: 21
  misc_feature: MA Experiment 20000234 PARAMETER Experiment Name: At_Siliques_P Parameter: Organism Value: A. thaliana
  misc_feature: MA Experiment 20000234 PARAMETER Experiment Name: At_Siliques_P Parameter: Plant Line Value: WS
  misc_feature: MA Experiment 20000234 PARAMETER Experiment Name: At_Siliques_P Parameter: Tissue Value: Less Than 5mm Siliques vs. Whole Plant
  misc_feature: MA Experiment ID: 20000235 Result: Down-regulated in Transcription
  misc_feature: MA Experiment 20000235 PARAMETER Experiment Name: At_Siliques_P Parameter: Age (day) Value: 21
  misc_feature: MA Experiment 20000235 PARAMETER Experiment Name: At_Siliques_P Parameter: Organism Value: A. thaliana
  misc_feature: MA Experiment 20000235 PARAMETER Experiment Name: At_Siliques_P Parameter: Plant Line Value: WS
  misc_feature: MA Experiment 20000235 PARAMETER Experiment Name: At_Siliques_P Parameter: Tissue Value: 5-10mm Siliques vs. Whole Plant
  misc_feature: MA Experiment ID: 20000264 Result: Down-regulated in Transcription
  misc_feature: MA Experiment 20000264 PARAMETER Experiment Name: At_Open_Flower_P Parameter: Age (day) Value: 21
  misc_feature: MA Experiment 20000264 PARAMETER Experiment Name: At_Open_Flower_P Parameter: Plant Line Value: WS
  misc_feature: MA Experiment 20000264 PARAMETER Experiment Name: At_Open_Flower_P Parameter: Tissue Value: Open Flower vs. Whole Plant
  misc_feature: MA Experiment ID: 20000265 Result: Down-regulated in Transcription
  misc_feature: MA Experiment 20000265 PARAMETER Experiment Name: At_Open_Flower_P Parameter: Age (day) Value: 21
  misc_feature: MA Experiment 20000265 PARAMETER Experiment Name: At_Open_Flower_P Parameter: Plant Line Value: WS
  misc_feature: MA Experiment 20000265 PARAMETER Experiment Name: At_Open_Flower_P Parameter: Tissue Value: Closed Flower vs. Whole Plant
  misc_feature: MA Experiment ID: 20000268 Result: Down-regulated in Transcription
  misc_feature: MA Experiment 20000268 PARAMETER Experiment Name: At_100mM_NaCl__P Parameter: Age (day) Value: 14
  misc_feature: MA Experiment 20000268 PARAMETER Experiment Name: At_100mM_NaCl__P Parameter: Organism Value: A. thaliana
  misc_feature: MA Experiment 20000268 PARAMETER Experiment Name: At_100mM_NaCl__P Parameter: Plant Line Value: WS
  misc_feature: MA Experiment 20000268 PARAMETER Experiment Name: At_100mM_NaCl__P Parameter: Timepoint (hr) Value: 6
  misc_feature: MA Experiment 20000268 PARAMETER Experiment Name: At_100mM_NaCl__P Parameter: Tissue Value: Whole Plant
  misc_feature: MA Experiment 20000268 PARAMETER Experiment Name: At_100mM_NaCl__P Parameter: Treatment Value: 100mM NaCl vs. No Treatment
  misc_feature: MA Experiment ID: 20000286 Result: Down-regulated in Transcription
  misc_feature: MA Experiment 20000286 PARAMETER Experiment Name: At_Open_Flower_P Parameter: Age (day) Value: 21
  misc_feature: MA Experiment 20000286 PARAMETER Experiment Name: At_Open_Flower_P Parameter: Plant Line Value: WS
  misc_feature: MA Experiment 20000286 PARAMETER Experiment Name: At_Open_Flower_P Parameter: Tissue Value: Half Open vs. Whole Plant
  misc_feature: MA Experiment ID: 20000438 Result: Down-regulated in Transcription
  misc_feature: MA Experiment 20000438 PARAMETER Experiment Name: At_Shoots__P Parameter: Age (day) Value: 14
  misc_feature: MA Experiment 20000438 PARAMETER Experiment Name: At_Shoots__P Parameter: Tissue Value: Shoots vs. Whole Plant
  misc_feature: MA Experiment ID: 20000439 Result: Down-regulated in Transcription
  misc_feature: MA Experiment 20000439 PARAMETER Experiment Name: At_Roots__P Parameter: Age (day) Value: 14 vs. 21
  misc_feature: MA Experiment 20000439 PARAMETER Experiment Name: At_Roots__P Parameter: Organism Value: A. thaliana
  misc_feature: MA Experiment 20000439 PARAMETER Experiment Name: At_Roots__P Parameter: Tissue Value: Roots vs. Whole Plant
  misc_feature: MA Experiment ID: 20000441 Result: Up-regulated in Transcription
  misc_feature: MA Experiment 20000441 PARAMETER Experiment Name: At_1uM_BR-BRZ__P Parameter: Tissue Value: Shoot Apices
  misc_feature: MA Experiment 20000441 PARAMETER Experiment Name: At_1uM_BR-BRZ__P Parameter: Treatment Value: 1uM BR vs. No Treatment
  misc_feature: MA Experiment ID: 20000443 Result: Up-regulated in Transcription
  misc_feature: MA Experiment 20000443 PARAMETER Experiment Name: At_1uM_BR-BRZ__P Parameter: Tissue Value: Shoot Apices
  misc_feature: MA Experiment 20000443 PARAMETER Experiment Name: At_1uM_BR-BRZ__P Parameter: Treatment Value: 1uM BRZ vs. No Treatment
  misc_feature: MA Experiment ID: 20000496 Result: Up-regulated in Transcription
  misc_feature: MA Experiment 20000496 PARAMETER Experiment Name: At_Guard_Cells_P Parameter: Harvest Date Value: 7/19/2002
  misc_feature: MA Experiment 20000496 PARAMETER Experiment Name: At_Guard_Cells_P Parameter: Organism Value: Canola
  misc_feature: MA Experiment 20000496 PARAMETER Experiment Name: At_Guard_Cells_P Parameter: Tissue Value: Guard Cells vs. Leaves
  misc_feature: MA Experiment ID: 20000794 Result: Down-regulated in Transcription
  misc_feature: MA Experiment 20000794 PARAMETER Experiment Name: At_Petals_P Parameter: Age (day) Value: 23-25 days
  misc_feature: MA Experiment 20000794 PARAMETER Experiment Name: At_Petals_P Parameter: Plant Line Value: WS
  misc_feature: MA Experiment 20000794 PARAMETER Experiment Name: At_Petals_P Parameter: Tissue Value: Petals vs. Whole plant
  misc_feature: MA Experiment ID: 20001247 Result: Up-regulated in Transcription
  misc_feature: MA Experiment 20001247 PARAMETER Experiment Name: At_Far-red-induction_P Parameter: Age (day) Value: 7
  misc_feature: MA Experiment 20001247 PARAMETER Experiment Name: At_Far-red-induction_P Parameter: Light Value: Far-red vs. White
  misc_feature: MA Experiment 20001247 PARAMETER Experiment Name: At_Far-red-induction_P Parameter: Organism Value: A. thaliana
  misc_feature: MA Experiment 20001247 PARAMETER Experiment Name: At_Far-red-induction_P Parameter: Plant Line Value: Columbia
  misc_feature: MA Experiment 20001247 PARAMETER Experiment Name: At_Far-red-induction_P Parameter: Timepoint (hr) Value: 1
  misc_feature: MA Experiment 20001247 PARAMETER Experiment Name: At_Far-red-induction_P Parameter: Tissue Value: Whole Plant
  misc_feature: MA Experiment ID: 20001248 Result: Up-regulated in Transcription
  misc_feature: MA Experiment 20001248 PARAMETER Experiment Name: At_Far-red-induction_P Parameter: Age (day) Value: 7
  misc_feature: MA Experiment 20001248 PARAMETER Experiment Name: At_Far-red-induction_P Parameter: Light Value: Far-red vs. White
  misc_feature: MA Experiment 20001248 PARAMETER Experiment Name: At_Far-red-induction_P Parameter: Organism Value: A. thaliana
  misc_feature: MA Experiment 20001248 PARAMETER Experiment Name: At_Far-red-induction_P Parameter: Plant Line Value: Columbia
  misc_feature: MA Experiment 20001248 PARAMETER Experiment Name: At_Far-red-induction_P Parameter: Timepoint (hr) Value: 4
  misc_feature: MA Experiment 20001248 PARAMETER Experiment Name: At_Far-red-induction_P Parameter: Tissue Value: Whole Plant
  misc_feature: MA Experiment ID: 20001450 Result: Up-regulated in Transcription
  misc_feature: MA Experiment 20001450 PARAMETER Experiment Name: At_Far-red-induction_P Parameter: Age (day) Value: 7
  misc_feature: MA Experiment 20001450 PARAMETER Experiment Name: At_Far-red-induction_P Parameter: Light Value: Far-red vs. White
  misc_feature: MA Experiment 20001450 PARAMETER Experiment Name: At_Far-red-induction_P Parameter: Organism Value: A. thaliana
  misc_feature: MA Experiment 20001450 PARAMETER Experiment Name: At_Far-red-induction_P Parameter: Plant Line Value: Columbia
  misc_feature: MA Experiment 20001450 PARAMETER Experiment Name: At_Far-red-induction_P Parameter: Timepoint (hr) Value: 8
  misc_feature: MA Experiment 20001450 PARAMETER Experiment Name: At_Far-red-induction_P Parameter: Tissue Value: Whole Plant
  misc_feature: MA Experiment ID: 20001451 Result: Up-regulated in Transcription
  misc_feature: MA Experiment 20001451 PARAMETER Experiment Name: At_Far-red-induction_P Parameter: Age (day) Value: 7
  misc_feature: MA Experiment 20001451 PARAMETER Experiment Name: At_Far-red-induction_P Parameter: Light Value: Far-red vs. White
  misc_feature: MA Experiment 20001451 PARAMETER Experiment Name: At_Far-red-induction_P Parameter: Organism Value: A. thaliana
  misc_feature: MA Experiment 20001451 PARAMETER Experiment Name: At_Far-red-induction_P Parameter: Plant Line Value: Columbia
  misc_feature: MA Experiment 20001451 PARAMETER Experiment Name: At_Far-red-induction_P Parameter: Timepoint (hr) Value: 24
  misc_feature: MA Experiment 20001451 PARAMETER Experiment Name: At_Far-red-induction_P Parameter: Tissue Value: Whole Plant
  misc_feature: MA Experiment ID: 20001905 Result: Up-regulated in Transcription
  misc_feature: MA Experiment 20001905 PARAMETER Experiment Name: At_Drought_Reproduction_P Parameter: Age (day) Value: 40
  misc_feature: MA Experiment 20001905 PARAMETER Experiment Name: At_Drought_Reproduction_P Parameter: Organism Value: A. thaliana
  misc_feature: MA Experiment 20001905 PARAMETER Experiment Name: At_Drought_Reproduction_P Parameter: Plant Line Value: WS
  misc_feature: MA Experiment 20001905 PARAMETER Experiment Name: At_Drought_Reproduction_P Parameter: Timepoint (day) Value: 10
  misc_feature: MA Experiment 20001905 PARAMETER Experiment Name: At_Drought_Reproduction_P Parameter: Tissue Value: Rosettes
  misc_feature: MA Experiment 20001905 PARAMETER Experiment Name: At_Drought_Reproduction_P Parameter: Treatment Value: Drought vs. No Drought
aaaaatccctcaagaatcgcttcatcttcttcttcttcaacaaatcgagtcctttttctgataactcatttcgatttcagaaactcgccaagaactggatactctggcggaatcaaagattaagaaccgagacgtggttctgaaactgtatgaagccctgagatctcgcgacgtcaaatctgtgcaccagatcttaaccccagatctggagtattggttccacggtcctccgccgcaccagtttttgatgcgcgtactcaccggaggtgtctctccgtcttcttcctccttcgaattcgtacctctctccgtcgtttccttcggatctaccgtaatcgcggaaggctgcgacgccgcgacatcgatttcttggatccacgcttggactgtagcgaatgggataatcacacaggtgagggagtactctaacacttctctcaccgtcacacggatcggtaacgttgttgctggacgacgctccgctgagattgcgcctccgtcgcattgttcctccgtgtgggaaagccaattctcgggtcgggctggtaaacccgtacccggtttggttctggcgatttgaaagagtttggtaaagtaagtaacagccacgtcaggagaataactaaataaaggctgcttacgtgtctgtgtgtggttggtttgtttgttgtatgggttaaaaaggattttgttgctgttttaaacgcggtgtgggcttctggggctacggtcgcgtttggctgtcgctagtttttttttttttttaaagttgtttgtctgaaaattcgtgtgggtttgtgttttttagtgggagcaagtatggggaaacccaaatcgacttgttgtcccgttgcgtttgatgtaacgtttgcttatgttataattgaaataaaaaagtgcttttggg

SEQ ID NO: 26872 - protein, 110 aa, Arabidopsis thaliana
  peptide (1)..(110): Ceres Seq. ID no. 12421694
  misc_feature (1)..(110): Homolog of NCBI NO: 33146884 NR Description: unknown protein [Oryza sativa (japonica
  misc_feature (1)..(110): Homolog of NCBI NO: 15241041 NR Description: putative protein
  misc_feature (1)..(110): Homolog of NCBI NO: 139780 NR Description: WOUND-INDUCED PROTEIN 1
  misc_feature (1)..(110): Homolog of NCBI NO: 10241935 NR Description: elicitor inducible protein [Nicotiana tabacum]
  misc_feature (1)..(110): Homolog of NCBI NO: 34898184 NR Description: P0034A04.2 [Oryza sativa (japonica
  misc_feature (1)..(110): Homolog of NCBI NO: 4574320 NR Description: wound-induced protein WI12 [Mesembryanthemum
  misc_feature (1)..(110): Homolog of NCBI NO: 15028339 NR Description: unknown protein [Arabidopsis thaliana]
  misc_feature (1)..(110): Homolog of NCBI NO: 15228414 NR Description: unknown protein; protein id: At3g10980.1
MRVLTGGVSPSSSSFEFVPLSVVSFGSTVIAEGCDAATSISWIHAWTVANGIITQVREYSNTSLTVTRIGNVVAGRRSAEIAPPSHCSSVWESQFSGRAGKPVPGLVLAI

SEQ ID NO: 26873 - DNA, 992 bp, Arabidopsis thaliana
  misc_feature (1)..(992): Ceres Seq. ID no. 12439671
  misc_feature: MA Experiment ID: 20000794 Result: Down-regulated in Transcription
  misc_feature: MA Experiment 20000794 PARAMETER Experiment Name: At_Petals_P Parameter: Age (day) Value: 23-25 days
  misc_feature: MA Experiment 20000794 PARAMETER Experiment Name: At_Petals_P Parameter: Plant Line Value: WS
  misc_feature: MA Experiment 20000794 PARAMETER Experiment Name: At_Petals_P Parameter: Tissue Value: Petals vs. Whole plant
  misc_feature: MA Experiment ID: 20001451 Result: Down-regulated in Transcription
  misc_feature: MA Experiment 20001451 PARAMETER Experiment Name: At_Far-red-induction_P Parameter: Age (day) Value: 7
  misc_feature: MA Experiment 20001451 PARAMETER Experiment Name: At_Far-red-induction_P Parameter: Light Value: Far-red vs. White
  misc_feature: MA Experiment 20001451 PARAMETER Experiment Name: At_Far-red-induction_P Parameter: Organism Value: A. thaliana
  misc_feature: MA Experiment 20001451 PARAMETER Experiment Name: At_Far-red-induction_P Parameter: Plant Line Value: Columbia
  misc_feature: MA Experiment 20001451 PARAMETER Experiment Name: At_Far-red-induction_P Parameter: Timepoint (hr) Value: 24
  misc_feature: MA Experiment 20001451 PARAMETER Experiment Name: At_Far-red-induction_P Parameter: Tissue Value: Whole Plant
  misc_feature: MA Experiment ID: 20001557 Result: Up-regulated in Transcription
  misc_feature: MA Experiment 20001557 PARAMETER Experiment Name: At_Drought_Soil_Dry_P Parameter: Age (day) Value: 27
  misc_feature: MA Experiment 20001557 PARAMETER Experiment Name: At_Drought_Soil_Dry_P Parameter: Organism Value: A. thaliana
  misc_feature: MA Experiment 20001557 PARAMETER Experiment Name: At_Drought_Soil_Dry_P Parameter: Plant Line Value: WS
  misc_feature: MA Experiment 20001557 PARAMETER Experiment Name: At_Drought_Soil_Dry_P Parameter: Post Timepoint (hr) Value: 3
  misc_feature: MA Experiment 20001557 PARAMETER Experiment Name: At_Drought_Soil_Dry_P Parameter: Post-Treatment Value: Re-Water vs. No Drought
  misc_feature: MA Experiment 20001557 PARAMETER Experiment Name: At_Drought_Soil_Dry_P Parameter: Timepoint (day) Value: 13
  misc_feature: MA Experiment 20001557 PARAMETER Experiment Name: At_Drought_Soil_Dry_P Parameter: Treatment Value: Drought vs. No Drought
  misc_feature: MA Experiment ID: 20001560 Result: Up-regulated in Transcription
  misc_feature: MA Experiment 20001560 PARAMETER Experiment Name: At_Drought_Soil_Dry_P Parameter: Age (day) Value: 28
  misc_feature: MA Experiment 20001560 PARAMETER Experiment Name: At_Drought_Soil_Dry_P Parameter: Organism Value: A. thaliana
  misc_feature: MA Experiment 20001560 PARAMETER Experiment Name: At_Drought_Soil_Dry_P Parameter: Plant Line Value: WS
  misc_feature: MA Experiment 20001560 PARAMETER Experiment Name: At_Drought_Soil_Dry_P Parameter: Post Timepoint (hr) Value: None
  misc_feature: MA Experiment 20001560 PARAMETER Experiment Name: At_Drought_Soil_Dry_P Parameter: Post-Treatment Value: None
  misc_feature: MA Experiment 20001560 PARAMETER Experiment Name: At_Drought_Soil_Dry_P Parameter: Timepoint (day) Value: 14
  misc_feature: MA Experiment 20001560 PARAMETER Experiment Name: At_Drought_Soil_Dry_P Parameter: Treatment Value: Drought vs. No Drought
  misc_feature: MA Experiment ID: 20001757 Result: Up-regulated in Transcription
  misc_feature: MA Experiment 20001757 PARAMETER Experiment Name: At_50mM_NH4NO3_L-to-H_P Parameter: Timepoint (hr) Value: 6
  misc_feature: MA Experiment 20001757 PARAMETER Experiment Name: At_50mM_NH4NO3_L-to-H_P Parameter: Tissue Value: Leaf
  misc_feature: MA Experiment 20001757 PARAMETER Experiment Name: At_50mM_NH4NO3_L-to-H_P Parameter: Treatment Value: 50mM NH4NO3 vs 100mM Mannitol
catctttacgatatcgccaatgttaaaggagttgctgctgatctaagtcattgtaacactccttctcaagttcgtgatttcactggtccttctgagttagctgattgtttgaaagatgttaacgttgttgtcatccctgctggtgtgccgaggaaacccggtatgactcgtgacgatcttttcaacatcaatgccaatattgtcaagactcttgttgaagctgttgctgagaattgccctaatgctttcattcatattattagtaacccggttaactctacggtacctattgctgctgaagtgttgaagaagaaaggtgtttatgatcctaagaagctgtttggtgtcactactttggatgttgtgagggctaacacttttgtttctcagaagaagaatcttaagcttattgatgttgatgttccggttattggtggacatgctggaatcaccattttgcctctcctctcgaagacaaaaccgtctgttaactttactgatgaagagatccaagagctcactgttaggattcagaacgctggtactgaggttgttgatgctaaggcaggtgcaggttcagctactttgtcaatggcttatgctgctgctagatttgtggagtcatctcttcgtgctcttgatggagacggagatgtctacgagtgctcgtttgtggagtcgactctgactgatcttcctttctttgcatcacgggttaagatagggaagaacggtcttgaagctgtgattgagtcagaccttcagggattgactgagtatgagcagaaagcactagaagctcttaaggtagaattgaaagctagcattgacaagggtgtcgcatttgcaaacaaaccagctgctgcagcagctaactagatcgcaagctgataacatttttcttctgatcatttcgagttttgttttatttttcatatttgttgcatcggcgagacattttcgtgttgtagaataaagaatgtatttgctcc

SEQ ID NO: 26874 - protein, 292 aa, Arabidopsis thaliana
  peptide (1)..(292): Ceres Seq. ID no. 12439672
  misc_feature (117)..(283): Pfam Name: lactate/malate dehydrogenase, alpha/beta Pfam Description: lactate/malate dehydrogenase, alpha/beta
  misc_feature (1)..(289): Homolog of NCBI NO: 5123836 NR Description: NAD-malate dehydrogenase [Nicotiana tabacum]
  misc_feature (1)..(292): Homolog of NCBI NO: 25283601 NR Description: malate dehydrogenase (EC 1.1.1.37), chloroplast
  misc_feature (1)..(292): Homolog of NCBI NO: 15232820 NR Description: chloroplast NAD-dependent malate dehydrogenase
HLYDIANVKGVAADLSHCNTPSQVRDFTGPSELADCLKDVNVVVIPAGVPRKPGMTRDDLFNINANIVKTLVEAVAENCPNAFIHIISNPVNSTVPIAAEVLKKKGVYDPKKLFGVTTLDVVRANTFVSQKKNLKLIDVDVPVIGGHAGITILPLLSKTKPSVNFTDEEIQELTVRIQNAGTEVVDAKAGAGSATLSMAYAAARFVESSLRALDGDGDVYECSFVESTLTDLPFFASRVKIGKNGLEAVIESDLQGLTEYEQKALEALKVELKASIDKGVAFANKPAAAAAN

SEQ ID NO: 26875 - protein, 238 aa, Arabidopsis thaliana; identical to SEQ ID NO: 22022
  peptide (1)..(238): Ceres Seq. ID no. 12439673
  misc_feature (63)..(229): Pfam Name: lactate/malate dehydrogenase, alpha/beta Pfam Description: lactate/malate dehydrogenase, alpha/beta
  misc_feature (1)..(235): Homolog of NCBI NO: 5123836 NR Description: NAD-malate dehydrogenase [Nicotiana tabacum]
  misc_feature (1)..(238): Homolog of NCBI NO: 25283601 NR Description: malate dehydrogenase (EC 1.1.1.37), chloroplast
  misc_feature (1)..(238): Homolog of NCBI NO: 15232820 NR Description: chloroplast NAD-dependent malate dehydrogenase

SEQ ID NO: 26876 - DNA, 1483 bp, Arabidopsis thaliana
  misc_feature (1)..(1483): Ceres Seq. ID no. 13487740
  misc_feature: MA Experiment ID: 108434 Result: Up-regulated in Transcription
  misc_feature: MA Experiment 108434 PARAMETER Experiment Name: At_Root_Tips_cDNA_P Parameter: Tissue Value: Root Tips
  misc_feature: MA Experiment ID: 108435 Result: Up-regulated in Transcription
  misc_feature: MA Experiment 108435 PARAMETER Experiment Name: At_stm_Mutants_cDNA_P Parameter: Plant Line Value: wt Landsburg vs stm
  misc_feature: MA Experiment 108435 PARAMETER Experiment Name: At_stm_Mutants_cDNA_P Parameter: Tissue Value: Shoot Apical Meristem Region
  misc_feature: MA Experiment ID: 108462 Result: Down-regulated in Transcription
  misc_feature: MA Experiment 108462 PARAMETER Experiment Name: At_Germinating_Seeds_cDNA_P Parameter: Age (day) Value: 2 vs. 0
  misc_feature: MA Experiment 108462 PARAMETER Experiment Name: At_Germinating_Seeds_cDNA_P Parameter: Tissue Value: Germinating Seeds
  misc_feature: MA Experiment ID: 108463 Result: Down-regulated in Transcription
  misc_feature: MA Experiment 108463 PARAMETER Experiment Name: At_Germinating_Seeds_cDNA_P Parameter: Age (day) Value: 3 vs. 0
  misc_feature: MA Experiment 108463 PARAMETER Experiment Name: At_Germinating_Seeds_cDNA_P Parameter: Tissue Value: Germinating Seeds
  misc_feature: MA Experiment ID: 108464 Result: Down-regulated in Transcription
  misc_feature: MA Experiment 108464 PARAMETER Experiment Name: At_Germinating_Seeds_cDNA_P Parameter: Age (day) Value: 4 vs. 0
  misc_feature: MA Experiment 108464 PARAMETER Experiment Name: At_Germinating_Seeds_cDNA_P Parameter: Tissue Value: Germinating Seeds
  misc_feature: MA Experiment ID: 108469 Result: Up-regulated in Transcription
  misc_feature: MA Experiment ID: 108576 Result: Up-regulated in Transcription
  misc_feature: MA Experiment 108576 PARAMETER Experiment Name: At_42deg_Heat_cDNA_P Parameter: Temperature (deg C) Value: 42 vs. 22
  misc_feature: MA Experiment 108576 PARAMETER Experiment Name: At_42deg_Heat_cDNA_P Parameter: Timepoint (hr) Value: 1
  misc_feature: MA Experiment 108576 PARAMETER Experiment Name: At_42deg_Heat_cDNA_P Parameter: Tissue Value: Aerial
  misc_feature: MA Experiment ID: 108577 Result: Up-regulated in Transcription
  misc_feature: MA Experiment 108577 PARAMETER Experiment Name: At_42deg_Heat_cDNA_P Parameter: Temperature (deg C) Value: 42 vs. 22
  misc_feature: MA Experiment 108577 PARAMETER Experiment Name: At_42deg_Heat_cDNA_P Parameter: Timepoint (hr) Value: 6
  misc_feature: MA Experiment 108577 PARAMETER Experiment Name: At_42deg_Heat_cDNA_P Parameter: Tissue Value: Aerial
  misc_feature: MA Experiment ID: 108585 Result: Up-regulated in Transcription
  misc_feature: MA Experiment 108585 PARAMETER Experiment Name: At_5mM_NaNP_cDNA_P Parameter: Timepoint (hr) Value: 6
  misc_feature: MA Experiment 108585 PARAMETER Experiment Name: At_5mM_NaNP_cDNA_P Parameter: Tissue Value: Aerial
  misc_feature: MA Experiment 108585 PARAMETER Experiment Name: At_5mM_NaNP_cDNA_P Parameter: Treatment Value: null
  misc_feature: MA Experiment ID: 108668 Result: Up-regulated in Transcription
  misc_feature: MA Experiment 108668 PARAMETER Experiment Name: At_2mM_SA_cDNA_P Parameter: Plant Line Value: WS
  misc_feature: MA Experiment 108668 PARAMETER Experiment Name: At_2mM_SA_cDNA_P Parameter: Timepoint (hr) Value: 6
  misc_feature: MA Experiment 108668 PARAMETER Experiment Name: At_2mM_SA_cDNA_P Parameter: Treatment Value: 2mM SA vs. No Treatment
  misc_feature: MA Experiment ID: 20000093 Result: Up-regulated in Transcription
  misc_feature: MA Experiment 20000093 PARAMETER Experiment Name: At_42deg_Heat_cDNA_P Parameter: Temperature (deg C) Value: 42 vs. 22
  misc_feature: MA Experiment 20000093 PARAMETER Experiment Name: At_42deg_Heat_cDNA_P Parameter: Timepoint (hr) Value: 0.5
  misc_feature: MA Experiment 20000093 PARAMETER Experiment Name: At_42deg_Heat_cDNA_P Parameter: Tissue Value: Aerial
  misc_feature: MA Experiment ID: 20000111 Result: Up-regulated in Transcription
  misc_feature: MA Experiment 20000111 PARAMETER Experiment Name: At_42deg_Heat_cDNA_P Parameter: Temperature (deg C) Value: 42 vs. 22
  misc_feature: MA Experiment 20000111 PARAMETER Experiment Name: At_42deg_Heat_cDNA_P Parameter: Timepoint (hr) Value: 6
  misc_feature: MA Experiment 20000111 PARAMETER Experiment Name: At_42deg_Heat_cDNA_P Parameter: Tissue Value: Aerial
  misc_feature: MA Experiment ID: 20000112 Result: Up-regulated in Transcription
  misc_feature: MA Experiment 20000112 PARAMETER Experiment Name: At_42deg_Heat_cDNA_P Parameter: Temperature (deg C) Value: 42 vs. 22
  misc_feature: MA Experiment 20000112 PARAMETER Experiment Name: At_42deg_Heat_cDNA_P Parameter: Timepoint (hr) Value: 2
  misc_feature: MA Experiment 20000112 PARAMETER Experiment Name: At_42deg_Heat_cDNA_P Parameter: Tissue Value: Aerial
  misc_feature: MA Experiment ID: 20000113 Result: Up-regulated in Transcription
  misc_feature: MA Experiment 20000113 PARAMETER Experiment Name: At_42deg_Heat_cDNA_P Parameter: Temperature (deg C) Value: 42 vs. 22
  misc_feature: MA Experiment 20000113 PARAMETER Experiment Name: At_42deg_Heat_cDNA_P Parameter: Timepoint (hr) Value: 8
  misc_feature: MA Experiment 20000113 PARAMETER Experiment Name: At_42deg_Heat_cDNA_P Parameter: Tissue Value: Aerial
  misc_feature: MA Experiment ID: 20000144 Result: Up-regulated in Transcription
  misc_feature: MA Experiment 20000144 PARAMETER Experiment Name: At_42deg_Heat_cDNA_P Parameter: Temperature (deg C) Value: 42 vs. 22
  misc_feature: MA Experiment 20000144 PARAMETER Experiment Name: At_42deg_Heat_cDNA_P Parameter: Timepoint (hr) Value: 1
  misc_feature: MA Experiment 20000144 PARAMETER Experiment Name: At_42deg_Heat_cDNA_P Parameter: Tissue Value: Aerial
  misc_feature: MA Experiment ID: 20000171 Result: Up-regulated in Transcription
  misc_feature: MA Experiment 20000171 PARAMETER Experiment Name: At_42deg_Heat_P Parameter: Age (day) Value: 14
  misc_feature: MA Experiment 20000171 PARAMETER Experiment Name: At_42deg_Heat_P Parameter: Organism Value: A. thaliana
  misc_feature: MA Experiment 20000171 PARAMETER Experiment Name: At_42deg_Heat_P Parameter: Plant Line Value: WS
  misc_feature: MA Experiment 20000171 PARAMETER Experiment Name: At_42deg_Heat_P Parameter: Temperature (deg C) Value: 42 vs. 22
  misc_feature: MA Experiment 20000171 PARAMETER Experiment Name: At_42deg_Heat_P Parameter: Timepoint (hr) Value: 1
  misc_feature: MA Experiment 20000171 PARAMETER Experiment Name: At_42deg_Heat_P Parameter: Tissue Value: Aerial
  misc_feature: MA Experiment ID: 20000173 Result: Up-regulated in Transcription
  misc_feature: MA Experiment 20000173 PARAMETER Experiment Name: At_42deg_Heat_P Parameter: Age (day) Value: 14
  misc_feature: MA Experiment 20000173 PARAMETER Experiment Name: At_42deg_Heat_P Parameter: Organism Value: A. thaliana
  misc_feature: MA Experiment 20000173 PARAMETER Experiment Name: At_42deg_Heat_P Parameter: Plant Line Value: WS
  misc_feature: MA Experiment 20000173 PARAMETER Experiment Name: At_42deg_Heat_P Parameter: Temperature (deg C) Value: 42 vs. 22
  misc_feature: MA Experiment 20000173 PARAMETER Experiment Name: At_42deg_Heat_P Parameter: Timepoint (hr) Value: 6
  misc_feature: MA Experiment 20000173 PARAMETER Experiment Name: At_42deg_Heat_P Parameter: Tissue Value: Aerial
  misc_feature: MA Experiment ID: 20000182 Result: Up-regulated in Transcription
  misc_feature: MA Experiment 20000182 PARAMETER Experiment Name: At_2mM_SA_P Parameter: Age (day) Value: 14
  misc_feature: MA Experiment 20000182 PARAMETER Experiment Name: At_2mM_SA_P Parameter: Organism Value: A. thaliana
  misc_feature: MA Experiment 20000182 PARAMETER Experiment Name: At_2mM_SA_P Parameter: Plant Line Value: WS
  misc_feature: MA Experiment 20000182 PARAMETER Experiment Name: At_2mM_SA_P Parameter: Timepoint (hr) Value: 6
  misc_feature: MA Experiment 20000182 PARAMETER Experiment Name: At_2mM_SA_P Parameter: Tissue Value: Aerial
  misc_feature: MA Experiment 20000182 PARAMETER Experiment Name: At_2mM_SA_P Parameter: Treatment Value: 2mM SA vs. No Treatment
  misc_feature: MA Experiment ID: 20000443 Result: Up-regulated in Transcription
  misc_feature: MA Experiment 20000443 PARAMETER Experiment Name: At_1uM_BR-BRZ__P Parameter: Tissue Value: Shoot Apices
  misc_feature: MA Experiment 20000443 PARAMETER Experiment Name: At_1uM_BR-BRZ__P Parameter: Treatment Value: 1uM BRZ vs. No Treatment
  misc_feature: MA Experiment ID: 20001248 Result: Down-regulated in Transcription
  misc_feature: MA Experiment 20001248 PARAMETER Experiment Name: At_Far-red-induction_P Parameter: Age (day) Value: 7
  misc_feature: MA Experiment 20001248 PARAMETER Experiment Name: At_Far-red-induction_P Parameter: Light Value: Far-red vs. White
  misc_feature: MA Experiment 20001248 PARAMETER Experiment Name: At_Far-red-induction_P Parameter: Organism Value: A. thaliana
  misc_feature: MA Experiment 20001248 PARAMETER Experiment Name: At_Far-red-induction_P Parameter: Plant Line Value: Columbia
  misc_feature: MA Experiment 20001248 PARAMETER Experiment Name: At_Far-red-induction_P Parameter: Timepoint (hr) Value: 4
  misc_feature: MA Experiment 20001248 PARAMETER Experiment Name: At_Far-red-induction_P Parameter: Tissue Value: Whole Plant
  misc_feature: MA Experiment ID: 20001450 Result: Down-regulated in Transcription
  misc_feature: MA Experiment 20001450 PARAMETER Experiment Name: At_Far-red-induction_P Parameter: Age (day) Value: 7
  misc_feature: MA Experiment 20001450 PARAMETER Experiment Name: At_Far-red-induction_P Parameter: Light Value: Far-red vs. White
  misc_feature: MA Experiment 20001450 PARAMETER Experiment Name: At_Far-red-induction_P Parameter: Organism Value: A. thaliana
  misc_feature: MA Experiment 20001450 PARAMETER Experiment Name: At_Far-red-induction_P Parameter: Plant Line Value: Columbia
  misc_feature: MA Experiment 20001450 PARAMETER Experiment Name: At_Far-red-induction_P Parameter: Timepoint (hr) Value: 8
  misc_feature: MA Experiment 20001450 PARAMETER Experiment Name: At_Far-red-induction_P Parameter: Tissue Value: Whole Plant
  misc_feature: MA Experiment ID: 20001557 Result: Up-regulated in Transcription
  misc_feature: MA Experiment 20001557 PARAMETER Experiment Name: At_Drought_Soil_Dry_P Parameter: Age (day) Value: 27
  misc_feature: MA Experiment 20001557 PARAMETER Experiment Name: At_Drought_Soil_Dry_P Parameter: Organism Value: A. thaliana
  misc_feature: MA Experiment 20001557 PARAMETER Experiment Name: At_Drought_Soil_Dry_P Parameter: Plant Line Value: WS
  misc_feature: MA Experiment 20001557 PARAMETER Experiment Name: At_Drought_Soil_Dry_P Parameter: Post Timepoint (hr) Value: 3
  misc_feature: MA Experiment 20001557 PARAMETER Experiment Name: At_Drought_Soil_Dry_P Parameter: Post-Treatment Value: Re-Water vs. No Drought
  misc_feature: MA Experiment 20001557 PARAMETER Experiment Name: At_Drought_Soil_Dry_P Parameter: Timepoint (day) Value: 13
  misc_feature: MA Experiment 20001557 PARAMETER Experiment Name: At_Drought_Soil_Dry_P Parameter: Treatment Value: Drought vs. No Drought
acaacattctccttatccttctcctcgtgaagacttttctctctgtttattttttttagggttttcgtaagaacagagcaaaaaacatgtttggaagaggaccttcaaggaagagcgataacacaaagttctacgagatccttggtgttcctaagaccgcagcaccagaagatctcaagaaagcttataagaaagccgctatcaaaaaccatcctgataagggtggtgatcccgaaaagtttaaagagttagcacaggcttatgaagttttaagtgatcctgagaagcgtgagatctatgatcaatatggggaagatgcactcaaggaaggaatgggtggtggaggtggtggacacgatccatttgatatcttctcttccttctttggtagtggtggacacccattcggaagtcatagccggggaaggaggcagaggcgtggtgaagatgttgttcatcccttgaaggtttccttagaggatgtttatctcggaacaacaaagaagctctcactttctaggaaggctttgtgctcaaagtgtaacggcaagggttcaaagtctggagcttcaatgaaatgtggtggctgtcaaggttcgggaatgaagatctcgatcaggcagtttggacctggaatgatgcagcaggtgcagcatgcttgtaatgattgcaaaggcacaggagagaccatcaatgatcgggacaggtgtccacaatgcaaaggagagaaggttgtctctgagaagaaggtgcttgaagtaaatgtggagaagggaatgcaacacaatcagaagatcacattcagtggacaagccgatgaagcgcctgatactgtcaccggagatatagtgtttgtcattcagcagaaggagcacccaaagttcaaaagaaagggtgaggatctctttgtggagcacaccatctctctaaccgaggccttgtgtggcttccagtttgtcttgacccatttggacaaaagacagcttctcatcaaatccaagcccggagaggtcgtcaaacctgattcatacaaggcgataagtgatgagggaatgccaatataccaaaggccgttcatgaagggtaagctatacattcacttcacggttgaattcccggaatcgctgagcccggatcagacaaaggccattgaagcagttttgccaaagccaaccaaggcagctataagcgatatggaaatagacgactgcgaagagacgactctgcatgatgtgaacattgaggatgagatgaaaaggaaggcgcaagctcaaagagaggcttatgatgacgatgaggaagatcacccaggcggtgctcagcgtgtgcaatgtgcccagcagtgatcaacatgcgcatcttagtgatctccaatatttgcttctgtcttttctccttttcattgtattatttttgggtctttttatagactttgccaattcagtgggaagaacctcgtcctaattcaaatccttgttacacc

SEQ ID NO: 26877 - protein, 419 aa, Arabidopsis thaliana
  peptide (1)..(419): Ceres Seq. ID no. 13487741
  misc_feature (235)..(359): Pfam Name: DnaJ C terminal region Pfam Description: DnaJ C terminal region
  misc_feature (1)..(419): Homolog of NCBI NO: 15010708 NR Description: AT3g44110/F26G5_60 [Arabidopsis thaliana]
  misc_feature (1)..(419): Homolog of NCBI NO: 2129577 NR Description: dnaJ protein homolog atj3 - Arabidopsis thaliana
  misc_feature (1)..(419): Homolog of NCBI NO: 15229874 NR Description: DnaJ protein AtJ3 [Arabidopsis thaliana]
  misc_feature (1)..(419): Homolog of NCBI NO: 535588 NR Description: putative [Arabidopsis thaliana]
  misc_feature (1)..(419): Homolog of NCBI NO: 18420428 NR Description: DnaJ protein, putative [Arabidopsis thaliana]
MFGRGPSRKSDNTKFYEILGVPKTAAPEDLKKAYKKAAIKNHPDKGGDPEKFKELAQAYEVLSDPEKREIYDQYGEDALKEGMGGGGGGHDPFDIFSSFFGSGGHPFGSHSRGRRQRRGEDVVHPLKVSLEDVYLGTTKKLSLSRKALCSKCNGKGSKSGASMKCGGCQGSGMKISIRQFGPGMMQQVQHACNDCKGTGETINDRDRCPQCKGEKVVSEKKVLEVNVEKGMQHNQKITFSGQADEAPDTVTGDIVFVIQQKEHPKFKRKGEDLFVEHTISLTEALCGFQFVLTHLDKRQLLIKSKPGEVVKPDSYKAISDEGMPIYQRPFMKGKLYIHFTVEFPESLSPDQTKAIEAVLPKPTKAAISDMEIDDCEETTLHDVNIEDEMKRKAQAQREAYDDDEEDHPGGAQRVQCAQQ

SEQ ID NO: 26878 - protein, 337 aa, Arabidopsis thaliana
  peptide (1)..(337): Ceres Seq. ID no. 13487742
  misc_feature (153)..(277): Pfam Name: DnaJ C terminal region Pfam Description: DnaJ C terminal region
  misc_feature (1)..(337): Homolog of NCBI NO: 15010708 NR Description: AT3g44110/F26G5_60 [Arabidopsis thaliana]
  misc_feature (1)..(337): Homolog of NCBI NO: 2129577 NR Description: dnaJ protein homolog atj3 - Arabidopsis thaliana
  misc_feature (1)..(337): Homolog of NCBI NO: 15229874 NR Description: DnaJ protein AtJ3 [Arabidopsis thaliana]
  misc_feature (1)..(337): Homolog of NCBI NO: 535588 NR Description: putative [Arabidopsis thaliana]
  misc_feature (1)..(337): Homolog of NCBI NO: 18420428 NR Description: DnaJ protein, putative [Arabidopsis thaliana]
MGGGGGGHDPFDIFSSFFGSGGHPFGSHSRGRRQRRGEDVVHPLKVSLEDVYLGTTKKLSLSRKALCSKCNGKGSKSGASMKCGGCQGSGMKISIRQFGPGMMQQVQHACNDCKGTGETINDRDRCPQCKGEKVVSEKKVLEVNVEKGMQHNQKITFSGQADEAPDTVTGDIVFVIQQKEHPKFKRKGEDLFVEHTISLTEALCGFQFVLTHLDKRQLLIKSKPGEVVKPDSYKAISDEGMPIYQRPFMKGKLYIHFTVEFPESLSPDQTKAIEAVLPKPTKAAISDMEIDDCEETTLHDVNIEDEMKRKAQAQREAYDDDEEDHPGGAQRVQCAQQ

SEQ ID NO: 26879 - protein, 257 aa, Arabidopsis thaliana
  peptide (1)..(257): Ceres Seq. ID no. 13487743
  misc_feature (73)..(197): Pfam Name: DnaJ C terminal region Pfam Description: DnaJ C terminal region
  misc_feature (1)..(257): Homolog of NCBI NO: 15010708 NR Description: AT3g44110/F26G5_60 [Arabidopsis thaliana]
  misc_feature (1)..(257): Homolog of NCBI NO: 2129577 NR Description: dnaJ protein homolog atj3 - Arabidopsis thaliana
  misc_feature (1)..(257): Homolog of NCBI NO: 15229874 NR Description: DnaJ protein AtJ3 [Arabidopsis thaliana]
  misc_feature (1)..(257): Homolog of NCBI NO: 535588 NR Description: putative [Arabidopsis thaliana]
  misc_feature (1)..(257): Homolog of NCBI NO: 18420428 NR Description: DnaJ protein, putative [Arabidopsis thaliana]
MKCGGCQGSGMKISIRQFGPGMMQQVQHACNDCKGTGETINDRDRCPQCKGEKVVSEKKVLEVNVEKGMQHNQKITFSGQADEAPDTVTGDIVFVIQQKEHPKFKRKGEDLFVEHTISLTEALCGFQFVLTHLDKRQLLIKSKPGEVVKPDSYKAISDEGMPIYQRPFMKGKLYIHFTVEFPESLSPDQTKAIEAVLPKPTKAAISDMEIDDCEETTLHDVNIEDEMKRKAQAQREAYDDDEEDHPGGAQRVQCAQQ

SEQ ID NO: 26880 - DNA, 794 bp, Arabidopsis thaliana
  misc_feature (1)..(794): Ceres Seq. ID no. 13490180
  misc_feature: MA Experiment ID: 108434 Result: Down-regulated in Transcription
  misc_feature: MA Experiment 108434 PARAMETER Experiment Name: At_Root_Tips_cDNA_P Parameter: Tissue Value: Root Tips
  misc_feature: MA Experiment ID: 108464 Result: Up-regulated in Transcription
  misc_feature: MA Experiment 108464 PARAMETER Experiment Name: At_Germinating_Seeds_cDNA_P Parameter: Age (day) Value: 4 vs. 0
  misc_feature: MA Experiment 108464 PARAMETER Experiment Name: At_Germinating_Seeds_cDNA_P Parameter: Tissue Value: Germinating Seeds
  misc_feature: MA Experiment ID: 108561 Result: Up-regulated in Transcription
  misc_feature: MA Experiment 108561 PARAMETER Experiment Name: At_100uM_ABA_cDNA_P Parameter: Timepoint (hr) Value: 6
  misc_feature: MA Experiment 108561 PARAMETER Experiment Name: At_100uM_ABA_cDNA_P Parameter: Tissue Value: Aerial
  misc_feature: MA Experiment 108561 PARAMETER Experiment Name: At_100uM_ABA_cDNA_P Parameter: Treatment Value: 100uM ABA vs. No Treatment
  misc_feature: MA Experiment ID: 108594 Result: Down-regulated in Transcription
  misc_feature: MA Experiment 108594 PARAMETER Experiment Name: At_Ler-rhl_Root_cDNA_P Parameter: Plant Line Value: null
  misc_feature: MA Experiment ID: 108595 Result: Up-regulated in Transcription
  misc_feature: MA Experiment 108595 PARAMETER Experiment Name: At_Ler-pi_Ovule_cDNA_P Parameter: Plant Line Value: null
  misc_feature: MA Experiment ID: 108605 Result: Up-regulated in Transcription
  misc_feature: MA Experiment 108605 PARAMETER Experiment Name: At_100uM_ABA_cDNA_P Parameter: Timepoint (hr) Value: 6
  misc_feature: MA Experiment 108605 PARAMETER Experiment Name: At_100uM_ABA_cDNA_P Parameter: Tissue Value: Aerial
  misc_feature: MA Experiment 108605 PARAMETER Experiment Name: At_100uM_ABA_cDNA_P Parameter: Treatment Value: 100uM ABA vs. No Treatment
  misc_feature: MA Experiment ID: 108607 Result: Up-regulated in Transcription
  misc_feature: MA Experiment 108607 PARAMETER Experiment Name: At_100uM_ABA_cDNA_P Parameter: Timepoint (hr) Value: 4
  misc_feature: MA Experiment 108607 PARAMETER Experiment Name: At_100uM_ABA_cDNA_P Parameter: Tissue Value: Aerial
  misc_feature: MA Experiment 108607 PARAMETER Experiment Name: At_100uM_ABA_cDNA_P Parameter: Treatment Value: 100uM ABA vs. No Treatment
  misc_feature: MA Experiment ID: 108609 Result: Up-regulated in Transcription
  misc_feature: MA Experiment 108609 PARAMETER Experiment Name: At_100uM_ABA_cDNA_P Parameter: Timepoint (hr) Value: 24
  misc_feature: MA Experiment 108609 PARAMETER Experiment Name: At_100uM_ABA_cDNA_P Parameter: Tissue Value: Aerial
  misc_feature: MA Experiment 108609 PARAMETER Experiment Name: At_100uM_ABA_cDNA_P Parameter: Treatment Value: 100uM ABA vs. No Treatment
  misc_feature: MA Experiment ID: 108668 Result: Down-regulated in Transcription
  misc_feature: MA Experiment 108668 PARAMETER Experiment Name: At_2mM_SA_cDNA_P Parameter: Plant Line Value: WS
  misc_feature: MA Experiment 108668 PARAMETER Experiment Name: At_2mM_SA_cDNA_P Parameter: Timepoint (hr) Value: 6
  misc_feature: MA Experiment 108668 PARAMETER Experiment Name: At_2mM_SA_cDNA_P Parameter: Treatment Value: 2mM SA vs. No Treatment
  misc_feature: MA Experiment ID: 20000069 Result: Up-regulated in Transcription
  misc_feature: MA Experiment 20000069 PARAMETER Experiment Name: At_100uM_ABA_Mutants_cDNA_P Parameter: Plant Line Value: CS23
  misc_feature: MA Experiment 20000069 PARAMETER Experiment Name: At_100uM_ABA_Mutants_cDNA_P Parameter: Timepoint (hr) Value: 6
  misc_feature: MA Experiment 20000069 PARAMETER Experiment Name: At_100uM_ABA_Mutants_cDNA_P Parameter: Tissue Value: Aerial
  misc_feature: MA Experiment 20000069 PARAMETER Experiment Name: At_100uM_ABA_Mutants_cDNA_P Parameter: Treatment Value: 100uM ABA vs. No Treatment
  misc_feature: MA Experiment ID: 20000070 Result: Up-regulated in Transcription
  misc_feature: MA Experiment 20000070 PARAMETER Experiment Name: At_100uM_ABA_Mutants_cDNA_P Parameter: Plant Line Value: CS24
  misc_feature: MA Experiment 20000070 PARAMETER Experiment Name: At_100uM_ABA_Mutants_cDNA_P Parameter: Timepoint (hr) Value: 6
  misc_feature: MA Experiment 20000070 PARAMETER Experiment Name: At_100uM_ABA_Mutants_cDNA_P Parameter: Tissue Value: Aerial
  misc_feature: MA Experiment 20000070 PARAMETER Experiment Name: At_100uM_ABA_Mutants_cDNA_P Parameter: Treatment Value: 100uM ABA vs. No Treatment
  misc_feature: MA Experiment ID: 20000071 Result: Up-regulated in Transcription
  misc_feature: MA Experiment 20000071 PARAMETER Experiment Name: At_100uM_ABA_Mutants_cDNA_P Parameter: Plant Line Value: CS8104
  misc_feature: MA Experiment 20000071 PARAMETER Experiment Name: At_100uM_ABA_Mutants_cDNA_P Parameter: Timepoint (hr) Value: 6
  misc_feature: MA Experiment 20000071 PARAMETER Experiment Name: At_100uM_ABA_Mutants_cDNA_P Parameter: Tissue Value: Aerial
  misc_feature: MA Experiment 20000071 PARAMETER Experiment Name: At_100uM_ABA_Mutants_cDNA_P Parameter: Treatment Value: 100uM ABA vs. No Treatment
  misc_feature: MA Experiment ID: 20000086 Result: Up-regulated in Transcription
  misc_feature: MA Experiment 20000086 PARAMETER Experiment Name: At_100uM_ABA_Mutants_cDNA_P Parameter: Plant Line Value: CS22
  misc_feature: MA Experiment 20000086 PARAMETER Experiment Name: At_100uM_ABA_Mutants_cDNA_P Parameter: Timepoint (hr) Value: 6
  misc_feature: MA Experiment 20000086 PARAMETER Experiment Name: At_100uM_ABA_Mutants_cDNA_P Parameter: Tissue Value: Aerial
  misc_feature: MA Experiment 20000086 PARAMETER Experiment Name: At_100uM_ABA_Mutants_cDNA_P Parameter: Treatment Value: 100uM ABA vs. No Treatment
  misc_feature: MA Experiment ID: 20000087 Result: Up-regulated in Transcription
  misc_feature: MA Experiment 20000087 PARAMETER Experiment Name: At_100uM_ABA_Mutants_cDNA_P Parameter: Plant Line Value: WS
  misc_feature: MA Experiment 20000087 PARAMETER Experiment Name: At_100uM_ABA_Mutants_cDNA_P Parameter: Timepoint (hr) Value: 6
  misc_feature: MA Experiment 20000087 PARAMETER Experiment Name: At_100uM_ABA_Mutants_cDNA_P Parameter: Tissue Value: Aerial
  misc_feature: MA Experiment 20000087 PARAMETER Experiment Name: At_100uM_ABA_Mutants_cDNA_P Parameter: Treatment Value: 100uM ABA vs. No Treatment
  misc_feature: MA Experiment ID: 20000117 Result: Up-regulated in Transcription
  misc_feature: MA Experiment 20000117 PARAMETER Experiment Name: At_100uM_ABA_Mutants_cDNA_P Parameter: Plant Line Value: Columbia
  misc_feature: MA Experiment 20000117 PARAMETER Experiment Name: At_100uM_ABA_Mutants_cDNA_P Parameter: Timepoint (hr) Value: 6
  misc_feature: MA Experiment 20000117 PARAMETER Experiment Name: At_100uM_ABA_Mutants_cDNA_P Parameter: Tissue Value: Aerial
  misc_feature: MA Experiment 20000117 PARAMETER Experiment Name: At_100uM_ABA_Mutants_cDNA_P Parameter: Treatment Value: 100uM ABA vs. No Treatment
  misc_feature: MA Experiment ID: 20000169 Result: Up-regulated in Transcription
  misc_feature: MA Experiment 20000169 PARAMETER Experiment Name: At_100uM_ABA_P Parameter: Age (day) Value: 14
  misc_feature: MA Experiment 20000169 PARAMETER Experiment Name: At_100uM_ABA_P Parameter: Organism Value: A. thaliana
  misc_feature: MA Experiment 20000169 PARAMETER Experiment Name: At_100uM_ABA_P Parameter: Plant Line Value: WS
  misc_feature: MA Experiment 20000169 PARAMETER Experiment Name: At_100uM_ABA_P Parameter: Timepoint (hr) Value: 6
  misc_feature: MA Experiment 20000169 PARAMETER Experiment Name: At_100uM_ABA_P Parameter: Tissue Value: Aerial
  misc_feature: MA Experiment 20000169 PARAMETER Experiment Name: At_100uM_ABA_P Parameter: Treatment Value: 100uM ABA vs. No Treatment
  misc_feature: MA Experiment ID: 20000214 Result: Down-regulated in Transcription
  misc_feature: MA Experiment 20000214 PARAMETER Experiment Name: At_4deg_Cold_P Parameter: Timepoint (hr) Value: 6
  misc_feature: MA Experiment ID: 20000265 Result: Down-regulated in Transcription
  misc_feature: MA Experiment 20000265 PARAMETER Experiment Name: At_Open_Flower_P Parameter: Age (day) Value: 21
  misc_feature: MA Experiment 20000265 PARAMETER Experiment Name: At_Open_Flower_P Parameter: Plant Line Value: WS
  misc_feature: MA Experiment 20000265 PARAMETER Experiment Name: At_Open_Flower_P Parameter: Tissue Value: Closed Flower vs. Whole Plant
  misc_feature: MA Experiment ID: 20000439 Result: Down-regulated in Transcription
  misc_feature: MA Experiment 20000439 PARAMETER Experiment Name: At_Roots__P Parameter: Age (day) Value: 14 vs. 21
  misc_feature: MA Experiment 20000439 PARAMETER Experiment Name: At_Roots__P Parameter: Organism Value: A. thaliana
  misc_feature: MA Experiment 20000439 PARAMETER Experiment Name: At_Roots__P Parameter: Tissue Value: Roots vs. Whole Plant
  misc_feature: MA Experiment ID: 20000453 Result: Up-regulated in Transcription
  misc_feature: MA Experiment 20000453 PARAMETER Experiment Name: At_100uM_ABA_P Parameter: Age (day) Value: 15
  misc_feature: MA Experiment 20000453 PARAMETER Experiment Name: At_100uM_ABA_P Parameter: Organism Value: A. thaliana
  misc_feature: MA Experiment 20000453 PARAMETER Experiment Name: At_100uM_ABA_P Parameter: Plant Line Value: WS
  misc_feature: MA Experiment 20000453 PARAMETER Experiment Name: At_100uM_ABA_P Parameter: Timepoint (hr) Value: 24
  misc_feature: MA Experiment 20000453 PARAMETER Experiment Name: At_100uM_ABA_P Parameter: Tissue Value: Aerial
  misc_feature: MA Experiment 20000453 PARAMETER Experiment Name: At_100uM_ABA_P Parameter: Treatment Value: 100uM ABA vs. No Treatment
  misc_feature: MA Experiment ID: 20001248 Result: Up-regulated in Transcription
  misc_feature: MA Experiment 20001248 PARAMETER Experiment Name: At_Far-red-induction_P Parameter: Age (day) Value: 7
  misc_feature: MA Experiment 20001248 PARAMETER Experiment Name: At_Far-red-induction_P Parameter: Light Value: Far-red vs. White
  misc_feature: MA Experiment 20001248 PARAMETER Experiment Name: At_Far-red-induction_P Parameter: Organism Value: A. thaliana
  misc_feature: MA Experiment 20001248 PARAMETER Experiment Name: At_Far-red-induction_P Parameter: Plant Line Value: Columbia
  misc_feature: MA Experiment 20001248 PARAMETER Experiment Name: At_Far-red-induction_P Parameter: Timepoint (hr) Value: 4
  misc_feature: MA Experiment 20001248 PARAMETER Experiment Name: At_Far-red-induction_P Parameter: Tissue Value: Whole Plant
  misc_feature: MA Experiment ID: 20001910 Result: Up-regulated in Transcription
  misc_feature: MA Experiment 20001910 PARAMETER Experiment Name: At_Drought_Reproduction_P Parameter: Age (day) Value: 37
  misc_feature: MA Experiment 20001910 PARAMETER Experiment Name: At_Drought_Reproduction_P Parameter: Organism Value: A. thaliana
  misc_feature: MA Experiment 20001910 PARAMETER Experiment Name: At_Drought_Reproduction_P Parameter: Plant Line Value: WS
  misc_feature: MA Experiment 20001910 PARAMETER Experiment Name: At_Drought_Reproduction_P Parameter: Timepoint (day) Value: 7
  misc_feature: MA Experiment 20001910 PARAMETER Experiment Name: At_Drought_Reproduction_P Parameter: Tissue Value: Flowers
  misc_feature: MA Experiment 20001910 PARAMETER Experiment Name: At_Drought_Reproduction_P Parameter: Treatment Value: Drought vs. No Drought
actaccaacaacacttagagaacaagcagaggaatataactttttttttctttttcctttttgcttttttacaaccaaaaaaataaagcaagccgtagagagcaagagacggtgtaaagatgcactacacacgcatctcgccggctttagtaccatctctatcaccaaccgccgcggctgaatctagcggtggtgggacgatgatagctactgttttcatggcccttctcctcccctgcgtcggcatgtgcatcgtcttcctaatctatctattcctcttgtggtgctccacacggcgtcgtatcgaacgccttcgatttgctgaaccggttaaaccggtcacaggtaaaggcctttcggtgttggagctcgagaaaatccctaaactcaccggaagagagctagccgtaatagctagatcaacggaatgtgctgtttgccttgaagatatagagagtggtcaatcgactcgtctagttcccggttgcaaccatgggtttcaccaattatgtgctgatacgtggctatctaaccacacggtttgtccagtttgccgcgccgagctggctccgaacctacctcaatgtaatgaaaatcaaagtccatgttagaaacagaattttcaaaaacattctttccttcttttttactcgttttgtgtacttctcttgtttttcccttttcttagttttgtgtaagcgttatagagagagaagtttccaggttgtaactagccttgttgtttttttttgtacatgaaattagttttagagtaaattacgaaatttacagcc

SEQ ID NO: 26881 - protein, 163 aa, Arabidopsis thaliana
  peptide (1)..(163): Ceres Seq. ID no. 13490181
  misc_feature (104)..(145): Pfam Name: Zinc finger, C3HC4 type (RING finger) Pfam Description: Zinc finger, C3HC4 type (RING finger)
  misc_feature (2)..(146): Homolog of NCBI NO: 25405963 NR Description: protein F27J15.2 [imported] - Arabidopsis
  misc_feature (9)..(146): Homolog of NCBI NO: 7770352 NR Description: F27J15.3 [Arabidopsis thaliana]
  misc_feature (9)..(146): Homolog of NCBI NO: 15222069 NR Description: RING-H2 finger protein RHA3a -related
  misc_feature (20)..(147): Homolog of NCBI NO: 34903920 NR Description: OSJNBa0038J17.5 [Oryza sativa (japonica
  misc_feature (2)..(146): Homolog of NCBI NO: 15222071 NR Description: RING-H2 finger protein RHA3a -related
  misc_feature (10)..(158): Homolog of NCBI NO: 21555237 NR Description: putative RING zinc finger protein [Arabidopsis
  misc_feature (10)..(158): Homolog of NCBI NO: 15223041 NR Description: RING zinc finger protein -related [Arabidopsis
  misc_feature (10)..(158): Homolog of NCBI NO: 15218042 NR Description: RING zinc finger protein -related [Arabidopsis
  misc_feature (1)..(163): Homolog of NCBI NO: 21593762 NR Description: unknown [Arabidopsis thaliana]
  misc_feature (1)..(163): Homolog of NCBI NO: 15238323 NR Description: zinc finger (C3HC4-type RING finger) protein
MHYTRISPALVPSLSPTAAAESSGGGTMIATVFMALLLPCVGMCIVFLIYLFLLWCSTRRRIERLRFAEPVKPVTGKGLSVLELEKIPKLTGRELAVIARSTECAVCLEDIESGQSTRLVPGCNHGFHQLCADTWLSNHTVCPVCRAELAPNLPQCNENQSPC

SEQ ID NO: 26882 - protein, 136 aa, Arabidopsis thaliana
  peptide (1)..(136): Ceres Seq. ID no. 13490182
  misc_feature (77)..(118): Pfam Name: Zinc finger, C3HC4 type (RING finger) Pfam Description: Zinc finger, C3HC4 type (RING finger)
  misc_feature (1)..(119): Homolog of NCBI NO: 25405963 NR Description: protein F27J15.2 [imported] - Arabidopsis
  misc_feature (1)..(119): Homolog of NCBI NO: 7770352 NR Description: F27J15.3 [Arabidopsis thaliana]
  misc_feature (1)..(119): Homolog of NCBI NO: 15222069 NR Description: RING-H2 finger protein RHA3a -related
  misc_feature (1)..(120): Homolog of NCBI NO: 34903920 NR Description: OSJNBa0038J17.5 [Oryza sativa (japonica
  misc_feature (1)..(119): Homolog of NCBI NO: 15222071 NR Description: RING-H2 finger protein RHA3a -related
  misc_feature (1)..(131): Homolog of NCBI NO: 21555237 NR Description: putative RING zinc finger protein [Arabidopsis
  misc_feature (1)..(131): Homolog of NCBI NO: 15223041 NR Description: RING zinc finger protein -related [Arabidopsis
  misc_feature (1)..(131): Homolog of NCBI NO: 15218042 NR Description: RING zinc finger protein -related [Arabidopsis
  misc_feature (1)..(136): Homolog of NCBI NO: 21593762 NR Description: unknown [Arabidopsis thaliana]
  misc_feature (1)..(136): Homolog of NCBI NO: 15238323 NR Description: zinc finger (C3HC4-type RING finger) protein
MIATVFMALLLPCVGMCIVFLIYLFLLWCSTRRRIERLRFAEPVKPVTGKGLSVLELEKIPKLTGRELAVIARSTECAVCLEDIESGQSTRLVPGCNHGFHQLCADTWLSNHTVCPVCRAELAPNLPQCNENQSPC

SEQ ID NO: 26883 - protein, 130 aa, Arabidopsis thaliana
  peptide (1)..(130): Ceres Seq. ID no. 13490183
  misc_feature (71)..(112): Pfam Name: Zinc finger, C3HC4 type (RING finger) Pfam Description: Zinc finger, C3HC4 type (RING finger)
  misc_feature (1)..(113): Homolog of NCBI NO: 25405963 NR Description: protein F27J15.2 [imported] - Arabidopsis
  misc_feature (1)..(113): Homolog of NCBI NO: 7770352 NR Description: F27J15.3 [Arabidopsis thaliana]
  misc_feature (1)..(113): Homolog of NCBI NO: 15222069 NR Description: RING-H2 finger protein RHA3a -related
  misc_feature (1)..(114): Homolog of NCBI NO: 34903920 NR Description: OSJNBa0038J17.5 [Oryza sativa (japonica
  misc_feature (1)..(113): Homolog of NCBI NO: 15222071 NR Description: RING-H2 finger protein RHA3a -related
  misc_feature (1)..(125): Homolog of NCBI NO: 21555237 NR Description: putative RING zinc finger protein [Arabidopsis
  misc_feature (1)..(125): Homolog of NCBI NO: 15223041 NR Description: RING zinc finger protein -related [Arabidopsis
  misc_feature (1)..(125): Homolog of NCBI NO: 15218042 NR Description: RING zinc finger protein -related [Arabidopsis
  misc_feature (1)..(130): Homolog of NCBI NO: 21593762 NR Description: unknown [Arabidopsis thaliana]
  misc_feature (1)..(130): Homolog of NCBI NO: 15238323 NR Description: zinc finger (C3HC4-type RING finger) protein
MALLLPCVGMCIVFLIYLFLLWCSTRRRIERLRFAEPVKPVTGKGLSVLELEKIPKLTGRELAVIARSTECAVCLEDIESGQSTRLVPGCNHGFHQLCADTWLSNHTVCPVCRAELAPNLPQCNENQSPC

SEQ ID NO: 26884 - DNA, 1741 bp, Arabidopsis thaliana
  misc_feature (1)..(1741): Ceres Seq. ID no. 12422200
  misc_feature: MA Experiment ID: 108569 Result: Up-regulated in Transcription
  misc_feature: MA Experiment 108569 PARAMETER Experiment Name: At_0.001%_MeJA__cDNA_P Parameter: Timepoint (hr) Value: 6
  misc_feature: MA Experiment 108569 PARAMETER Experiment Name: At_0.001%_MeJA__cDNA_P Parameter: Tissue Value: Aerial
  misc_feature: MA Experiment 108569 PARAMETER Experiment Name: At_0.001%_MeJA__cDNA_P Parameter: Treatment Value: 0.001% MeJA vs. No Treatment
  misc_feature: MA Experiment ID: 108573 Result: Up-regulated in Transcription
  misc_feature: MA Experiment 108573 PARAMETER Experiment Name: At_Drought_cDNA_P Parameter: Timepoint (hr) Value: 6
  misc_feature: MA Experiment 108573 PARAMETER Experiment Name: At_Drought_cDNA_P Parameter: Tissue Value: Aerial
  misc_feature: MA Experiment 108573 PARAMETER Experiment Name: At_Drought_cDNA_P Parameter: Treatment Value: Drought vs. No Drought
  misc_feature: MA Experiment ID: 108577 Result: Down-regulated in Transcription
  misc_feature: MA Experiment 108577 PARAMETER Experiment Name: At_42deg_Heat_cDNA_P Parameter: Temperature (deg C) Value: 42 vs. 22
  misc_feature: MA Experiment 108577 PARAMETER Experiment Name: At_42deg_Heat_cDNA_P Parameter: Timepoint (hr) Value: 6
  misc_feature: MA Experiment 108577 PARAMETER Experiment Name: At_42deg_Heat_cDNA_P Parameter: Tissue Value: Aerial
cttgttcaaccctcgagagattacggatagtgaaagagaagctacaaaatttcccaatttatcaaaaaatagaaatttcttacttttttcaaaattcatttctccccaaaaaaaatatcttgtgaaaactgcaactgtgatccatggcggaggatatggctgccgacgaagttacggctcctcctcgtaaggttcttatcatctccgctggtgctagccactccgtcgctcttctctctggtgacattgtttgttcttggggtcgaggagaggatggacagttaggtcatggcgatgcagangagtcgaccttctccgactcagcttagcgctttagatggccaccaaattgtttccgttacctgtggtctgatcacactgttgcttattcacaatcaggcatggaagtctacagttggggatggggtgattttgggagattaggccatggtaactcaagcgacttgtttactccgctaccaatcaaagcattgcacggtattcggatcaagcagattgcttgtggggatagtcattgtttggctgtcactatggaaggagaggtccagagttggggccgcaaccagaatggtcaacttggtctgggggacaccgaagattctctagtgcctcagaagattcaagcctttgagggaatacgaatcaaaatggttgctgctggtgcagaacacactgctgcagttacagaagatggtgacctctatggatggggctggggaagatacggaaatttgggattaggtgaccggactgaccgcttagttcctgaaagagttacctctactggtggtgagaaaatgtcaatggttgcttgtggatggcggcacacaatatcagtttcctactctggagcattgtatacttatggatggagcaaatatggacagctaggacatggagacttggaggatcaccttattcctcacaaactggaagcactgagcaacagttttatctcccagatttcgggaggttggagacatacaatggcattgacttcagatggaaaactatatggatggggttggattaagtttggacaagtaggagtcggcaataatttagatcagtgttctcctgtgcaagtgcgatttcccgatgatcagaaagtagttcaagtctcatgtggatggagacataccttggctgtcactgaaagaaataacgtgtttgcttggggtagaagtacaaatggacagctcggcattggagagtcggttgacaggaactttcccaagattatagaggcactgagcgtcgatggagcaagtggacaacatatagaatcttctaatatcgatccatcttcagggaaaagctgggtgtcgcctgcagagagatatgcagttgttcctgatgaaacgggcctaacggatggttcaagcaaaggtaatggaggtgatatcagtgttccacaaactgatgtcaagcgtgtacgaatttgagcctgagtcaattccgttttttttttacttccggttcttccgttggattcgaaggtttttcagtgatctcttttgggttgaggtttgtactaagagtacgtctgtctagtttgggattgtactttttgttgttgttgttagtttgtaacttgtgatgcttccctccccctagctctcttattacatgggcgttgtaaactgtgtgtactactactactagtctctagggtatgtactttttttttcctcaccataataataccttctggttctat

SEQ ID NO: 26885 - protein, 354 aa, Arabidopsis thaliana
  peptide (1)..(354): Ceres Seq. ID no. 12422201
  misc_feature (104)..(153): Pfam Name: Regulator of chromosome condensation (RCC1) Pfam Description: Regulator of chromosome condensation (RCC1)
  misc_feature (1)..(298): Homolog of NCBI NO: 38175475 NR Description: putative UVB-resistance protein UVR8
  misc_feature (1)..(291): Homolog of NCBI NO: 30687301 NR Description: expressed protein [Arabidopsis thaliana]
  misc_feature (1)..(291): Homolog of NCBI NO: 18416843 NR Description: putative protein; protein id: At5g12350.1
  misc_feature (1)..(291): Homolog of NCBI NO: 24643485 NR Description: CG11734-PB [Drosophila melanogaster]
  misc_feature (1)..(285): Homolog of NCBI NO: 21537357 NR Description: UVB-resistance protein-like [Arabidopsis thaliana]
  misc_feature (1)..(285): Homolog of NCBI NO: 15237253 NR Description: UVB-resistance protein-like
  misc_feature (1)..(332): Homolog of NCBI NO: 4557026 NR Description: guanine nucleotide exchange factor p532 [Homo
  misc_feature (1)..(134): Homolog of NCBI NO: 21741206 NR Description: OSJNBb0086G13.1 [Oryza sativa (japonica
  misc_feature (1)..(354): Homolog of NCBI NO: 11358913 NR Description: UVB-resistance protein UVR8 [imported] -
  misc_feature (1)..(354): Homolog of NCBI NO: 15237540 NR Description: UVB-resistance protein UVR8 (gb|AAD43920.1)
MEVYSWGWGDFGRLGHGNSSDLFTPLPIKALHGIRIKQIACGDSHCLAVTMEGEVQSWGRNQNGQLGLGDTEDSLVPQKIQAFEGIRIKMVAAGAEHTAAVTEDGDLYGWGWGRYGNLGLGDRTDRLVPERVTSTGGEKMSMVACGWRHTISVSYSGALYTYGWSKYGQLGHGDLEDHLIPHKLEALSNSFISQISGGWRHTMALTSDGKLYGWGWIKFGQVGVGNNLDQCSPVQVRFPDDQKVVQVSCGWRHTLAVTERNNVFAWGRSTNGQLGIGESVDRNFPKIIEALSVDGASGQHIESSNIDPSSGKSWVSPAERYAVVPDETGLTDGSSKGNGGDISVPQTDVKRVRI

SEQ ID NO: 26886 - protein, 304 aa, Arabidopsis thaliana
  peptide (1)..(304): Ceres Seq. ID no. 12422202
  misc_feature (54)..(103): Pfam Name: Regulator of chromosome condensation (RCC1) Pfam Description: Regulator of chromosome condensation (RCC1)
  misc_feature (1)..(248): Homolog of NCBI NO: 38175475 NR Description: putative UVB-resistance protein UVR8
  misc_feature (1)..(241): Homolog of NCBI NO: 30687301 NR Description: expressed protein [Arabidopsis thaliana]
  misc_feature (1)..(241): Homolog of NCBI NO: 18416843 NR Description: putative protein; protein id: At5g12350.1
  misc_feature (1)..(241): Homolog of NCBI NO: 24643485 NR Description: CG11734-PB [Drosophila melanogaster]
  misc_feature (1)..(235): Homolog of NCBI NO: 21537357 NR Description: UVB-resistance protein-like [Arabidopsis thaliana]
  misc_feature (1)..(235): Homolog of NCBI NO: 15237253 NR Description: UVB-resistance protein-like
  misc_feature (1)..(282): Homolog of NCBI NO: 4557026 NR Description: guanine nucleotide exchange factor p532 [Homo
  misc_feature (1)..(84): Homolog of NCBI NO: 21741206 NR Description: OSJNBb0086G13.1 [Oryza sativa (japonica
  misc_feature (1)..(304): Homolog of NCBI NO: 11358913 NR Description: UVB-resistance protein UVR8 [imported] -
  misc_feature (1)..(304): Homolog of NCBI NO: 15237540 NR Description: UVB-resistance protein UVR8 (gb|AAD43920.1)
MEGEVQSWGRNQNGQLGLGDTEDSLVPQKIQAFEGIRIKMVAAGAEHTAAVTEDGDLYGWGWGRYGNLGLGDRTDRLVPERVTSTGGEKMSMVACGWRHTISVSYSGALYTYGWSKYGQLGHGDLEDHLIPHKLEALSNSFISQISGGWRHTMALTSDGKLYGWGWIKFGQVGVGNNLDQCSPVQVRFPDDQKVVQVSCGWRHTLAVTERNNVFAWGRSTNGQLGIGESVDRNFPKIIEALSVDGASGQHIESSNIDPSSGKSWVSPAERYAVVPDETGLTDGSSKGNGGDISVPQTDVKRVRI

SEQ ID NO: 26887 - protein, 265 aa, Arabidopsis thaliana
  peptide (1)..(265): Ceres Seq. ID no. 12422203
  misc_feature (15)..(64): Pfam Name: Regulator of chromosome condensation (RCC1) Pfam Description: Regulator of chromosome condensation (RCC1)
  misc_feature (1)..(209): Homolog of NCBI NO: 38175475 NR Description: putative UVB-resistance protein UVR8
  misc_feature (1)..(202): Homolog of NCBI NO: 30687301 NR Description: expressed protein [Arabidopsis thaliana]
  misc_feature (1)..(202): Homolog of NCBI NO: 18416843 NR Description: putative protein; protein id: At5g12350.1
  misc_feature (1)..(202): Homolog of NCBI NO: 24643485 NR Description: CG11734-PB [Drosophila melanogaster]
  misc_feature (1)..(196): Homolog of NCBI NO: 21537357 NR Description: UVB-resistance protein-like [Arabidopsis thaliana]
  misc_feature (1)..(196): Homolog of NCBI NO: 15237253 NR Description: UVB-resistance protein-like
  misc_feature (1)..(243): Homolog of NCBI NO: 4557026 NR Description: guanine nucleotide exchange factor p532 [Homo
  misc_feature (1)..(45): Homolog of NCBI NO: 21741206 NR Description: OSJNBb0086G13.1 [Oryza sativa (japonica
  misc_feature (1)..(265): Homolog of NCBI NO: 11358913 NR Description: UVB-resistance protein UVR8 [imported] -
  misc_feature (1)..(265): Homolog of NCBI NO: 15237540 NR Description: UVB-resistance protein UVR8 (gb|AAD43920.1)
MVAAGAEHTAAVTEDGDLYGWGWGRYGNLGLGDRTDRLVPERVTSTGGEKMSMVACGWRHTISVSYSGALYTYGWSKYGQLGHGDLEDHLIPHKLEALSNSFISQISGGWRHTMALTSDGKLYGWGWIKFGQVGVGNNLDQCSPVQVRFPDDQKVVQVSCGWRHTLAVTERNNVFAWGRSTNGQLGIGESVDRNFPKIIEALSVDGASGQHIESSNIDPSSGKSWVSPAERYAVVPDETGLTDGSSKGNGGDISVPQTDVKRVRI

SEQ ID NO: 26888 - DNA, 813 bp, Arabidopsis thaliana
  misc_feature (1)..(813): Ceres Seq. ID no. 12581284
  misc_feature: MA Experiment ID: 108434 Result: Up-regulated in Transcription
  misc_feature: MA Experiment 108434 PARAMETER Experiment Name: At_Root_Tips_cDNA_P Parameter: Tissue Value: Root Tips
  misc_feature: MA Experiment ID: 108462 Result: Down-regulated in Transcription
  misc_feature: MA Experiment 108462 PARAMETER Experiment Name: At_Germinating_Seeds_cDNA_P Parameter: Age (day) Value: 2 vs. 0
  misc_feature: MA Experiment 108462 PARAMETER Experiment Name: At_Germinating_Seeds_cDNA_P Parameter: Tissue Value: Germinating Seeds
  misc_feature: MA Experiment ID: 108463 Result: Down-regulated in Transcription
  misc_feature: MA Experiment 108463 PARAMETER Experiment Name: At_Germinating_Seeds_cDNA_P Parameter: Age (day) Value: 3 vs. 0
  misc_feature: MA Experiment 108463 PARAMETER Experiment Name: At_Germinating_Seeds_cDNA_P Parameter: Tissue Value: Germinating Seeds
  misc_feature: MA Experiment ID: 108464 Result: Down-regulated in Transcription
  misc_feature: MA Experiment 108464 PARAMETER Experiment Name: At_Germinating_Seeds_cDNA_P Parameter: Age (day) Value: 4 vs. 0
  misc_feature: MA Experiment 108464 PARAMETER Experiment Name: At_Germinating_Seeds_cDNA_P Parameter: Tissue Value: Germinating Seeds
  misc_feature: MA Experiment ID: 108488 Result: Up-regulated in Transcription
  misc_feature: MA Experiment ID: 108489 Result: Up-regulated in Transcription
  misc_feature: MA Experiment ID: 20000224 Result: Down-regulated in Transcription
  misc_feature: MA Experiment ID: 20000235 Result: Up-regulated in Transcription
  misc_feature: MA Experiment 20000235 PARAMETER Experiment Name: At_Siliques_P Parameter: Age (day) Value: 21
  misc_feature: MA Experiment 20000235 PARAMETER Experiment Name: At_Siliques_P Parameter: Organism Value: A. thaliana
  misc_feature: MA Experiment 20000235 PARAMETER Experiment Name: At_Siliques_P Parameter: Plant Line Value: WS
  misc_feature: MA Experiment 20000235 PARAMETER Experiment Name: At_Siliques_P Parameter: Tissue Value: 5-10mm Siliques vs. Whole Plant
  misc_feature: MA Experiment ID: 20000794 Result: Down-regulated in Transcription
  misc_feature: MA Experiment 20000794 PARAMETER Experiment Name: At_Petals_P Parameter: Age (day) Value: 23-25 days
  misc_feature: MA Experiment 20000794 PARAMETER Experiment Name: At_Petals_P Parameter: Plant Line Value: WS
  misc_feature: MA Experiment 20000794 PARAMETER Experiment Name: At_Petals_P Parameter: Tissue Value: Petals vs. Whole plant
  misc_feature: MA Experiment ID: 20001558 Result: Up-regulated in Transcription
  misc_feature: MA Experiment 20001558 PARAMETER Experiment Name: At_Drought_Soil_Dry_P Parameter: Age (day) Value: 27
  misc_feature: MA Experiment 20001558 PARAMETER Experiment Name: At_Drought_Soil_Dry_P Parameter: Organism Value: A. thaliana
  misc_feature: MA Experiment 20001558 PARAMETER Experiment Name: At_Drought_Soil_Dry_P Parameter: Plant Line Value: WS
  misc_feature: MA Experiment 20001558 PARAMETER Experiment Name: At_Drought_Soil_Dry_P Parameter: Post Timepoint (hr) Value: 6
  misc_feature: MA Experiment 20001558 PARAMETER Experiment Name: At_Drought_Soil_Dry_P Parameter: Post-Treatment Value: Re-Water vs. No Drought
  misc_feature: MA Experiment 20001558 PARAMETER Experiment Name: At_Drought_Soil_Dry_P Parameter: Timepoint (day) Value: 13
  misc_feature: MA Experiment 20001558 PARAMETER Experiment Name: At_Drought_Soil_Dry_P Parameter: Treatment Value: Drought vs. No Drought
  misc_feature: MA Experiment ID: 20001757 Result: Up-regulated in Transcription
  misc_feature: MA Experiment 20001757 PARAMETER Experiment Name: At_50mM_NH4NO3_L-to-H_P Parameter: Timepoint (hr) Value: 6
  misc_feature: MA Experiment 20001757 PARAMETER Experiment Name: At_50mM_NH4NO3_L-to-H_P Parameter: Tissue Value: Leaf
  misc_feature: MA Experiment 20001757 PARAMETER Experiment Name: At_50mM_NH4NO3_L-to-H_P Parameter: Treatment Value: 50mM NH4NO3 vs 100mM Mannitol
aagctctcaccacagtttgagaagcgaaaatggtgtcaggatcagggatatgctcgaagcgcgttgtcgtcgacgcgcgccaccacatgcttggccgtcttgcgtcgatcaccgctaaagagcttctcaatggccagaaagttgtcattgtccggtgcgaagagatttgcctctccggcggactcgttcgtcagaaaatgaagtacatgaggtttcttcgcaaacgtatgaacactaaaccttctcatggacctattcacttccgtgctccttccaaaatcttctggcgtactgttcgcggtatgattccacacaagacgaagcgtggagctgctgcattagcacgtctgaaggtatatgaaggtgttcctactccatatgacaagatcaagaggatggtcatccctgatgctctcaaggtgttgaggcttcaagctggtcacaaatactgtctattgggccgtctttcttctgaagttgggtggaaccattacgacaccatcaaggagctggagacaaagaggaaggagagagcccacgtggtttacgagcgaaagaagcaacttaacaaacttagagttaaggccgagaaggtcgctgaagagaagctcggagcacagctcgatattcttgcgccagttaagtactgagcttgtcagtagtagttttttttttttttggtaaggagcttgtcagtagtagtttgtcttggcatgttttgagccaacccaatacttttttactttttatcttttacttaggtcttgtatcgaaatttgtactcctaacattttatgcttgagttttatttat

SEQ ID NO: 26889 - protein, 206 aa, Arabidopsis thaliana
  peptide (1)..(206): Ceres Seq. ID no. 12581285
  misc_feature (11)..(127): Pfam Name: Ribosomal protein L13 Pfam Description: Ribosomal protein L13
  misc_feature (1)..(159): Homolog of NCBI NO: 34899414 NR Description: putative 60S ribosomal protein
  misc_feature (1)..(206): Homolog of NCBI NO: 33146452 NR Description: putative 60S ribosomal protein
  misc_feature (1)..(206): Homolog of NCBI NO: 37718812 NR Description: putative ribosomal protein L13a
  misc_feature (1)..(206): Homolog of NCBI NO: 3914535 NR Description: 60S RIBOSOMAL PROTEIN L13A
  misc_feature (1)..(206): Homolog of NCBI NO: 21326116 NR Description: putative 60S ribosomal protein [Sorghum bicolor]
  misc_feature (1)..(206): Homolog of NCBI NO: 19423912 NR Description: putative 60S ribosomal protein [Arabidopsis
  misc_feature (1)..(206): Homolog of NCBI NO: 15230197 NR Description: 60S ribosomal protein, putative
  misc_feature (1)..(206): Homolog of NCBI NO: 15231394 NR Description: putative 60S ribosomal protein L13A
  misc_feature (1)..(206): Homolog of NCBI NO: 15235617 NR Description: ribosomal protein L13a like protein
  misc_feature (1)..(206): Homolog of NCBI NO: 15239698 NR Description: 60S ribosomal protein L13a
MVSGSGICSKRVVVDARHHMLGRLASITAKELLNGQKVVIVRCEEICLSGGLVRQKMKYMRFLRKRMNTKPSHGPIHFRAPSKIFWRTVRGMIPHKTKRGAAALARLKVYEGVPTPYDKIKRMVIPDALKVLRLQAGHKYCLLGRLSSEVGWNHYDTIKELETKRKERAHVVYERKKQLNKLRVKAEKVAEEKLGAQLDILAPVKY

SEQ ID NO: 26890 - protein, 187 aa, Arabidopsis thaliana
  peptide (1)..(187): Ceres Seq. ID no. 12581286
  misc_feature (1)..(108): Pfam Name: Ribosomal protein L13 Pfam Description: Ribosomal protein L13
  misc_feature (1)..(140): Homolog of NCBI NO: 34899414 NR Description: putative 60S ribosomal protein
  misc_feature (1)..(187): Homolog of NCBI NO: 33146452 NR Description: putative 60S ribosomal protein
  misc_feature (1)..(187): Homolog of NCBI NO: 37718812 NR Description: putative ribosomal protein L13a
  misc_feature (1)..(187): Homolog of NCBI NO: 3914535 NR Description: 60S RIBOSOMAL PROTEIN L13A
  misc_feature (1)..(187): Homolog of NCBI NO: 21326116 NR Description: putative 60S ribosomal protein [Sorghum bicolor]
  misc_feature (1)..(187): Homolog of NCBI NO: 19423912 NR Description: putative 60S ribosomal protein [Arabidopsis
  misc_feature (1)..(187): Homolog of NCBI NO: 15230197 NR Description: 60S ribosomal protein, putative
  misc_feature (1)..(187): Homolog of NCBI NO: 15231394 NR Description: putative 60S ribosomal protein L13A
  misc_feature (1)..(187): Homolog of NCBI NO: 15235617 NR Description: ribosomal protein L13a like protein
  misc_feature (1)..(187): Homolog of NCBI NO: 15239698 NR Description: 60S ribosomal protein L13a
MLGRLASITAKELLNGQKVVIVRCEEICLSGGLVRQKMKYMRFLRKRMNTKPSHGPIHFRAPSKIFWRTVRGMIPHKTKRGAAALARLKVYEGVPTPYDKIKRMVIPDALKVLRLQAGHKYCLLGRLSSEVGWNHYDTIKELETKRKERAHVVYERKKQLNKLRVKAEKVAEEKLGAQLDILAPVKY

SEQ ID NO: 26891 - protein, 150 aa, Arabidopsis thaliana
  peptide (1)..(150): Ceres Seq. ID no. 12581287
  misc_feature (1)..(71): Pfam Name: Ribosomal protein L13 Pfam Description: Ribosomal protein L13
  misc_feature (1)..(103): Homolog of NCBI NO: 34899414 NR Description: putative 60S ribosomal protein
  misc_feature (1)..(150): Homolog of NCBI NO: 33146452 NR Description: putative 60S ribosomal protein
  misc_feature (1)..(150): Homolog of NCBI NO: 37718812 NR Description: putative ribosomal protein L13a
  misc_feature (1)..(150): Homolog of NCBI NO: 3914535 NR Description: 60S RIBOSOMAL PROTEIN L13A
  misc_feature (1)..(150): Homolog of NCBI NO: 21326116 NR Description: putative 60S ribosomal protein [Sorghum bicolor]
  misc_feature (1)..(150): Homolog of NCBI NO: 19423912 NR Description: putative 60S ribosomal protein [Arabidopsis
  misc_feature (1)..(150): Homolog of NCBI NO: 15230197 NR Description: 60S ribosomal protein, putative
  misc_feature (1)..(150): Homolog of NCBI NO: 15231394 NR Description: putative 60S ribosomal protein L13A
  misc_feature (1)..(150): Homolog of NCBI NO: 15235617 NR Description: ribosomal protein L13a like protein
  misc_feature (1)..(150): Homolog of NCBI NO: 15239698 NR Description: 60S ribosomal protein L13a
MKYMRFLRKRMNTKPSHGPIHFRAPSKIFWRTVRGMIPHKTKRGAAALARLKVYEGVPTPYDKIKRMVIPDALKVLRLQAGHKYCLLGRLSSEVGWNHYDTIKELETKRKERAHVVYERKKQLNKLRVKAEKVAEEKLGAQLDILAPVKY

SEQ ID NO: 26892 - DNA, 963 bp, Arabidopsis thaliana
  misc_feature (1)..(963): Ceres Seq. ID no. 12723825
  misc_feature: MA Experiment ID: 20000184 Result: Down-regulated in Transcription
  misc_feature: MA Experiment 20000184 PARAMETER Experiment Name: At_Shoots__P Parameter: Age (day) Value: 7
  misc_feature: MA Experiment 20000184 PARAMETER Experiment Name: At_Shoots__P Parameter: Tissue Value: Shoots vs. Whole Plant
  misc_feature: MA Experiment ID: 20000185 Result: Up-regulated in Transcription
  misc_feature: MA Experiment 20000185 PARAMETER Experiment Name: At_Roots__P Parameter: Age (day) Value: 7 vs. 21
  misc_feature: MA Experiment 20000185 PARAMETER Experiment Name: At_Roots__P Parameter: Organism Value: A. thaliana
  misc_feature: MA Experiment 20000185 PARAMETER Experiment Name: At_Roots__P Parameter: Tissue Value: Roots vs. Whole Plant
  misc_feature: MA Experiment ID: 20000496 Result: Up-regulated in Transcription
  misc_feature: MA Experiment 20000496 PARAMETER Experiment Name: At_Guard_Cells_P Parameter: Harvest Date Value: 7/19/2002
  misc_feature: MA Experiment 20000496 PARAMETER Experiment Name: At_Guard_Cells_P Parameter: Organism Value: Canola
  misc_feature: MA Experiment 20000496 PARAMETER Experiment Name: At_Guard_Cells_P Parameter: Tissue Value: Guard Cells vs. Leaves
atcaatttttctttattttattcactaataataattttgagtctctcttctctctctcttatatctcaaaatccgagaaaacgaagttcaaagatccgtggttgaattcgtgattctgaaatttcgtttcttcaggtctctgatcgtcctggttctcctctgatctgttatttgcttcgaaatagaagtttgtttctcgtttgacgatggagactgcgactggagaaatcaccatcgtctgcaaccactgtgacagagacattccatcactgaatatcgatctgcatcgtgtacattgtgctcggaatttagaaaaatgtaagatttgtggtgatatggtacccaaaaagcatgctgaggaacactacttgaacacacatgctccgatagcatgctcgatgtgcaaagagaccatagaacgtgagattttcgatagtcataaaggagaaatttgccccaagaggattgtaacatgcgagttctgtgagtttccattgcctgcggttgatcttgccgagcatcaggaagtatgtggcaacaggacagaactctgttatcaatgcaacagctatgttagattgagagaaagatataaccatgaaaccaaatgccctggcactgttgaatcatccagaaggatcccgagagcagcagaaggagatggaaacgggagaagacgaagagatgggaacggtgtttcgaacaaaaggcttttcttcacgatagcaataacgggaatagctgtgataataggatccttgttcttccagaggaagcctgagtagaggaggcgtagcttatctgtaattctgtaaatttgcctcaaatccttcagacagattctaaggaagggtttatacattttaaagcttacccagacaagagaaaccccaaaagattgtttgagctgatcaccatgagacttgcttttatatttgatttcaataaaagagatttcagatt

SEQ ID NO: 26893 - protein, 192 aa, Arabidopsis thaliana
  peptide (1)..(192): Ceres Seq. ID no. 12723826
  misc_feature (27)..(97): Pfam Name: TRAF-type zinc finger Pfam Description: TRAF-type zinc finger
  misc_feature (10)..(148): Homolog of NCBI NO: 9663394 NR Description: zinc-fingered kinesin [Leishmania major]
  misc_feature (11)..(135): Homolog of NCBI NO: 40288191 NR Description: XIAP associated factor-1 isoform 1 [Homo sapiens]
  misc_feature (11)..(135): Homolog of NCBI NO: 1869901 NR Description: XIAP associated factor-1 (ZAP-1) [Homo sapiens]
  misc_feature (9)..(169): Homolog of NCBI NO: 5729828 NR Description: FLN29 gene product [Homo sapiens]
  misc_feature (11)..(148): Homolog of NCBI NO: 26986577 NR Description: FLN29 gene product [Mus musculus]
  misc_feature (11)..(144): Homolog of NCBI NO: 34872552 NR Description: similar to FLN29 gene product [Rattus norvegicus]
  misc_feature (9)..(114): Homolog of NCBI NO: 34899048 NR Description: contains ESTs
  misc_feature (9)..(189): Homolog of NCBI NO: 33354198 NR Description: XIAP associated factor-1-like protein
  misc_feature (1)..(192): Homolog of NCBI NO: 21593788 NR Description: unknown [Arabidopsis thaliana]
  misc_feature (1)..(192): Homolog of NCBI NO: 18391087 NR Description: expressed protein
METATGEITIVCNHCDRDIPSLNIDLHRVHCARNLEKCKICGDMVPKKHAEEHYLNTHAPIACSMCKETIEREIFDSHKGEICPKRIVTCEFCEFPLPAVDLAEHQEVCGNRTELCYQCNSYVRLRERYNHETKCPGTVESSRRIPRAAEGDGNGRRRRDGNGVSNKRLFFTIAITGIAVIIGSLFFQRKPE

SEQ ID NO: 26894 - protein, 149 aa, Arabidopsis thaliana
  peptide (1)..(149): Ceres Seq. ID no. 12723827
  misc_feature (1)..(54): Pfam Name: TRAF-type zinc finger Pfam Description: TRAF-type zinc finger
  misc_feature (1)..(105): Homolog of NCBI NO: 9663394 NR Description: zinc-fingered kinesin [Leishmania major]
  misc_feature (1)..(92): Homolog of NCBI NO: 40288191 NR Description: XIAP associated factor-1 isoform 1 [Homo sapiens]
  misc_feature (1)..(92): Homolog of NCBI NO: 1869901 NR Description: XIAP associated factor-1 (ZAP-1) [Homo sapiens]
  misc_feature (1)..(126): Homolog of NCBI NO: 5729828 NR Description: FLN29 gene product [Homo sapiens]
  misc_feature (1)..(105): Homolog of NCBI NO: 26986577 NR Description: FLN29 gene product [Mus musculus]
  misc_feature (1)..(101): Homolog of NCBI NO: 34872552 NR Description: similar to FLN29 gene product [Rattus norvegicus]
  misc_feature (1)..(71): Homolog of NCBI NO: 34899048 NR Description: contains ESTs
  misc_feature (1)..(146): Homolog of NCBI NO: 33354198 NR Description: XIAP associated factor-1-like protein
  misc_feature (1)..(149): Homolog of NCBI NO: 21593788 NR Description: unknown [Arabidopsis thaliana]
  misc_feature (1)..(149): Homolog of NCBI NO: 18391087 NR Description: expressed protein
MVPKKHAEEHYLNTHAPIACSMCKETIEREIFDSHKGEICPKRIVTCEFCEFPLPAVDLAEHQEVCGNRTELCYQCNSYVRLRERYNHETKCPGTVESSRRIPRAAEGDGNGRRRRDGNGVSNKRLFFTIAITGIAVIIGSLFFQRKPE

SEQ ID NO: 26895 - protein, 128 aa, Arabidopsis thaliana
  peptide (1)..(128): Ceres Seq. ID no. 12723828
  misc_feature (1)..(84): Homolog of NCBI NO: 26986577 NR Description: FLN29 gene product [Mus musculus]
  misc_feature (1)..(80): Homolog of NCBI NO: 34872552 NR Description: similar to FLN29 gene product [Rattus norvegicus]
  misc_feature (1)..(50): Homolog of NCBI NO: 34899048 NR Description: contains ESTs
  misc_feature (1)..(125): Homolog of NCBI NO: 33354198 NR Description: XIAP associated factor-1-like protein
  misc_feature (1)..(128): Homolog of NCBI NO: 21593788 NR Description: unknown [Arabidopsis thaliana]
  misc_feature (1)..(128): Homolog of NCBI NO: 18391087 NR Description: expressed protein
  misc_feature (1)..(84): Homolog of NCBI NO: 9663394 NR Description: zinc-fingered kinesin [Leishmania major]
  misc_feature (1)..(71): Homolog of NCBI NO: 40288191 NR Description: XIAP associated factor-1 isoform 1 [Homo sapiens]
  misc_feature (1)..(71): Homolog of NCBI NO: 1869901 NR Description: XIAP associated factor-1 (ZAP-1) [Homo sapiens]
  misc_feature (1)..(105): Homolog of NCBI NO: 5729828 NR Description: FLN29 gene product [Homo sapiens]
MCKETIEREIFDSHKGEICPKRIVTCEFCEFPLPAVDLAEHQEVCGNRTELCYQCNSYVRLRERYNHETKCPGTVESSRRIPRAAEGDGNGRRRRDGNGVSNKRLFFTIAITGIAVIIGSLFFQRKPE

SEQ ID NO: 26896 - DNA, 590 bp, Arabidopsis thaliana
  misc_feature (1)..(590): Ceres Seq. ID no. 12394309
  misc_feature: MA Experiment ID: 108463 Result: Up-regulated in Transcription
  misc_feature: MA Experiment 108463 PARAMETER Experiment Name: At_Germinating_Seeds_cDNA_P Parameter: Age (day) Value: 3 vs. 0
  misc_feature: MA Experiment 108463 PARAMETER Experiment Name: At_Germinating_Seeds_cDNA_P Parameter: Tissue Value: Germinating Seeds
  misc_feature: MA Experiment ID: 108464 Result: Up-regulated in Transcription
  misc_feature: MA Experiment 108464 PARAMETER Experiment Name: At_Germinating_Seeds_cDNA_P Parameter: Age (day) Value: 4 vs. 0
  misc_feature: MA Experiment 108464 PARAMETER Experiment Name: At_Germinating_Seeds_cDNA_P Parameter: Tissue Value: Germinating Seeds
  misc_feature: MA Experiment ID: 108594 Result: Down-regulated in Transcription
  misc_feature: MA Experiment 108594 PARAMETER Experiment Name: At_Ler-rhl_Root_cDNA_P Parameter: Plant Line Value: null
  misc_feature: MA Experiment ID: 108595 Result: Up-regulated in Transcription
  misc_feature: MA Experiment 108595 PARAMETER Experiment Name: At_Ler-pi_Ovule_cDNA_P Parameter: Plant Line Value: null
  misc_feature: MA Experiment ID: 20000314 Result: Down-regulated in Transcription
  misc_feature: MA Experiment 20000314 PARAMETER Experiment Name: At_14day_Shoots-Roots_Sub_P Parameter: Age (day) Value: 14
  misc_feature: MA Experiment 20000314 PARAMETER Experiment Name: At_14day_Shoots-Roots_Sub_P Parameter: Organism Value: A. thaliana
  misc_feature: MA Experiment 20000314 PARAMETER Experiment Name: At_14day_Shoots-Roots_Sub_P Parameter: Plant Line Value: WS
  misc_feature: MA Experiment 20000314 PARAMETER Experiment Name: At_14day_Shoots-Roots_Sub_P Parameter: Tissue Value: Roots vs. Whole Plant
  misc_feature: MA Experiment ID: 20000327 Result: Down-regulated in Transcription
  misc_feature: MA Experiment 20000327 PARAMETER Experiment Name: At_42deg_Heat_Sub_P Parameter: Age (day) Value: 14
  misc_feature: MA Experiment 20000327 PARAMETER Experiment Name: At_42deg_Heat_Sub_P Parameter: Organism Value: A. thaliana
  misc_feature: MA Experiment 20000327 PARAMETER Experiment Name: At_42deg_Heat_Sub_P Parameter: Plant Line Value: WS
  misc_feature: MA Experiment 20000327 PARAMETER Experiment Name: At_42deg_Heat_Sub_P Parameter: Temperature (deg C) Value: 42 vs. 22
  misc_feature: MA Experiment 20000327 PARAMETER Experiment Name: At_42deg_Heat_Sub_P Parameter: Timepoint (hr) Value: 1
  misc_feature: MA Experiment 20000327 PARAMETER Experiment Name: At_42deg_Heat_Sub_P Parameter: Tissue Value: Aerial
  misc_feature: MA Experiment ID: 20000328 Result: Down-regulated in Transcription
  misc_feature: MA Experiment 20000328 PARAMETER Experiment Name: At_42deg_Heat_Sub_P Parameter: Age (day) Value: 14
  misc_feature: MA Experiment 20000328 PARAMETER Experiment Name: At_42deg_Heat_Sub_P Parameter: Organism Value: A. thaliana
  misc_feature: MA Experiment 20000328 PARAMETER Experiment Name: At_42deg_Heat_Sub_P Parameter: Plant Line Value: WS
  misc_feature: MA Experiment 20000328 PARAMETER Experiment Name: At_42deg_Heat_Sub_P Parameter: Temperature (deg C) Value: 42 vs. 22
  misc_feature: MA Experiment 20000328 PARAMETER Experiment Name: At_42deg_Heat_Sub_P Parameter: Timepoint (hr) Value: 6
  misc_feature: MA Experiment 20000328 PARAMETER Experiment Name: At_42deg_Heat_Sub_P Parameter: Tissue Value: Aerial
  misc_feature: MA Experiment ID: 20000349 Result: Up-regulated in Transcription
  misc_feature: MA Experiment 20000349 PARAMETER Experiment Name: At_100uM_ABA_Sub_P Parameter: Age (day) Value: 14
  misc_feature: MA Experiment 20000349 PARAMETER Experiment Name: At_100uM_ABA_Sub_P Parameter: Organism Value: A. thaliana
  misc_feature: MA Experiment 20000349 PARAMETER Experiment Name: At_100uM_ABA_Sub_P Parameter: Plant Line Value: WS
  misc_feature: MA Experiment 20000349 PARAMETER Experiment Name: At_100uM_ABA_Sub_P Parameter: Timepoint (hr) Value: 6
  misc_feature: MA Experiment 20000349 PARAMETER Experiment Name: At_100uM_ABA_Sub_P Parameter: Tissue Value: Aerial
  misc_feature: MA Experiment 20000349 PARAMETER Experiment Name: At_100uM_ABA_Sub_P Parameter: Treatment Value: 100uM ABA vs. No Treatment
  misc_feature: MA Experiment ID: 20000440 Result: Down-regulated in Transcription
  misc_feature: MA Experiment 20000440 PARAMETER Experiment Name: At_Closed-Flower__Sub_P Parameter: Tissue Value: Closed Flower vs. Whole Plant
aaaattcacactatgaaactcgccaaactaattccaaaacgtttcttcatcagatccaaagatcgttccactgtctctaagtcccccacggctttttccttcggatccgcttcctcatcttccggccaagactgtaaaaactccggtggtgatggcggtggcggttccgttaccccgactagcattctcccggaggttccttctccttattcctacgtcgagattctccaagcgtttaagttgatagacagagacaacgacggagctgtctctagacacgatcttgagtcgttacttagccggctaggtcctgatcctttgacggaggaggagatcaacgttatgcttaaagaggtggactgcgacggcgacggtacgatccgtcttgaagagcttgcgagtcgtgtagtctctttagatccggctcgtgactcgactgagctgaaggagactttcgagttctttgacgcggatcgtaacggtttgatctcggctgatgagcttctacgagttttctcgaccattggagatgacggtgcacgttagatgattgtaagcgtatgatagcagatgttgatgaggacggtgat

SEQ ID NO: 26897 - protein, 181 aa, Arabidopsis thaliana
  peptide (1)..(181): Ceres Seq. ID no. 12394310
  misc_feature (111)..(139): Pfam Name: EF hand Pfam Description: EF hand
  misc_feature (74)..(177): Homolog of NCBI NO: 729010 NR Description: Calmodulin
  misc_feature (74)..(177): Homolog of NCBI NO: 4959629 NR Description: calmodulin mutant SYNCAM15 [synthetic construct]
  misc_feature (74)..(177): Homolog of NCBI NO: 4959171 NR Description: calmodulin mutant SYNCAM64B [synthetic construct]
  misc_feature (73)..(177): Homolog of NCBI NO: 14625425 NR Description: calmodulin NtCaM13 [Nicotiana tabacum]
  misc_feature (63)..(177): Homolog of NCBI NO: 7441485 NR Description: calmodulin - soybean
  misc_feature (74)..(177): Homolog of NCBI NO: 8131969 NR Description: calmodulin [Brassica napus]
  misc_feature (5)..(178): Homolog of NCBI NO: 322474 NR Description: calmodulin-related protein (clone PM129) -
  misc_feature (5)..(178): Homolog of NCBI NO: 21536925 NR Description: calmodulin-like protein [Arabidopsis thaliana]
  misc_feature (5)..(178): Homolog of NCBI NO: 15227349 NR Description: calmodulin-like protein
  misc_feature (5)..(178): Homolog of NCBI NO: 15228219 NR Description: calmodulin-like protein; protein id: At3g10190.1
KIHTMKLAKLIPKRFFIRSKDRSTVSKSPTAFSFGSASSSSGQDCKNSGGDGGGGSVTPTSILPEVPSPYSYVEILQAFKLIDRDNDGAVSRHDLESLLSRLGPDPLTEEEINVMLKEVDCDGDGTIRLEELASRVVSLDPARDSTELKETFEFFDADRNGLISADELLRVFSTIGDDGAR

SEQ ID NO: 26898 - protein, 177 aa, Arabidopsis thaliana
  peptide (1)..(177): Ceres Seq. ID no. 12394311
  misc_feature (107)..(135): Pfam Name: EF hand Pfam Description: EF hand
  misc_feature (70)..(173): Homolog of NCBI NO: 729010 NR Description: Calmodulin
  misc_feature (70)..(173): Homolog of NCBI NO: 4959629 NR Description: calmodulin mutant SYNCAM15 [synthetic construct]
  misc_feature (70)..(173): Homolog of NCBI NO: 4959171 NR Description: calmodulin mutant SYNCAM64B [synthetic construct]
  misc_feature (69)..(173): Homolog of NCBI NO: 14625425 NR Description: calmodulin NtCaM13 [Nicotiana tabacum]
  misc_feature (59)..(173): Homolog of NCBI NO: 7441485 NR Description: calmodulin - soybean
  misc_feature (70)..(173): Homolog of NCBI NO: 8131969 NR Description: calmodulin [Brassica napus]
  misc_feature (1)..(174): Homolog of NCBI NO: 322474 NR Description: calmodulin-related protein (clone PM129) -
  misc_feature (1)..(174): Homolog of NCBI NO: 21536925 NR Description: calmodulin-like protein [Arabidopsis thaliana]
  misc_feature (1)..(174): Homolog of NCBI NO: 15227349 NR Description: calmodulin-like protein
  misc_feature (1)..(174): Homolog of NCBI NO: 15228219 NR Description: calmodulin-like protein; protein id: At3g10190.1
MKLAKLIPKRFFIRSKDRSTVSKSPTAFSFGSASSSSGQDCKNSGGDGGGGSVTPTSILPEVPSPYSYVEILQAFKLIDRDNDGAVSRHDLESLLSRLGPDPLTEEEINVMLKEVDCDGDGTIRLEELASRVVSLDPARDSTELKETFEFFDADRNGLISADELLRVFSTIGDDGAR

SEQ ID NO: 26899 - DNA, 841 bp, Arabidopsis thaliana
  misc_feature (1)..(841): Ceres Seq. ID no. 12331332
  misc_feature: MA Experiment ID: 108595 Result: Down-regulated in Transcription
  misc_feature: MA Experiment 108595 PARAMETER Experiment Name: At_Ler-pi_Ovule_cDNA_P Parameter: Plant Line Value: null
  misc_feature: MA Experiment ID: 20000071 Result: Up-regulated in Transcription
  misc_feature: MA Experiment 20000071 PARAMETER Experiment Name: At_100uM_ABA_Mutants_cDNA_P Parameter: Plant Line Value: CS8104
  misc_feature: MA Experiment 20000071 PARAMETER Experiment Name: At_100uM_ABA_Mutants_cDNA_P Parameter: Timepoint (hr) Value: 6
  misc_feature: MA Experiment 20000071 PARAMETER Experiment Name: At_100uM_ABA_Mutants_cDNA_P Parameter: Tissue Value: Aerial
  misc_feature: MA Experiment 20000071 PARAMETER Experiment Name: At_100uM_ABA_Mutants_cDNA_P Parameter: Treatment Value: 100uM ABA vs. No Treatment
  misc_feature: MA Experiment ID: 20000112 Result: Down-regulated in Transcription
  misc_feature: MA Experiment 20000112 PARAMETER Experiment Name: At_42deg_Heat_cDNA_P Parameter: Temperature (deg C) Value: 42 vs. 22
  misc_feature: MA Experiment 20000112 PARAMETER Experiment Name: At_42deg_Heat_cDNA_P Parameter: Timepoint (hr) Value: 2
  misc_feature: MA Experiment 20000112 PARAMETER Experiment Name: At_42deg_Heat_cDNA_P Parameter: Tissue Value: Aerial
  misc_feature: MA Experiment ID: 20000224 Result: Down-regulated in Transcription
aaatcatcactcatcttcaccaatctccattgattccttcaagccaagcttctggcattctcctcttagatcaatctggttctttcatattccttgtggatatgatccgttaagattcgttcgttttgtgtctagtagatcgctgtgacgtaatataaagaaaaccctaaatctcagaaaactcgagactggctctaatggcttgtcaaattcaagcttcacgcgttttcccagttctggaaattgaaaaaggtctctcctttatgataaatgtcttgcataggagaagaaaagtttcgtccattactctcacttcatttccttatcccatgaaaagttttcagataagaagaccaaaccggaaaatagcgtttgcgttagacactggttcttctattcctggagatagtggtgaagggcaagagatgaatggagacagaaccggtctcggtagcactcggttaggtagaattgcgattgcaggaggcaaacagttacttgcaagataaactctgcaagaaaaaacttcccaatgaagatatttctgctgcttcttggtttctacactgccaatgcactagctactattcttggacagactggtgattgggatgtgcttgttgccggaatcgtcgttgctgcgatcgaaggaatcggtatgcttatgtataagaaaccgtcttcttcaatgttttcagggaagttgcagtcttttgttgtgtttatgaatttttggaaagctggtgtttgcttaggtctctttgttgatgctttcaagttgggtagttaaaaagacaaatctttcttttcttctactctatgtatatatgcaattgttact

SEQ ID NO: 26900 - protein, 103 aa, Arabidopsis thaliana
  peptide (1)..(103): Ceres Seq. ID no. 12331333
  misc_feature (77)..(103): Homolog of NCBI NO: 6136502 NR Description: Ycf20-like protein
  misc_feature (1)..(103): Homolog of NCBI NO: 18408276 NR Description: antigen receptor, putative
  misc_feature (1)..(103): Homolog of NCBI NO: 21593789 NR Description: antigen receptor, putative [Arabidopsis thaliana]
MACQIQASRVFPVLEIEKGLSFMINVLHRRRKVSSITLTSFPYPMKSFQIRRPNRKIAFALDTGSSIPGDSGEGQEMNGDRTGLGSTRLGRIAIAGGKQLLAR

SEQ ID NO: 26901 - protein, 85 aa, Arabidopsis thaliana
  peptide (1)..(85): Ceres Seq. ID no. 12331334
  misc_feature (22)..(85): Pfam Name: Protein of unknown function (DUF565) Pfam Description: Protein of unknown function (DUF565)
  misc_feature (4)..(85): Homolog of NCBI NO: 11465590 NR Description: unknown [Cyanidium caldarium]
  misc_feature (4)..(85): Homolog of NCBI NO: 7484292 NR Description: hypothetical protein ORF96 - red alga (Cyanidium
  misc_feature (1)..(85): Homolog of NCBI NO: 11465680 NR Description: ORF20 [Porphyra purpurea]
  misc_feature (1)..(85): Homolog of NCBI NO: 11466439 NR Description: hypothetical chloroplast RF20 [Mesostigma viride]
  misc_feature (1)..(82): Homolog of NCBI NO: 15230144 NR Description: putative protein; protein id: At3g56830.1
  misc_feature (1)..(72): Homolog of NCBI NO: 28436400 NR Description: putative antigen receptor [Arabidopsis thaliana]
  misc_feature (1)..(72): Homolog of NCBI NO: 28394796 NR Description: putative antigen receptor [Arabidopsis lyrata]
  misc_feature (1)..(85): Homolog of NCBI NO: 6136502 NR Description: Ycf20-like protein
  misc_feature (1)..(85): Homolog of NCBI NO: 18408276 NR Description: antigen receptor, putative
  misc_feature (1)..(85): Homolog of NCBI NO: 21593789 NR Description: antigen receptor, putative [Arabidopsis thaliana]
MKIFLLLLGFYTANALATILGQTGDWDVLVAGIVVAAIEGIGMLMYKKPSSSMFSGKLQSFVVFMNFWKAGVCLGLFVDAFKLGS

SEQ ID NO: 26902 - protein, 81 aa, Arabidopsis thaliana
  peptide (1)..(81): Ceres Seq. ID no. 12331335
  misc_feature (55)..(81): Homolog of NCBI NO: 6136502 NR Description: Ycf20-like protein
  misc_feature (1)..(81): Homolog of NCBI NO: 18408276 NR Description: antigen receptor, putative
  misc_feature (1)..(81): Homolog of NCBI NO: 21593789 NR Description: antigen receptor, putative [Arabidopsis thaliana]
MINVLHRRRKVSSITLTSFPYPMKSFQIRRPNRKIAFALDTGSSIPGDSGEGQEMNGDRTGLGSTRLGRIAIAGGKQLLAR

SEQ ID NO: 26903 - DNA, 1164 bp, Arabidopsis thaliana
  misc_feature (1)..(1164): Ceres Seq. ID no. 12674198
  misc_feature: MA Experiment ID: 20000437 Result: Up-regulated in Transcription
  misc_feature: MA Experiment 20000437 PARAMETER Experiment Name: At_Drought_P Parameter: Age (day) Value: 8
  misc_feature: MA Experiment 20000437 PARAMETER Experiment Name: At_Drought_P Parameter: Organism Value: A. thaliana
  misc_feature: MA Experiment 20000437 PARAMETER Experiment Name: At_Drought_P Parameter: Plant Line Value: WS
  misc_feature: MA Experiment 20000437 PARAMETER Experiment Name: At_Drought_P Parameter: Timepoint (hr) Value: 24
  misc_feature: MA Experiment 20000437 PARAMETER Experiment Name: At_Drought_P Parameter: Tissue Value: Whole Plant
  misc_feature: MA Experiment 20000437 PARAMETER Experiment Name: At_Drought_P Parameter: Treatment Value: Drought vs. No Drought
  misc_feature: MA Experiment ID: 20001451 Result: Up-regulated in Transcription
  misc_feature: MA Experiment 20001451 PARAMETER Experiment Name: At_Far-red-induction_P Parameter: Age (day) Value: 7
  misc_feature: MA Experiment 20001451 PARAMETER Experiment Name: At_Far-red-induction_P Parameter: Light Value: Far-red vs. White
  misc_feature: MA Experiment 20001451 PARAMETER Experiment Name: At_Far-red-induction_P Parameter: Organism Value: A. thaliana
  misc_feature: MA Experiment 20001451 PARAMETER Experiment Name: At_Far-red-induction_P Parameter: Plant Line Value: Columbia
  misc_feature: MA Experiment 20001451 PARAMETER Experiment Name: At_Far-red-induction_P Parameter: Timepoint (hr) Value: 24
  misc_feature: MA Experiment 20001451 PARAMETER Experiment Name: At_Far-red-induction_P Parameter: Tissue Value: Whole Plant
atacaaaaaaaactctcttctcaagtctctccttcttctccgtccttcccaattcttccgttcaaacaaatttctccaaacccaaaccctaatttcctccgtctgtgaaatcaagggttttctctgatctgggttttgatcagaaatcagatctaggtttaattttcgaaatcaaattatgaggaagagagaaagagagaacccttgttcgatttgtgggcattaccataagtacgaggaaggagaagtatgtggagtctgtggtcactgtatgcctgtttcttccgatacggtggcgccgcaacaagtccacgtcagtgcttttccgtcggagattctccctgagtttctttacctcggtagttacgacaacgcttctcgctctgagcttcttaagactcaaggaatctctcgtgttcttaatacggttcctatgtgccagaatctctacaggaattcattcacttatcatggtcttgataatgaaaaagttttacagtttgatgatgctattaagttcttagaccaatgtgagaaggacaaggcacgtgttcttgtgcattgcatgtctgggaaaagtagatcaccagcggttgttgtagcgtacttgatgaaacgaaaagggtggagactcgctgagagtcatcagtgggttaaacaacggagaccaagcactgacataagtccagagttttaccaacaactgcaggagtttgagcaggggatattcggatctgagatgatgtcggcgatgaatattaatgatgctccaacgtttgggtttggtttccctaagattgataatcaagcacaagctcctgtgttcaacaatgctcctacttcttctatattttcatctcctgcttcaagtatccctcctcaggagttcacttttggagcaactccaccaaagccaacaactggtggtgatattgcaatggatggctcttagaaccagataatcatatactcttgcaagaattttcatcaacaaatatactgttgtgagaatgtttctttttcttttttgtacatggagattggtgcattgcttgagagagtttggggtttgagaacatgagattggaagcatctttgtctggtttattcctcactctcccacaattctgtatcgatctttacagcgaaatatactattaaacc

SEQ ID NO: 26904 - protein, 257 aa, Arabidopsis thaliana; identical to SEQ ID NO: 22394
  peptide (1)..(257): Ceres Seq. ID no. 12674199
  misc_feature (50)..(233): Homolog of NCBI NO: 14715265 NR Description: MAP kinase phosphatase XCL100(beta) protein
  misc_feature (50)..(233): Homolog of NCBI NO: 4758204 NR Description: dual specificity phosphatase 1
  misc_feature (50)..(233): Homolog of NCBI NO: 28277750 NR Description: Similar to dual specificity phosphatase 1 [Danio
  misc_feature (50)..(231): Homolog of NCBI NO: 2582561 NR Description: MAP kinase phosphatase-1 [Gallus gallus]
  misc_feature (44)..(233): Homolog of NCBI NO: 16950652 NR Description: dual specificity phosphatase 4 isoform 2
  misc_feature (41)..(230): Homolog of NCBI NO: 30851156 NR Description: Unknown (protein for MGC:55423) [Danio rerio]
  misc_feature (27)..(233): Homolog of NCBI NO: 1050849 NR Description: MAP kinase phosphatase [Xenopus laevis]
  misc_feature (171)..(257): Homolog of NCBI NO: 15228155 NR Description: putative protein phosphatase; protein id:
  misc_feature (1)..(173): Homolog of NCBI NO: 15228155 NR Description: putative protein phosphatase; protein id:
  misc_feature (1)..(257): Homolog of NCBI NO: 28393745 NR Description: putative protein phosphatase [Arabidopsis

SEQ ID NO: 26905 - protein, 226 aa, Arabidopsis thaliana; identical to SEQ ID NO: 22395
  peptide (1)..(226): Ceres Seq. ID no. 12674200
  misc_feature (19)..(202): Homolog of NCBI NO: 14715265 NR Description: MAP kinase phosphatase XCL100(beta) protein
  misc_feature (19)..(202): Homolog of NCBI NO: 4758204 NR Description: dual specificity phosphatase 1
  misc_feature (19)..(202): Homolog of NCBI NO: 28277750 NR Description: Similar to dual specificity phosphatase 1 [Danio
  misc_feature (19)..(200): Homolog of NCBI NO: 2582561 NR Description: MAP kinase phosphatase-1 [Gallus gallus]
  misc_feature (13)..(202): Homolog of NCBI NO: 16950652 NR Description: dual specificity phosphatase 4 isoform 2
  misc_feature (10)..(199): Homolog of NCBI NO: 30851156 NR Description: Unknown (protein for MGC:55423) [Danio rerio]
  misc_feature (1)..(202): Homolog of NCBI NO: 1050849 NR Description: MAP kinase phosphatase [Xenopus laevis]
  misc_feature (140)..(226): Homolog of NCBI NO: 15228155 NR Description: putative protein phosphatase; protein id:
  misc_feature (1)..(142): Homolog of NCBI NO: 15228155 NR Description: putative protein phosphatase; protein id:
  misc_feature (1)..(226): Homolog of NCBI NO: 28393745 NR Description: putative protein phosphatase [Arabidopsis

SEQ ID NO: 26906 - protein, 172 aa, Arabidopsis thaliana; identical to SEQ ID NO: 22396
  peptide (1)..(172): Ceres Seq. ID no. 12674201
  misc_feature (1)..(148): Homolog of NCBI NO: 14715265 NR Description: MAP kinase phosphatase XCL100(beta) protein
  misc_feature (1)..(148): Homolog of NCBI NO: 4758204 NR Description: dual specificity phosphatase 1
  misc_feature (1)..(148): Homolog of NCBI NO: 28277750 NR Description: Similar to dual specificity phosphatase 1 [Danio
  misc_feature (1)..(146): Homolog of NCBI NO: 2582561 NR Description: MAP kinase phosphatase-1 [Gallus gallus]
  misc_feature (1)..(148): Homolog of NCBI NO: 16950652 NR Description: dual specificity phosphatase 4 isoform 2
  misc_feature (1)..(145): Homolog of NCBI NO: 30851156 NR Description: Unknown (protein for MGC:55423) [Danio rerio]
  misc_feature (1)..(148): Homolog of NCBI NO: 1050849 NR Description: MAP kinase phosphatase [Xenopus laevis]
  misc_feature (86)..(172): Homolog of NCBI NO: 15228155 NR Description: putative protein phosphatase; protein id:
  misc_feature (1)..(88): Homolog of NCBI NO: 15228155 NR Description: putative protein phosphatase; protein id:
  misc_feature (1)..(172): Homolog of NCBI NO: 28393745 NR Description: putative protein phosphatase [Arabidopsis

SEQ ID NO: 26907 - DNA, 1394 bp, Arabidopsis thaliana
  misc_feature (1)..(1394): Ceres Seq. ID no. 12421706
  misc_feature: MA Experiment ID: 108461 Result: Up-regulated in Transcription
  misc_feature: MA Experiment 108461 PARAMETER Experiment Name: At_Germinating_Seeds_cDNA_P Parameter: Age (day) Value: 1 vs. 0
  misc_feature: MA Experiment 108461 PARAMETER Experiment Name: At_Germinating_Seeds_cDNA_P Parameter: Tissue Value: Germinating Seeds
  misc_feature: MA Experiment ID: 108462 Result: Up-regulated in Transcription
  misc_feature: MA Experiment 108462 PARAMETER Experiment Name: At_Germinating_Seeds_cDNA_P Parameter: Age (day) Value: 2 vs. 0
  misc_feature: MA Experiment 108462 PARAMETER Experiment Name: At_Germinating_Seeds_cDNA_P Parameter: Tissue Value: Germinating Seeds
  misc_feature: MA Experiment ID: 108463 Result: Up-regulated in Transcription
  misc_feature: MA Experiment 108463 PARAMETER Experiment Name: At_Germinating_Seeds_cDNA_P Parameter: Age (day) Value: 3 vs. 0
  misc_feature: MA Experiment 108463 PARAMETER Experiment Name: At_Germinating_Seeds_cDNA_P Parameter: Tissue Value: Germinating Seeds
  misc_feature: MA Experiment ID: 108464 Result: Up-regulated in Transcription
  misc_feature: MA Experiment 108464 PARAMETER Experiment Name: At_Germinating_Seeds_cDNA_P Parameter: Age (day) Value: 4 vs. 0
  misc_feature: MA Experiment 108464 PARAMETER Experiment Name: At_Germinating_Seeds_cDNA_P Parameter: Tissue Value: Germinating Seeds
  misc_feature: MA Experiment ID: 108561 Result: Down-regulated in Transcription
  misc_feature: MA Experiment 108561 PARAMETER Experiment Name: At_100uM_ABA_cDNA_P Parameter: Timepoint (hr) Value: 6
  misc_feature: MA Experiment 108561 PARAMETER Experiment Name: At_100uM_ABA_cDNA_P Parameter: Tissue Value: Aerial
  misc_feature: MA Experiment 108561 PARAMETER Experiment Name: At_100uM_ABA_cDNA_P Parameter: Treatment Value: 100uM ABA vs. No Treatment
  misc_feature: MA Experiment ID: 108572 Result: Down-regulated in Transcription
  misc_feature: MA Experiment 108572 PARAMETER Experiment Name: At_Drought_cDNA_P Parameter: Timepoint (hr) Value: 1
  misc_feature: MA Experiment 108572 PARAMETER Experiment Name: At_Drought_cDNA_P Parameter: Tissue Value: Aerial
  misc_feature: MA Experiment 108572 PARAMETER Experiment Name: At_Drought_cDNA_P Parameter: Treatment Value: Drought vs. No Drought
  misc_feature: MA Experiment ID: 108573 Result: Down-regulated in Transcription
  misc_feature: MA Experiment 108573 PARAMETER Experiment Name: At_Drought_cDNA_P Parameter: Timepoint (hr) Value: 6
  misc_feature: MA Experiment 108573 PARAMETER Experiment Name: At_Drought_cDNA_P Parameter: Tissue Value: Aerial
  misc_feature: MA Experiment 108573 PARAMETER Experiment Name: At_Drought_cDNA_P Parameter: Treatment Value: Drought vs. No Drought
  misc_feature: MA Experiment ID: 108579 Result: Up-regulated in Transcription
  misc_feature: MA Experiment 108579 PARAMETER Experiment Name: At_4deg_Cold_cDNA_P Parameter: Temperature (deg C) Value: 4 vs. 22
  misc_feature: MA Experiment 108579 PARAMETER Experiment Name: At_4deg_Cold_cDNA_P Parameter: Timepoint (hr) Value: 6
  misc_feature: MA Experiment 108579 PARAMETER Experiment Name: At_4deg_Cold_cDNA_P Parameter: Tissue Value: Aerial
  misc_feature: MA Experiment ID: 108595 Result: Down-regulated in Transcription
  misc_feature: MA Experiment 108595 PARAMETER Experiment Name: At_Ler-pi_Ovule_cDNA_P Parameter: Plant Line Value: null
  misc_feature: MA Experiment ID: 20000069 Result: Down-regulated in Transcription
  misc_feature: MA Experiment 20000069 PARAMETER Experiment Name: At_100uM_ABA_Mutants_cDNA_P Parameter: Plant Line Value: CS23
  misc_feature: MA Experiment 20000069 PARAMETER Experiment Name: At_100uM_ABA_Mutants_cDNA_P Parameter: Timepoint (hr) Value: 6
  misc_feature: MA Experiment 20000069 PARAMETER Experiment Name: At_100uM_ABA_Mutants_cDNA_P Parameter: Tissue Value: Aerial
  misc_feature: MA Experiment 20000069 PARAMETER Experiment Name: At_100uM_ABA_Mutants_cDNA_P Parameter: Treatment Value: 100uM ABA vs. No Treatment
  misc_feature: MA Experiment ID: 20000071 Result: Down-regulated in Transcription
  misc_feature: MA Experiment 20000071 PARAMETER Experiment Name: At_100uM_ABA_Mutants_cDNA_P Parameter: Plant Line Value: CS8104
  misc_feature: MA Experiment 20000071 PARAMETER Experiment Name: At_100uM_ABA_Mutants_cDNA_P Parameter: Timepoint (hr) Value: 6
  misc_feature: MA Experiment 20000071 PARAMETER Experiment Name: At_100uM_ABA_Mutants_cDNA_P Parameter: Tissue Value: Aerial
  misc_feature: MA Experiment 20000071 PARAMETER Experiment Name: At_100uM_ABA_Mutants_cDNA_P Parameter: Treatment Value: 100uM ABA vs. No Treatment
  misc_feature: MA Experiment ID: 20000072 Result: Down-regulated in Transcription
  misc_feature: MA Experiment 20000072 PARAMETER Experiment Name: At_100uM_ABA_Mutants_cDNA_P Parameter: Plant Line Value: CS8105
  misc_feature: MA Experiment 20000072 PARAMETER Experiment Name: At_100uM_ABA_Mutants_cDNA_P Parameter: Timepoint (hr) Value: 6
  misc_feature: MA Experiment 20000072 PARAMETER Experiment Name: At_100uM_ABA_Mutants_cDNA_P Parameter: Tissue Value: Aerial
  misc_feature: MA Experiment 20000072 PARAMETER Experiment Name: At_100uM_ABA_Mutants_cDNA_P Parameter: Treatment Value: 100uM ABA vs. No Treatment
  misc_feature: MA Experiment ID: 20000086 Result: Down-regulated in Transcription
  misc_feature: MA Experiment 20000086 PARAMETER Experiment Name: At_100uM_ABA_Mutants_cDNA_P Parameter: Plant Line Value: CS22
  misc_feature: MA Experiment 20000086 PARAMETER Experiment Name: At_100uM_ABA_Mutants_cDNA_P Parameter: Timepoint (hr) Value: 6
  misc_feature: MA Experiment 20000086 PARAMETER Experiment Name: At_100uM_ABA_Mutants_cDNA_P Parameter: Tissue Value: Aerial
  misc_feature: MA Experiment 20000086 PARAMETER Experiment Name: At_100uM_ABA_Mutants_cDNA_P Parameter: Treatment Value: 100uM ABA vs. No Treatment
  misc_feature: MA Experiment ID: 20000087 Result: Down-regulated in Transcription
  misc_feature: MA Experiment 20000087 PARAMETER Experiment Name: At_100uM_ABA_Mutants_cDNA_P Parameter: Plant Line Value: WS
  misc_feature: MA Experiment 20000087 PARAMETER Experiment Name: At_100uM_ABA_Mutants_cDNA_P Parameter: Timepoint (hr) Value: 6
  misc_feature: MA Experiment 20000087 PARAMETER Experiment Name: At_100uM_ABA_Mutants_cDNA_P Parameter: Tissue Value: Aerial
  misc_feature: MA Experiment 20000087 PARAMETER Experiment Name: At_100uM_ABA_Mutants_cDNA_P Parameter: Treatment Value: 100uM ABA vs. No Treatment
  misc_feature: MA Experiment ID: 20000088 Result: Down-regulated in Transcription
  misc_feature: MA Experiment 20000088 PARAMETER Experiment Name: At_100uM_ABA_Mutants_cDNA_P Parameter: Plant Line Value: Landsberg
  misc_feature: MA Experiment 20000088 PARAMETER Experiment Name: At_100uM_ABA_Mutants_cDNA_P Parameter: Timepoint (hr) Value: 6
  misc_feature: MA Experiment 20000088 PARAMETER Experiment Name: At_100uM_ABA_Mutants_cDNA_P Parameter: Tissue Value: Aerial
  misc_feature: MA Experiment 20000088 PARAMETER Experiment Name: At_100uM_ABA_Mutants_cDNA_P Parameter: Treatment Value: 100uM ABA vs. No Treatment
  misc_feature: MA Experiment ID: 20000089 Result: Down-regulated in Transcription
  misc_feature: MA Experiment ID: 20000179 Result: Up-regulated in Transcription
  misc_feature: MA Experiment 20000179 PARAMETER Experiment Name: At_Germinating_Seeds_P Parameter: Age (hr) Value: 6 vs. 0
  misc_feature: MA Experiment 20000179 PARAMETER Experiment Name: At_Germinating_Seeds_P Parameter: Tissue Value: Germinating Seeds
  misc_feature: MA Experiment ID: 20000180 Result: Up-regulated in Transcription
  misc_feature: MA Experiment 20000180 PARAMETER Experiment Name: At_Germinating_Seeds_P Parameter: Age (hr) Value: 24 vs. 0
  misc_feature: MA Experiment 20000180 PARAMETER Experiment Name: At_Germinating_Seeds_P Parameter: Tissue Value: Germinating Seeds
  misc_feature: MA Experiment ID: 20000184 Result: Up-regulated in Transcription
  misc_feature: MA Experiment 20000184 PARAMETER Experiment Name: At_Shoots__P Parameter: Age (day) Value: 7
  misc_feature: MA Experiment 20000184 PARAMETER Experiment Name: At_Shoots__P Parameter: Tissue Value: Shoots vs. Whole Plant
  misc_feature: MA Experiment ID: 20000185 Result: Up-regulated in Transcription
  misc_feature: MA Experiment 20000185 PARAMETER Experiment Name: At_Roots__P Parameter: Age (day) Value: 7 vs. 21
  misc_feature: MA Experiment 20000185 PARAMETER Experiment Name: At_Roots__P Parameter: Organism Value: A. thaliana
  misc_feature: MA Experiment 20000185 PARAMETER Experiment Name: At_Roots__P Parameter: Tissue Value: Roots vs. Whole Plant
  misc_feature: MA Experiment ID: 20000224 Result: Up-regulated in Transcription
  misc_feature: MA Experiment ID: 20000264 Result: Down-regulated in Transcription
  misc_feature: MA Experiment 20000264 PARAMETER Experiment Name: At_Open_Flower_P Parameter: Age (day) Value: 21
  misc_feature: MA Experiment 20000264 PARAMETER Experiment Name: At_Open_Flower_P Parameter: Plant Line Value: WS
  misc_feature: MA Experiment 20000264 PARAMETER Experiment Name: At_Open_Flower_P Parameter: Tissue Value: Open Flower vs. Whole Plant
  misc_feature: MA Experiment ID: 20000437 Result: Down-regulated in Transcription
  misc_feature: MA Experiment 20000437 PARAMETER Experiment Name: At_Drought_P Parameter: Age (day) Value: 8
  misc_feature: MA Experiment 20000437 PARAMETER Experiment Name: At_Drought_P Parameter: Organism Value: A. thaliana
  misc_feature: MA Experiment 20000437 PARAMETER Experiment Name: At_Drought_P Parameter: Plant Line Value: WS
  misc_feature: MA Experiment 20000437 PARAMETER Experiment Name: At_Drought_P Parameter: Timepoint (hr) Value: 24
  misc_feature: MA Experiment 20000437 PARAMETER Experiment Name: At_Drought_P Parameter: Tissue Value: Whole Plant
  misc_feature: MA Experiment 20000437 PARAMETER Experiment Name: At_Drought_P Parameter: Treatment Value: Drought vs. No Drought
  misc_feature: MA Experiment ID: 20000438 Result: Up-regulated in Transcription
  misc_feature: MA Experiment 20000438 PARAMETER Experiment Name: At_Shoots__P Parameter: Age (day) Value: 14
  misc_feature: MA Experiment 20000438 PARAMETER Experiment Name: At_Shoots__P Parameter: Tissue Value: Shoots vs. Whole Plant
  misc_feature: MA Experiment ID: 20000439 Result: Up-regulated in Transcription
  misc_feature: MA Experiment 20000439 PARAMETER Experiment Name: At_Roots__P Parameter: Age (day) Value: 14 vs. 21
  misc_feature: MA Experiment 20000439 PARAMETER Experiment Name: At_Roots__P Parameter: Organism Value: A. thaliana
  misc_feature: MA Experiment 20000439 PARAMETER Experiment Name: At_Roots__P Parameter: Tissue Value: Roots vs. Whole Plant
  misc_feature: MA Experiment ID: 20001248 Result: Down-regulated in Transcription
  misc_feature: MA Experiment 20001248 PARAMETER Experiment Name: At_Far-red-induction_P Parameter: Age (day) Value: 7
  misc_feature: MA Experiment 20001248 PARAMETER Experiment Name: At_Far-red-induction_P Parameter: Light Value: Far-red vs. White
  misc_feature: MA Experiment 20001248 PARAMETER Experiment Name: At_Far-red-induction_P Parameter: Organism Value: A. thaliana
  misc_feature: MA Experiment 20001248 PARAMETER Experiment Name: At_Far-red-induction_P Parameter: Plant Line Value: Columbia
  misc_feature: MA Experiment 20001248 PARAMETER Experiment Name: At_Far-red-induction_P Parameter: Timepoint (hr) Value: 4
  misc_feature: MA Experiment 20001248 PARAMETER Experiment Name: At_Far-red-induction_P Parameter: Tissue Value: Whole Plant
  misc_feature: MA Experiment ID: 20001450 Result: Down-regulated in Transcription
  misc_feature: MA Experiment 20001450 PARAMETER Experiment Name: At_Far-red-induction_P Parameter: Age (day) Value: 7
  misc_feature: MA Experiment 20001450 PARAMETER Experiment Name: At_Far-red-induction_P Parameter: Light Value: Far-red vs. White
  misc_feature: MA Experiment 20001450 PARAMETER Experiment Name: At_Far-red-induction_P Parameter: Organism Value: A. thaliana
  misc_feature: MA Experiment 20001450 PARAMETER Experiment Name: At_Far-red-induction_P Parameter: Plant Line Value: Columbia
  misc_feature: MA Experiment 20001450 PARAMETER Experiment Name: At_Far-red-induction_P Parameter: Timepoint (hr) Value: 8
  misc_feature: MA Experiment 20001450 PARAMETER Experiment Name: At_Far-red-induction_P Parameter: Tissue Value: Whole Plant
  misc_feature: MA Experiment ID: 20001555 Result: Down-regulated in Transcription
  misc_feature: MA Experiment 20001555 PARAMETER Experiment Name: At_Drought_Soil_Dry_P Parameter: Age (day) Value: 24
  misc_feature: MA Experiment 20001555 PARAMETER Experiment Name: At_Drought_Soil_Dry_P Parameter: Organism Value: A. thaliana
  misc_feature: MA Experiment 20001555 PARAMETER Experiment Name: At_Drought_Soil_Dry_P Parameter: Plant Line Value: WS
  misc_feature: MA Experiment 20001555 PARAMETER Experiment Name: At_Drought_Soil_Dry_P Parameter: Post Timepoint (hr) Value: None
  misc_feature: MA Experiment 20001555 PARAMETER Experiment Name: At_Drought_Soil_Dry_P Parameter: Post-Treatment Value: None
  misc_feature: MA Experiment 20001555 PARAMETER Experiment Name: At_Drought_Soil_Dry_P Parameter: Timepoint (day) Value: 10
  misc_feature: MA Experiment 20001555 PARAMETER Experiment Name: At_Drought_Soil_Dry_P Parameter: Treatment Value: Drought vs. No Drought
  misc_feature: MA Experiment ID: 20001556 Result: Down-regulated in Transcription
  misc_feature: MA Experiment 20001556 PARAMETER Experiment Name: At_Drought_Soil_Dry_P Parameter: Age (day) Value: 26
  misc_feature: MA Experiment 20001556 PARAMETER Experiment Name: At_Drought_Soil_Dry_P Parameter: Organism Value: A. thaliana
  misc_feature: MA Experiment 20001556 PARAMETER Experiment Name: At_Drought_Soil_Dry_P Parameter: Plant Line Value: WS
  misc_feature: MA Experiment 20001556 PARAMETER Experiment Name: At_Drought_Soil_Dry_P Parameter: Post Timepoint (hr) Value: None
  misc_feature: MA Experiment 20001556 PARAMETER Experiment Name: At_Drought_Soil_Dry_P Parameter: Post-Treatment Value: None
  misc_feature: MA Experiment 20001556 PARAMETER Experiment Name: At_Drought_Soil_Dry_P Parameter: Timepoint (day) Value: 12
  misc_feature: MA Experiment 20001556 PARAMETER Experiment Name: At_Drought_Soil_Dry_P Parameter: Treatment Value: Drought vs. No Drought
  misc_feature: MA Experiment ID: 20001559 Result: Down-regulated in Transcription
  misc_feature: MA Experiment 20001559 PARAMETER Experiment Name: At_Drought_Soil_Dry_P Parameter: Age (day) Value: 28
  misc_feature: MA Experiment 20001559 PARAMETER Experiment Name: At_Drought_Soil_Dry_P Parameter: Organism Value: A. thaliana
  misc_feature: MA Experiment 20001559 PARAMETER Experiment Name: At_Drought_Soil_Dry_P Parameter: Plant Line Value: WS
  misc_feature: MA Experiment 20001559 PARAMETER Experiment Name: At_Drought_Soil_Dry_P Parameter: Post Timepoint (hr) Value: 29
  misc_feature: MA Experiment 20001559 PARAMETER Experiment Name: At_Drought_Soil_Dry_P Parameter: Post-Treatment Value: Re-Water vs. No Drought
  misc_feature: MA Experiment 20001559 PARAMETER Experiment Name: At_Drought_Soil_Dry_P Parameter: Timepoint (day) Value: 14
  misc_feature: MA Experiment 20001559 PARAMETER Experiment Name: At_Drought_Soil_Dry_P Parameter: Treatment Value: Drought vs. No Drought
  misc_feature: MA Experiment ID: 20001904 Result: Down-regulated in Transcription
  misc_feature: MA Experiment 20001904 PARAMETER Experiment Name: At_Drought_Reproduction_P Parameter: Age (day) Value: 37
  misc_feature: MA Experiment 20001904 PARAMETER Experiment Name: At_Drought_Reproduction_P Parameter: Organism Value: A. thaliana
  misc_feature: MA Experiment 20001904 PARAMETER Experiment Name: At_Drought_Reproduction_P Parameter: Plant Line Value: WS
  misc_feature: MA Experiment 20001904 PARAMETER Experiment Name: At_Drought_Reproduction_P Parameter: Timepoint (day) Value: 7
  misc_feature: MA Experiment 20001904 PARAMETER Experiment Name: At_Drought_Reproduction_P Parameter: Tissue Value: Rosettes
  misc_feature: MA Experiment 20001904 PARAMETER Experiment Name: At_Drought_Reproduction_P Parameter: Treatment Value: Drought vs. No Drought
  misc_feature: MA Experiment ID: 20001905 Result: Down-regulated in Transcription
  misc_feature: MA Experiment 20001905 PARAMETER Experiment Name: At_Drought_Reproduction_P Parameter: Age (day) Value: 40
  misc_feature: MA Experiment 20001905 PARAMETER Experiment Name: At_Drought_Reproduction_P Parameter: Organism Value: A. thaliana
  misc_feature: MA Experiment 20001905 PARAMETER Experiment Name: At_Drought_Reproduction_P Parameter: Plant Line Value: WS
  misc_feature: MA Experiment 20001905 PARAMETER Experiment Name: At_Drought_Reproduction_P Parameter: Timepoint (day) Value: 10
  misc_feature: MA Experiment 20001905 PARAMETER Experiment Name: At_Drought_Reproduction_P Parameter: Tissue Value: Rosettes
  misc_feature: MA Experiment 20001905 PARAMETER Experiment Name: At_Drought_Reproduction_P Parameter: Treatment Value: Drought vs. No Drought
  misc_feature: MA Experiment ID: 20001911 Result: Down-regulated in Transcription
  misc_feature: MA Experiment 20001911 PARAMETER Experiment Name: At_Drought_Reproduction_P Parameter: Age (day) Value: 40
  misc_feature: MA Experiment 20001911 PARAMETER Experiment Name: At_Drought_Reproduction_P Parameter: Organism Value: A. thaliana
  misc_feature: MA Experiment 20001911 PARAMETER Experiment Name: At_Drought_Reproduction_P Parameter: Plant Line Value: WS
  misc_feature: MA Experiment 20001911 PARAMETER Experiment Name: At_Drought_Reproduction_P Parameter: Timepoint (day) Value: 10
  misc_feature: MA Experiment 20001911 PARAMETER Experiment Name: At_Drought_Reproduction_P Parameter: Tissue Value: Flowers
  misc_feature: MA Experiment 20001911 PARAMETER Experiment Name: At_Drought_Reproduction_P Parameter: Treatment Value: Drought vs. No Drought
agtcatgtttccatagacataatctctcaccattgtttttctctgcaaaactaaagaaacaaaaaaagaaaaatcggagaaaccaagaaaaaagaaatgggaagtgtagaagcaggagaaaagaaggctttaggatgggctgcaagagatccttctggtgttctctctccttactcctacactttaaggagcacaggagcagatgatgtgtatataaaggttatatgctgtggaatatgccatactgatattcaccaaattaaaaatgatcttggaatgtctaattatcctatggttcctgggcacgaggtagtaggtgaggtgttggaagtgggatcagatgtgagcaagttcaccgtaggagatgtagtcggagtcggcgtggtcgttggatgctgcggtagctgcaaaccatgcagctcagaacttgagcagtattgtaacaagagaatctggagttacaacgatgtctacaccgatggaaaacctactcaaggtggcttcgccgacaccatgatcgtcaatcaaaagtttgtggtgaagattccagaaggaatggcggtggagcaggctgcaccgctactctgcgcgggagtaacggtttatagtccgttgagccacttcggtctaatggcgagtgggcttaaaggagggattctagggttaggtggagtagggcacatgggtgtgaagatagctaaagcaatgggacaccatgtgactgtgataagctcatcagataagaaaaaagaagaagctatcgaacatttaggagctgacgactatgtggtgagctctgatccagcagagatgcaaagactcgcagattcccttgactacatcattgacaccgtaccggtgtttcaccctctcgacccttacttggcttgtcttaaactcgacgggaaattgattctcatgggtgttatcaacactcctcttcagttcgtgacccctctcgtcattcttgggaggaaagtgatatcagggagctttatagggagcattaaagagacagaagaagtgttggctttctgcaaagagaaagggcttacgtcgacgattgaaactgtgaagatcgatgagcttaacattgcgtttgagaggcttcgcaagaacgatgttcgttacagatttgtggttgatgttgcaggaagtaatctggtggaggaggctgcaacaactacaaactaaagagggcagggcacattgatacatgaacgaaaaattgtaacgggcttgtttgtccaacgaatgttttgttgttgtctttttcaaatggttcaaacacgaatgctttggctttatttttttctaatcaatgtggattttctgtttacgtgtgtttgtcacaagaaaatcattatgataagaattttcttccacttgaactc

SEQ ID NO: 26908 - protein, 365 aa, Arabidopsis thaliana
  peptide (1)..(365): Ceres Seq. ID no. 12421707
  misc_feature (1)..(358): Homolog of NCBI NO: 399168 NR Description: Cinnamyl-alcohol dehydrogenase (CAD)
  misc_feature (1)..(356): Homolog of NCBI NO: 231675 NR Description: Cinnamyl-alcohol dehydrogenase (CAD)
  misc_feature (1)..(357): Homolog of NCBI NO: 1168734 NR Description: Cinnamyl-alcohol dehydrogenase (CAD)
  misc_feature (1)..(357): Homolog of NCBI NO: 7239226 NR Description: cinnamyl alcohol dehydrogenase; CAD [Populus
  misc_feature (1)..(357): Homolog of NCBI NO: 9998899 NR Description: cinnamyl alcohol dehydrogenase
  misc_feature (1)..(356): Homolog of NCBI NO: 15235295 NR Description: cinnamyl alcohol dehydrogenase - like protein
  misc_feature (1)..(359): Homolog of NCBI NO: 1168727 NR Description: Cinnamyl-alcohol dehydrogenase 1 (CAD)
  misc_feature (1)..(365): Homolog of NCBI NO: 629510 NR Description: cinnamyl-alcohol dehydrogenase (EC 1.1.1.195) CAD
  misc_feature (1)..(365): Homolog of NCBI NO: 21593794 NR Description: cinnamyl alcohol dehydrogenase [Arabidopsis
  misc_feature (1)..(365): Homolog of NCBI NO: 15230382 NR Description: cinnamyl alcohol dehydrogenase
MGSVEAGEKKALGWAARDPSGVLSPYSYTLRSTGADDVYIKVICCGICHTDIHQIKNDLGMSNYPMVPGHEVVGEVLEVGSDVSKFTVGDVVGVGVVVGCCGSCKPCSSELEQYCNKRIWSYNDVYTDGKPTQGGFADTMIVNQKFVVKIPEGMAVEQAAPLLCAGVTVYSPLSHFGLMASGLKGGILGLGGVGHMGVKIAKAMGHHVTVISSSDKKKEEAIEHLGADDYVVSSDPAEMQRLADSLDYIIDTVPVFHPLDPYLACLKLDGKLILMGVINTPLQFVTPLVILGRKVISGSFIGSIKETEEVLAFCKEKGLTSTIETVKIDELNIAFERLRKNDVRYRFVVDVAGSNLVEEAATTTN

SEQ ID NO: 26909 - protein, 305 aa, Arabidopsis thaliana
  peptide (1)..(305): Ceres Seq. ID no. 12421708
  misc_feature (1)..(297): Homolog of NCBI NO: 7239226 NR Description: cinnamyl alcohol dehydrogenase; CAD [Populus
  misc_feature (1)..(297): Homolog of NCBI NO: 9998899 NR Description: cinnamyl alcohol dehydrogenase
  misc_feature (1)..(296): Homolog of NCBI NO: 15235295 NR Description: cinnamyl alcohol dehydrogenase - like protein
  misc_feature (1)..(299): Homolog of NCBI NO: 1168727 NR Description: Cinnamyl-alcohol dehydrogenase 1 (CAD)
  misc_feature (1)..(305): Homolog of NCBI NO: 629510 NR Description: cinnamyl-alcohol dehydrogenase (EC 1.1.1.195) CAD
  misc_feature (1)..(305): Homolog of NCBI NO: 21593794 NR Description: cinnamyl alcohol dehydrogenase [Arabidopsis
  misc_feature (1)..(305): Homolog of NCBI NO: 15230382 NR Description: cinnamyl alcohol dehydrogenase
  misc_feature (1)..(298): Homolog of NCBI NO: 399168 NR Description: Cinnamyl-alcohol dehydrogenase (CAD)
  misc_feature (1)..(296): Homolog of NCBI NO: 231675 NR Description: Cinnamyl-alcohol dehydrogenase (CAD)
  misc_feature (1)..(297): Homolog of NCBI NO: 1168734 NR Description: Cinnamyl-alcohol dehydrogenase (CAD)
MSNYPMVPGHEVVGEVLEVGSDVSKFTVGDVVGVGVVVGCCGSCKPCSSELEQYCNKRIWSYNDVYTDGKPTQGGFADTMIVNQKFVVKIPEGMAVEQAAPLLCAGVTVYSPLSHFGLMASGLKGGILGLGGVGHMGVKIAKAMGHHVTVISSSDKKKEEAIEHLGADDYVVSSDPAEMQRLADSLDYIIDTVPVFHPLDPYLACLKLDGKLILMGVINTPLQFVTPLVILGRKVISGSFIGSIKETEEVLAFCKEKGLTSTIETVKIDELNIAFERLRKNDVRYRFVVDVAGSNLVEEAATTTN

SEQ ID NO: 26910 - protein, 300 aa, Arabidopsis thaliana
  peptide (1)..(300): Ceres Seq. ID no. 12421709
  misc_feature (1)..(293): Homolog of NCBI NO: 399168 NR Description: Cinnamyl-alcohol dehydrogenase (CAD)
  misc_feature (1)..(291): Homolog of NCBI NO: 231675 NR Description: Cinnamyl-alcohol dehydrogenase (CAD)
  misc_feature (1)..(292): Homolog of NCBI NO: 1168734 NR Description: Cinnamyl-alcohol dehydrogenase (CAD)
  misc_feature (1)..(292): Homolog of NCBI NO: 7239226 NR Description: cinnamyl alcohol dehydrogenase; CAD [Populus
  misc_feature (1)..(292): Homolog of NCBI NO: 9998899 NR Description: cinnamyl alcohol dehydrogenase
  misc_feature (1)..(291): Homolog of NCBI NO: 15235295 NR Description: cinnamyl alcohol dehydrogenase - like protein
  misc_feature (1)..(294): Homolog of NCBI NO: 1168727 NR Description: Cinnamyl-alcohol dehydrogenase 1 (CAD)
  misc_feature (1)..(300): Homolog of NCBI NO: 629510 NR Description: cinnamyl-alcohol dehydrogenase (EC 1.1.1.195) CAD
  misc_feature (1)..(300): Homolog of NCBI NO: 21593794 NR Description: cinnamyl alcohol dehydrogenase [Arabidopsis
  misc_feature (1)..(300): Homolog of NCBI NO: 15230382 NR Description: cinnamyl alcohol dehydrogenase
MVPGHEVVGEVLEVGSDVSKFTVGDVVGVGVVVGCCGSCKPCSSELEQYCNKRIWSYNDVYTDGKPTQGGFADTMIVNQKFVVKIPEGMAVEQAAPLLCAGVTVYSPLSHFGLMASGLKGGILGLGGVGHMGVKIAKAMGHHVTVISSSDKKKEEAIEHLGADDYVVSSDPAEMQRLADSLDYIIDTVPVFHPLDPYLACLKLDGKLILMGVINTPLQFVTPLVILGRKVISGSFIGSIKETEEVLAFCKEKGLTSTIETVKIDELNIAFERLRKNDVRYRFVVDVAGSNLVEEAATTTN

SEQ ID NO: 26911 - DNA, 1250 bp, Arabidopsis thaliana
  misc_feature (1)..(1250): Ceres Seq. ID no. 12332472
  misc_feature: MA Experiment ID: 108434 Result: Down-regulated in Transcription
  misc_feature: MA Experiment 108434 PARAMETER Experiment Name: At_Root_Tips_cDNA_P Parameter: Tissue Value: Root Tips
  misc_feature: MA Experiment ID: 20000112 Result: Up-regulated in Transcription
  misc_feature: MA Experiment 20000112 PARAMETER Experiment Name: At_42deg_Heat_cDNA_P Parameter: Temperature (deg C) Value: 42 vs. 22
  misc_feature: MA Experiment 20000112 PARAMETER Experiment Name: At_42deg_Heat_cDNA_P Parameter: Timepoint (hr) Value: 2
  misc_feature: MA Experiment 20000112 PARAMETER Experiment Name: At_42deg_Heat_cDNA_P Parameter: Tissue Value: Aerial
  misc_feature: MA Experiment ID: 20000184 Result: Down-regulated in Transcription
  misc_feature: MA Experiment 20000184 PARAMETER Experiment Name: At_Shoots__P Parameter: Age (day) Value: 7
  misc_feature: MA Experiment 20000184 PARAMETER Experiment Name: At_Shoots__P Parameter: Tissue Value: Shoots vs. Whole Plant
  misc_feature: MA Experiment ID: 20000227 Result: Down-regulated in Transcription
  misc_feature: MA Experiment 20000227 PARAMETER Experiment Name: At_Root-Tips-vs-Tops_P Parameter: Tissue Value: Root Tips vs. Root Tops
  misc_feature: MA Experiment ID: 20000794 Result: Up-regulated in Transcription
  misc_feature: MA Experiment 20000794 PARAMETER Experiment Name: At_Petals_P Parameter: Age (day) Value: 23-25 days
  misc_feature: MA Experiment 20000794 PARAMETER Experiment Name: At_Petals_P Parameter: Plant Line Value: WS
  misc_feature: MA Experiment 20000794 PARAMETER Experiment Name: At_Petals_P Parameter: Tissue Value: Petals vs. Whole plant
agaggtttacgctaagggaactcataagtcagagtttgactcgaatttgcttgatcctcgttctgatcctatttgggatgctataagagaagaagctaaacttgaggcagagaaagagcctattttgagtagcttcttgtatgctggtatcttagcacatgattgtttagagcaagctttagggtttgttctagccaaccgtctccaaaacccaaccttgttggcaacacaactcttggatatattttatggtgttatgatgcatgacaaaggtattcagagttcgattcgccatgatctccaggcatttaaagatcgtgatcctgcttgtctgtcgtatagttctgctattttacatctgaagggttatcatgcgttacaagcatatagggttgcgcataaactgtggaatgaagggaggaaactattagctcttgcattgcaaagccgaataagcgaggtagttggtgatcgttgtcttttggttgagtcttgctggagctgcatttttgagctcaatgtctgatctatgctgtggtttctctcaggtttttggcattgacatacacccaggtagagttttgagcttcatatctctgctctcatctgtttgaacattctcagtttcccttctctgttgtaatagttgatcaggtttaccgatgaattgattgctggttatacatattacttgaattctctttctgcatagcggcaagaattggggagggaatattgttggatcatggaactggagtggtcattggtgagaccgctgtgataggcaacggtgtctcgatcttacatggtgtgactttaggaggaaccggaaaggaaactggcgatcgccacccaaagataggtgaaggtgcattgcttggagcttgtgtgactatacttggtaacataagcataggtgctggagcaatggtagctgcaggttcacttgtgttaaaagacgttccttcgcatagtgtggtggctggaaatcctgcaaaactgatcagggtcatggaagagcaagacccgtctctagcaatgaaacacgatgctactaaagagttctttcgacatgtagctgatggttacaaaggggcacaatctaacggaccatcactttcagcaggagatacagagaaaggacacactaacagcacatcatgagatctttgtatgcaaatttcttaccatcataagctaattcttgtatgctcttgcttatcatcataagctaatctcagcatttcctc

SEQ ID NO: 26912 - protein, 174 aa, Arabidopsis thaliana
  peptide (1)..(174): Ceres Seq. ID no. 12332473
  misc_feature (24)..(154): Homolog of NCBI NO: 1361979 NR Description: serine O-acetyltransferase (EC 2.3.1.30) -
  misc_feature (2)..(158): Homolog of NCBI NO: 7433700 NR Description: serine O-acetyltransferase (EC 2.3.1.30)
  misc_feature (2)..(154): Homolog of NCBI NO: 22758278 NR Description: Putative serine acetyltransferase
  misc_feature (2)..(158): Homolog of NCBI NO: 30690434 NR Description: acetyltransferase family [Arabidopsis thaliana]
  misc_feature (2)..(156): Homolog of NCBI NO: 17225592 NR Description: serine acetyltransferase [Arabidopsis thaliana]
  misc_feature (1)..(158): Homolog of NCBI NO: 7433701 NR Description: serine O-acetyltransferase (EC 2.3.1.30)
  misc_feature (1)..(156): Homolog of NCBI NO: 25286519 NR Description: probable serine acetyltransferase
  misc_feature (1)..(156): Homolog of NCBI NO: 20198259 NR Description: serine acetyltransferase (GB:AF112303)
  misc_feature (1)..(156): Homolog of NCBI NO: 18398491 NR Description: expressed protein
  misc_feature (1)..(156): Homolog of NCBI NO: 5597011 NR Description: serine acetyltranferase 2 [Arabidopsis thaliana]
EVYAKGTHKSEFDSNLLDPRSDPIWDAIREEAKLEAEKEPILSSFLYAGILAHDCLEQALGFVLANRLQNPTLLATQLLDIFYGVMMHDKGIQSSIRHDLQAFKDRDPACLSYSSAILHLKGYHALQAYRVAHKLWNEGRKLLALALQSRISEVVGDRCLLVESCWSCIFELNV

SEQ ID NO: 26913 - protein, 89 aa, Arabidopsis thaliana
  peptide (1)..(89): Ceres Seq. ID no. 12332474
  misc_feature (1)..(69): Homolog of NCBI NO: 1361979 NR Description: serine O-acetyltransferase (EC 2.3.1.30) -
  misc_feature (1)..(73): Homolog of NCBI NO: 7433700 NR Description: serine O-acetyltransferase (EC 2.3.1.30)
  misc_feature (1)..(69): Homolog of NCBI NO: 22758278 NR Description: Putative serine acetyltransferase
  misc_feature (1)..(73): Homolog of NCBI NO: 30690434 NR Description: acetyltransferase family [Arabidopsis thaliana]
  misc_feature (1)..(71): Homolog of NCBI NO: 17225592 NR Description: serine acetyltransferase [Arabidopsis thaliana]
  misc_feature (1)..(73): Homolog of NCBI NO: 7433701 NR Description: serine O-acetyltransferase (EC 2.3.1.30)
  misc_feature (1)..(71): Homolog of NCBI NO: 25286519 NR Description: probable serine acetyltransferase
  misc_feature (1)..(71): Homolog of NCBI NO: 20198259 NR Description: serine acetyltransferase (GB:AF112303)
  misc_feature (1)..(71): Homolog of NCBI NO: 18398491 NR Description: expressed protein
  misc_feature (1)..(71): Homolog of NCBI NO: 5597011 NR Description: serine acetyltranferase 2 [Arabidopsis thaliana]
MMHDKGIQSSIRHDLQAFKDRDPACLSYSSAILHLKGYHALQAYRVAHKLWNEGRKLLALALQSRISEVVGDRCLLVESCWSCIFELNV

SEQ ID NO: 26914 - protein, 88 aa, Arabidopsis thaliana
  peptide (1)..(88): Ceres Seq. ID no. 12332475
  misc_feature (1)..(68): Homolog of NCBI NO: 1361979 NR Description: serine O-acetyltransferase (EC 2.3.1.30) -
  misc_feature (1)..(72): Homolog of NCBI NO: 7433700 NR Description: serine O-acetyltransferase (EC 2.3.1.30)
  misc_feature (1)..(68): Homolog of NCBI NO: 22758278 NR Description: Putative serine acetyltransferase
  misc_feature (1)..(72): Homolog of NCBI NO: 30690434 NR Description: acetyltransferase family [Arabidopsis thaliana]
  misc_feature (1)..(70): Homolog of NCBI NO: 17225592 NR Description: serine acetyltransferase [Arabidopsis thaliana]
  misc_feature (1)..(72): Homolog of NCBI NO: 7433701 NR Description: serine O-acetyltransferase (EC 2.3.1.30)
  misc_feature (1)..(70): Homolog of NCBI NO: 25286519 NR Description: probable serine acetyltransferase
  misc_feature (1)..(70): Homolog of NCBI NO: 20198259 NR Description: serine acetyltransferase (GB:AF112303)
  misc_feature (1)..(70): Homolog of NCBI NO: 18398491 NR Description: expressed protein
  misc_feature (1)..(70): Homolog of NCBI NO: 5597011 NR Description: serine acetyltranferase 2 [Arabidopsis thaliana]
MHDKGIQSSIRHDLQAFKDRDPACLSYSSAILHLKGYHALQAYRVAHKLWNEGRKLLALALQSRISEVVGDRCLLVESCWSCIFELNV

SEQ ID NO: 26915 - DNA, 1325 bp, Arabidopsis thaliana
  misc_feature (1)..(1325): Ceres Seq. ID no. 13488426
  misc_feature: MA Experiment ID: 108461 Result: Up-regulated in Transcription
  misc_feature: MA Experiment 108461 PARAMETER Experiment Name: At_Germinating_Seeds_cDNA_P Parameter: Age (day) Value: 1 vs. 0
  misc_feature: MA Experiment 108461 PARAMETER Experiment Name: At_Germinating_Seeds_cDNA_P Parameter: Tissue Value: Germinating Seeds
  misc_feature: MA Experiment ID: 20000070 Result: Down-regulated in Transcription
  misc_feature: MA Experiment 20000070 PARAMETER Experiment Name: At_100uM_ABA_Mutants_cDNA_P Parameter: Plant Line Value: CS24
  misc_feature: MA Experiment 20000070 PARAMETER Experiment Name: At_100uM_ABA_Mutants_cDNA_P Parameter: Timepoint (hr) Value: 6
  misc_feature: MA Experiment 20000070 PARAMETER Experiment Name: At_100uM_ABA_Mutants_cDNA_P Parameter: Tissue Value: Aerial
  misc_feature: MA Experiment 20000070 PARAMETER Experiment Name: At_100uM_ABA_Mutants_cDNA_P Parameter: Treatment Value: 100uM ABA vs. No Treatment
  misc_feature: MA Experiment ID: 20000071 Result: Down-regulated in Transcription
  misc_feature: MA Experiment 20000071 PARAMETER Experiment Name: At_100uM_ABA_Mutants_cDNA_P Parameter: Plant Line Value: CS8104
  misc_feature: MA Experiment 20000071 PARAMETER Experiment Name: At_100uM_ABA_Mutants_cDNA_P Parameter: Timepoint (hr) Value: 6
  misc_feature: MA Experiment 20000071 PARAMETER Experiment Name: At_100uM_ABA_Mutants_cDNA_P Parameter: Tissue Value: Aerial
  misc_feature: MA Experiment 20000071 PARAMETER Experiment Name: At_100uM_ABA_Mutants_cDNA_P Parameter: Treatment Value: 100uM ABA vs. No Treatment
  misc_feature: MA Experiment ID: 20000086 Result: Down-regulated in Transcription
  misc_feature: MA Experiment 20000086 PARAMETER Experiment Name: At_100uM_ABA_Mutants_cDNA_P Parameter: Plant Line Value: CS22
  misc_feature: MA Experiment 20000086 PARAMETER Experiment Name: At_100uM_ABA_Mutants_cDNA_P Parameter: Timepoint (hr) Value: 6
  misc_feature: MA Experiment 20000086 PARAMETER Experiment Name: At_100uM_ABA_Mutants_cDNA_P Parameter: Tissue Value: Aerial
  misc_feature: MA Experiment 20000086 PARAMETER Experiment Name: At_100uM_ABA_Mutants_cDNA_P Parameter: Treatment Value: 100uM ABA vs. No Treatment
  misc_feature: MA Experiment ID: 20000087 Result: Down-regulated in Transcription
  misc_feature: MA Experiment 20000087 PARAMETER Experiment Name: At_100uM_ABA_Mutants_cDNA_P Parameter: Plant Line Value: WS
  misc_feature: MA Experiment 20000087 PARAMETER Experiment Name: At_100uM_ABA_Mutants_cDNA_P Parameter: Timepoint (hr) Value: 6
  misc_feature: MA Experiment 20000087 PARAMETER Experiment Name: At_100uM_ABA_Mutants_cDNA_P Parameter: Tissue Value: Aerial
  misc_feature: MA Experiment 20000087 PARAMETER Experiment Name: At_100uM_ABA_Mutants_cDNA_P Parameter: Treatment Value: 100uM ABA vs. No Treatment
  misc_feature: MA Experiment ID: 20000088 Result: Down-regulated in Transcription
  misc_feature: MA Experiment 20000088 PARAMETER Experiment Name: At_100uM_ABA_Mutants_cDNA_P Parameter: Plant Line Value: Landsberg
  misc_feature: MA Experiment 20000088 PARAMETER Experiment Name: At_100uM_ABA_Mutants_cDNA_P Parameter: Timepoint (hr) Value: 6
  misc_feature: MA Experiment 20000088 PARAMETER Experiment Name: At_100uM_ABA_Mutants_cDNA_P Parameter: Tissue Value: Aerial
  misc_feature: MA Experiment 20000088 PARAMETER Experiment Name: At_100uM_ABA_Mutants_cDNA_P Parameter: Treatment Value: 100uM ABA vs. No Treatment
  misc_feature: MA Experiment ID: 20000117 Result: Down-regulated in Transcription
  misc_feature: MA Experiment 20000117 PARAMETER Experiment Name: At_100uM_ABA_Mutants_cDNA_P Parameter: Plant Line Value: Columbia
  misc_feature: MA Experiment 20000117 PARAMETER Experiment Name: At_100uM_ABA_Mutants_cDNA_P Parameter: Timepoint (hr) Value: 6
  misc_feature: MA Experiment 20000117 PARAMETER Experiment Name: At_100uM_ABA_Mutants_cDNA_P Parameter: Tissue Value: Aerial
  misc_feature: MA Experiment 20000117 PARAMETER Experiment Name: At_100uM_ABA_Mutants_cDNA_P Parameter: Treatment Value: 100uM ABA vs. No Treatment
  misc_feature: MA Experiment ID: 20000179 Result: Up-regulated in Transcription
  misc_feature: MA Experiment 20000179 PARAMETER Experiment Name: At_Germinating_Seeds_P Parameter: Age (hr) Value: 6 vs. 0
  misc_feature: MA Experiment 20000179 PARAMETER Experiment Name: At_Germinating_Seeds_P Parameter: Tissue Value: Germinating Seeds
  misc_feature: MA Experiment ID: 20000180 Result: Up-regulated in Transcription
  misc_feature: MA Experiment 20000180 PARAMETER Experiment Name: At_Germinating_Seeds_P Parameter: Age (hr) Value: 24 vs. 0
  misc_feature: MA Experiment 20000180 PARAMETER Experiment Name: At_Germinating_Seeds_P Parameter: Tissue Value: Germinating Seeds
  misc_feature: MA Experiment ID: 20000185 Result: Up-regulated in Transcription
  misc_feature: MA Experiment 20000185 PARAMETER Experiment Name: At_Roots__P Parameter: Age (day) Value: 7 vs. 21
  misc_feature: MA Experiment 20000185 PARAMETER Experiment Name: At_Roots__P Parameter: Organism Value: A. thaliana
  misc_feature: MA Experiment 20000185 PARAMETER Experiment Name: At_Roots__P Parameter: Tissue Value: Roots vs. Whole Plant
  misc_feature: MA Experiment ID: 20000224 Result: Up-regulated in Transcription
  misc_feature: MA Experiment ID: 20000269 Result: Down-regulated in Transcription
  misc_feature: MA Experiment 20000269 PARAMETER Experiment Name: At_1mM_KNO3_L-vs-H_Roots_P Parameter: Age (day) Value: 7,10,12
  misc_feature: MA Experiment 20000269 PARAMETER Experiment Name: At_1mM_KNO3_L-vs-H_Roots_P Parameter: Organism Value: A. thaliana
  misc_feature: MA Experiment 20000269 PARAMETER Experiment Name: At_1mM_KNO3_L-vs-H_Roots_P Parameter: Plant Line Value: WS
  misc_feature: MA Experiment 20000269 PARAMETER Experiment Name: At_1mM_KNO3_L-vs-H_Roots_P Parameter: Timepoint (day) Value: 7,10,12
  misc_feature: MA Experiment 20000269 PARAMETER Experiment Name: At_1mM_KNO3_L-vs-H_Roots_P Parameter: Tissue Value: Roots
  misc_feature: MA Experiment 20000269 PARAMETER Experiment Name: At_1mM_KNO3_L-vs-H_Roots_P Parameter: Treatment Value: 1mM KNO3 vs. 50mM KNO3
  misc_feature: MA Experiment ID: 20000439 Result: Up-regulated in Transcription
  misc_feature: MA Experiment 20000439 PARAMETER Experiment Name: At_Roots__P Parameter: Age (day) Value: 14 vs. 21
  misc_feature: MA Experiment 20000439 PARAMETER Experiment Name: At_Roots__P Parameter: Organism Value: A. thaliana
  misc_feature: MA Experiment 20000439 PARAMETER Experiment Name: At_Roots__P Parameter: Tissue Value: Roots vs. Whole Plant
  misc_feature: MA Experiment ID: 20000573 Result: Down-regulated in Transcription
  misc_feature: MA Experiment 20000573 PARAMETER Experiment Name: At_100uM_ABA_Mutants__P Parameter: Organism Value: A. thaliana
  misc_feature: MA Experiment 20000573 PARAMETER Experiment Name: At_100uM_ABA_Mutants__P Parameter: Plant Line Value: CS22 vs. Ler wt
  misc_feature: MA Experiment 20000573 PARAMETER Experiment Name: At_100uM_ABA_Mutants__P Parameter: Timepoint (hr) Value: N/A
  misc_feature: MA Experiment 20000573 PARAMETER Experiment Name: At_100uM_ABA_Mutants__P Parameter: Tissue Value: Whole Plant
  misc_feature: MA Experiment 20000573 PARAMETER Experiment Name: At_100uM_ABA_Mutants__P Parameter: Treatment Value: None
  misc_feature: MA Experiment ID: 20000794 Result: Up-regulated in Transcription
  misc_feature: MA Experiment 20000794 PARAMETER Experiment Name: At_Petals_P Parameter: Age (day) Value: 23-25 days
  misc_feature: MA Experiment 20000794 PARAMETER Experiment Name: At_Petals_P Parameter: Plant Line Value: WS
  misc_feature: MA Experiment 20000794 PARAMETER Experiment Name: At_Petals_P Parameter: Tissue Value: Petals vs. Whole plant
  misc_feature: MA Experiment ID: 20001248 Result: Down-regulated in Transcription
  misc_feature: MA Experiment 20001248 PARAMETER Experiment Name: At_Far-red-induction_P Parameter: Age (day) Value: 7
  misc_feature: MA Experiment 20001248 PARAMETER Experiment Name: At_Far-red-induction_P Parameter: Light Value: Far-red vs. White
  misc_feature: MA Experiment 20001248 PARAMETER Experiment Name: At_Far-red-induction_P Parameter: Organism Value: A. thaliana
  misc_feature: MA Experiment 20001248 PARAMETER Experiment Name: At_Far-red-induction_P Parameter: Plant Line Value: Columbia
  misc_feature: MA Experiment 20001248 PARAMETER Experiment Name: At_Far-red-induction_P Parameter: Timepoint (hr) Value: 4
  misc_feature: MA Experiment 20001248 PARAMETER Experiment Name: At_Far-red-induction_P Parameter: Tissue Value: Whole Plant
  misc_feature: MA Experiment ID: 20001450 Result: Down-regulated in Transcription
  misc_feature: MA Experiment 20001450 PARAMETER Experiment Name: At_Far-red-induction_P Parameter: Age (day) Value: 7
  misc_feature: MA Experiment 20001450 PARAMETER Experiment Name: At_Far-red-induction_P Parameter: Light Value: Far-red vs. White
  misc_feature: MA Experiment 20001450 PARAMETER Experiment Name: At_Far-red-induction_P Parameter: Organism Value: A. thaliana
  misc_feature: MA Experiment 20001450 PARAMETER Experiment Name: At_Far-red-induction_P Parameter: Plant Line Value: Columbia
  misc_feature: MA Experiment 20001450 PARAMETER Experiment Name: At_Far-red-induction_P Parameter: Timepoint (hr) Value: 8
  misc_feature: MA Experiment 20001450 PARAMETER Experiment Name: At_Far-red-induction_P Parameter: Tissue Value: Whole Plant
  misc_feature: MA Experiment ID: 20001560 Result: Up-regulated in Transcription
  misc_feature: MA Experiment 20001560 PARAMETER Experiment Name: At_Drought_Soil_Dry_P Parameter: Age (day) Value: 28
  misc_feature: MA Experiment 20001560 PARAMETER Experiment Name: At_Drought_Soil_Dry_P Parameter: Organism Value: A. thaliana
  misc_feature: MA Experiment 20001560 PARAMETER Experiment Name: At_Drought_Soil_Dry_P Parameter: Plant Line Value: WS
  misc_feature: MA Experiment 20001560 PARAMETER Experiment Name: At_Drought_Soil_Dry_P Parameter: Post Timepoint (hr) Value: None
  misc_feature: MA Experiment 20001560 PARAMETER Experiment Name: At_Drought_Soil_Dry_P Parameter: Post-Treatment Value: None
  misc_feature: MA Experiment 20001560 PARAMETER Experiment Name: At_Drought_Soil_Dry_P Parameter: Timepoint (day) Value: 14
  misc_feature: MA Experiment 20001560 PARAMETER Experiment Name: At_Drought_Soil_Dry_P Parameter: Treatment Value: Drought vs. No Drought
atgtttaacgttacactcattaagatcgtaccttagggaaaaaaaactcaagagacaaaaaaaaaaggaaggcgcgtcagtgatggagaagattattgacgtagcttatggcgcatcagtgaaggtgggtttgacgttgttggagatgaatctgttgccggatattgtcattaggcggctcacacgtctgcttctggccggtcgtctccgttccggttacaaacccacggcggagatgcaactctccgatctcctccgttttgttgactctataaagaagatgcctatagctatccataccgagaagccaaagactcaacactatgaattaccgacagctttcttcgaacttgtccttggaagaaacatgaagtacagctcttgttacttctcaaacgattcaagtagcttagaagatgcagaggaagcaattttggctctttattgtgaaagagctaaagtggaagatggtcaaagtgttcttgatatcggatgtggctggggatccttgtctttgtacattgcacgcaagtacagcaaatgcaagttaaccggtatctgcaactccaaaacgcagaaagcatttatcgatgagaaatgccggaaactcgggcttcagaatatcgaaatcattgtcgcggatattagcacttttgagcatgaagggacatacgatcggatattctccatcgagatgtttgagcatatgaaaaactatggagagctactaaagaagataggaaagtggatgaaggaagatagtcttctgtttgttcactatttctgccataagacatttgcttaccactttgaggatgtgaatgacgatgactggatcacaagacacttcttcagcggaggaacaatgccatcagcagatcttctgctatattttcaagaaaatgtttcgattgtggatcattggctcgtaagcgggacgcattatgcaaaaacaagtgaagagtggctaaaaagaatggataaggagatagttgcagtaaaaaaaatcatggaagtgacttatgggaaagaagaagcagtgaagtggatggtttactggagaaccttcttcatcgcggttgctgagcttttcggatacaacaatggagaagagtggatggttgcacacttcctcttcaagaagaaatgatgatgatttctttatttttcttccaatttttcaataaagaatacaacaatcccattctactttgtattctatgatgttatggtttcataccaaaggagtttgttcaatctttttaaagtgacaatgttatctcgaaaaacatggggatcaagtatcatgaactggattcttttgt

SEQ ID NO: 26916 - protein, 382 aa, Arabidopsis thaliana
  peptide (1)..(382): Ceres Seq. ID no. 13488427
  misc_feature (211)..(381): Pfam Name: Cyclopropane-fatty-acyl-phospholipid synthase Pfam Description: Cyclopropane-fatty-acyl-phospholipid synthase
  misc_feature (46)..(382): Homolog of NCBI NO: 21230783 NR Description: conserved hypothetical protein
  misc_feature (46)..(382): Homolog of NCBI NO: 21242125 NR Description: conserved hypothetical protein
  misc_feature (28)..(201): Homolog of NCBI NO: 7486449 NR Description: hypothetical protein F4I10.40 - Arabidopsis
  misc_feature (47)..(382): Homolog of NCBI NO: 33413898 NR Description: S-adenosyl-L-methionine:coclaurine
  misc_feature (44)..(382): Homolog of NCBI NO: 16754879 NR Description: coclaurine N-methyltransferase [Coptis japonica]
  misc_feature (94)..(382): Homolog of NCBI NO: 7486450 NR Description: hypothetical protein F4I10.50 - Arabidopsis
  misc_feature (28)..(382): Homolog of NCBI NO: 30689611 NR Description: expressed protein [Arabidopsis thaliana]
  misc_feature (28)..(382): Homolog of NCBI NO: 21593795 NR Description: coclaurine N-methyltransferase [Arabidopsis
  misc_feature (28)..(382): Homolog of NCBI NO: 26451688 NR Description: unknown protein [Arabidopsis thaliana]
  misc_feature (28)..(382): Homolog of NCBI NO: 18418151 NR Description: expressed protein [Arabidopsis thaliana]
CLTLHSLRSYLREKKLKRQKKKEGASVMEKIIDVAYGASVKVGLTLLEMNLLPDIVIRRLTRLLLAGRLRSGYKPTAEMQLSDLLRFVDSIKKMPIAIHTEKPKTQHYELPTAFFELVLGRNMKYSSCYFSNDSSSLEDAEEAILALYCERAKVEDGQSVLDIGCGWGSLSLYIARKYSKCKLTGICNSKTQKAFIDEKCRKLGLQNIEIIVADISTFEHEGTYDRIFSIEMFEHMKNYGELLKKIGKWMKEDSLLFVHYFCHKTFAYHFEDVNDDDWITRHFFSGGTMPSADLLLYFQENVSIVDHWLVSGTHYAKTSEEWLKRMDKEIVAVKKIMEVTYGKEEAVKWMVYWRTFFIAVAELFGYNNGEEWMVAHFLFKKK

SEQ ID NO: 26917 - protein, 355 aa, Arabidopsis thaliana
  peptide (1)..(355): Ceres Seq. ID no. 13488428
  misc_feature (184)..(354): Pfam Name: Cyclopropane-fatty-acyl-phospholipid synthase Pfam Description: Cyclopropane-fatty-acyl-phospholipid synthase
  misc_feature (19)..(355): Homolog of NCBI NO: 21230783 NR Description: conserved hypothetical protein
  misc_feature (19)..(355): Homolog of NCBI NO: 21242125 NR Description: conserved hypothetical protein
  misc_feature (1)..(174): Homolog of NCBI NO: 7486449 NR Description: hypothetical protein F4I10.40 - Arabidopsis
  misc_feature (20)..(355): Homolog of NCBI NO: 33413898 NR Description: S-adenosyl-L-methionine:coclaurine
  misc_feature (17)..(355): Homolog of NCBI NO: 16754879 NR Description: coclaurine N-methyltransferase [Coptis japonica]
  misc_feature (67)..(355): Homolog of NCBI NO: 7486450 NR Description: hypothetical protein F4I10.50 - Arabidopsis
  misc_feature (1)..(355): Homolog of NCBI NO: 30689611 NR Description: expressed protein [Arabidopsis thaliana]
  misc_feature (1)..(355): Homolog of NCBI NO: 21593795 NR Description: coclaurine N-methyltransferase [Arabidopsis
  misc_feature (1)..(355): Homolog of NCBI NO: 26451688 NR Description: unknown protein [Arabidopsis thaliana]
  misc_feature (1)..(355): Homolog of NCBI NO: 18418151 NR Description: expressed protein [Arabidopsis thaliana]
MEKIIDVAYGASVKVGLTLLEMNLLPDIVIRRLTRLLLAGRLRSGYKPTAEMQLSDLLRFVDSIKKMPIAIHTEKPKTQHYELPTAFFELVLGRNMKYSSCYFSNDSSSLEDAEEAILALYCERAKVEDGQSVLDIGCGWGSLSLYIARKYSKCKLTGICNSKTQKAFIDEKCRKLGLQNIEIIVADISTFEHEGTYDRIFSIEMFEHMKNYGELLKKIGKWMKEDSLLFVHYFCHKTFAYHFEDVNDDDWITRHFFSGGTMPSADLLLYFQENVSIVDHWLVSGTHYAKTSEEWLKRMDKEIVAVKKIMEVTYGKEEAVKWMVYWRTFFIAVAELFGYNNGEEWMVAHFLFKKK

SEQ ID NO: 26918 - protein, 334 aa, Arabidopsis thaliana
  peptide (1)..(334): Ceres Seq. ID no. 13488429
  misc_feature (163)..(333): Pfam Name: Cyclopropane-fatty-acyl-phospholipid synthase Pfam Description: Cyclopropane-fatty-acyl-phospholipid synthase
  misc_feature (1)..(334): Homolog of NCBI NO: 21230783 NR Description: conserved hypothetical protein
  misc_feature (1)..(334): Homolog of NCBI NO: 21242125 NR Description: conserved hypothetical protein
  misc_feature (1)..(153): Homolog of NCBI NO: 7486449 NR Description: hypothetical protein F4I10.40 - Arabidopsis
  misc_feature (1)..(334): Homolog of NCBI NO: 33413898 NR Description: S-adenosyl-L-methionine:coclaurine
  misc_feature (1)..(334): Homolog of NCBI NO: 16754879 NR Description: coclaurine N-methyltransferase [Coptis japonica]
  misc_feature (46)..(334): Homolog of NCBI NO: 7486450 NR Description: hypothetical protein F4I10.50 - Arabidopsis
  misc_feature (1)..(334): Homolog of NCBI NO: 30689611 NR Description: expressed protein [Arabidopsis thaliana]
  misc_feature (1)..(334): Homolog of NCBI NO: 21593795 NR Description: coclaurine N-methyltransferase [Arabidopsis
  misc_feature (1)..(334): Homolog of NCBI NO: 26451688 NR Description: unknown protein [Arabidopsis thaliana]
  misc_feature (1)..(334): Homolog of NCBI NO: 18418151 NR Description: expressed protein [Arabidopsis thaliana]
MNLLPDIVIRRLTRLLLAGRLRSGYKPTAEMQLSDLLRFVDSIKKMPIAIHTEKPKTQHYELPTAFFELVLGRNMKYSSCYFSNDSSSLEDAEEAILALYCERAKVEDGQSVLDIGCGWGSLSLYIARKYSKCKLTGICNSKTQKAFIDEKCRKLGLQNIEIIVADISTFEHEGTYDRIFSIEMFEHMKNYGELLKKIGKWMKEDSLLFVHYFCHKTFAYHFEDVNDDDWITRHFFSGGTMPSADLLLYFQENVSIVDHWLVSGTHYAKTSEEWLKRMDKEIVAVKKIMEVTYGKEEAVKWMVYWRTFFIAVAELFGYNNGEEWMVAHFLFKKK

SEQ ID NO: 26919 - DNA, 1154 bp, Arabidopsis thaliana
  misc_feature (1)..(1154): Ceres Seq. ID no. 12385275
  misc_feature: MA Experiment ID: 108435 Result: Up-regulated in Transcription
  misc_feature: MA Experiment 108435 PARAMETER Experiment Name: At_stm_Mutants_cDNA_P Parameter: Plant Line Value: wt Landsburg vs stm
  misc_feature: MA Experiment 108435 PARAMETER Experiment Name: At_stm_Mutants_cDNA_P Parameter: Tissue Value: Shoot Apical Meristem Region
  misc_feature: MA Experiment ID: 108461 Result: Up-regulated in Transcription
  misc_feature: MA Experiment 108461 PARAMETER Experiment Name: At_Germinating_Seeds_cDNA_P Parameter: Age (day) Value: 1 vs. 0
  misc_feature: MA Experiment 108461 PARAMETER Experiment Name: At_Germinating_Seeds_cDNA_P Parameter: Tissue Value: Germinating Seeds
  misc_feature: MA Experiment ID: 108462 Result: Up-regulated in Transcription
  misc_feature: MA Experiment 108462 PARAMETER Experiment Name: At_Germinating_Seeds_cDNA_P Parameter: Age (day) Value: 2 vs. 0
  misc_feature: MA Experiment 108462 PARAMETER Experiment Name: At_Germinating_Seeds_cDNA_P Parameter: Tissue Value: Germinating Seeds
  misc_feature: MA Experiment ID: 108473 Result: Down-regulated in Transcription
  misc_feature: MA Experiment 108473 PARAMETER Experiment Name: At_Drought_Flowers_cDNA_P Parameter: Timepoint (hr) Value: 7 d
  misc_feature: MA Experiment 108473 PARAMETER Experiment Name: At_Drought_Flowers_cDNA_P Parameter: Tissue Value: Flower
  misc_feature: MA Experiment 108473 PARAMETER Experiment Name: At_Drought_Flowers_cDNA_P Parameter: Treatment Value: Drought vs. No Drought
  misc_feature: MA Experiment ID: 20000069 Result: Down-regulated in Transcription
  misc_feature: MA Experiment 20000069 PARAMETER Experiment Name: At_100uM_ABA_Mutants_cDNA_P Parameter: Plant Line Value: CS23
  misc_feature: MA Experiment 20000069 PARAMETER Experiment Name: At_100uM_ABA_Mutants_cDNA_P Parameter: Timepoint (hr) Value: 6
  misc_feature: MA Experiment 20000069 PARAMETER Experiment Name: At_100uM_ABA_Mutants_cDNA_P Parameter: Tissue Value: Aerial
  misc_feature: MA Experiment 20000069 PARAMETER Experiment Name: At_100uM_ABA_Mutants_cDNA_P Parameter: Treatment Value: 100uM ABA vs. No Treatment
  misc_feature: MA Experiment ID: 20000111 Result: Down-regulated in Transcription
  misc_feature: MA Experiment 20000111 PARAMETER Experiment Name: At_42deg_Heat_cDNA_P Parameter: Temperature (deg C) Value: 42 vs. 22
  misc_feature: MA Experiment 20000111 PARAMETER Experiment Name: At_42deg_Heat_cDNA_P Parameter: Timepoint (hr) Value: 6
  misc_feature: MA Experiment 20000111 PARAMETER Experiment Name: At_42deg_Heat_cDNA_P Parameter: Tissue Value: Aerial
  misc_feature: MA Experiment ID: 20000144 Result: Down-regulated in Transcription
  misc_feature: MA Experiment 20000144 PARAMETER Experiment Name: At_42deg_Heat_cDNA_P Parameter: Temperature (deg C) Value: 42 vs. 22
  misc_feature: MA Experiment 20000144 PARAMETER Experiment Name: At_42deg_Heat_cDNA_P Parameter: Timepoint (hr) Value: 1
  misc_feature: MA Experiment 20000144 PARAMETER Experiment Name: At_42deg_Heat_cDNA_P Parameter: Tissue Value: Aerial
  misc_feature: MA Experiment ID: 20000180 Result: Up-regulated in Transcription
  misc_feature: MA Experiment 20000180 PARAMETER Experiment Name: At_Germinating_Seeds_P Parameter: Age (hr) Value: 24 vs. 0
  misc_feature: MA Experiment 20000180 PARAMETER Experiment Name: At_Germinating_Seeds_P Parameter: Tissue Value: Germinating Seeds
  misc_feature: MA Experiment ID: 20000185 Result: Down-regulated in Transcription
  misc_feature: MA Experiment 20000185 PARAMETER Experiment Name: At_Roots__P Parameter: Age (day) Value: 7 vs. 21
  misc_feature: MA Experiment 20000185 PARAMETER Experiment Name: At_Roots__P Parameter: Organism Value: A. thaliana
  misc_feature: MA Experiment 20000185 PARAMETER Experiment Name: At_Roots__P Parameter: Tissue Value: Roots vs. Whole Plant
  misc_feature: MA Experiment ID: 20000224 Result: Up-regulated in Transcription
  misc_feature: MA Experiment ID: 20000234 Result: Up-regulated in Transcription
  misc_feature: MA Experiment 20000234 PARAMETER Experiment Name: At_Siliques_P Parameter: Age (day) Value: 21
  misc_feature: MA Experiment 20000234 PARAMETER Experiment Name: At_Siliques_P Parameter: Organism Value: A. thaliana
  misc_feature: MA Experiment 20000234 PARAMETER Experiment Name: At_Siliques_P Parameter: Plant Line Value: WS
  misc_feature: MA Experiment 20000234 PARAMETER Experiment Name: At_Siliques_P Parameter: Tissue Value: Less Than 5mm Siliques vs. Whole Plant
  misc_feature: MA Experiment ID: 20000265 Result: Up-regulated in Transcription
  misc_feature: MA Experiment 20000265 PARAMETER Experiment Name: At_Open_Flower_P Parameter: Age (day) Value: 21
  misc_feature: MA Experiment 20000265 PARAMETER Experiment Name: At_Open_Flower_P Parameter: Plant Line Value: WS
  misc_feature: MA Experiment 20000265 PARAMETER Experiment Name: At_Open_Flower_P Parameter: Tissue Value: Closed Flower vs. Whole Plant
  misc_feature: MA Experiment ID: 20000286 Result: Up-regulated in Transcription
  misc_feature: MA Experiment 20000286 PARAMETER Experiment Name: At_Open_Flower_P Parameter: Age (day) Value: 21
  misc_feature: MA Experiment 20000286 PARAMETER Experiment Name: At_Open_Flower_P Parameter: Plant Line Value: WS
  misc_feature: MA Experiment 20000286 PARAMETER Experiment Name: At_Open_Flower_P Parameter: Tissue Value: Half Open vs. Whole Plant
  misc_feature: MA Experiment ID: 20000437 Result: Down-regulated in Transcription
  misc_feature: MA Experiment 20000437 PARAMETER Experiment Name: At_Drought_P Parameter: Age (day) Value: 8
  misc_feature: MA Experiment 20000437 PARAMETER Experiment Name: At_Drought_P Parameter: Organism Value: A. thaliana
  misc_feature: MA Experiment 20000437 PARAMETER Experiment Name: At_Drought_P Parameter: Plant Line Value: WS
  misc_feature: MA Experiment 20000437 PARAMETER Experiment Name: At_Drought_P Parameter: Timepoint (hr) Value: 24
  misc_feature: MA Experiment 20000437 PARAMETER Experiment Name: At_Drought_P Parameter: Tissue Value: Whole Plant
  misc_feature: MA Experiment 20000437 PARAMETER Experiment Name: At_Drought_P Parameter: Treatment Value: Drought vs. No Drought
  misc_feature: MA Experiment ID: 20000439 Result: Down-regulated in Transcription
  misc_feature: MA Experiment 20000439 PARAMETER Experiment Name: At_Roots__P Parameter: Age (day) Value: 14 vs. 21
  misc_feature: MA Experiment 20000439 PARAMETER Experiment Name: At_Roots__P Parameter: Organism Value: A. thaliana
  misc_feature: MA Experiment 20000439 PARAMETER Experiment Name: At_Roots__P Parameter: Tissue Value: Roots vs. Whole Plant
  misc_feature: MA Experiment ID: 20000495 Result: Up-regulated in Transcription
  misc_feature: MA Experiment 20000495 PARAMETER Experiment Name: At_Guard_Cells_P Parameter: Harvest Date Value: 8/2/2002
  misc_feature: MA Experiment 20000495 PARAMETER Experiment Name: At_Guard_Cells_P Parameter: Organism Value: A. thaliana
  misc_feature: MA Experiment 20000495 PARAMETER Experiment Name: At_Guard_Cells_P Parameter: Tissue Value: Guard Cells vs. Leaves
  misc_feature: MA Experiment ID: 20001248 Result: Down-regulated in Transcription
  misc_feature: MA Experiment 20001248 PARAMETER Experiment Name: At_Far-red-induction_P Parameter: Age (day) Value: 7
  misc_feature: MA Experiment 20001248 PARAMETER Experiment Name: At_Far-red-induction_P Parameter: Light Value: Far-red vs. White
  misc_feature: MA Experiment 20001248 PARAMETER Experiment Name: At_Far-red-induction_P Parameter: Organism Value: A. thaliana
  misc_feature: MA Experiment 20001248 PARAMETER Experiment Name: At_Far-red-induction_P Parameter: Plant Line Value: Columbia
  misc_feature: MA Experiment 20001248 PARAMETER Experiment Name: At_Far-red-induction_P Parameter: Timepoint (hr) Value: 4
  misc_feature: MA Experiment 20001248 PARAMETER Experiment Name: At_Far-red-induction_P Parameter: Tissue Value: Whole Plant
  misc_feature: MA Experiment ID: 20001555 Result: Down-regulated in Transcription
  misc_feature: MA Experiment 20001555 PARAMETER Experiment Name: At_Drought_Soil_Dry_P Parameter: Age (day) Value: 24
  misc_feature: MA Experiment 20001555 PARAMETER Experiment Name: At_Drought_Soil_Dry_P Parameter: Organism Value: A. thaliana
  misc_feature: MA Experiment 20001555 PARAMETER Experiment Name: At_Drought_Soil_Dry_P Parameter: Plant Line Value: WS
  misc_feature: MA Experiment 20001555 PARAMETER Experiment Name: At_Drought_Soil_Dry_P Parameter: Post Timepoint (hr) Value: None
  misc_feature: MA Experiment 20001555 PARAMETER Experiment Name: At_Drought_Soil_Dry_P Parameter: Post-Treatment Value: None
  misc_feature: MA Experiment 20001555 PARAMETER Experiment Name: At_Drought_Soil_Dry_P Parameter: Timepoint (day) Value: 10
  misc_feature: MA Experiment 20001555 PARAMETER Experiment Name: At_Drought_Soil_Dry_P Parameter: Treatment Value: Drought vs. No Drought
acacatcttaaaaagtaaaaacacattcatctatccaacaaaaaaaaagaaaggagaaatggaaggaatcgatcatagaatggtgagtgtcaatggcataacaatgcacattgccgagaaaggtcccaaagaaggacctgtggtgcttctcctccatggattccctgatctctggtacacgtggcgtcaccagattagtgggttatcatctctaggttaccgcgctgtagctccagacctccgaggctacggagactctgattcgccggagtctttctccgagtacacgtgtcttaacgtcgttggggacctcgtagctcttctggacagtgttgctggaaatcaagagaaggtgtttctggtcggtcatgattggggagccattatcggatggtttctctgtttgtttcgacctgaaaagattaacggctttgtgtgtttgagtgtgccgtatagatcaagaaaccctaaagtcaagcccgttcaagggttcaaggctgtatttggagatgattactacatttgtagatttcaggaaccggggaagattgaaggagagattgcaagtgcagatccaagaatatttctgaggaacctcttcacagggaggacactcggtccgccgattttacctaaggataatccctttggggaaaaacctaaccctaatagcgaaaacattgaattgcctgaatggttttctaagaaagatctcgatttctatgtctccaaattcgagaaggcaggatttaccggtggattgaactactacagagccatggatctgaattgggagctcactgcaccatggaccggagctaagattcaagttccagtgaagttcatgacaggtgacttcgacatggtgtacaccacaccagggatgaaagagtacattcacggtggtggatttgctgcagatgttccaactcttcaagagatagtggtgattgaagatgctggtcacttcgttaaccaagagaaacctcaagaggtcactgctcacatcaatgacttcttcaccaagcttcgggacaacaacaaaagcttttagagttctcgtttggttctattatgttggctctcaaaacaagttggttcttgcatgtgttgtttcgacaagattttgaataagacttggcattatgaagctc

SEQ ID NO: 26920 - protein, 350 aa, Arabidopsis thaliana
  peptide (1)..(350): Ceres Seq. ID no. 12385276
  misc_feature (73)..(338): Pfam Name: alpha/beta hydrolase fold Pfam Description: alpha/beta hydrolase fold
  misc_feature (73)..(338): Pfam Name: alpha/beta hydrolase fold Pfam Description: alpha/beta hydrolase fold
  misc_feature (73)..(338): Pfam Name: alpha/beta hydrolase fold Pfam Description: alpha/beta hydrolase fold
  misc_feature (20)..(350): Homolog of NCBI NO: 15230018 NR Description: putative epoxide hydrolase
  misc_feature (20)..(350): Homolog of NCBI NO: 15230018 NR Description: putative epoxide hydrolase
  misc_feature (20)..(350): Homolog of NCBI NO: 15230018 NR Description: putative epoxide hydrolase
HILKSKNTFIYPTKKKKGEMEGIDHRMVSVNGITMHIAEKGPKEGPVVLLLHGFPDLWYTWRHQISGLSSLGYRAVAPDLRGYGDSDSPESFSEYTCLNVVGDLVALLDSVAGNQEKVFLVGHDWGAIIGWFLCLFRPEKINGFVCLSVPYRSRNPKVKPVQGFKAVFGDDYYICRFQEPGKIEGEIASADPRIFLRNLFTGRTLGPPILPKDNPFGEKPNPNSENIELPEWFSKKDLDFYVSKFEKAGFTGGLNYYRAMDLNWELTAPWTGAKIQVPVKFMTGDFDMVYTTPGMKEYIHGGGFAADVPTLQEIVVIEDAGHFVNQEKPQEVTAHINDFFTKLRDNNKSF

SEQ ID NO: 26921 - protein, 331 aa, Arabidopsis thaliana; identical to SEQ ID NO: 21476
  peptide (1)..(331): Ceres Seq. ID no. 12385277
  misc_feature (54)..(319): Pfam Name: alpha/beta hydrolase fold Pfam Description: alpha/beta hydrolase fold
  misc_feature (54)..(319): Pfam Name: alpha/beta hydrolase fold Pfam Description: alpha/beta hydrolase fold
  misc_feature (54)..(319): Pfam Name: alpha/beta hydrolase fold Pfam Description: alpha/beta hydrolase fold
  misc_feature (1)..(331): Homolog of NCBI NO: 15230018 NR Description: putative epoxide hydrolase
  misc_feature (1)..(331): Homolog of NCBI NO: 15230018 NR Description: putative epoxide hydrolase
  misc_feature (1)..(331): Homolog of NCBI NO: 15230018 NR Description: putative epoxide hydrolase

SEQ ID NO: 26922 - protein, 324 aa, Arabidopsis thaliana; identical to SEQ ID NO: 21477
  peptide (1)..(324): Ceres Seq. ID no. 12385278
  misc_feature (47)..(312): Pfam Name: alpha/beta hydrolase fold Pfam Description: alpha/beta hydrolase fold
  misc_feature (47)..(312): Pfam Name: alpha/beta hydrolase fold Pfam Description: alpha/beta hydrolase fold
  misc_feature (47)..(312): Pfam Name: alpha/beta hydrolase fold Pfam Description: alpha/beta hydrolase fold
  misc_feature (1)..(324): Homolog of NCBI NO: 15230018 NR Description: putative epoxide hydrolase
  misc_feature (1)..(324): Homolog of NCBI NO: 15230018 NR Description: putative epoxide hydrolase
  misc_feature (1)..(324): Homolog of NCBI NO: 15230018 NR Description: putative epoxide hydrolase

SEQ ID NO: 26923 - DNA, 1034 bp, Arabidopsis thaliana
  misc_feature (1)..(1034): Ceres Seq. ID no. 12576332
  misc_feature: MA Experiment ID: 108464 Result: Up-regulated in Transcription
  misc_feature: MA Experiment 108464 PARAMETER Experiment Name: At_Germinating_Seeds_cDNA_P Parameter: Age (day) Value: 4 vs. 0
  misc_feature: MA Experiment 108464 PARAMETER Experiment Name: At_Germinating_Seeds_cDNA_P Parameter: Tissue Value: Germinating Seeds
  misc_feature: MA Experiment ID: 108585 Result: Up-regulated in Transcription
  misc_feature: MA Experiment 108585 PARAMETER Experiment Name: At_5mM_NaNP_cDNA_P Parameter: Timepoint (hr) Value: 6
  misc_feature: MA Experiment 108585 PARAMETER Experiment Name: At_5mM_NaNP_cDNA_P Parameter: Tissue Value: Aerial
  misc_feature: MA Experiment 108585 PARAMETER Experiment Name: At_5mM_NaNP_cDNA_P Parameter: Treatment Value: null
  misc_feature: MA Experiment ID: 108668 Result: Up-regulated in Transcription
  misc_feature: MA Experiment 108668 PARAMETER Experiment Name: At_2mM_SA_cDNA_P Parameter: Plant Line Value: WS
  misc_feature: MA Experiment 108668 PARAMETER Experiment Name: At_2mM_SA_cDNA_P Parameter: Timepoint (hr) Value: 6
  misc_feature: MA Experiment 108668 PARAMETER Experiment Name: At_2mM_SA_cDNA_P Parameter: Treatment Value: 2mM SA vs. No Treatment
  misc_feature: MA Experiment ID: 20000182 Result: Up-regulated in Transcription
  misc_feature: MA Experiment 20000182 PARAMETER Experiment Name: At_2mM_SA_P Parameter: Age (day) Value: 14
  misc_feature: MA Experiment 20000182 PARAMETER Experiment Name: At_2mM_SA_P Parameter: Organism Value: A. thaliana
  misc_feature: MA Experiment 20000182 PARAMETER Experiment Name: At_2mM_SA_P Parameter: Plant Line Value: WS
  misc_feature: MA Experiment 20000182 PARAMETER Experiment Name: At_2mM_SA_P Parameter: Timepoint (hr) Value: 6
  misc_feature: MA Experiment 20000182 PARAMETER Experiment Name: At_2mM_SA_P Parameter: Tissue Value: Aerial
  misc_feature: MA Experiment 20000182 PARAMETER Experiment Name: At_2mM_SA_P Parameter: Treatment Value: 2mM SA vs. No Treatment
agatttggacagaggtattttttgatccgattcttacgaatcctgaatcttcctcgtagattaatcgatcgatcggttcttaattcgcggaaaattgtttcagtaacctgtgatcgtgtcggttggggtagaagagatcgaagtgggagcaaaatcatgatgaatcggctattcgggaaacccaagcaggaggctaatgctctccaaactttagacaagcttaacgagacgcttgagatgctagagaaaaaggagaaagtactcttgaagaaagctggtgcagaggttgagaaggcaaaagaatactcccgggctaagaacaaacgagcggctatacagtgtttgaaaaggaagaggttatatgagggacaagtcgaacagcttgggaatttccagctccgtattcatgatcaaatgattatgttagaaggtgcaaaagcaacaaccgaaactgttgatgcattgaggagtggagcttctgcaatgaaggcaatgcagaaagcaacaaatattgatgatgtggataagaccatggacgagatcaatgagcaaaccgagaacatgaaacagatccaagaagcattggcgactccaatgggggcagcggctgacttcgacgaggatgagcttgcagcagagcttgatgaactagaaagtgaagagcttgaatcgcaacttctacagccggcaacaacagctcctccattgccttcagttccagtgcctgcagggcgtcaaccggctcgtcctgttccccagaagcggactgctgaggaagaagaactcgctgcattacaggctgagatggccctctaaggttattcacctctccgagcagagacatgtatgcattgatagacacgaacagacgatgtatataaggatctgaatcagattaattcggagcgaaaaacttttataatccccgtcgttaatgttatctgcaatttgagtgttcttcacataatttatcttttgtaatttttgtatctttttatgacactttttcctttggttaataatcactttactcc

SEQ ID NO: 26924 - protein, 271 aa, Arabidopsis thaliana
  peptide (1)..(271): Ceres Seq. ID no. 12576333
  misc_feature (69)..(241): Pfam Name: SNF7 Pfam Description: SNF7
  misc_feature (59)..(261): Homolog of NCBI NO: 28278647 NR Description: Similar to RIKEN cDNA 2010012F05 gene [Danio
  misc_feature (56)..(271): Homolog of NCBI NO: 19115183 NR Description: similar to yeast Snf7 protein involved in glucose
  misc_feature (59)..(267): Homolog of NCBI NO: 28277855 NR Description: Unknown (protein for MGC:56112) [Danio rerio]
  misc_feature (50)..(270): Homolog of NCBI NO: 29841209 NR Description: similar to GenBank Accession Number BC011429
  misc_feature (69)..(266): Homolog of NCBI NO: 28827795 NR Description: chromosome 20 open reading frame 178 [Homo
  misc_feature (69)..(266): Homolog of NCBI NO: 28077049 NR Description: RIKEN cDNA 2010012F05 [Mus musculus]
  misc_feature (56)..(271): Homolog of NCBI NO: 28850339 NR Description: similar to C56C10.3.p
  misc_feature (52)..(271): Homolog of NCBI NO: 15224854 NR Description: copia-like retroelement pol polyprotein
  misc_feature (54)..(271): Homolog of NCBI NO: 21594892 NR Description: copia-like retroelement pol polyprotein
  misc_feature (53)..(271): Homolog of NCBI NO: 15233464 NR Description: putative protein
RFGQRYFLIRFLRILNLPRRLIDRSVLNSRKIVSVTCDRVGWGRRDRSGSKIMMNRLFGKPKQEANALQTLDKLNETLEMLEKKEKVLLKKAGAEVEKAKEYSRAKNKRAAIQCLKRKRLYEGQVEQLGNFQLRIHDQMIMLEGAKATTETVDALRSGASAMKAMQKATNIDDVDKTMDEINEQTENMKQIQEALATPMGAAADFDEDELAAELDELESEELESQLLQPATTAPPLPSVPVPAGRQPARPVPQKRTAEEEELAALQAEMAL

SEQ ID NO: 26925 - protein, 219 aa, Arabidopsis thaliana
  peptide (1)..(219): Ceres Seq. ID no. 12576334
  misc_feature (17)..(189): Pfam Name: SNF7 Pfam Description: SNF7
  misc_feature (1)..(218): Homolog of NCBI NO: 29841209 NR Description: similar to GenBank Accession Number BC011429
  misc_feature (4)..(219): Homolog of NCBI NO: 28850339 NR Description: similar to C56C10.3.p
  misc_feature (17)..(214): Homolog of NCBI NO: 28827795 NR Description: chromosome 20 open reading frame 178 [Homo
  misc_feature (17)..(214): Homolog of NCBI NO: 28077049 NR Description: RIKEN cDNA 2010012F05 [Mus musculus]
  misc_feature (7)..(209): Homolog of NCBI NO: 28278647 NR Description: Similar to RIKEN cDNA 2010012F05 gene [Danio
  misc_feature (4)..(219): Homolog of NCBI NO: 19115183 NR Description: similar to yeast Snf7 protein involved in glucose
  misc_feature (7)..(215): Homolog of NCBI NO: 28277855 NR Description: Unknown (protein for MGC:56112) [Danio rerio]
  misc_feature (1)..(219): Homolog of NCBI NO: 15224854 NR Description: copia-like retroelement pol polyprotein
  misc_feature (2)..(219): Homolog of NCBI NO: 21594892 NR Description: copia-like retroelement pol polyprotein
  misc_feature (1)..(219): Homolog of NCBI NO: 15233464 NR Description: putative protein
MMNRLFGKPKQEANALQTLDKLNETLEMLEKKEKVLLKKAGAEVEKAKEYSRAKNKRAAIQCLKRKRLYEGQVEQLGNFQLRIHDQMIMLEGAKATTETVDALRSGASAMKAMQKATNIDDVDKTMDEINEQTENMKQIQEALATPMGAAADFDEDELAAELDELESEELESQLLQPATTAPPLPSVPVPAGRQPARPVPQKRTAEEEELAALQAEMAL

SEQ ID NO: 26926 - protein, 218 aa, Arabidopsis thaliana
  peptide (1)..(218): Ceres Seq. ID no. 12576335
  misc_feature (16)..(188): Pfam Name: SNF7 Pfam Description: SNF7
  misc_feature (1)..(217): Homolog of NCBI NO: 29841209 NR Description: similar to GenBank Accession Number BC011429
  misc_feature (3)..(218): Homolog of NCBI NO: 28850339 NR Description: similar to C56C10.3.p
  misc_feature (16)..(213): Homolog of NCBI NO: 28827795 NR Description: chromosome 20 open reading frame 178 [Homo
  misc_feature (16)..(213): Homolog of NCBI NO: 28077049 NR Description: RIKEN cDNA 2010012F05 [Mus musculus]
  misc_feature (6)..(208): Homolog of NCBI NO: 28278647 NR Description: Similar to RIKEN cDNA 2010012F05 gene [Danio
  misc_feature (3)..(218): Homolog of NCBI NO: 19115183 NR Description: similar to yeast Snf7 protein involved in glucose
  misc_feature (6)..(214): Homolog of NCBI NO: 28277855 NR Description: Unknown (protein for MGC:56112) [Danio rerio]
  misc_feature (1)..(218): Homolog of NCBI NO: 15224854 NR Description: copia-like retroelement pol polyprotein
  misc_feature (1)..(218): Homolog of NCBI NO: 21594892 NR Description: copia-like retroelement pol polyprotein
  misc_feature (1)..(218): Homolog of NCBI NO: 15233464 NR Description: putative protein
MNRLFGKPKQEANALQTLDKLNETLEMLEKKEKVLLKKAGAEVEKAKEYSRAKNKRAAIQCLKRKRLYEGQVEQLGNFQLRIHDQMIMLEGAKATTETVDALRSGASAMKAMQKATNIDDVDKTMDEINEQTENMKQIQEALATPMGAAADFDEDELAAELDELESEELESQLLQPATTAPPLPSVPVPAGRQPARPVPQKRTAEEEELAALQAEMAL

SEQ ID NO: 26927 - DNA, 965 bp, Arabidopsis thaliana
  misc_feature (1)..(965): Ceres Seq. ID no. 12370710
  misc_feature: MA Experiment ID: 108433 Result: Down-regulated in Transcription
  misc_feature: MA Experiment 108433 PARAMETER Experiment Name: At_rhl_Mutant2_cDNA_P Parameter: Age (day) Value: 7
  misc_feature: MA Experiment 108433 PARAMETER Experiment Name: At_rhl_Mutant2_cDNA_P Parameter: Organism Value: A. thaliana
  misc_feature: MA Experiment 108433 PARAMETER Experiment Name: At_rhl_Mutant2_cDNA_P Parameter: Plant Line Value: rhl Mutant vs. wt landsburg
  misc_feature: MA Experiment 108433 PARAMETER Experiment Name: At_rhl_Mutant2_cDNA_P Parameter: Tissue Value: Roots
  misc_feature: MA Experiment ID: 108462 Result: Down-regulated in Transcription
  misc_feature: MA Experiment 108462 PARAMETER Experiment Name: At_Germinating_Seeds_cDNA_P Parameter: Age (day) Value: 2 vs. 0
  misc_feature: MA Experiment 108462 PARAMETER Experiment Name: At_Germinating_Seeds_cDNA_P Parameter: Tissue Value: Germinating Seeds
  misc_feature: MA Experiment ID: 108463 Result: Down-regulated in Transcription
  misc_feature: MA Experiment 108463 PARAMETER Experiment Name: At_Germinating_Seeds_cDNA_P Parameter: Age (day) Value: 3 vs. 0
  misc_feature: MA Experiment 108463 PARAMETER Experiment Name: At_Germinating_Seeds_cDNA_P Parameter: Tissue Value: Germinating Seeds
  misc_feature: MA Experiment ID: 108464 Result: Down-regulated in Transcription
  misc_feature: MA Experiment 108464 PARAMETER Experiment Name: At_Germinating_Seeds_cDNA_P Parameter: Age (day) Value: 4 vs. 0
  misc_feature: MA Experiment 108464 PARAMETER Experiment Name: At_Germinating_Seeds_cDNA_P Parameter: Tissue Value: Germinating Seeds
  misc_feature: MA Experiment ID: 108488 Result: Down-regulated in Transcription
  misc_feature: MA Experiment ID: 108579 Result: Up-regulated in Transcription
  misc_feature: MA Experiment 108579 PARAMETER Experiment Name: At_4deg_Cold_cDNA_P Parameter: Temperature (deg C) Value: 4 vs. 22
  misc_feature: MA Experiment 108579 PARAMETER Experiment Name: At_4deg_Cold_cDNA_P Parameter: Timepoint (hr) Value: 6
  misc_feature: MA Experiment 108579 PARAMETER Experiment Name: At_4deg_Cold_cDNA_P Parameter: Tissue Value: Aerial
  misc_feature: MA Experiment ID: 108594 Result: Down-regulated in Transcription
  misc_feature: MA Experiment 108594 PARAMETER Experiment Name: At_Ler-rhl_Root_cDNA_P Parameter: Plant Line Value: null
  misc_feature: MA Experiment ID: 108595 Result: Up-regulated in Transcription
  misc_feature: MA Experiment 108595 PARAMETER Experiment Name: At_Ler-pi_Ovule_cDNA_P Parameter: Plant Line Value: null
  misc_feature: MA Experiment ID: 108668 Result: Up-regulated in Transcription
  misc_feature: MA Experiment 108668 PARAMETER Experiment Name: At_2mM_SA_cDNA_P Parameter: Plant Line Value: WS
  misc_feature: MA Experiment 108668 PARAMETER Experiment Name: At_2mM_SA_cDNA_P Parameter: Timepoint (hr) Value: 6
  misc_feature: MA Experiment 108668 PARAMETER Experiment Name: At_2mM_SA_cDNA_P Parameter: Treatment Value: 2mM SA vs. No Treatment
  misc_feature: MA Experiment ID: 20000069 Result: Up-regulated in Transcription
  misc_feature: MA Experiment 20000069 PARAMETER Experiment Name: At_100uM_ABA_Mutants_cDNA_P Parameter: Plant Line Value: CS23
  misc_feature: MA Experiment 20000069 PARAMETER Experiment Name: At_100uM_ABA_Mutants_cDNA_P Parameter: Timepoint (hr) Value: 6
  misc_feature: MA Experiment 20000069 PARAMETER Experiment Name: At_100uM_ABA_Mutants_cDNA_P Parameter: Tissue Value: Aerial
  misc_feature: MA Experiment 20000069 PARAMETER Experiment Name: At_100uM_ABA_Mutants_cDNA_P Parameter: Treatment Value: 100uM ABA vs. No Treatment
  misc_feature: MA Experiment ID: 20000070 Result: Up-regulated in Transcription
  misc_feature: MA Experiment 20000070 PARAMETER Experiment Name: At_100uM_ABA_Mutants_cDNA_P Parameter: Plant Line Value: CS24
  misc_feature: MA Experiment 20000070 PARAMETER Experiment Name: At_100uM_ABA_Mutants_cDNA_P Parameter: Timepoint (hr) Value: 6
  misc_feature: MA Experiment 20000070 PARAMETER Experiment Name: At_100uM_ABA_Mutants_cDNA_P Parameter: Tissue Value: Aerial
  misc_feature: MA Experiment 20000070 PARAMETER Experiment Name: At_100uM_ABA_Mutants_cDNA_P Parameter: Treatment Value: 100uM ABA vs. No Treatment
  misc_feature: MA Experiment ID: 20000071 Result: Up-regulated in Transcription
  misc_feature: MA Experiment 20000071 PARAMETER Experiment Name: At_100uM_ABA_Mutants_cDNA_P Parameter: Plant Line Value: CS8104
  misc_feature: MA Experiment 20000071 PARAMETER Experiment Name: At_100uM_ABA_Mutants_cDNA_P Parameter: Timepoint (hr) Value: 6
  misc_feature: MA Experiment 20000071 PARAMETER Experiment Name: At_100uM_ABA_Mutants_cDNA_P Parameter: Tissue Value: Aerial
  misc_feature: MA Experiment 20000071 PARAMETER Experiment Name: At_100uM_ABA_Mutants_cDNA_P Parameter: Treatment Value: 100uM ABA vs. No Treatment
  misc_feature: MA Experiment ID: 20000072 Result: Up-regulated in Transcription
  misc_feature: MA Experiment 20000072 PARAMETER Experiment Name: At_100uM_ABA_Mutants_cDNA_P Parameter: Plant Line Value: CS8105
  misc_feature: MA Experiment 20000072 PARAMETER Experiment Name: At_100uM_ABA_Mutants_cDNA_P Parameter: Timepoint (hr) Value: 6
  misc_feature: MA Experiment 20000072 PARAMETER Experiment Name: At_100uM_ABA_Mutants_cDNA_P Parameter: Tissue Value: Aerial
  misc_feature: MA Experiment 20000072 PARAMETER Experiment Name: At_100uM_ABA_Mutants_cDNA_P Parameter: Treatment Value: 100uM ABA vs. No Treatment
  misc_feature: MA Experiment ID: 20000086 Result: Up-regulated in Transcription
  misc_feature: MA Experiment 20000086 PARAMETER Experiment Name: At_100uM_ABA_Mutants_cDNA_P Parameter: Plant Line Value: CS22
  misc_feature: MA Experiment 20000086 PARAMETER Experiment Name: At_100uM_ABA_Mutants_cDNA_P Parameter: Timepoint (hr) Value: 6
  misc_feature: MA Experiment 20000086 PARAMETER Experiment Name: At_100uM_ABA_Mutants_cDNA_P Parameter: Tissue Value: Aerial
  misc_feature: MA Experiment 20000086 PARAMETER Experiment Name: At_100uM_ABA_Mutants_cDNA_P Parameter: Treatment Value: 100uM ABA vs. No Treatment
  misc_feature: MA Experiment ID: 20000087 Result: Up-regulated in Transcription
  misc_feature: MA Experiment 20000087 PARAMETER Experiment Name: At_100uM_ABA_Mutants_cDNA_P Parameter: Plant Line Value: WS
  misc_feature: MA Experiment 20000087 PARAMETER Experiment Name: At_100uM_ABA_Mutants_cDNA_P Parameter: Timepoint (hr) Value: 6
  misc_feature: MA Experiment 20000087 PARAMETER Experiment Name: At_100uM_ABA_Mutants_cDNA_P Parameter: Tissue Value: Aerial
  misc_feature: MA Experiment 20000087 PARAMETER Experiment Name: At_100uM_ABA_Mutants_cDNA_P Parameter: Treatment Value: 100uM ABA vs. No Treatment
  misc_feature: MA Experiment ID: 20000088 Result: Up-regulated in Transcription
  misc_feature: MA Experiment 20000088 PARAMETER Experiment Name: At_100uM_ABA_Mutants_cDNA_P Parameter: Plant Line Value: Landsberg
  misc_feature: MA Experiment 20000088 PARAMETER Experiment Name: At_100uM_ABA_Mutants_cDNA_P Parameter: Timepoint (hr) Value: 6
  misc_feature: MA Experiment 20000088 PARAMETER Experiment Name: At_100uM_ABA_Mutants_cDNA_P Parameter: Tissue Value: Aerial
  misc_feature: MA Experiment 20000088 PARAMETER Experiment Name: At_100uM_ABA_Mutants_cDNA_P Parameter: Treatment Value: 100uM ABA vs. No Treatment
  misc_feature: MA Experiment ID: 20000089 Result: Up-regulated in Transcription
  misc_feature: MA Experiment ID: 20000090 Result: Up-regulated in Transcription
  misc_feature: MA Experiment ID: 20000111 Result: Up-regulated in Transcription
  misc_feature: MA Experiment 20000111 PARAMETER Experiment Name: At_42deg_Heat_cDNA_P Parameter: Temperature (deg C) Value: 42 vs. 22
  misc_feature: MA Experiment 20000111 PARAMETER Experiment Name: At_42deg_Heat_cDNA_P Parameter: Timepoint (hr) Value: 6
  misc_feature: MA Experiment 20000111 PARAMETER Experiment Name: At_42deg_Heat_cDNA_P Parameter: Tissue Value: Aerial
  misc_feature: MA Experiment ID: 20000112 Result: Up-regulated in Transcription
  misc_feature: MA Experiment 20000112 PARAMETER Experiment Name: At_42deg_Heat_cDNA_P Parameter: Temperature (deg C) Value: 42 vs. 22
  misc_feature: MA Experiment 20000112 PARAMETER Experiment Name: At_42deg_Heat_cDNA_P Parameter: Timepoint (hr) Value: 2
  misc_feature: MA Experiment 20000112 PARAMETER Experiment Name: At_42deg_Heat_cDNA_P Parameter: Tissue Value: Aerial
  misc_feature: MA Experiment ID: 20000117 Result: Up-regulated in Transcription
  misc_feature: MA Experiment 20000117 PARAMETER Experiment Name: At_100uM_ABA_Mutants_cDNA_P Parameter: Plant Line Value: Columbia
  misc_feature: MA Experiment 20000117 PARAMETER Experiment Name: At_100uM_ABA_Mutants_cDNA_P Parameter: Timepoint (hr) Value: 6
  misc_feature: MA Experiment 20000117 PARAMETER Experiment Name: At_100uM_ABA_Mutants_cDNA_P Parameter: Tissue Value: Aerial
  misc_feature: MA Experiment 20000117 PARAMETER Experiment Name: At_100uM_ABA_Mutants_cDNA_P Parameter: Treatment Value: 100uM ABA vs. No Treatment
  misc_feature: MA Experiment ID: 20000314 Result: Up-regulated in Transcription
  misc_feature: MA Experiment 20000314 PARAMETER Experiment Name: At_14day_Shoots-Roots_Sub_P Parameter: Age (day) Value: 14
  misc_feature: MA Experiment 20000314 PARAMETER Experiment Name: At_14day_Shoots-Roots_Sub_P Parameter: Organism Value: A. thaliana
  misc_feature: MA Experiment 20000314 PARAMETER Experiment Name: At_14day_Shoots-Roots_Sub_P Parameter: Plant Line Value: WS
  misc_feature: MA Experiment 20000314 PARAMETER Experiment Name: At_14day_Shoots-Roots_Sub_P Parameter: Tissue Value: Roots vs. Whole Plant
  misc_feature: MA Experiment ID: 20000315 Result: Down-regulated in Transcription
  misc_feature: MA Experiment 20000315 PARAMETER Experiment Name: At_14day_Shoots-Roots_Sub_P Parameter: Age (day) Value: 14
  misc_feature: MA Experiment 20000315 PARAMETER Experiment Name: At_14day_Shoots-Roots_Sub_P Parameter: Organism Value: A. thaliana
  misc_feature: MA Experiment 20000315 PARAMETER Experiment Name: At_14day_Shoots-Roots_Sub_P Parameter: Plant Line Value: WS
  misc_feature: MA Experiment 20000315 PARAMETER Experiment Name: At_14day_Shoots-Roots_Sub_P Parameter: Tissue Value: Shoots vs. Whole Plant
  misc_feature: MA Experiment ID: 20000328 Result: Up-regulated in Transcription
  misc_feature: MA Experiment 20000328 PARAMETER Experiment Name: At_42deg_Heat_Sub_P Parameter: Age (day) Value: 14
  misc_feature: MA Experiment 20000328 PARAMETER Experiment Name: At_42deg_Heat_Sub_P Parameter: Organism Value: A. thaliana
  misc_feature: MA Experiment 20000328 PARAMETER Experiment Name: At_42deg_Heat_Sub_P Parameter: Plant Line Value: WS
  misc_feature: MA Experiment 20000328 PARAMETER Experiment Name: At_42deg_Heat_Sub_P Parameter: Temperature (deg C) Value: 42 vs. 22
  misc_feature: MA Experiment 20000328 PARAMETER Experiment Name: At_42deg_Heat_Sub_P Parameter: Timepoint (hr) Value: 6
  misc_feature: MA Experiment 20000328 PARAMETER Experiment Name: At_42deg_Heat_Sub_P Parameter: Tissue Value: Aerial
  misc_feature: MA Experiment ID: 20000329 Result: Up-regulated in Transcription
  misc_feature: MA Experiment 20000329 PARAMETER Experiment Name: At_4deg_Cold_Sub_P Parameter: Age (day) Value: 14
  misc_feature: MA Experiment 20000329 PARAMETER Experiment Name: At_4deg_Cold_Sub_P Parameter: Organism Value: A. thaliana
  misc_feature: MA Experiment 20000329 PARAMETER Experiment Name: At_4deg_Cold_Sub_P Parameter: Plant Line Value: WS
  misc_feature: MA Experiment 20000329 PARAMETER Experiment Name: At_4deg_Cold_Sub_P Parameter: Temperature (deg C) Value: 4 vs. 22
  misc_feature: MA Experiment 20000329 PARAMETER Experiment Name: At_4deg_Cold_Sub_P Parameter: Timepoint (hr) Value: 6
  misc_feature: MA Experiment 20000329 PARAMETER Experiment Name: At_4deg_Cold_Sub_P Parameter: Tissue Value: Aerial
  misc_feature: MA Experiment ID: 20000332 Result: Up-regulated in Transcription
  misc_feature: MA Experiment 20000332 PARAMETER Experiment Name: At_4deg_Cold_Sub_P Parameter: Age (day) Value: 14
  misc_feature: MA Experiment 20000332 PARAMETER Experiment Name: At_4deg_Cold_Sub_P Parameter: Organism Value: A. thaliana
  misc_feature: MA Experiment 20000332 PARAMETER Experiment Name: At_4deg_Cold_Sub_P Parameter: Plant Line Value: WS
  misc_feature: MA Experiment 20000332 PARAMETER Experiment Name: At_4deg_Cold_Sub_P Parameter: Temperature (deg C) Value: 4 vs. 22
  misc_feature: MA Experiment 20000332 PARAMETER Experiment Name: At_4deg_Cold_Sub_P Parameter: Timepoint (hr) Value: 2
  misc_feature: MA Experiment 20000332 PARAMETER Experiment Name: At_4deg_Cold_Sub_P Parameter: Tissue Value: Aerial
  misc_feature: MA Experiment ID: 20000355 Result: Up-regulated in Transcription
  misc_feature: MA Experiment 20000355 PARAMETER Experiment Name: At_Siliques_Sub_P Parameter: Age (day) Value: 21
  misc_feature: MA Experiment 20000355 PARAMETER Experiment Name: At_Siliques_Sub_P Parameter: Organism Value: A. thaliana
  misc_feature: MA Experiment 20000355 PARAMETER Experiment Name: At_Siliques_Sub_P Parameter: Plant Line Value: WS
  misc_feature: MA Experiment 20000355 PARAMETER Experiment Name: At_Siliques_Sub_P Parameter: Tissue Value: Less Than 5mm Siliques vs. Whole Plant
  misc_feature: MA Experiment ID: 20000440 Result: Up-regulated in Transcription
  misc_feature: MA Experiment 20000440 PARAMETER Experiment Name: At_Closed-Flower__Sub_P Parameter: Tissue Value: Closed Flower vs. Whole Plant
  misc_feature: MA Experiment ID: 20001807 Result: Down-regulated in Transcription
  misc_feature: MA Experiment 20001807 PARAMETER Experiment Name: At_50mM_NH4NO3_L-to-H_Sub_P Parameter: Timepoint (hr) Value: 6
  misc_feature: MA Experiment 20001807 PARAMETER Experiment Name: At_50mM_NH4NO3_L-to-H_Sub_P Parameter: Tissue Value: Leaf
  misc_feature: MA Experiment 20001807 PARAMETER Experiment Name: At_50mM_NH4NO3_L-to-H_Sub_P Parameter: Treatment Value: 50mM NH4NO3 vs 100mM Mannitol
aacaacaaaacctctctctctttcactttctctctaaaaaccagaaaaaaaaaaaatggagctttcatcgagaaagccttatttcattgaggaagaagaagaagagaatttggcttcttctttatcagaaatggaagctgggttttctggtaacaataataatagtaataaccatggaaatccccaaaacggtgtcgtttcttcaagccgtttctcttacggtagattaaacagtcttaggaacagtcagagttattattacaatcaatactctgtttcgtctccgagatctgttgtgtctggaagatttcatgatttcagattcgatattcaacaacctcatttcttggactcgtgtttcctctgtaagaaacctcttggtgataacagagacatctacatgtacagaggagatacaccgttttgcagtgaagagtgtagacaagaacagatagagagagatgaagcaaaagagaagaaacagaatctgtctcattcggtgaaatcagttatgcggaggaaagaacaatcttcaccaactagatctcgtgattatgcttttcacaatggaactgttgctgctgcttaattaaaaatagctgggaactttgagaattattataattaattaggttaagaaaaaaataagctatattgtatctaacgctatgaagctggttttggatcctctctctttctctcgagatcttaaggatcttttaaaactttagcttcaagtcttgggaaaaagatgaagaagctaaagatcctttaattttcttttctttttttgtaagaaaaaaatagtttcttgacatgaaattttgggagtatgagaagagaaaatgtaaatgcctatgtgaattataatagtccatggcatgtttgagttatattttttcttttgtttttagatttcggtatcaatgtctttcgagggatatacagatgttaaatcaaatttt

SEQ ID NO: 26928 - protein, 177 aa, Arabidopsis thaliana
  peptide (1)..(177): Ceres Seq. ID no. 12370711
  misc_feature (81)..(140): Pfam Name: Protein of unknown function (DUF581) Pfam Description: Protein of unknown function (DUF581)
  misc_feature (82)..(157): Homolog of NCBI NO: 38344282 NR Description: OSJNBa0013K16.14 [Oryza sativa (japonica
  misc_feature (18)..(165): Homolog of NCBI NO: 18411783 NR Description: expressed protein
  misc_feature (18)..(165): Homolog of NCBI NO: 21593931 NR Description: unknown [Arabidopsis thaliana]
  misc_feature (93)..(160): Homolog of NCBI NO: 18406598 NR Description: expressed protein; protein id: At2g44670.1
  misc_feature (96)..(161): Homolog of NCBI NO: 38344280 NR Description: OSJNBa0013K16.12 [Oryza sativa (japonica
  misc_feature (96)..(163): Homolog of NCBI NO: 38344283 NR Description: OSJNBa0013K16.15 [Oryza sativa (japonica
  misc_feature (45)..(177): Homolog of NCBI NO: 7485163 NR Description: hypothetical protein - Arabidopsis thaliana
  misc_feature (45)..(177): Homolog of NCBI NO: 18414940 NR Description: expressed protein
  misc_feature (45)..(177): Homolog of NCBI NO: 21594214 NR Description: unknown [Arabidopsis thaliana]
  misc_feature (1)..(177): Homolog of NCBI NO: 15238001 NR Description: putative protein; protein id: At5g47060.1
MELSSRKPYFIEEEEEENLASSLSEMEAGFSGNNNNSNNHGNPQNGVVSSSRFSYGRLNSLRNSQSYYYNQYSVSSPRSVVSGRFHDFRFDIQQPHFLDSCFLCKKPLGDNRDIYMYRGDTPFCSEECRQEQIERDEAKEKKQNLSHSVKSVMRRKEQSSPTRSRDYAFHNGTVAAA

SEQ ID NO: 26929 - protein, 152 aa, Arabidopsis thaliana
  peptide (1)..(152): Ceres Seq. ID no. 12370712
  misc_feature (56)..(115): Pfam Name: Protein of unknown function (DUF581) Pfam Description: Protein of unknown function (DUF581)
  misc_feature (57)..(132): Homolog of NCBI NO: 38344282 NR Description: OSJNBa0013K16.14 [Oryza sativa (japonica
  misc_feature (1)..(140): Homolog of NCBI NO: 18411783 NR Description: expressed protein
  misc_feature (1)..(140): Homolog of NCBI NO: 21593931 NR Description: unknown [Arabidopsis thaliana]
  misc_feature (68)..(135): Homolog of NCBI NO: 18406598 NR Description: expressed protein; protein id: At2g44670.1
  misc_feature (71)..(136): Homolog of NCBI NO: 38344280 NR Description: OSJNBa0013K16.12 [Oryza sativa (japonica
  misc_feature (71)..(138): Homolog of NCBI NO: 38344283 NR Description: OSJNBa0013K16.15 [Oryza sativa (japonica
  misc_feature (20)..(152): Homolog of NCBI NO: 7485163 NR Description: hypothetical protein - Arabidopsis thaliana
  misc_feature (20)..(152): Homolog of NCBI NO: 18414940 NR Description: expressed protein
  misc_feature (20)..(152): Homolog of NCBI NO: 21594214 NR Description: unknown [Arabidopsis thaliana]
  misc_feature (1)..(152): Homolog of NCBI NO: 15238001 NR Description: putative protein; protein id: At5g47060.1
MEAGFSGNNNNSNNHGNPQNGVVSSSRFSYGRLNSLRNSQSYYYNQYSVSSPRSVVSGRFHDFRFDIQQPHFLDSCFLCKKPLGDNRDIYMYRGDTPFCSEECRQEQIERDEAKEKKQNLSHSVKSVMRRKEQSSPTRSRDYAFHNGTVAAA

SEQ ID NO: 26930 - DNA, 1005 bp, Arabidopsis thaliana
  misc_feature (1)..(1005): Ceres Seq. ID no. 12389220
  misc_feature: MA Experiment ID: 108576 Result: Down-regulated in Transcription
  misc_feature: MA Experiment 108576 PARAMETER Experiment Name: At_42deg_Heat_cDNA_P Parameter: Temperature (deg C) Value: 42 vs. 22
  misc_feature: MA Experiment 108576 PARAMETER Experiment Name: At_42deg_Heat_cDNA_P Parameter: Timepoint (hr) Value: 1
  misc_feature: MA Experiment 108576 PARAMETER Experiment Name: At_42deg_Heat_cDNA_P Parameter: Tissue Value: Aerial
  misc_feature: MA Experiment ID: 108577 Result: Down-regulated in Transcription
  misc_feature: MA Experiment 108577 PARAMETER Experiment Name: At_42deg_Heat_cDNA_P Parameter: Temperature (deg C) Value: 42 vs. 22
  misc_feature: MA Experiment 108577 PARAMETER Experiment Name: At_42deg_Heat_cDNA_P Parameter: Timepoint (hr) Value: 6
  misc_feature: MA Experiment 108577 PARAMETER Experiment Name: At_42deg_Heat_cDNA_P Parameter: Tissue Value: Aerial
  misc_feature: MA Experiment ID: 20000111 Result: Down-regulated in Transcription
  misc_feature: MA Experiment 20000111 PARAMETER Experiment Name: At_42deg_Heat_cDNA_P Parameter: Temperature (deg C) Value: 42 vs. 22
  misc_feature: MA Experiment 20000111 PARAMETER Experiment Name: At_42deg_Heat_cDNA_P Parameter: Timepoint (hr) Value: 6
  misc_feature: MA Experiment 20000111 PARAMETER Experiment Name: At_42deg_Heat_cDNA_P Parameter: Tissue Value: Aerial
  misc_feature: MA Experiment ID: 20000112 Result: Down-regulated in Transcription
  misc_feature: MA Experiment 20000112 PARAMETER Experiment Name: At_42deg_Heat_cDNA_P Parameter: Temperature (deg C) Value: 42 vs. 22
  misc_feature: MA Experiment 20000112 PARAMETER Experiment Name: At_42deg_Heat_cDNA_P Parameter: Timepoint (hr) Value: 2
  misc_feature: MA Experiment 20000112 PARAMETER Experiment Name: At_42deg_Heat_cDNA_P Parameter: Tissue Value: Aerial
  misc_feature: MA Experiment ID: 20000113 Result: Down-regulated in Transcription
  misc_feature: MA Experiment 20000113 PARAMETER Experiment Name: At_42deg_Heat_cDNA_P Parameter: Temperature (deg C) Value: 42 vs. 22
  misc_feature: MA Experiment 20000113 PARAMETER Experiment Name: At_42deg_Heat_cDNA_P Parameter: Timepoint (hr) Value: 8
  misc_feature: MA Experiment 20000113 PARAMETER Experiment Name: At_42deg_Heat_cDNA_P Parameter: Tissue Value: Aerial
  misc_feature: MA Experiment ID: 20000224 Result: Down-regulated in Transcription
atgatttgtttgtaattagatcaggggtttaggtctttccattactttttaatgttttttctgttactgtctccgcgatctgattttacgacaatagagtttcgggttttgtcccattccagtttgaaaataaaggtccgtcttttaagtttgctggatcgataaacctgtgaagattgagtctagtcgatttattggatgatccattcttcatcgtttttttcttgcttcgaagttctgtataaccagatttgtctgtgtgcgattgtcattacctagccgtgtatcgagaactagggttttcgagtcaattttgccccttttggttatatctggttcgataacgattcatctggattagggttttaagtgatggctcgtaccaagcaaaccgctcgtaagtccaccggaggtaaagctccaaggaagcaacttgctactaaggctgctcgtaaatctgcaccaactactggtggagtcaagaaaccacatcgttaccgtcctggaactgttgctctccgtgaaatccgtaagtaccagaagagtactgagttgcttatcaggaaactgccatttcagaggctagtccgtgagattgctcaagatttcaagactgatttgcgtttccagagccatgctgtcttagctctccaggaagctgcagaagcatatcttgttggtctctttgaagacactaacctttgtgccattcatgccaagcgtgtgaccataatgcccaaagacattcagctcgctcgtcgtatcagaggtgaacgcgcttaagccaaccaagaatccgagatttggttcatgtagtttttgttttttatgaaagcaagatcttaattgctgtgttttttaaatctctgggtatgtagtagtaagagtagtaagaagtctgcaatctaagaatgttgtgttctttaagcttattattatgtgtgttgcgaactctttttaactcttttgttaaattcttatgttttcttaactcgtttgttcgtc

SEQ ID NO: 26931 - protein, 136 aa, Arabidopsis thaliana; identical to SEQ ID NO: 26403
  peptide (1)..(136): Ceres Seq. ID no. 12389221
  misc_feature (17)..(135): Pfam Name: Core histone H2A/H2B/H3/H4 Pfam Description: Core histone H2A/H2B/H3/H4
  misc_feature (1)..(136): Homolog of NCBI NO: 34858260 NR Description: similar to histone protein Hist2h3c1 [Rattus
  misc_feature (1)..(136): Homolog of NCBI NO: 37546835 NR Description: similar to histone protein Hist2h3c1 [Homo
  misc_feature (1)..(136): Homolog of NCBI NO: 34876394 NR Description: similar to histone protein Hist2h3c1 [Rattus
  misc_feature (1)..(136): Homolog of NCBI NO: 34876364 NR Description: similar to CG31613-PA [Rattus norvegicus]
  misc_feature (1)..(136): Homolog of NCBI NO: 34858254 NR Description: similar to histone protein Hist2h3c1 [Rattus
  misc_feature (1)..(136): Homolog of NCBI NO: 30061401 NR Description: histone 2, H3ca1 [Mus musculus]
  misc_feature (1)..(136): Homolog of NCBI NO: 7305139 NR Description: histone 1, H3f; histone gene complex 1 [Mus
  misc_feature (1)..(136): Homolog of NCBI NO: 2119013 NR Description: histone H3.2 protein - shrew mouse
  misc_feature (1)..(136): Homolog of NCBI NO: 18698662 NR Description: disease-resistent-related protein [Oryza sativa]
  misc_feature (1)..(136): Homolog of NCBI NO: 15236103 NR Description: histone H3.3

SEQ ID NO: 26932 - DNA, 1488 bp, Arabidopsis thaliana
  misc_feature (1)..(1488): Ceres Seq. ID no. 12324052
  misc_feature: MA Experiment ID: 108488 Result: Up-regulated in Transcription
  misc_feature: MA Experiment ID: 20000069 Result: Down-regulated in Transcription
  misc_feature: MA Experiment 20000069 PARAMETER Experiment Name: At_100uM_ABA_Mutants_cDNA_P Parameter: Plant Line Value: CS23
  misc_feature: MA Experiment 20000069 PARAMETER Experiment Name: At_100uM_ABA_Mutants_cDNA_P Parameter: Timepoint (hr) Value: 6
  misc_feature: MA Experiment 20000069 PARAMETER Experiment Name: At_100uM_ABA_Mutants_cDNA_P Parameter: Tissue Value: Aerial
  misc_feature: MA Experiment 20000069 PARAMETER Experiment Name: At_100uM_ABA_Mutants_cDNA_P Parameter: Treatment Value: 100uM ABA vs. No Treatment
  misc_feature: MA Experiment ID: 20000070 Result: Down-regulated in Transcription
  misc_feature: MA Experiment 20000070 PARAMETER Experiment Name: At_100uM_ABA_Mutants_cDNA_P Parameter: Plant Line Value: CS24
  misc_feature: MA Experiment 20000070 PARAMETER Experiment Name: At_100uM_ABA_Mutants_cDNA_P Parameter: Timepoint (hr) Value: 6
  misc_feature: MA Experiment 20000070 PARAMETER Experiment Name: At_100uM_ABA_Mutants_cDNA_P Parameter: Tissue Value: Aerial
  misc_feature: MA Experiment 20000070 PARAMETER Experiment Name: At_100uM_ABA_Mutants_cDNA_P Parameter: Treatment Value: 100uM ABA vs. No Treatment
  misc_feature: MA Experiment ID: 20000071 Result: Down-regulated in Transcription
  misc_feature: MA Experiment 20000071 PARAMETER Experiment Name: At_100uM_ABA_Mutants_cDNA_P Parameter: Plant Line Value: CS8104
  misc_feature: MA Experiment 20000071 PARAMETER Experiment Name: At_100uM_ABA_Mutants_cDNA_P Parameter: Timepoint (hr) Value: 6
  misc_feature: MA Experiment 20000071 PARAMETER Experiment Name: At_100uM_ABA_Mutants_cDNA_P Parameter: Tissue Value: Aerial
  misc_feature: MA Experiment 20000071 PARAMETER Experiment Name: At_100uM_ABA_Mutants_cDNA_P Parameter: Treatment Value: 100uM ABA vs. No Treatment
  misc_feature: MA Experiment ID: 20000072 Result: Down-regulated in Transcription
  misc_feature: MA Experiment 20000072 PARAMETER Experiment Name: At_100uM_ABA_Mutants_cDNA_P Parameter: Plant Line Value: CS8105
  misc_feature: MA Experiment 20000072 PARAMETER Experiment Name: At_100uM_ABA_Mutants_cDNA_P Parameter: Timepoint (hr) Value: 6
  misc_feature: MA Experiment 20000072 PARAMETER Experiment Name: At_100uM_ABA_Mutants_cDNA_P Parameter: Tissue Value: Aerial
  misc_feature: MA Experiment 20000072 PARAMETER Experiment Name: At_100uM_ABA_Mutants_cDNA_P Parameter: Treatment Value: 100uM ABA vs. No Treatment
  misc_feature: MA Experiment ID: 20000087 Result: Down-regulated in Transcription
  misc_feature: MA Experiment 20000087 PARAMETER Experiment Name: At_100uM_ABA_Mutants_cDNA_P Parameter: Plant Line Value: WS
  misc_feature: MA Experiment 20000087 PARAMETER Experiment Name: At_100uM_ABA_Mutants_cDNA_P Parameter: Timepoint (hr) Value: 6
  misc_feature: MA Experiment 20000087 PARAMETER Experiment Name: At_100uM_ABA_Mutants_cDNA_P Parameter: Tissue Value: Aerial
  misc_feature: MA Experiment 20000087 PARAMETER Experiment Name: At_100uM_ABA_Mutants_cDNA_P Parameter: Treatment Value: 100uM ABA vs. No Treatment
  misc_feature: MA Experiment ID: 20000117 Result: Down-regulated in Transcription
  misc_feature: MA Experiment 20000117 PARAMETER Experiment Name: At_100uM_ABA_Mutants_cDNA_P Parameter: Plant Line Value: Columbia
  misc_feature: MA Experiment 20000117 PARAMETER Experiment Name: At_100uM_ABA_Mutants_cDNA_P Parameter: Timepoint (hr) Value: 6
  misc_feature: MA Experiment 20000117 PARAMETER Experiment Name: At_100uM_ABA_Mutants_cDNA_P Parameter: Tissue Value: Aerial
  misc_feature: MA Experiment 20000117 PARAMETER Experiment Name: At_100uM_ABA_Mutants_cDNA_P Parameter: Treatment Value: 100uM ABA vs. No Treatment
  misc_feature: MA Experiment ID: 20000185 Result: Down-regulated in Transcription
  misc_feature: MA Experiment 20000185 PARAMETER Experiment Name: At_Roots__P Parameter: Age (day) Value: 7 vs. 21
  misc_feature: MA Experiment 20000185 PARAMETER Experiment Name: At_Roots__P Parameter: Organism Value: A. thaliana
  misc_feature: MA Experiment 20000185 PARAMETER Experiment Name: At_Roots__P Parameter: Tissue Value: Roots vs. Whole Plant
  misc_feature: MA Experiment ID: 20000439 Result: Down-regulated in Transcription
  misc_feature: MA Experiment 20000439 PARAMETER Experiment Name: At_Roots__P Parameter: Age (day) Value: 14 vs. 21
  misc_feature: MA Experiment 20000439 PARAMETER Experiment Name: At_Roots__P Parameter: Organism Value: A. thaliana
  misc_feature: MA Experiment 20000439 PARAMETER Experiment Name: At_Roots__P Parameter: Tissue Value: Roots vs. Whole Plant
  misc_feature: MA Experiment ID: 20000794 Result: Down-regulated in Transcription
  misc_feature: MA Experiment 20000794 PARAMETER Experiment Name: At_Petals_P Parameter: Age (day) Value: 23-25 days
  misc_feature: MA Experiment 20000794 PARAMETER Experiment Name: At_Petals_P Parameter: Plant Line Value: WS
  misc_feature: MA Experiment 20000794 PARAMETER Experiment Name: At_Petals_P Parameter: Tissue Value: Petals vs. Whole plant
  misc_feature: MA Experiment ID: 20001450 Result: Down-regulated in Transcription
  misc_feature: MA Experiment 20001450 PARAMETER Experiment Name: At_Far-red-induction_P Parameter: Age (day) Value: 7
  misc_feature: MA Experiment 20001450 PARAMETER Experiment Name: At_Far-red-induction_P Parameter: Light Value: Far-red vs. White
  misc_feature: MA Experiment 20001450 PARAMETER Experiment Name: At_Far-red-induction_P Parameter: Organism Value: A. thaliana
  misc_feature: MA Experiment 20001450 PARAMETER Experiment Name: At_Far-red-induction_P Parameter: Plant Line Value: Columbia
  misc_feature: MA Experiment 20001450 PARAMETER Experiment Name: At_Far-red-induction_P Parameter: Timepoint (hr) Value: 8
  misc_feature: MA Experiment 20001450 PARAMETER Experiment Name: At_Far-red-induction_P Parameter: Tissue Value: Whole Plant
aaacccaacgataaaacgcaggagccatagaagaataacagataaaactctctgtgtgagtgagtgagactcaaccatggcgtctttggctcagcaattctcgggattgagatgttccccactctcttcttcttctaggttatcgaggagagcttcgaagaactttccccagaacaaatctgcctctgtttctccgactattgtcgccgcggttgcaatgtctagcggtcaaacaaaggagcgtcttgagctgaagaagatgttcgaagatgcttatgaacgatgtagaacttctcctatggaaggtgttgctttcaccgtcgacgatttcgctgctgctattgaacaatacgacttcaattccgaaatcggcactagggtaaaaggaacagtgttcaagactgatgcaaatggtgcattagttgacatttctgcaaagtcatcggcttacttgtcggtagaacaagcgtgtattcatagaattaagcatgtggaagaagctggtattgtacctggtatggtggaagagtttgtcatcattggtgaaaatgaaagtgatgacagtttgctattgagcttaaggaatattcaatacgaacttgcttgggaacgttgcaggcagcttcaggctgaggatgttattgtcaaggctaaggttattggtgctaacaaaggtggattggttgctcttgtggaaggtcttcgtggatttgtgcccttttcgcagatatcatcgaaagcagcagctgaagagcttcttgaaaaagaaatacctcttaagtttgtggaggttgatgaggaacaaacaaagcttgtcctcagcaaccgtaaagctgtagcagatagccaagctcagcttggaattggatctgtggtcctcggagttgttcagagcttgaaaccttatggtgccttcattgacattggtggaatcaatgggcttcttcatgtcagtcagataagtcatgaccgtgtctcagatatcgcaactgttcttcagcctggtgacactttgaaggttatgatattgagtcacgaccgtgacagaggaagagtaagtctctccacaaagaagctggagccaacacctggtgatatgattcgtaacccaaaacttgtgttcgagaaggctgaggagatggctcagacattcagacagagaattgcgcaagcagaagccatggctcgtgcagacatgcttcgcttccaacctgagagtggactgacgctgagttctgacgggatactaggaccactcggatctgagttaccagatgatggcgtagatctaacggtcgacgacattccttctgcagttgatatttagattctaaagctttagtgtattttttcatacacaaaaacacctccttgagcttaattgaatatgtagtttacttcctacaagacattttatcatgtgtactttgtcttttgtaatcgatatgttctgttacaatgtcaagaaaccaaagaaaggctttgccc

SEQ ID NO: 26933 - protein, 416 aa, Arabidopsis thaliana
  peptide (1)..(416): Ceres Seq. ID no. 12324053
  misc_feature (95)..(169): Pfam Name: S1 RNA binding domain Pfam Description: S1 RNA binding domain
  misc_feature (64)..(367): Homolog of NCBI NO: 33239803 NR Description: Ribosomal protein S1
  misc_feature (78)..(369): Homolog of NCBI NO: 16330162 NR Description: 30S ribosomal protein S1 [Synechocystis sp. PCC
  misc_feature (78)..(416): Homolog of NCBI NO: 23128852 NR Description: hypothetical protein [Nostoc punctiforme]
  misc_feature (78)..(415): Homolog of NCBI NO: 17227632 NR Description: 30S ribosomal protein S1 [Nostoc sp. PCC 7120]
  misc_feature (64)..(367): Homolog of NCBI NO: 33866517 NR Description: 30S ribosomal protein S1, homolog A
  misc_feature (38)..(367): Homolog of NCBI NO: 33863935 NR Description: 30S ribosomal protein S1, homolog A
  misc_feature (74)..(369): Homolog of NCBI NO: 1173225 NR Description: 30S ribosomal protein S1
  misc_feature (78)..(383): Homolog of NCBI NO: 22299589 NR Description: 30S ribosomal protein S1 [Thermosynechococcus
  misc_feature (1)..(415): Homolog of NCBI NO: 133872 NR Description: 30S ribosomal protein S1, chloroplast precursor
  misc_feature (1)..(416): Homolog of NCBI NO: 30692346 NR Description: ribosomal protein S1 [Arabidopsis thaliana]
MASLAQQFSGLRCSPLSSSSRLSRRASKNFPQNKSASVSPTIVAAVAMSSGQTKERLELKKMFEDAYERCRTSPMEGVAFTVDDFAAAIEQYDFNSEIGTRVKGTVFKTDANGALVDISAKSSAYLSVEQACIHRIKHVEEAGIVPGMVEEFVIIGENESDDSLLLSLRNIQYELAWERCRQLQAEDVIVKAKVIGANKGGLVALVEGLRGFVPFSQISSKAAAEELLEKEIPLKFVEVDEEQTKLVLSNRKAVADSQAQLGIGSVVLGVVQSLKPYGAFIDIGGINGLLHVSQISHDRVSDIATVLQPGDTLKVMILSHDRDRGRVSLSTKKLEPTPGDMIRNPKLVFEKAEEMAQTFRQRIAQAEAMARADMLRFQPESGLTLSSDGILGPLGSELPDDGVDLTVDDIPSAVDI

SEQ ID NO: 26934 - protein, 369 aa, Arabidopsis thaliana
  peptide (1)..(369): Ceres Seq. ID no. 12324054
  misc_feature (48)..(122): Pfam Name: S1 RNA binding domain Pfam Description: S1 RNA binding domain
  misc_feature (17)..(320): Homolog of NCBI NO: 33239803 NR Description: Ribosomal protein S1
  misc_feature (31)..(322): Homolog of NCBI NO: 16330162 NR Description: 30S ribosomal protein S1 [Synechocystis sp. PCC
  misc_feature (31)..(369): Homolog of NCBI NO: 23128852 NR Description: hypothetical protein [Nostoc punctiforme]
  misc_feature (31)..(368): Homolog of NCBI NO: 17227632 NR Description: 30S ribosomal protein S1 [Nostoc sp. PCC 7120]
  misc_feature (17)..(320): Homolog of NCBI NO: 33866517 NR Description: 30S ribosomal protein S1, homolog A
  misc_feature (1)..(320): Homolog of NCBI NO: 33863935 NR Description: 30S ribosomal protein S1, homolog A
  misc_feature (27)..(322): Homolog of NCBI NO: 1173225 NR Description: 30S ribosomal protein S1
  misc_feature (31)..(336): Homolog of NCBI NO: 22299589 NR Description: 30S ribosomal protein S1 [Thermosynechococcus
  misc_feature (1)..(368): Homolog of NCBI NO: 133872 NR Description: 30S ribosomal protein S1, chloroplast precursor
  misc_feature (1)..(369): Homolog of NCBI NO: 30692346 NR Description: ribosomal protein S1 [Arabidopsis thaliana]
MSSGQTKERLELKKMFEDAYERCRTSPMEGVAFTVDDFAAAIEQYDFNSEIGTRVKGTVFKTDANGALVDISAKSSAYLSVEQACIHRIKHVEEAGIVPGMVEEFVIIGENESDDSLLLSLRNIQYELAWERCRQLQAEDVIVKAKVIGANKGGLVALVEGLRGFVPFSQISSKAAAEELLEKEIPLKFVEVDEEQTKLVLSNRKAVADSQAQLGIGSVVLGVVQSLKPYGAFIDIGGINGLLHVSQISHDRVSDIATVLQPGDTLKVMILSHDRDRGRVSLSTKKLEPTPGDMIRNPKLVFEKAEEMAQTFRQRIAQAEAMARADMLRFQPESGLTLSSDGILGPLGSELPDDGVDLTVDDIPSAVDI

SEQ ID NO: 26935 - protein, 355 aa, Arabidopsis thaliana
  peptide (1)..(355): Ceres Seq. ID no. 12324055
  misc_feature (34)..(108): Pfam Name: S1 RNA binding domain Pfam Description: S1 RNA binding domain
  misc_feature (13)..(308): Homolog of NCBI NO: 1173225 NR Description: 30S ribosomal protein S1
  misc_feature (17)..(322): Homolog of NCBI NO: 22299589 NR Description: 30S ribosomal protein S1 [Thermosynechococcus
  misc_feature (3)..(306): Homolog of NCBI NO: 33239803 NR Description: Ribosomal protein S1
  misc_feature (17)..(355): Homolog of NCBI NO: 23128852 NR Description: hypothetical protein [Nostoc punctiforme]
  misc_feature (3)..(306): Homolog of NCBI NO: 33866517 NR Description: 30S ribosomal protein S1, homolog A
  misc_feature (1)..(306): Homolog of NCBI NO: 33863935 NR Description: 30S ribosomal protein S1, homolog A
  misc_feature (17)..(354): Homolog of NCBI NO: 17227632 NR Description: 30S ribosomal protein S1 [Nostoc sp. PCC 7120]
  misc_feature (17)..(308): Homolog of NCBI NO: 16330162 NR Description: 30S ribosomal protein S1 [Synechocystis sp. PCC
  misc_feature (1)..(354): Homolog of NCBI NO: 133872 NR Description: 30S ribosomal protein S1, chloroplast precursor
  misc_feature (1)..(355): Homolog of NCBI NO: 30692346 NR Description: ribosomal protein S1 [Arabidopsis thaliana]
MFEDAYERCRTSPMEGVAFTVDDFAAAIEQYDFNSEIGTRVKGTVFKTDANGALVDISAKSSAYLSVEQACIHRIKHVEEAGIVPGMVEEFVIIGENESDDSLLLSLRNIQYELAWERCRQLQAEDVIVKAKVIGANKGGLVALVEGLRGFVPFSQISSKAAAEELLEKEIPLKFVEVDEEQTKLVLSNRKAVADSQAQLGIGSVVLGVVQSLKPYGAFIDIGGINGLLHVSQISHDRVSDIATVLQPGDTLKVMILSHDRDRGRVSLSTKKLEPTPGDMIRNPKLVFEKAEEMAQTFRQRIAQAEAMARADMLRFQPESGLTLSSDGILGPLGSELPDDGVDLTVDDIPSAVDI

SEQ ID NO: 26936 - DNA, 1193 bp, Arabidopsis thaliana
  misc_feature (1)..(1193): Ceres Seq. ID no. 12422204
  misc_feature: MA Experiment ID: 108595 Result: Up-regulated in Transcription
  misc_feature: MA Experiment 108595 PARAMETER Experiment Name: At_Ler-pi_Ovule_cDNA_P Parameter: Plant Line Value: null
aactaatctctctctccctctctttcttcttcttccacaaatggcttcttgcgtcaccggaacagaggcagcaatcagagcagcggcatgtagagacggcgaagaagcctctcatctaaagatagtcgccgtcttcgccatctttctcacaagcgttttcggagtttggggaccagttttactcgctaaatactttcatggtaaacctctgtacgataaagcaattcttgtgataaagtgtttcgccgccggcgtgattctctcgacgtctttagtccacgttttaccggaagcgtttgagtcactcggctgattgccaagtgtcgtcacgtcatccatggaaagattttccgtttgctggtttagttacgatgatcggagctataacggctttgttggttgatttaacggcgagtgaacatatgggacacggtggtggtggtggtggtgacggagggatggagtatatgccggtgggtaaggcggttggagggttagaaatgaaagaaggaaagtgtggggctgatttggaaatacaagaaaatagtgaggaggaaattgtgaagatgaaacaaagattagtgtcacaagttcttgaaatagggattatatttcattcggtgataattggagtaacaatgggaatgtcacaaaataagtgtaccattagacctttgattgctgcgctttcttttcatcagatttttgaaggtttgggtcttggtggttgcattgctcaggctgggtttaaggcagggacagtggtgtatatgtgcttaatgttcgcggtaacaacgccactcgggattgtactagggatggtgatatttgcagcgaccgggtacgatgatcagaacccgaatgcattgataatggagggtttattgggatcattctcttcaggtattctaatatacatggccttggttgacctaattgcattggatttcttccataacaagatgctgacgacttgcggtgaatcgggttctcgcctcaagaagctttgttttgtggctttggttttaggttctgcctctatgtcactacttgctctttgggcttagacaaaaaaaaattgaggttatatactaatttggctacaggaaatattatgaatacgtaaacggctaaacctgttttaacatatttgaactttttactttataatatatctaattatcatttcttcg

SEQ ID NO: 26937 - protein, 231 aa, Arabidopsis thaliana
  peptide (1)..(231): Ceres Seq. ID no. 12422205
  misc_feature (1)..(228): Pfam Name: ZIP Zinc transporter Pfam Description: ZIP Zinc transporter
  misc_feature (1)..(231): Homolog of NCBI NO: 4836771 NR Description: iron-regulated transporter 1 [Lycopersicon
  misc_feature (1)..(231): Homolog of NCBI NO: 7488829 NR Description: probable Fe(II) transport protein, root - garden
  misc_feature (1)..(15): Homolog of NCBI NO: 40888854 NR Description: TPA: putative ZIP-like protein
  misc_feature (17)..(231): Homolog of NCBI NO: 40888854 NR Description: TPA: putative ZIP-like protein
  misc_feature (1)..(15): Homolog of NCBI NO: 32816615 NR Description: putative zinc transporter [Oryza sativa (japonica
  misc_feature (17)..(231): Homolog of NCBI NO: 32816615 NR Description: putative zinc transporter [Oryza sativa (japonica
  misc_feature (1)..(231): Homolog of NCBI NO: 30841912 NR Description: putative zinc transporter OsZIP2 [Oryza sativa]
  misc_feature (60)..(231): Homolog of NCBI NO: 40888872 NR Description: TPA: putative ZIP-like protein
  misc_feature (1)..(231): Homolog of NCBI NO: 40782197 NR Description: zinc transporter ZIP6 [Arabidopsis halleri subsp.
  misc_feature (1)..(231): Homolog of NCBI NO: 15227702 NR Description: putative Fe(II) transport protein; protein id:
MIGAITALLVDLTASEHMGHGGGGGGDGGMEYMPVGKAVGGLEMKEGKCGADLEIQENSEEEIVKMKQRLVSQVLEIGIIFHSVIIGVTMGMSQNKCTIRPLIAALSFHQIFEGLGLGGCIAQAGFKAGTVVYMCLMFAVTTPLGIVLGMVIFAATGYDDQNPNALIMEGLLGSFSSGILIYMALVDLIALDFFHNKMLTTCGESGSRLKKLCFVALVLGSASMSLLALWA

SEQ ID NO: 26938 - protein, 214 aa, Arabidopsis thaliana
  peptide (1)..(214): Ceres Seq. ID no. 12422206
  misc_feature (1)..(211): Pfam Name: ZIP Zinc transporter Pfam Description: ZIP Zinc transporter
  misc_feature (1)..(214): Homolog of NCBI NO: 15220470 NR Description: putative zinc transporter; protein id:
  misc_feature (1)..(214): Homolog of NCBI NO: 4836771 NR Description: iron-regulated transporter 1 [Lycopersicon
  misc_feature (1)..(214): Homolog of NCBI NO: 7488829 NR Description: probable Fe(II) transport protein, root - garden
  misc_feature (1)..(214): Homolog of NCBI NO: 40888854 NR Description: TPA: putative ZIP-like protein
  misc_feature (1)..(214): Homolog of NCBI NO: 32816615 NR Description: putative zinc transporter [Oryza sativa (japonica
  misc_feature (1)..(214): Homolog of NCBI NO: 30841912 NR Description: putative zinc transporter OsZIP2 [Oryza sativa]
  misc_feature (43)..(214): Homolog of NCBI NO: 40888872 NR Description: TPA: putative ZIP-like protein
  misc_feature (1)..(214): Homolog of NCBI NO: 40782197 NR Description: zinc transporter ZIP6 [Arabidopsis halleri subsp.
  misc_feature (1)..(214): Homolog of NCBI NO: 15227702 NR Description: putative Fe(II) transport protein; protein id:
MGHGGGGGGDGGMEYMPVGKAVGGLEMKEGKCGADLEIQENSEEEIVKMKQRLVSQVLEIGIIFHSVIIGVTMGMSQNKCTIRPLIAALSFHQIFEGLGLGGCIAQAGFKAGTVVYMCLMFAVTTPLGIVLGMVIFAATGYDDQNPNALIMEGLLGSFSSGILIYMALVDLIALDFFHNKMLTTCGESGSRLKKLCFVALVLGSASMSLLALWA

SEQ ID NO: 26939 - protein, 202 aa, Arabidopsis thaliana
  peptide (1)..(202): Ceres Seq. ID no. 12422207
  misc_feature (1)..(199): Pfam Name: ZIP Zinc transporter Pfam Description: ZIP Zinc transporter
  misc_feature (1)..(202): Homolog of NCBI NO: 15220470 NR Description: putative zinc transporter; protein id:
  misc_feature (1)..(202): Homolog of NCBI NO: 4836771 NR Description: iron-regulated transporter 1 [Lycopersicon
  misc_feature (1)..(202): Homolog of NCBI NO: 7488829 NR Description: probable Fe(II) transport protein, root - garden
  misc_feature (1)..(202): Homolog of NCBI NO: 40888854 NR Description: TPA: putative ZIP-like protein
  misc_feature (1)..(202): Homolog of NCBI NO: 32816615 NR Description: putative zinc transporter [Oryza sativa (japonica
  misc_feature (1)..(202): Homolog of NCBI NO: 30841912 NR Description: putative zinc transporter OsZIP2 [Oryza sativa]
  misc_feature (31)..(202): Homolog of NCBI NO: 40888872 NR Description: TPA: putative ZIP-like protein
  misc_feature (1)..(202): Homolog of NCBI NO: 40782197 NR Description: zinc transporter ZIP6 [Arabidopsis halleri subsp.
  misc_feature (1)..(202): Homolog of NCBI NO: 15227702 NR Description: putative Fe(II) transport protein; protein id:
MEYMPVGKAVGGLEMKEGKCGADLEIQENSEEEIVKMKQRLVSQVLEIGIIFHSVIIGVTMGMSQNKCTIRPLIAALSFHQIFEGLGLGGCIAQAGFKAGTVVYMCLMFAVTTPLGIVLGMVIFAATGYDDQNPNALIMEGLLGSFSSGILIYMALVDLIALDFFHNKMLTTCGESGSRLKKLCFVALVLGSASMSLLALWA

SEQ ID NO: 26940 - DNA, 1382 bp, Arabidopsis thaliana
  misc_feature (1)..(1382): Ceres Seq. ID no. 12384983
  misc_feature: MA Experiment ID: 108434 Result: Down-regulated in Transcription
  misc_feature: MA Experiment 108434 PARAMETER Experiment Name: At_Root_Tips_cDNA_P Parameter: Tissue Value: Root Tips
  misc_feature: MA Experiment ID: 108463 Result: Up-regulated in Transcription
  misc_feature: MA Experiment 108463 PARAMETER Experiment Name: At_Germinating_Seeds_cDNA_P Parameter: Age (day) Value: 3 vs. 0
  misc_feature: MA Experiment 108463 PARAMETER Experiment Name: At_Germinating_Seeds_cDNA_P Parameter: Tissue Value: Germinating Seeds
  misc_feature: MA Experiment ID: 108577 Result: Down-regulated in Transcription
  misc_feature: MA Experiment 108577 PARAMETER Experiment Name: At_42deg_Heat_cDNA_P Parameter: Temperature (deg C) Value: 42 vs. 22
  misc_feature: MA Experiment 108577 PARAMETER Experiment Name: At_42deg_Heat_cDNA_P Parameter: Timepoint (hr) Value: 6
  misc_feature: MA Experiment 108577 PARAMETER Experiment Name: At_42deg_Heat_cDNA_P Parameter: Tissue Value: Aerial
  misc_feature: MA Experiment ID: 108585 Result: Up-regulated in Transcription
  misc_feature: MA Experiment 108585 PARAMETER Experiment Name: At_5mM_NaNP_cDNA_P Parameter: Timepoint (hr) Value: 6
  misc_feature: MA Experiment 108585 PARAMETER Experiment Name: At_5mM_NaNP_cDNA_P Parameter: Tissue Value: Aerial
  misc_feature: MA Experiment 108585 PARAMETER Experiment Name: At_5mM_NaNP_cDNA_P Parameter: Treatment Value: null
  misc_feature: MA Experiment ID: 20000111 Result: Down-regulated in Transcription
  misc_feature: MA Experiment 20000111 PARAMETER Experiment Name: At_42deg_Heat_cDNA_P Parameter: Temperature (deg C) Value: 42 vs. 22
  misc_feature: MA Experiment 20000111 PARAMETER Experiment Name: At_42deg_Heat_cDNA_P Parameter: Timepoint (hr) Value: 6
  misc_feature: MA Experiment 20000111 PARAMETER Experiment Name: At_42deg_Heat_cDNA_P Parameter: Tissue Value: Aerial
  misc_feature: MA Experiment ID: 20000113 Result: Down-regulated in Transcription
  misc_feature: MA Experiment 20000113 PARAMETER Experiment Name: At_42deg_Heat_cDNA_P Parameter: Temperature (deg C) Value: 42 vs. 22
  misc_feature: MA Experiment 20000113 PARAMETER Experiment Name: At_42deg_Heat_cDNA_P Parameter: Timepoint (hr) Value: 8
  misc_feature: MA Experiment 20000113 PARAMETER Experiment Name: At_42deg_Heat_cDNA_P Parameter: Tissue Value: Aerial
  misc_feature: MA Experiment ID: 20000144 Result: Down-regulated in Transcription
  misc_feature: MA Experiment 20000144 PARAMETER Experiment Name: At_42deg_Heat_cDNA_P Parameter: Temperature (deg C) Value: 42 vs. 22
  misc_feature: MA Experiment 20000144 PARAMETER Experiment Name: At_42deg_Heat_cDNA_P Parameter: Timepoint (hr) Value: 1
  misc_feature: MA Experiment 20000144 PARAMETER Experiment Name: At_42deg_Heat_cDNA_P Parameter: Tissue Value: Aerial
  misc_feature: MA Experiment ID: 20000171 Result: Down-regulated in Transcription
  misc_feature: MA Experiment 20000171 PARAMETER Experiment Name: At_42deg_Heat_P Parameter: Age (day) Value: 14
  misc_feature: MA Experiment 20000171 PARAMETER Experiment Name: At_42deg_Heat_P Parameter: Organism Value: A. thaliana
  misc_feature: MA Experiment 20000171 PARAMETER Experiment Name: At_42deg_Heat_P Parameter: Plant Line Value: WS
  misc_feature: MA Experiment 20000171 PARAMETER Experiment Name: At_42deg_Heat_P Parameter: Temperature (deg C) Value: 42 vs. 22
  misc_feature: MA Experiment 20000171 PARAMETER Experiment Name: At_42deg_Heat_P Parameter: Timepoint (hr) Value: 1
  misc_feature: MA Experiment 20000171 PARAMETER Experiment Name: At_42deg_Heat_P Parameter: Tissue Value: Aerial
  misc_feature: MA Experiment ID: 20000173 Result: Down-regulated in Transcription
  misc_feature: MA Experiment 20000173 PARAMETER Experiment Name: At_42deg_Heat_P Parameter: Age (day) Value: 14
  misc_feature: MA Experiment 20000173 PARAMETER Experiment Name: At_42deg_Heat_P Parameter: Organism Value: A. thaliana
  misc_feature: MA Experiment 20000173 PARAMETER Experiment Name: At_42deg_Heat_P Parameter: Plant Line Value: WS
  misc_feature: MA Experiment 20000173 PARAMETER Experiment Name: At_42deg_Heat_P Parameter: Temperature (deg C) Value: 42 vs. 22
  misc_feature: MA Experiment 20000173 PARAMETER Experiment Name: At_42deg_Heat_P Parameter: Timepoint (hr) Value: 6
  misc_feature: MA Experiment 20000173 PARAMETER Experiment Name: At_42deg_Heat_P Parameter: Tissue Value: Aerial
  misc_feature: MA Experiment ID: 20000185 Result: Down-regulated in Transcription
  misc_feature: MA Experiment 20000185 PARAMETER Experiment Name: At_Roots__P Parameter: Age (day) Value: 7 vs. 21
  misc_feature: MA Experiment 20000185 PARAMETER Experiment Name: At_Roots__P Parameter: Organism Value: A. thaliana
  misc_feature: MA Experiment 20000185 PARAMETER Experiment Name: At_Roots__P Parameter: Tissue Value: Roots vs. Whole Plant
  misc_feature: MA Experiment ID: 20000234 Result: Down-regulated in Transcription
  misc_feature: MA Experiment 20000234 PARAMETER Experiment Name: At_Siliques_P Parameter: Age (day) Value: 21
  misc_feature: MA Experiment 20000234 PARAMETER Experiment Name: At_Siliques_P Parameter: Organism Value: A. thaliana
  misc_feature: MA Experiment 20000234 PARAMETER Experiment Name: At_Siliques_P Parameter: Plant Line Value: WS
  misc_feature: MA Experiment 20000234 PARAMETER Experiment Name: At_Siliques_P Parameter: Tissue Value: Less Than 5mm Siliques vs. Whole Plant
  misc_feature: MA Experiment ID: 20000235 Result: Down-regulated in Transcription
  misc_feature: MA Experiment 20000235 PARAMETER Experiment Name: At_Siliques_P Parameter: Age (day) Value: 21
  misc_feature: MA Experiment 20000235 PARAMETER Experiment Name: At_Siliques_P Parameter: Organism Value: A. thaliana
  misc_feature: MA Experiment 20000235 PARAMETER Experiment Name: At_Siliques_P Parameter: Plant Line Value: WS
  misc_feature: MA Experiment 20000235 PARAMETER Experiment Name: At_Siliques_P Parameter: Tissue Value: 5-10mm Siliques vs. Whole Plant
  misc_feature: MA Experiment ID: 20000264 Result: Down-regulated in Transcription
  misc_feature: MA Experiment 20000264 PARAMETER Experiment Name: At_Open_Flower_P Parameter: Age (day) Value: 21
  misc_feature: MA Experiment 20000264 PARAMETER Experiment Name: At_Open_Flower_P Parameter: Plant Line Value: WS
  misc_feature: MA Experiment 20000264 PARAMETER Experiment Name: At_Open_Flower_P Parameter: Tissue Value: Open Flower vs. Whole Plant
  misc_feature: MA Experiment ID: 20000265 Result: Down-regulated in Transcription
  misc_feature: MA Experiment 20000265 PARAMETER Experiment Name: At_Open_Flower_P Parameter: Age (day) Value: 21
  misc_feature: MA Experiment 20000265 PARAMETER Experiment Name: At_Open_Flower_P Parameter: Plant Line Value: WS
  misc_feature: MA Experiment 20000265 PARAMETER Experiment Name: At_Open_Flower_P Parameter: Tissue Value: Closed Flower vs. Whole Plant
  misc_feature: MA Experiment ID: 20000268 Result: Down-regulated in Transcription
  misc_feature: MA Experiment 20000268 PARAMETER Experiment Name: At_100mM_NaCl__P Parameter: Age (day) Value: 14
  misc_feature: MA Experiment 20000268 PARAMETER Experiment Name: At_100mM_NaCl__P Parameter: Organism Value: A. thaliana
  misc_feature: MA Experiment 20000268 PARAMETER Experiment Name: At_100mM_NaCl__P Parameter: Plant Line Value: WS
  misc_feature: MA Experiment 20000268 PARAMETER Experiment Name: At_100mM_NaCl__P Parameter: Timepoint (hr) Value: 6
  misc_feature: MA Experiment 20000268 PARAMETER Experiment Name: At_100mM_NaCl__P Parameter: Tissue Value: Whole Plant
  misc_feature: MA Experiment 20000268 PARAMETER Experiment Name: At_100mM_NaCl__P Parameter: Treatment Value: 100mM NaCl vs. No Treatment
  misc_feature: MA Experiment ID: 20000286 Result: Down-regulated in Transcription
  misc_feature: MA Experiment 20000286 PARAMETER Experiment Name: At_Open_Flower_P Parameter: Age (day) Value: 21
  misc_feature: MA Experiment 20000286 PARAMETER Experiment Name: At_Open_Flower_P Parameter: Plant Line Value: WS
  misc_feature: MA Experiment 20000286 PARAMETER Experiment Name: At_Open_Flower_P Parameter: Tissue Value: Half Open vs. Whole Plant
  misc_feature: MA Experiment ID: 20000437 Result: Down-regulated in Transcription
  misc_feature: MA Experiment 20000437 PARAMETER Experiment Name: At_Drought_P Parameter: Age (day) Value: 8
  misc_feature: MA Experiment 20000437 PARAMETER Experiment Name: At_Drought_P Parameter: Organism Value: A. thaliana
  misc_feature: MA Experiment 20000437 PARAMETER Experiment Name: At_Drought_P Parameter: Plant Line Value: WS
  misc_feature: MA Experiment 20000437 PARAMETER Experiment Name: At_Drought_P Parameter: Timepoint (hr) Value: 24
  misc_feature: MA Experiment 20000437 PARAMETER Experiment Name: At_Drought_P Parameter: Tissue Value: Whole Plant
  misc_feature: MA Experiment 20000437 PARAMETER Experiment Name: At_Drought_P Parameter: Treatment Value: Drought vs. No Drought
  misc_feature: MA Experiment ID: 20000438 Result: Down-regulated in Transcription
  misc_feature: MA Experiment 20000438 PARAMETER Experiment Name: At_Shoots__P Parameter: Age (day) Value: 14
  misc_feature: MA Experiment 20000438 PARAMETER Experiment Name: At_Shoots__P Parameter: Tissue Value: Shoots vs. Whole Plant
  misc_feature: MA Experiment ID: 20000439 Result: Down-regulated in Transcription
  misc_feature: MA Experiment 20000439 PARAMETER Experiment Name: At_Roots__P Parameter: Age (day) Value: 14 vs. 21
  misc_feature: MA Experiment 20000439 PARAMETER Experiment Name: At_Roots__P Parameter: Organism Value: A. thaliana
  misc_feature: MA Experiment 20000439 PARAMETER Experiment Name: At_Roots__P Parameter: Tissue Value: Roots vs. Whole Plant
  misc_feature: MA Experiment ID: 20000441 Result: Up-regulated in Transcription
  misc_feature: MA Experiment 20000441 PARAMETER Experiment Name: At_1uM_BR-BRZ__P Parameter: Tissue Value: Shoot Apices
  misc_feature: MA Experiment 20000441 PARAMETER Experiment Name: At_1uM_BR-BRZ__P Parameter: Treatment Value: 1uM BR vs. No Treatment
  misc_feature: MA Experiment ID: 20000452 Result: Up-regulated in Transcription
  misc_feature: MA Experiment 20000452 PARAMETER Experiment Name: At_CS6879_Shoots-Roots_P Parameter: Age (day) Value: 14
  misc_feature: MA Experiment 20000452 PARAMETER Experiment Name: At_CS6879_Shoots-Roots_P Parameter: Organism Value: A. thaliana
  misc_feature: MA Experiment 20000452 PARAMETER Experiment Name: At_CS6879_Shoots-Roots_P Parameter: Plant Line Value: CS6879 vs. WS
  misc_feature: MA Experiment 20000452 PARAMETER Experiment Name: At_CS6879_Shoots-Roots_P Parameter: Tissue Value: Shoots
  misc_feature: MA Experiment ID: 20000460 Result: Up-regulated in Transcription
  misc_feature: MA Experiment 20000460 PARAMETER Experiment Name: At_10percent_PEG_P Parameter: Age (day) Value: 12
  misc_feature: MA Experiment 20000460 PARAMETER Experiment Name: At_10percent_PEG_P Parameter: Organism Value: A. thaliana
  misc_feature: MA Experiment 20000460 PARAMETER Experiment Name: At_10percent_PEG_P Parameter: Plant Line Value: WS
  misc_feature: MA Experiment 20000460 PARAMETER Experiment Name: At_10percent_PEG_P Parameter: Timepoint (day) Value: 12
  misc_feature: MA Experiment 20000460 PARAMETER Experiment Name: At_10percent_PEG_P Parameter: Tissue Value: Whole Plant
  misc_feature: MA Experiment 20000460 PARAMETER Experiment Name: At_10percent_PEG_P Parameter: Treatment Value: 10percent PEG vs. No Treatment
  misc_feature: MA Experiment ID: 20000573 Result: Down-regulated in Transcription
  misc_feature: MA Experiment 20000573 PARAMETER Experiment Name: At_100uM_ABA_Mutants__P Parameter: Organism Value: A. thaliana
  misc_feature: MA Experiment 20000573 PARAMETER Experiment Name: At_100uM_ABA_Mutants__P Parameter: Plant Line Value: CS22 vs. Ler wt
  misc_feature: MA Experiment 20000573 PARAMETER Experiment Name: At_100uM_ABA_Mutants__P Parameter: Timepoint (hr) Value: N/A
  misc_feature: MA Experiment 20000573 PARAMETER Experiment Name: At_100uM_ABA_Mutants__P Parameter: Tissue Value: Whole Plant
  misc_feature: MA Experiment 20000573 PARAMETER Experiment Name: At_100uM_ABA_Mutants__P Parameter: Treatment Value: None
  misc_feature: MA Experiment ID: 20000574 Result: Down-regulated in Transcription
  misc_feature: MA Experiment 20000574 PARAMETER Experiment Name: At_100uM_ABA_Mutants__P Parameter: Organism Value: A. thaliana
  misc_feature: MA Experiment 20000574 PARAMETER Experiment Name: At_100uM_ABA_Mutants__P Parameter: Plant Line Value: CS23 vs. Ler wt
  misc_feature: MA Experiment 20000574 PARAMETER Experiment Name: At_100uM_ABA_Mutants__P Parameter: Timepoint (hr) Value: N/A
  misc_feature: MA Experiment 20000574 PARAMETER Experiment Name: At_100uM_ABA_Mutants__P Parameter: Tissue Value: Whole Plant
  misc_feature: MA Experiment 20000574 PARAMETER Experiment Name: At_100uM_ABA_Mutants__P Parameter: Treatment Value: None
aataataattagacttctgcactttctcacgaacctctctgtctcgtccattacttaaaaaccaaatctttcatcatcttccttcaccagttgactctctttcaatctatctctgaatctctcactctcctacccgaaaaccatgaactccaacgaccaggatccgattccgttcagacccgaagacaacaacttctccggttccaaaacctacgccatgagcggcaaaatcatgctaagtgcaatagtaatcctcttcttcgtcgtcattttaatggtcttcctccatctttacgctcgttggtatctcctccgtgctcgtagacgtcatctccgtcgtcgtagccgtaaccgtcgcgctacgatggttttcttcaccgctgatccttccaccgccgcaacttccgtcgtcgcttcacgtggacttgatccaaacgttattaaatctcttcctgttttcactttctccgacgagactcataaagatccgatcgaatgcgccgtttgtttatcggaattcgaagagagcgagacgggtcgggttttgcccaattgtcaacatacttttcatgttgattgtattgatatgtggtttcattctcattccacttgtcctctttgtcgatctctcgttgagtctctcgccgggattgaatcaacggcggcggcgagggagagggaagttgtgattgcggttgattctgatccggttttggtaattgaaccgagttctagctctggattgacggatgaaccacatggatctggatcttctcagatgctgagggaagattccgggagaaaaccggcggcgattgaggttccgaggaggacttttagcgagtttgaagatgagttgactcggagagactcgccggcgagtcagtcgtttaggtctccgatgagtcggatgttatctttcactcggatgttgagtagagatagaagaagcgcttcgtctcctatcgccggagctccgccgctatcgccgacgttaagctgccggatacagatgaccgagtcagatatcgaacggggaggagaagagagtaggtgacttgtcacgtgttggtgtctgattggtttaatgttaaccgggagtaaaaaaaggaattactacaagtcaacaggcttttgtctaggtgttgatttcggcgcccaaggacacgtggcgtaaactgagcttccaggaatcaatattcaccgtctattatgattagataggttagatagatttgtgtaacgatgtacaaagtcatctacaatattgaatctatttccatttattttaccatattctttttttttataattttcgaagttctacaaactcttttatgtaaaacacaatccaatggtcataattgtgataaagactttgc

SEQ ID NO: 26941 - protein, 304 aa, Arabidopsis thaliana
  peptide (1)..(304): Ceres Seq. ID no. 12384984
  misc_feature (119)..(160): Pfam Name: Zinc finger, C3HC4 type (RING finger) Pfam Description: Zinc finger, C3HC4 type (RING finger)
  misc_feature (21)..(165): Homolog of NCBI NO: 15226628 NR Description: hypothetical protein; protein id: At2g47560.1
  misc_feature (26)..(259): Homolog of NCBI NO: 12003386 NR Description: Avr9/Cf-9 rapidly elicited protein 132 [Nicotiana
  misc_feature (20)..(257): Homolog of NCBI NO: 4928401 NR Description: RING-H2 zinc finger protein ATL5 [Arabidopsis
  misc_feature (20)..(257): Homolog of NCBI NO: 15228830 NR Description: RING-H2 zinc finger protein ATL5
  misc_feature (31)..(253): Homolog of NCBI NO: 18414561 NR Description: Expressed protein
  misc_feature (29)..(253): Homolog of NCBI NO: 7485154 NR Description: hypothetical protein - Arabidopsis thaliana
  misc_feature (31)..(253): Homolog of NCBI NO: 21537244 NR Description: unknown [Arabidopsis thaliana]
  misc_feature (1)..(304): Homolog of NCBI NO: 25456278 NR Description: probable zinc finger protein [imported] -
  misc_feature (1)..(304): Homolog of NCBI NO: 21593806 NR Description: putative RING zinc finger protein [Arabidopsis
  misc_feature (1)..(304): Homolog of NCBI NO: 15228302 NR Description: putative RING zinc finger protein
MNSNDQDPIPFRPEDNNFSGSKTYAMSGKIMLSAIVILFFVVILMVFLHLYARWYLLRARRRHLRRRSRNRRATMVFFTADPSTAATSVVASRGLDPNVIKSLPVFTFSDETHKDPIECAVCLSEFEESETGRVLPNCQHTFHVDCIDMWFHSHSTCPLCRSLVESLAGIESTAAAREREVVIAVDSDPVLVIEPSSSSGLTDEPHGSGSSQMLREDSGRKPAAIEVPRRTFSEFEDELTRRDSPASQSFRSPMSRMLSFTRMLSRDRRSASSPIAGAPPLSPTLSCRIQMTESDIERGGEESR

SEQ ID NO: 26942 - protein, 279 aa, Arabidopsis thaliana
  peptide (1)..(279): Ceres Seq. ID no. 12384985
  misc_feature (94)..(135): Pfam Name: Zinc finger, C3HC4 type (RING finger) Pfam Description: Zinc finger, C3HC4 type (RING finger)
  misc_feature (1)..(140): Homolog of NCBI NO: 15226628 NR Description: hypothetical protein; protein id: At2g47560.1
  misc_feature (1)..(234): Homolog of NCBI NO: 12003386 NR Description: Avr9/Cf-9 rapidly elicited protein 132 [Nicotiana
  misc_feature (1)..(232): Homolog of NCBI NO: 4928401 NR Description: RING-H2 zinc finger protein ATL5 [Arabidopsis
  misc_feature (1)..(232): Homolog of NCBI NO: 15228830 NR Description: RING-H2 zinc finger protein ATL5
  misc_feature (6)..(228): Homolog of NCBI NO: 18414561 NR Description: Expressed protein
  misc_feature (4)..(228): Homolog of NCBI NO: 7485154 NR Description: hypothetical protein - Arabidopsis thaliana
  misc_feature (6)..(228): Homolog of NCBI NO: 21537244 NR Description: unknown [Arabidopsis thaliana]
  misc_feature (1)..(279): Homolog of NCBI NO: 25456278 NR Description: probable zinc finger protein [imported] -
  misc_feature (1)..(279): Homolog of NCBI NO: 21593806 NR Description: putative RING zinc finger protein [Arabidopsis
  misc_feature (1)..(279): Homolog of NCBI NO: 15228302 NR Description: putative RING zinc finger protein
MSGKIMLSAIVILFFVVILMVFLHLYARWYLLRARRRHLRRRSRNRRATMVFFTADPSTAATSVVASRGLDPNVIKSLPVFTFSDETHKDPIECAVCLSEFEESETGRVLPNCQHTFHVDCIDMWFHSHSTCPLCRSLVESLAGIESTAAAREREVVIAVDSDPVLVIEPSSSSGLTDEPHGSGSSQMLREDSGRKPAAIEVPRRTFSEFEDELTRRDSPASQSFRSPMSRMLSFTRMLSRDRRSASSPIAGAPPLSPTLSCRIQMTESDIERGGEESR

SEQ ID NO: 26943 - protein, 274 aa, Arabidopsis thaliana
  peptide (1)..(274): Ceres Seq. ID no. 12384986
  misc_feature (89)..(130): Pfam Name: Zinc finger, C3HC4 type (RING finger) Pfam Description: Zinc finger, C3HC4 type (RING finger)
  misc_feature (1)..(135): Homolog of NCBI NO: 15226628 NR Description: hypothetical protein; protein id: At2g47560.1
  misc_feature (1)..(229): Homolog of NCBI NO: 12003386 NR Description: Avr9/Cf-9 rapidly elicited protein 132 [Nicotiana
  misc_feature (1)..(227): Homolog of NCBI NO: 4928401 NR Description: RING-H2 zinc finger protein ATL5 [Arabidopsis
  misc_feature (1)..(227): Homolog of NCBI NO: 15228830 NR Description: RING-H2 zinc finger protein ATL5
  misc_feature (1)..(223): Homolog of NCBI NO: 18414561 NR Description: Expressed protein
  misc_feature (1)..(223): Homolog of NCBI NO: 7485154 NR Description: hypothetical protein - Arabidopsis thaliana
  misc_feature (1)..(223): Homolog of NCBI NO: 21537244 NR Description: unknown [Arabidopsis thaliana]
  misc_feature (1)..(274): Homolog of NCBI NO: 25456278 NR Description: probable zinc finger protein [imported] -
  misc_feature (1)..(274): Homolog of NCBI NO: 21593806 NR Description: putative RING zinc finger protein [Arabidopsis
  misc_feature (1)..(274): Homolog of NCBI NO: 15228302 NR Description: putative RING zinc finger protein
MLSAIVILFFVVILMVFLHLYARWYLLRARRRHLRRRSRNRRATMVFFTADPSTAATSVVASRGLDPNVIKSLPVFTFSDETHKDPIECAVCLSEFEESETGRVLPNCQHTFHVDCIDMWFHSHSTCPLCRSLVESLAGIESTAAAREREVVIAVDSDPVLVIEPSSSSGLTDEPHGSGSSQMLREDSGRKPAAIEVPRRTFSEFEDELTRRDSPASQSFRSPMSRMLSFTRMLSRDRRSASSPIAGAPPLSPTLSCRIQMTESDIERGGEESR

SEQ ID NO: 26944 - DNA, 1222 bp, Arabidopsis thaliana
  misc_feature (1)..(1222): Ceres Seq. ID no. 12333520
  misc_feature: MA Experiment ID: 108501 Result: Up-regulated in Transcription
  misc_feature: MA Experiment 108501 PARAMETER Experiment Name: At_ap2_floral_buds_cDNA_P Parameter: Plant Line Value: ap2 (Ler.)
  misc_feature: MA Experiment 108501 PARAMETER Experiment Name: At_ap2_floral_buds_cDNA_P Parameter: Tissue Value: Closed Flower
  misc_feature: MA Experiment ID: 108595 Result: Up-regulated in Transcription
  misc_feature: MA Experiment 108595 PARAMETER Experiment Name: At_Ler-pi_Ovule_cDNA_P Parameter: Plant Line Value: null
  misc_feature: MA Experiment ID: 20000070 Result: Up-regulated in Transcription
  misc_feature: MA Experiment 20000070 PARAMETER Experiment Name: At_100uM_ABA_Mutants_cDNA_P Parameter: Plant Line Value: CS24
  misc_feature: MA Experiment 20000070 PARAMETER Experiment Name: At_100uM_ABA_Mutants_cDNA_P Parameter: Timepoint (hr) Value: 6
  misc_feature: MA Experiment 20000070 PARAMETER Experiment Name: At_100uM_ABA_Mutants_cDNA_P Parameter: Tissue Value: Aerial
  misc_feature: MA Experiment 20000070 PARAMETER Experiment Name: At_100uM_ABA_Mutants_cDNA_P Parameter: Treatment Value: 100uM ABA vs. No Treatment
  misc_feature: MA Experiment ID: 20000071 Result: Up-regulated in Transcription
  misc_feature: MA Experiment 20000071 PARAMETER Experiment Name: At_100uM_ABA_Mutants_cDNA_P Parameter: Plant Line Value: CS8104
  misc_feature: MA Experiment 20000071 PARAMETER Experiment Name: At_100uM_ABA_Mutants_cDNA_P Parameter: Timepoint (hr) Value: 6
  misc_feature: MA Experiment 20000071 PARAMETER Experiment Name: At_100uM_ABA_Mutants_cDNA_P Parameter: Tissue Value: Aerial
  misc_feature: MA Experiment 20000071 PARAMETER Experiment Name: At_100uM_ABA_Mutants_cDNA_P Parameter: Treatment Value: 100uM ABA vs. No Treatment
  misc_feature: MA Experiment ID: 20000117 Result: Up-regulated in Transcription
  misc_feature: MA Experiment 20000117 PARAMETER Experiment Name: At_100uM_ABA_Mutants_cDNA_P Parameter: Plant Line Value: Columbia
  misc_feature: MA Experiment 20000117 PARAMETER Experiment Name: At_100uM_ABA_Mutants_cDNA_P Parameter: Timepoint (hr) Value: 6
  misc_feature: MA Experiment 20000117 PARAMETER Experiment Name: At_100uM_ABA_Mutants_cDNA_P Parameter: Tissue Value: Aerial
  misc_feature: MA Experiment 20000117 PARAMETER Experiment Name: At_100uM_ABA_Mutants_cDNA_P Parameter: Treatment Value: 100uM ABA vs. No Treatment
  misc_feature: MA Experiment ID: 20000224 Result: Down-regulated in Transcription
aaaattttgttttctctccttctctctccctctctcggtttctcaatctttcttattttttccataattctgaatttttcttttcaacaatctccggctaaaaaatgcccttagaggctgtcgtatacccgcaagatccattcggatatctctccaattgcaaagattttatgttccacgacttatactctcaagaagagttcgtagctcaagatacgaagaacaacattgataagttagggcatgaacagagctttgtggaacaaggtaaggaggacgatcatcaatggcgagactatcatcagtatcctttgttgatcccttcgttgggagaagagcttggtcttaccgccattgatgtggagagtcatcctcctccacagcaccggaggaagaggaggagaacgagaaactgcaagaacaaggaagagatcgagaaccagagaatgactcacatcgccgtcgagagaaatcgccggaaacagatgaacgagtatctggctgtgctccgttctctaatgccgtcgtcgtatgctcaaagaggagatcaagcgtcgatagtaggaggagctataaactacgtgaaggagttagagcatattttacaatctatggagccgaagagaactaggactcatgatcccaaaggagacaagactagcactagctcgttagtgggtccattcacagattttttcagcttcccacaatattctacaaagtcatcatcagatgtaccggaaagctcatcttcaccggcggagatagaggttacggtggcagaaagccatgcgaacatcaagataatgacgaagaagaaaccgaggcagcttcttaagctcataacttctttacaaagcctaaggctcactcttcttcatctcaatgtcaccactctccacaactccattctctactccatcagcgtcagggttgaagaaggaagccaactgaataccgtggacgacattgcaacagctttgaatcaaaccataaggaggattcaagaagagacataattcagcaaatagattataattaacttgttttatttttattttattttgaaataactgaaatcagttttctaatttatgtattttttttttcactattcctctaatcctccctatgtaagttgcatttttgtctcttgtaatgaatcaatggtcataaagatctgaacaaaaaaattgaataaaagaaaatggtttaagtcggc

SEQ ID NO: 26945 - protein, 304 aa, Arabidopsis thaliana
  peptide (1)..(304): Ceres Seq. ID no. 12333521
  misc_feature (113)..(164): Pfam Name: Helix-loop-helix DNA-binding domain Pfam Description: Helix-loop-helix DNA-binding domain
  misc_feature (1)..(277): Homolog of NCBI NO: 28558779 NR Description: helix-loop-helix-like protein [Cucumis melo]
  misc_feature (219)..(304): Homolog of NCBI NO: 37533680 NR Description: putative helix-loop-helix DNA-binding protein
  misc_feature (95)..(208): Homolog of NCBI NO: 37533680 NR Description: putative helix-loop-helix DNA-binding protein
  misc_feature (205)..(303): Homolog of NCBI NO: 34902426 NR Description: Unknown protein [Oryza sativa (japonica
  misc_feature (80)..(217): Homolog of NCBI NO: 34902426 NR Description: Unknown protein [Oryza sativa (japonica
  misc_feature (1)..(304): Homolog of NCBI NO: 15218391 NR Description: bHLH protein; protein id: At1g72210.1
  misc_feature (1)..(61): Homolog of NCBI NO: 25513460 NR Description: F12K8.16 protein - Arabidopsis thaliana
  misc_feature (107)..(304): Homolog of NCBI NO: 25513460 NR Description: F12K8.16 protein - Arabidopsis thaliana
  misc_feature (1)..(304): Homolog of NCBI NO: 18395124 NR Description: expressed protein
  misc_feature (1)..(304): Homolog of NCBI NO: 21593808 NR Description: unknown [Arabidopsis thaliana]
MPLEAVVYPQDPFGYLSNCKDFMFHDLYSQEEFVAQDTKNNIDKLGHEQSFVEQGKEDDHQWRDYHQYPLLIPSLGEELGLTAIDVESHPPPQHRRKRRRTRNCKNKEEIENQRMTHIAVERNRRKQMNEYLAVLRSLMPSSYAQRGDQASIVGGAINYVKELEHILQSMEPKRTRTHDPKGDKTSTSSLVGPFTDFFSFPQYSTKSSSDVPESSSSPAEIEVTVAESHANIKIMTKKKPRQLLKLITSLQSLRLTLLHLNVTTLHNSILYSISVRVEEGSQLNTVDDIATALNQTIRRIQEET

SEQ ID NO: 26946 - protein, 282 aa, Arabidopsis thaliana
  peptide (1)..(282): Ceres Seq. ID no. 12333522
  misc_feature (91)..(142): Pfam Name: Helix-loop-helix DNA-binding domain Pfam Description: Helix-loop-helix DNA-binding domain
  misc_feature (197)..(282): Homolog of NCBI NO: 37533680 NR Description: putative helix-loop-helix DNA-binding protein
  misc_feature (73)..(186): Homolog of NCBI NO: 37533680 NR Description: putative helix-loop-helix DNA-binding protein
  misc_feature (183)..(281): Homolog of NCBI NO: 34902426 NR Description: Unknown protein [Oryza sativa (japonica
  misc_feature (58)..(195): Homolog of NCBI NO: 34902426 NR Description: Unknown protein [Oryza sativa (japonica
  misc_feature (1)..(282): Homolog of NCBI NO: 15218391 NR Description: bHLH protein; protein id: At1g72210.1
  misc_feature (1)..(255): Homolog of NCBI NO: 28558779 NR Description: helix-loop-helix-like protein [Cucumis melo]
  misc_feature (1)..(39): Homolog of NCBI NO: 25513460 NR Description: F12K8.16 protein - Arabidopsis thaliana
  misc_feature (85)..(282): Homolog of NCBI NO: 25513460 NR Description: F12K8.16 protein - Arabidopsis thaliana
  misc_feature (1)..(282): Homolog of NCBI NO: 18395124 NR Description: expressed protein
  misc_feature (1)..(282): Homolog of NCBI NO: 21593808 NR Description: unknown [Arabidopsis thaliana]
MFHDLYSQEEFVAQDTKNNIDKLGHEQSFVEQGKEDDHQWRDYHQYPLLIPSLGEELGLTAIDVESHPPPQHRRKRRRTRNCKNKEEIENQRMTHIAVERNRRKQMNEYLAVLRSLMPSSYAQRGDQASIVGGAINYVKELEHILQSMEPKRTRTHDPKGDKTSTSSLVGPFTDFFSFPQYSTKSSSDVPESSSSPAEIEVTVAESHANIKIMTKKKPRQLLKLITSLQSLRLTLLHLNVTTLHNSILYSISVRVEEGSQLNTVDDIATALNQTIRRIQEET

SEQ ID NO: 26947 - protein, 190 aa, Arabidopsis thaliana
  peptide (1)..(190): Ceres Seq. ID no. 12333523
  misc_feature (1)..(50): Pfam Name: Helix-loop-helix DNA-binding domain Pfam Description: Helix-loop-helix DNA-binding domain
  misc_feature (79)..(168): Homolog of NCBI NO: 38346722 NR Description: OSJNBa0086O06.20 [Oryza sativa (japonica
  misc_feature (1)..(163): Homolog of NCBI NO: 28558779 NR Description: helix-loop-helix-like protein [Cucumis melo]
  misc_feature (105)..(190): Homolog of NCBI NO: 37533680 NR Description: putative helix-loop-helix DNA-binding protein
  misc_feature (1)..(94): Homolog of NCBI NO: 37533680 NR Description: putative helix-loop-helix DNA-binding protein
  misc_feature (91)..(189): Homolog of NCBI NO: 34902426 NR Description: Unknown protein [Oryza sativa (japonica
  misc_feature (1)..(103): Homolog of NCBI NO: 34902426 NR Description: Unknown protein [Oryza sativa (japonica
  misc_feature (1)..(190): Homolog of NCBI NO: 15218391 NR Description: bHLH protein; protein id: At1g72210.1
  misc_feature (1)..(190): Homolog of NCBI NO: 25513460 NR Description: F12K8.16 protein - Arabidopsis thaliana
  misc_feature (1)..(190): Homolog of NCBI NO: 18395124 NR Description: expressed protein
  misc_feature (1)..(190): Homolog of NCBI NO: 21593808 NR Description: unknown [Arabidopsis thaliana]
MTHIAVERNRRKQMNEYLAVLRSLMPSSYAQRGDQASIVGGAINYVKELEHILQSMEPKRTRTHDPKGDKTSTSSLVGPFTDFFSFPQYSTKSSSDVPESSSSPAEIEVTVAESHANIKIMTKKKPRQLLKLITSLQSLRLTLLHLNVTTLHNSILYSISVRVEEGSQLNTVDDIATALNQTIRRIQEET

SEQ ID NO: 26948 - DNA, 1821 bp, Arabidopsis thaliana
  misc_feature (1)..(1821): Ceres Seq. ID no. 12738467
  misc_feature: MA Experiment ID: 108469 Result: Up-regulated in Transcription
  misc_feature: MA Experiment ID: 108573 Result: Up-regulated in Transcription
  misc_feature: MA Experiment 108573 PARAMETER Experiment Name: At_Drought_cDNA_P Parameter: Timepoint (hr) Value: 6
  misc_feature: MA Experiment 108573 PARAMETER Experiment Name: At_Drought_cDNA_P Parameter: Tissue Value: Aerial
  misc_feature: MA Experiment 108573 PARAMETER Experiment Name: At_Drought_cDNA_P Parameter: Treatment Value: Drought vs. No Drought
  misc_feature: MA Experiment ID: 108585 Result: Up-regulated in Transcription
  misc_feature: MA Experiment 108585 PARAMETER Experiment Name: At_5mM_NaNP_cDNA_P Parameter: Timepoint (hr) Value: 6
  misc_feature: MA Experiment 108585 PARAMETER Experiment Name: At_5mM_NaNP_cDNA_P Parameter: Tissue Value: Aerial
  misc_feature: MA Experiment 108585 PARAMETER Experiment Name: At_5mM_NaNP_cDNA_P Parameter: Treatment Value: null
  misc_feature: MA Experiment ID: 20000182 Result: Up-regulated in Transcription
  misc_feature: MA Experiment 20000182 PARAMETER Experiment Name: At_2mM_SA_P Parameter: Age (day) Value: 14
  misc_feature: MA Experiment 20000182 PARAMETER Experiment Name: At_2mM_SA_P Parameter: Organism Value: A. thaliana
  misc_feature: MA Experiment 20000182 PARAMETER Experiment Name: At_2mM_SA_P Parameter: Plant Line Value: WS
  misc_feature: MA Experiment 20000182 PARAMETER Experiment Name: At_2mM_SA_P Parameter: Timepoint (hr) Value: 6
  misc_feature: MA Experiment 20000182 PARAMETER Experiment Name: At_2mM_SA_P Parameter: Tissue Value: Aerial
  misc_feature: MA Experiment 20000182 PARAMETER Experiment Name: At_2mM_SA_P Parameter: Treatment Value: 2mM SA vs. No Treatment
  misc_feature: MA Experiment ID: 20000794 Result: Down-regulated in Transcription
  misc_feature: MA Experiment 20000794 PARAMETER Experiment Name: At_Petals_P Parameter: Age (day) Value: 23-25 days
  misc_feature: MA Experiment 20000794 PARAMETER Experiment Name: At_Petals_P Parameter: Plant Line Value: WS
  misc_feature: MA Experiment 20000794 PARAMETER Experiment Name: At_Petals_P Parameter: Tissue Value: Petals vs. Whole plant
aaggtgaccttcgtctttggttgaccatcaaaaactacaacgctctttctccgtaggaaaggggaagcaaataaattatcgaagcccactggtttcggagctgatcggtctctatttctctcttcatacatatctcaagcagataaagttgatcggatactagaatgggaggaggatttagagttttgcatttggtgaggccattcttggcttttctgcctgaggttcagagtgctgataggaaggttccattcagagagaaggttatctacactgtcatctctctcttcatctttcttgtctgcagtcagcttcctctttatggaatccattccaccaccggtgcggatccattctattggatgcgtgtcattcttgcgtccaaccgtggaactgtcatggagctcggtattactcctattgttacatctggacttgtgatgcaactcttggctggttccaagattattgaggttgacaacaatgttcgtgaggatcgtgccctcttgaatggtgctcagaagcttctaggtattctgattgccattggtgaggctgttgcatatgttctttctggaatgtatggtcccgttggacagcttggtgttggaaatgccattctgatcatccttcagcttttctttgctggaatcattgttatctgccttgatgaactccttcagaagggatatggtctcggatcaggaatctcccttttcattgccaccaacatttgtgaaagcattatctggaaggcatttagcccaactaccatcaacaccgggcgtggagctgagtttgaaggtgctgttattgcactgttccatatgctgataaccaagtccaacaaggttgcggctctccgccaagctttctaccggcaaaaccttccaaatgttaccaacttgcttgccacagtcttgatcttcctgattgtgatctacttccaaggtttccgtgtggttttgcctgtgagatcaaagaatgcccgtggacaacagggttcttacccaatcaagctgttctacacctctaacatgcccatcatcctccaatccgccctcgtctcaaatctttacttcatttctcagcttctctaccggaagttcagcggaaatttctttgtaaaccttttgggacaatggaaagaatctgagtacagtggacaatctattccagttagtggtctggcttacctcatcacagctccagcaagtttctctgacatggcagctcacccgttccatgcactgttctacatcgtcttcatgctcactgcttgtgctcttttctcaaagacatggattgaagtctctggatcttctgctagggatgtagctaagcagctaaaggaacaacaaatggtgatgccaggacacagagaatcaaacttacagaaggaactgaacagatacatcccaacagcagcagcttttggaggagtttgtatcggtgcacttaccgttttggctgatttcatgggagccatcgggtcgggaaccggaattctgttggcggtcacgatcatataccagtatttcgagacctttgagaaggaaaaagccagtgaactcggcttcttcgggttctaagttagcttaaagaaggtgtaaactttgcctgaggcaaaaaagcagagcagaagaggctttagcttctgtgcccacctcaaacacagacaatttgtggtggcacttgggttagactacttttttttgttgttgttgaaacgaaattttctctttagtcatttatgtttttttgttactttttacaagttaaaaaacttatgtgatagacgcttttctaatgtatgtttct

SEQ ID NO: 26949 - protein, 475 aa, Arabidopsis thaliana
  peptide (1)..(475): Ceres Seq. ID no. 12738468
  misc_feature (77)..(461): Pfam Name: eubacterial secY protein Pfam Description: eubacterial secY protein
  misc_feature (4)..(474): Homolog of NCBI NO: 13517985 NR Description: Sec61 alpha form A [Oncorhynchus mykiss]
  misc_feature (4)..(474): Homolog of NCBI NO: 23429003 NR Description: Sec61-alpha [Pagothenia borchgrevinki]
  misc_feature (1)..(474): Homolog of NCBI NO: 15219158 NR Description: protein transport protein sec61 alpha subunit,
  misc_feature (1)..(475): Homolog of NCBI NO: 15375074 NR Description: Sec61 alpha subunit [Hordeum vulgare]
  misc_feature (1)..(475): Homolog of NCBI NO: 8886324 NR Description: Sec61p [Triticum aestivum]
  misc_feature (1)..(475): Homolog of NCBI NO: 6581004 NR Description: putative integral membrane protein [Phaseolus
  misc_feature (1)..(475): Homolog of NCBI NO: 21593089 NR Description: putative protein transport protein SEC61 alpha
  misc_feature (1)..(475): Homolog of NCBI NO: 15218887 NR Description: flower pigmentation protein ATAN11
  misc_feature (1)..(475): Homolog of NCBI NO: 20260296 NR Description: putative protein transport protein SEC61 alpha
  misc_feature (1)..(475): Homolog of NCBI NO: 15226261 NR Description: putative protein transport protein SEC61 alpha
MGGGFRVLHLVRPFLAFLPEVQSADRKVPFREKVIYTVISLFIFLVCSQLPLYGIHSTTGADPFYWMRVILASNRGTVMELGITPIVTSGLVMQLLAGSKIIEVDNNVREDRALLNGAQKLLGILIAIGEAVAYVLSGMYGPVGQLGVGNAILIILQLFFAGIIVICLDELLQKGYGLGSGISLFIATNICESIIWKAFSPTTINTGRGAEFEGAVIALFHMLITKSNKVAALRQAFYRQNLPNVTNLLATVLIFLIVIYFQGFRVVLPVRSKNARGQQGSYPIKLFYTSNMPIILQSALVSNLYFISQLLYRKFSGNFFVNLLGQWKESEYSGQSIPVSGLAYLITAPASFSDMAAHPFHALFYIVFMLTACALFSKTWIEVSGSSARDVAKQLKEQQMVMPGHRESNLQKELNRYIPTAAAFGGVCIGALTVLADFMGAIGSGTGILLAVTIIYQYFETFEKEKASELGFFGF

SEQ ID NO: 26950 - protein, 409 aa, Arabidopsis thaliana
  peptide (1)..(409): Ceres Seq. ID no. 12738469
  misc_feature (11)..(395): Pfam Name: eubacterial secY protein Pfam Description: eubacterial secY protein
  misc_feature (1)..(408): Homolog of NCBI NO: 13517985 NR Description: Sec61 alpha form A [Oncorhynchus mykiss]
  misc_feature (1)..(408): Homolog of NCBI NO: 23429003 NR Description: Sec61-alpha [Pagothenia borchgrevinki]
  misc_feature (1)..(408): Homolog of NCBI NO: 15219158 NR Description: protein transport protein sec61 alpha subunit,
  misc_feature (1)..(409): Homolog of NCBI NO: 15375074 NR Description: Sec61 alpha subunit [Hordeum vulgare]
  misc_feature (1)..(409): Homolog of NCBI NO: 8886324 NR Description: Sec61p [Triticum aestivum]
  misc_feature (1)..(409): Homolog of NCBI NO: 6581004 NR Description: putative integral membrane protein [Phaseolus
  misc_feature (1)..(409): Homolog of NCBI NO: 21593089 NR Description: putative protein transport protein SEC61 alpha
  misc_feature (1)..(409): Homolog of NCBI NO: 15218887 NR Description: flower pigmentation protein ATAN11
  misc_feature (1)..(409): Homolog of NCBI NO: 20260296 NR Description: putative protein transport protein SEC61 alpha
  misc_feature (1)..(409): Homolog of NCBI NO: 15226261 NR Description: putative protein transport protein SEC61 alpha
MRVILASNRGTVMELGITPIVTSGLVMQLLAGSKIIEVDNNVREDRALLNGAQKLLGILIAIGEAVAYVLSGMYGPVGQLGVGNAILIILQLFFAGIIVICLDELLQKGYGLGSGISLFIATNICESIIWKAFSPTTINTGRGAEFEGAVIALFHMLITKSNKVAALRQAFYRQNLPNVTNLLATVLIFLIVIYFQGFRVVLPVRSKNARGQQGSYPIKLFYTSNMPIILQSALVSNLYFISQLLYRKFSGNFFVNLLGQWKESEYSGQSIPVSGLAYLITAPASFSDMAAHPFHALFYIVFMLTACALFSKTWIEVSGSSARDVAKQLKEQQMVMPGHRESNLQKELNRYIPTAAAFGGVCIGALTVLADFMGAIGSGTGILLAVTIIYQYFETFEKEKASELGFFGF

SEQ ID NO: 26951 - protein, 397 aa, Arabidopsis thaliana
  peptide (1)..(397): Ceres Seq. ID no. 12738470
  misc_feature (1)..(383): Pfam Name: eubacterial secY protein Pfam Description: eubacterial secY protein
  misc_feature (1)..(396): Homolog of NCBI NO: 13517985 NR Description: Sec61 alpha form A [Oncorhynchus mykiss]
  misc_feature (1)..(396): Homolog of NCBI NO: 23429003 NR Description: Sec61-alpha [Pagothenia borchgrevinki]
  misc_feature (1)..(396): Homolog of NCBI NO: 15219158 NR Description: protein transport protein sec61 alpha subunit,
  misc_feature (1)..(397): Homolog of NCBI NO: 15375074 NR Description: Sec61 alpha subunit [Hordeum vulgare]
  misc_feature (1)..(397): Homolog of NCBI NO: 8886324 NR Description: Sec61p [Triticum aestivum]
  misc_feature (1)..(397): Homolog of NCBI NO: 6581004 NR Description: putative integral membrane protein [Phaseolus
  misc_feature (1)..(397): Homolog of NCBI NO: 21593089 NR Description: putative protein transport protein SEC61 alpha
  misc_feature (1)..(397): Homolog of NCBI NO: 15218887 NR Description: flower pigmentation protein ATAN11
  misc_feature (1)..(397): Homolog of NCBI NO: 20260296 NR Description: putative protein transport protein SEC61 alpha
  misc_feature (1)..(397): Homolog of NCBI NO: 15226261 NR Description: putative protein transport protein SEC61 alpha
MELGITPIVTSGLVMQLLAGSKIIEVDNNVREDRALLNGAQKLLGILIAIGEAVAYVLSGMYGPVGQLGVGNAILIILQLFFAGIIVICLDELLQKGYGLGSGISLFIATNICESIIWKAFSPTTINTGRGAEFEGAVIALFHMLITKSNKVAALRQAFYRQNLPNVTNLLATVLIFLIVIYFQGFRVVLPVRSKNARGQQGSYPIKLFYTSNMPIILQSALVSNLYFISQLLYRKFSGNFFVNLLGQWKESEYSGQSIPVSGLAYLITAPASFSDMAAHPFHALFYIVFMLTACALFSKTWIEVSGSSARDVAKQLKEQQMVMPGHRESNLQKELNRYIPTAAAFGGVCIGALTVLADFMGAIGSGTGILLAVTIIYQYFETFEKEKASELGFFGF

SEQ ID NO: 26952 - DNA, 1709 bp, Arabidopsis thaliana
  misc_feature (1)..(1709): Ceres Seq. ID no. 12324064
  misc_feature: MA Experiment ID: 108434 Result: Up-regulated in Transcription
  misc_feature: MA Experiment 108434 PARAMETER Experiment Name: At_Root_Tips_cDNA_P Parameter: Tissue Value: Root Tips
  misc_feature: MA Experiment ID: 108461 Result: Up-regulated in Transcription
  misc_feature: MA Experiment 108461 PARAMETER Experiment Name: At_Germinating_Seeds_cDNA_P Parameter: Age (day) Value: 1 vs. 0
  misc_feature: MA Experiment 108461 PARAMETER Experiment Name: At_Germinating_Seeds_cDNA_P Parameter: Tissue Value: Germinating Seeds
  misc_feature: MA Experiment ID: 108463 Result: Up-regulated in Transcription
  misc_feature: MA Experiment 108463 PARAMETER Experiment Name: At_Germinating_Seeds_cDNA_P Parameter: Age (day) Value: 3 vs. 0
  misc_feature: MA Experiment 108463 PARAMETER Experiment Name: At_Germinating_Seeds_cDNA_P Parameter: Tissue Value: Germinating Seeds
  misc_feature: MA Experiment ID: 108464 Result: Up-regulated in Transcription
  misc_feature: MA Experiment 108464 PARAMETER Experiment Name: At_Germinating_Seeds_cDNA_P Parameter: Age (day) Value: 4 vs. 0
  misc_feature: MA Experiment 108464 PARAMETER Experiment Name: At_Germinating_Seeds_cDNA_P Parameter: Tissue Value: Germinating Seeds
  misc_feature: MA Experiment ID: 108569 Result: Up-regulated in Transcription
  misc_feature: MA Experiment 108569 PARAMETER Experiment Name: At_0.001%_MeJA__cDNA_P Parameter: Timepoint (hr) Value: 6
  misc_feature: MA Experiment 108569 PARAMETER Experiment Name: At_0.001%_MeJA__cDNA_P Parameter: Tissue Value: Aerial
  misc_feature: MA Experiment 108569 PARAMETER Experiment Name: At_0.001%_MeJA__cDNA_P Parameter: Treatment Value: 0.001% MeJA vs. No Treatment
  misc_feature: MA Experiment ID: 108573 Result: Up-regulated in Transcription
  misc_feature: MA Experiment 108573 PARAMETER Experiment Name: At_Drought_cDNA_P Parameter: Timepoint (hr) Value: 6
  misc_feature: MA Experiment 108573 PARAMETER Experiment Name: At_Drought_cDNA_P Parameter: Tissue Value: Aerial
  misc_feature: MA Experiment 108573 PARAMETER Experiment Name: At_Drought_cDNA_P Parameter: Treatment Value: Drought vs. No Drought
  misc_feature: MA Experiment ID: 108595 Result: Down-regulated in Transcription
  misc_feature: MA Experiment 108595 PARAMETER Experiment Name: At_Ler-pi_Ovule_cDNA_P Parameter: Plant Line Value: null
  misc_feature: MA Experiment ID: 20000087 Result: Down-regulated in Transcription
  misc_feature: MA Experiment 20000087 PARAMETER Experiment Name: At_100uM_ABA_Mutants_cDNA_P Parameter: Plant Line Value: WS
  misc_feature: MA Experiment 20000087 PARAMETER Experiment Name: At_100uM_ABA_Mutants_cDNA_P Parameter: Timepoint (hr) Value: 6
  misc_feature: MA Experiment 20000087 PARAMETER Experiment Name: At_100uM_ABA_Mutants_cDNA_P Parameter: Tissue Value: Aerial
  misc_feature: MA Experiment 20000087 PARAMETER Experiment Name: At_100uM_ABA_Mutants_cDNA_P Parameter: Treatment Value: 100uM ABA vs. No Treatment
  misc_feature: MA Experiment ID: 20000113 Result: Down-regulated in Transcription
  misc_feature: MA Experiment 20000113 PARAMETER Experiment Name: At_42deg_Heat_cDNA_P Parameter: Temperature (deg C) Value: 42 vs. 22
  misc_feature: MA Experiment 20000113 PARAMETER Experiment Name: At_42deg_Heat_cDNA_P Parameter: Timepoint (hr) Value: 8
  misc_feature: MA Experiment 20000113 PARAMETER Experiment Name: At_42deg_Heat_cDNA_P Parameter: Tissue Value: Aerial
  misc_feature: MA Experiment ID: 20000306 Result: Up-regulated in Transcription
  misc_feature: MA Experiment 20000306 PARAMETER Experiment Name: At_Germinating_Seeds_Sub_P Parameter: Age (hr) Value: 6 vs. 0
  misc_feature: MA Experiment 20000306 PARAMETER Experiment Name: At_Germinating_Seeds_Sub_P Parameter: Organism Value: A. thaliana
  misc_feature: MA Experiment 20000306 PARAMETER Experiment Name: At_Germinating_Seeds_Sub_P Parameter: Plant Line Value: WS
  misc_feature: MA Experiment 20000306 PARAMETER Experiment Name: At_Germinating_Seeds_Sub_P Parameter: Tissue Value: Germinating Seeds
  misc_feature: MA Experiment ID: 20000307 Result: Up-regulated in Transcription
  misc_feature: MA Experiment 20000307 PARAMETER Experiment Name: At_Germinating_Seeds_Sub_P Parameter: Age (hr) Value: 24 vs. 0
  misc_feature: MA Experiment 20000307 PARAMETER Experiment Name: At_Germinating_Seeds_Sub_P Parameter: Organism Value: A. thaliana
  misc_feature: MA Experiment 20000307 PARAMETER Experiment Name: At_Germinating_Seeds_Sub_P Parameter: Plant Line Value: WS
  misc_feature: MA Experiment 20000307 PARAMETER Experiment Name: At_Germinating_Seeds_Sub_P Parameter: Tissue Value: Germinating Seeds
aaaaaatttattagccattcgagaaacaaggcatctctatttttttgcttcttctaatagacttcttcgtcactgatctcccacgacgatctcccaaactcatttctctacgttcatcgatctctctctttctcgtttgctctacgaaaatcagccatggatgaagagtacgaggttattgttctcggcaccggtctcaaggagtgtatcctcagcggtctcctttccgtcgatggtgtcaaggtgcttcacatggacaggaatgactactatggtggagaatcaacttcccttaatctcaatcagctttggaagaagttcaggggagaagagaaggctcctgagcatttaggcgctagccgggattacaatgttgacatgatgcctaagtttatgatgggaaatggcaagcttgttcgtacccttattcatacagatgttacaaagtatttgtccttcaaagctgttgatggaagctatgttttcgtcaaaggaaaggttcaaaaggtgccagctactcctatggaggccctgaaatcttctctcatgggcatatttgagaaacgtcgagccggcaagtttttcagttttgttcaagaatacgatgagaaggacccaaaaacacacgatggaatggatttgaccagagttacaacaaaggaactgattgcgaaatatggtcttgatggcaacactattgactttattggtcacgcagtggcacttcacacgaatgaccaacatctcgaccaacccgcctttgatactgtaatgagaatgaagctctatgcggaatctcttgcacgtttccaaggaacatctccatatatttatcctctctatgggttgggagaactaccccaggcatttgcacgacttagtgctgtctatggtggcacatatatgttgaacaaacctgagtgcaaggtagagtttgacgagggaggtaaggttattggtgtaacatctgagggagagactgctaaatgcaaaaagattgtgtgtgacccttcatacctgccgaacaaggttaggaagattggcagggttgctcgggccatcgccattatgagccacccgattccgaacaccaatgattctcactcagtgcaggtcatcataccccagaaacagttggcccgcaaatcggatatgtatgtcttctgttgttcgtactcccacaacgttgctcccaagggaaaattcattgcatttgtgtctacagatgcagagactgataaccctcaaaccgaactaaagcctggaactgatcttttgggtcctgttgatgagatattcttcgacatgtatgatagatacgagcctgtcaacgagccagagttggacaactgctttatttcaacgagctatgatgctacaacacactttgagacaactgttgcggatgtgttgaacatgtataccctaatcaccggaaagcaactggacctaagtgttgacctgagtgccgcaagtgctgcagaggaatgaagaatcatcaccagatcgctccctctctagttgattttctaaaagcttgttttgctcatttctctgtttccgactcttgctttcgtgttcttttttggtttgaactttgaatacaaaatcagaatgatccttcatgttttagaaactaacaaccatgtgtctccgtttgatgttggattcctcggttaaagacttataaatgctctttaaaactcaat

SEQ ID NO: 26953 - protein, 444 aa, Arabidopsis thaliana
  peptide (1)..(444): Ceres Seq. ID no. 12324065
  misc_feature (1)..(438): Pfam Name: GDP dissociation inhibitor Pfam Description: GDP dissociation inhibitor
  misc_feature (1)..(444): Homolog of NCBI NO: 15242440 NR Description: GDP dissociation inhibitor; protein id:
  misc_feature (1)..(444): Homolog of NCBI NO: 7489479 NR Description: GDP dissociation inhibitor protein - rice
  misc_feature (1)..(444): Homolog of NCBI NO: 7489478 NR Description: GDP dissociation inhibitor protein - rice
  misc_feature (1)..(444): Homolog of NCBI NO: 7489133 NR Description: GDP dissociation inhibitor - common tobacco
  misc_feature (1)..(444): Homolog of NCBI NO: 3175990 NR Description: GDP dissociation inhibitor [Cicer arietinum]
  misc_feature (1)..(444): Homolog of NCBI NO: 21592535 NR Description: GDP dissociation inhibitor [Arabidopsis thaliana]
  misc_feature (1)..(444): Homolog of NCBI NO: 17473582 NR Description: GDP dissociation inhibitor [Arabidopsis thaliana]
  misc_feature (1)..(444): Homolog of NCBI NO: 1550740 NR Description: GDP-associated inhibitor [Arabidopsis thaliana]
  misc_feature (1)..(444): Homolog of NCBI NO: 15224814 NR Description: GDP dissociation inhibitor
  misc_feature (1)..(444): Homolog of NCBI NO: 15232210 NR Description: Rab GDP dissociation inhibitor
MDEEYEVIVLGTGLKECILSGLLSVDGVKVLHMDRNDYYGGESTSLNLNQLWKKFRGEEKAPEHLGASRDYNVDMMPKFMMGNGKLVRTLIHTDVTKYLSFKAVDGSYVFVKGKVQKVPATPMEALKSSLMGIFEKRRAGKFFSFVQEYDEKDPKTHDGMDLTRVTTKELIAKYGLDGNTIDFIGHAVALHTNDQHLDQPAFDTVMRMKLYAESLARFQGTSPYIYPLYGLGELPQAFARLSAVYGGTYMLNKPECKVEFDEGGKVIGVTSEGETAKCKKIVCDPSYLPNKVRKIGRVARAIAIMSHPIPNTNDSHSVQVIIPQKQLARKSDMYVFCCSYSHNVAPKGKFIAFVSTDAETDNPQTELKPGTDLLGPVDEIFFDMYDRYEPVNEPELDNCFISTSYDATTHFETTVADVLNMYTLITGKQLDLSVDLSAASAAEE

SEQ ID NO: 26954 - protein, 412 aa, Arabidopsis thaliana
  peptide (1)..(412): Ceres Seq. ID no. 12324066
  misc_feature (1)..(406): Pfam Name: GDP dissociation inhibitor Pfam Description: GDP dissociation inhibitor
  misc_feature (1)..(412): Homolog of NCBI NO: 15242440 NR Description: GDP dissociation inhibitor; protein id:
  misc_feature (1)..(412): Homolog of NCBI NO: 7489479 NR Description: GDP dissociation inhibitor protein - rice
  misc_feature (1)..(412): Homolog of NCBI NO: 7489478 NR Description: GDP dissociation inhibitor protein - rice
  misc_feature (1)..(412): Homolog of NCBI NO: 7489133 NR Description: GDP dissociation inhibitor - common tobacco
  misc_feature (1)..(412): Homolog of NCBI NO: 3175990 NR Description: GDP dissociation inhibitor [Cicer arietinum]
  misc_feature (1)..(412): Homolog of NCBI NO: 21592535 NR Description: GDP dissociation inhibitor [Arabidopsis thaliana]
  misc_feature (1)..(412): Homolog of NCBI NO: 17473582 NR Description: GDP dissociation inhibitor [Arabidopsis thaliana]
  misc_feature (1)..(412): Homolog of NCBI NO: 1550740 NR Description: GDP-associated inhibitor [Arabidopsis thaliana]
  misc_feature (1)..(412): Homolog of NCBI NO: 15224814 NR Description: GDP dissociation inhibitor
  misc_feature (1)..(412): Homolog of NCBI NO: 15232210 NR Description: Rab GDP dissociation inhibitor
MDRNDYYGGESTSLNLNQLWKKFRGEEKAPEHLGASRDYNVDMMPKFMMGNGKLVRTLIHTDVTKYLSFKAVDGSYVFVKGKVQKVPATPMEALKSSLMGIFEKRRAGKFFSFVQEYDEKDPKTHDGMDLTRVTTKELIAKYGLDGNTIDFIGHAVALHTNDQHLDQPAFDTVMRMKLYAESLARFQGTSPYIYPLYGLGELPQAFARLSAVYGGTYMLNKPECKVEFDEGGKVIGVTSEGETAKCKKIVCDPSYLPNKVRKIGRVARAIAIMSHPIPNTNDSHSVQVIIPQKQLARKSDMYVFCCSYSHNVAPKGKFIAFVSTDAETDNPQTELKPGTDLLGPVDEIFFDMYDRYEPVNEPELDNCFISTSYDATTHFETTVADVLNMYTLITGKQLDLSVDLSAASAAEE

SEQ ID NO: 26955 - protein, 370 aa, Arabidopsis thaliana
  peptide (1)..(370): Ceres Seq. ID no. 12324067
  misc_feature (1)..(364): Pfam Name: GDP dissociation inhibitor Pfam Description: GDP dissociation inhibitor
  misc_feature (1)..(370): Homolog of NCBI NO: 15242440 NR Description: GDP dissociation inhibitor; protein id:
  misc_feature (1)..(370): Homolog of NCBI NO: 7489479 NR Description: GDP dissociation inhibitor protein - rice
  misc_feature (1)..(370): Homolog of NCBI NO: 7489478 NR Description: GDP dissociation inhibitor protein - rice
  misc_feature (1)..(370): Homolog of NCBI NO: 7489133 NR Description: GDP dissociation inhibitor - common tobacco
  misc_feature (1)..(370): Homolog of NCBI NO: 3175990 NR Description: GDP dissociation inhibitor [Cicer arietinum]
  misc_feature (1)..(370): Homolog of NCBI NO: 21592535 NR Description: GDP dissociation inhibitor [Arabidopsis thaliana]
  misc_feature (1)..(370): Homolog of NCBI NO: 17473582 NR Description: GDP dissociation inhibitor [Arabidopsis thaliana]
  misc_feature (1)..(370): Homolog of NCBI NO: 1550740 NR Description: GDP-associated inhibitor [Arabidopsis thaliana]
  misc_feature (1)..(370): Homolog of NCBI NO: 15224814 NR Description: GDP dissociation inhibitor
  misc_feature (1)..(370): Homolog of NCBI NO: 15232210 NR Description: Rab GDP dissociation inhibitor
MMPKFMMGNGKLVRTLIHTDVTKYLSFKAVDGSYVFVKGKVQKVPATPMEALKSSLMGIFEKRRAGKFFSFVQEYDEKDPKTHDGMDLTRVTTKELIAKYGLDGNTIDFIGHAVALHTNDQHLDQPAFDTVMRMKLYAESLARFQGTSPYIYPLYGLGELPQAFARLSAVYGGTYMLNKPECKVEFDEGGKVIGVTSEGETAKCKKIVCDPSYLPNKVRKIGRVARAIAIMSHPIPNTNDSHSVQVIIPQKQLARKSDMYVFCCSYSHNVAPKGKFIAFVSTDAETDNPQTELKPGTDLLGPVDEIFFDMYDRYEPVNEPELDNCFISTSYDATTHFETTVADVLNMYTLITGKQLDLSVDLSAASAAEE

SEQ ID NO: 26956 - DNA, 843 bp, Arabidopsis thaliana
  misc_feature (1)..(843): Ceres Seq. ID no. 12384977
  misc_feature: MA Experiment ID: 20000166 Result: Down-regulated in Transcription
  misc_feature: MA Experiment 20000166 PARAMETER Experiment Name: At_100uM_ABA_P Parameter: Age (day) Value: 14
  misc_feature: MA Experiment 20000166 PARAMETER Experiment Name: At_100uM_ABA_P Parameter: Organism Value: A. thaliana
  misc_feature: MA Experiment 20000166 PARAMETER Experiment Name: At_100uM_ABA_P Parameter: Plant Line Value: WS
  misc_feature: MA Experiment 20000166 PARAMETER Experiment Name: At_100uM_ABA_P Parameter: Timepoint (hr) Value: 1
  misc_feature: MA Experiment 20000166 PARAMETER Experiment Name: At_100uM_ABA_P Parameter: Tissue Value: Aerial
  misc_feature: MA Experiment 20000166 PARAMETER Experiment Name: At_100uM_ABA_P Parameter: Treatment Value: 100uM ABA vs. No Treatment
  misc_feature: MA Experiment ID: 20000184 Result: Down-regulated in Transcription
  misc_feature: MA Experiment 20000184 PARAMETER Experiment Name: At_Shoots__P Parameter: Age (day) Value: 7
  misc_feature: MA Experiment 20000184 PARAMETER Experiment Name: At_Shoots__P Parameter: Tissue Value: Shoots vs. Whole Plant
  misc_feature: MA Experiment ID: 20000234 Result: Down-regulated in Transcription
  misc_feature: MA Experiment 20000234 PARAMETER Experiment Name: At_Siliques_P Parameter: Age (day) Value: 21
  misc_feature: MA Experiment 20000234 PARAMETER Experiment Name: At_Siliques_P Parameter: Organism Value: A. thaliana
  misc_feature: MA Experiment 20000234 PARAMETER Experiment Name: At_Siliques_P Parameter: Plant Line Value: WS
  misc_feature: MA Experiment 20000234 PARAMETER Experiment Name: At_Siliques_P Parameter: Tissue Value: Less Than 5mm Siliques vs. Whole Plant
  misc_feature: MA Experiment ID: 20000265 Result: Down-regulated in Transcription
  misc_feature: MA Experiment 20000265 PARAMETER Experiment Name: At_Open_Flower_P Parameter: Age (day) Value: 21
  misc_feature: MA Experiment 20000265 PARAMETER Experiment Name: At_Open_Flower_P Parameter: Plant Line Value: WS
  misc_feature: MA Experiment 20000265 PARAMETER Experiment Name: At_Open_Flower_P Parameter: Tissue Value: Closed Flower vs. Whole Plant
  misc_feature: MA Experiment ID: 20000268 Result: Down-regulated in Transcription
  misc_feature: MA Experiment 20000268 PARAMETER Experiment Name: At_100mM_NaCl__P Parameter: Age (day) Value: 14
  misc_feature: MA Experiment 20000268 PARAMETER Experiment Name: At_100mM_NaCl__P Parameter: Organism Value: A. thaliana
  misc_feature: MA Experiment 20000268 PARAMETER Experiment Name: At_100mM_NaCl__P Parameter: Plant Line Value: WS
  misc_feature: MA Experiment 20000268 PARAMETER Experiment Name: At_100mM_NaCl__P Parameter: Timepoint (hr) Value: 6
  misc_feature: MA Experiment 20000268 PARAMETER Experiment Name: At_100mM_NaCl__P Parameter: Tissue Value: Whole Plant
  misc_feature: MA Experiment 20000268 PARAMETER Experiment Name: At_100mM_NaCl__P Parameter: Treatment Value: 100mM NaCl vs. No Treatment
  misc_feature: MA Experiment ID: 20000441 Result: Up-regulated in Transcription
  misc_feature: MA Experiment 20000441 PARAMETER Experiment Name: At_1uM_BR-BRZ__P Parameter: Tissue Value: Shoot Apices
  misc_feature: MA Experiment 20000441 PARAMETER Experiment Name: At_1uM_BR-BRZ__P Parameter: Treatment Value: 1uM BR vs. No Treatment
  misc_feature: MA Experiment ID: 20000443 Result: Up-regulated in Transcription
  misc_feature: MA Experiment 20000443 PARAMETER Experiment Name: At_1uM_BR-BRZ__P Parameter: Tissue Value: Shoot Apices
  misc_feature: MA Experiment 20000443 PARAMETER Experiment Name: At_1uM_BR-BRZ__P Parameter: Treatment Value: 1uM BRZ vs. No Treatment
  misc_feature: MA Experiment ID: 20000445 Result: Down-regulated in Transcription
  misc_feature: MA Experiment 20000445 PARAMETER Experiment Name: At_100uM_NAA__P Parameter: Age (day) Value: 14
  misc_feature: MA Experiment 20000445 PARAMETER Experiment Name: At_100uM_NAA__P Parameter: Organism Value: A. thaliana
  misc_feature: MA Experiment 20000445 PARAMETER Experiment Name: At_100uM_NAA__P Parameter: Plant Line Value: WS
  misc_feature: MA Experiment 20000445 PARAMETER Experiment Name: At_100uM_NAA__P Parameter: Timepoint (hr) Value: 6
  misc_feature: MA Experiment 20000445 PARAMETER Experiment Name: At_100uM_NAA__P Parameter: Tissue Value: Aerial
  misc_feature: MA Experiment 20000445 PARAMETER Experiment Name: At_100uM_NAA__P Parameter: Treatment Value: 100uM NAA vs. No Treatment
  misc_feature: MA Experiment ID: 20000455 Result: Down-regulated in Transcription
  misc_feature: MA Experiment 20000455 PARAMETER Experiment Name: At_100uM_ABA_P Parameter: Age (day) Value: 16
  misc_feature: MA Experiment 20000455 PARAMETER Experiment Name: At_100uM_ABA_P Parameter: Organism Value: A. thaliana
  misc_feature: MA Experiment 20000455 PARAMETER Experiment Name: At_100uM_ABA_P Parameter: Plant Line Value: WS
  misc_feature: MA Experiment 20000455 PARAMETER Experiment Name: At_100uM_ABA_P Parameter: Timepoint (hr) Value: 48
  misc_feature: MA Experiment 20000455 PARAMETER Experiment Name: At_100uM_ABA_P Parameter: Tissue Value: Aerial
  misc_feature: MA Experiment 20000455 PARAMETER Experiment Name: At_100uM_ABA_P Parameter: Treatment Value: 100uM ABA vs. No Treatment
  misc_feature: MA Experiment ID: 20000496 Result: Up-regulated in Transcription
  misc_feature: MA Experiment 20000496 PARAMETER Experiment Name: At_Guard_Cells_P Parameter: Harvest Date Value: 7/19/2002
  misc_feature: MA Experiment 20000496 PARAMETER Experiment Name: At_Guard_Cells_P Parameter: Organism Value: Canola
  misc_feature: MA Experiment 20000496 PARAMETER Experiment Name: At_Guard_Cells_P Parameter: Tissue Value: Guard Cells vs. Leaves
  misc_feature: MA Experiment ID: 20000794 Result: Up-regulated in Transcription
  misc_feature: MA Experiment 20000794 PARAMETER Experiment Name: At_Petals_P Parameter: Age (day) Value: 23-25 days
  misc_feature: MA Experiment 20000794 PARAMETER Experiment Name: At_Petals_P Parameter: Plant Line Value: WS
  misc_feature: MA Experiment 20000794 PARAMETER Experiment Name: At_Petals_P Parameter: Tissue Value: Petals vs. Whole plant
  misc_feature: MA Experiment ID: 20001247 Result: Up-regulated in Transcription
  misc_feature: MA Experiment 20001247 PARAMETER Experiment Name: At_Far-red-induction_P Parameter: Age (day) Value: 7
  misc_feature: MA Experiment 20001247 PARAMETER Experiment Name: At_Far-red-induction_P Parameter: Light Value: Far-red vs. White
  misc_feature: MA Experiment 20001247 PARAMETER Experiment Name: At_Far-red-induction_P Parameter: Organism Value: A. thaliana
  misc_feature: MA Experiment 20001247 PARAMETER Experiment Name: At_Far-red-induction_P Parameter: Plant Line Value: Columbia
  misc_feature: MA Experiment 20001247 PARAMETER Experiment Name: At_Far-red-induction_P Parameter: Timepoint (hr) Value: 1
  misc_feature: MA Experiment 20001247 PARAMETER Experiment Name: At_Far-red-induction_P Parameter: Tissue Value: Whole Plant
  misc_feature: MA Experiment ID: 20001451 Result: Up-regulated in Transcription
  misc_feature: MA Experiment 20001451 PARAMETER Experiment Name: At_Far-red-induction_P Parameter: Age (day) Value: 7
  misc_feature: MA Experiment 20001451 PARAMETER Experiment Name: At_Far-red-induction_P Parameter: Light Value: Far-red vs. White
  misc_feature: MA Experiment 20001451 PARAMETER Experiment Name: At_Far-red-induction_P Parameter: Organism Value: A. thaliana
  misc_feature: MA Experiment 20001451 PARAMETER Experiment Name: At_Far-red-induction_P Parameter: Plant Line Value: Columbia
  misc_feature: MA Experiment 20001451 PARAMETER Experiment Name: At_Far-red-induction_P Parameter: Timepoint (hr) Value: 24
  misc_feature: MA Experiment 20001451 PARAMETER Experiment Name: At_Far-red-induction_P Parameter: Tissue Value: Whole Plant
  misc_feature: MA Experiment ID: 20001555 Result: Down-regulated in Transcription
  misc_feature: MA Experiment 20001555 PARAMETER Experiment Name: At_Drought_Soil_Dry_P Parameter: Age (day) Value: 24
  misc_feature: MA Experiment 20001555 PARAMETER Experiment Name: At_Drought_Soil_Dry_P Parameter: Organism Value: A. thaliana
  misc_feature: MA Experiment 20001555 PARAMETER Experiment Name: At_Drought_Soil_Dry_P Parameter: Plant Line Value: WS
  misc_feature: MA Experiment 20001555 PARAMETER Experiment Name: At_Drought_Soil_Dry_P Parameter: Post Timepoint (hr) Value: None
  misc_feature: MA Experiment 20001555 PARAMETER Experiment Name: At_Drought_Soil_Dry_P Parameter: Post-Treatment Value: None
  misc_feature: MA Experiment 20001555 PARAMETER Experiment Name: At_Drought_Soil_Dry_P Parameter: Timepoint (day) Value: 10
  misc_feature: MA Experiment 20001555 PARAMETER Experiment Name: At_Drought_Soil_Dry_P Parameter: Treatment Value: Drought vs. No Drought
  misc_feature: MA Experiment ID: 20001556 Result: Down-regulated in Transcription
  misc_feature: MA Experiment 20001556 PARAMETER Experiment Name: At_Drought_Soil_Dry_P Parameter: Age (day) Value: 26
  misc_feature: MA Experiment 20001556 PARAMETER Experiment Name: At_Drought_Soil_Dry_P Parameter: Organism Value: A. thaliana
  misc_feature: MA Experiment 20001556 PARAMETER Experiment Name: At_Drought_Soil_Dry_P Parameter: Plant Line Value: WS
  misc_feature: MA Experiment 20001556 PARAMETER Experiment Name: At_Drought_Soil_Dry_P Parameter: Post Timepoint (hr) Value: None
  misc_feature: MA Experiment 20001556 PARAMETER Experiment Name: At_Drought_Soil_Dry_P Parameter: Post-Treatment Value: None
  misc_feature: MA Experiment 20001556 PARAMETER Experiment Name: At_Drought_Soil_Dry_P Parameter: Timepoint (day) Value: 12
  misc_feature: MA Experiment 20001556 PARAMETER Experiment Name: At_Drought_Soil_Dry_P Parameter: Treatment Value: Drought vs. No Drought
  misc_feature: MA Experiment ID: 20001907 Result: Down-regulated in Transcription
  misc_feature: MA Experiment 20001907 PARAMETER Experiment Name: At_Drought_Reproduction_P Parameter: Age (day) Value: 37
  misc_feature: MA Experiment 20001907 PARAMETER Experiment Name: At_Drought_Reproduction_P Parameter: Organism Value: A. thaliana
  misc_feature: MA Experiment 20001907 PARAMETER Experiment Name: At_Drought_Reproduction_P Parameter: Plant Line Value: WS
  misc_feature: MA Experiment 20001907 PARAMETER Experiment Name: At_Drought_Reproduction_P Parameter: Timepoint (day) Value: 7
  misc_feature: MA Experiment 20001907 PARAMETER Experiment Name: At_Drought_Reproduction_P Parameter: Tissue Value: Siliques
  misc_feature: MA Experiment 20001907 PARAMETER Experiment Name: At_Drought_Reproduction_P Parameter: Treatment Value: Drought vs. No Drought
aaaagagagagagagtctaaaagctcgtcgtcgtcttcaatggtgaatctcaaaccaattggataaataaaacaaaacaaaaaaaaacttcacaagaaaaaaaaaagatccaaattacaaccatgccttcggagttaacaccagaagaacgatcggaactaaaaaactcaatcgccgagttccacacataccaactcgatccaggaagctgttcatcactccacgcgcaacgaatccacgcgcctccggaactcgtctggtcaatcgtacgacgattcgacaaaccacaaacatacaaacacttcatcaaatcctgctccgtcgaacaaaacttcgagatgcgcgtcggatgcacgcgcgacgtgatcgtcatcagtggattaccggcgaacacatcaacggaaagactcgatatactcgacgacgaacggagagttaccggattcagtatcatcggaggcgaacataggctgacgaattacaaatccgttacgacggtgcatcggttcgagaaagagaatcggatctggacggtggttttggaatcttacgtcgttgatatgccggaaggtaactcggaggatgatactcgtatgtttgctgatacggttgtgaagcttaatttgcagaaactcgcgacggttgctgaagctatggctcgtaactccggtgacggaagtggttctcaggtgacgtgaaaatgaagaaaaaaatatgatttaatttcttttattaaaaacaaaatccagaaatgttatttatgttgcttcgtataagattctcttcttcttttgtctgtttttgcttttttaacctcatatagtcatatttttaccattttct

SEQ ID NO: 26957 - protein, 191 aa, Arabidopsis thaliana
  peptide (1)..(191): Ceres Seq. ID no. 12384978
  misc_feature (29)..(171): Pfam Name: Pathogenesis-related protein Bet v I family Pfam Description: Pathogenesis-related protein Bet v I family
  misc_feature (21)..(182): Homolog of NCBI NO: 18405351 NR Description: expressed protein
  misc_feature (17)..(188): Homolog of NCBI NO: 34907924 NR Description: B1088C09.9 [Oryza sativa (japonica
  misc_feature (17)..(172): Homolog of NCBI NO: 15239114 NR Description: putative protein
  misc_feature (1)..(182): Homolog of NCBI NO: 18404709 NR Description: expressed protein
  misc_feature (1)..(177): Homolog of NCBI NO: 15219339 NR Description: hypothetical protein; protein id: At1g73000.1
  misc_feature (5)..(175): Homolog of NCBI NO: 15225245 NR Description: hypothetical protein; protein id: At2g26040.1
  misc_feature (5)..(179): Homolog of NCBI NO: 37537066 NR Description: unknown protein [Oryza sativa (japonica
  misc_feature (1)..(190): Homolog of NCBI NO: 9758515 NR Description: gene_id:MZA15.21~pir||T05073~similar to unknown
  misc_feature (1)..(190): Homolog of NCBI NO: 22327625 NR Description: putative protein
  misc_feature (1)..(191): Homolog of NCBI NO: 15236689 NR Description: putative protein
MPSELTPEERSELKNSIAEFHTYQLDPGSCSSLHAQRIHAPPELVWSIVRRFDKPQTYKHFIKSCSVEQNFEMRVGCTRDVIVISGLPANTSTERLDILDDERRVTGFSIIGGEHRLTNYKSVTTVHRFEKENRIWTVVLESYVVDMPEGNSEDDTRMFADTVVKLNLQKLATVAEAMARNSGDGSGSQVT

SEQ ID NO: 26958 - protein, 119 aa, Arabidopsis thaliana
  peptide (1)..(119): Ceres Seq. ID no. 12384979
  misc_feature (1)..(99): Pfam Name: Pathogenesis-related protein Bet v I family Pfam Description: Pathogenesis-related protein Bet v I family
  misc_feature (1)..(110): Homolog of NCBI NO: 18405351 NR Description: expressed protein
  misc_feature (1)..(116): Homolog of NCBI NO: 34907924 NR Description: B1088C09.9 [Oryza sativa (japonica
  misc_feature (1)..(100): Homolog of NCBI NO: 15239114 NR Description: putative protein
  misc_feature (1)..(110): Homolog of NCBI NO: 18404709 NR Description: expressed protein
  misc_feature (1)..(105): Homolog of NCBI NO: 15219339 NR Description: hypothetical protein; protein id: At1g73000.1
  misc_feature (1)..(103): Homolog of NCBI NO: 15225245 NR Description: hypothetical protein; protein id: At2g26040.1
  misc_feature (1)..(107): Homolog of NCBI NO: 37537066 NR Description: unknown protein [Oryza sativa (japonica
  misc_feature (1)..(118): Homolog of NCBI NO: 9758515 NR Description: gene_id:MZA15.21~pir||T05073~similar to unknown
  misc_feature (1)..(118): Homolog of NCBI NO: 22327625 NR Description: putative protein
  misc_feature (1)..(119): Homolog of NCBI NO: 15236689 NR Description: putative protein
MRVGCTRDVIVISGLPANTSTERLDILDDERRVTGFSIIGGEHRLTNYKSVTTVHRFEKENRIWTVVLESYVVDMPEGNSEDDTRMFADTVVKLNLQKLATVAEAMARNSGDGSGSQVT

SEQ ID NO: 26959 - DNA, 1494 bp, Arabidopsis thaliana
  misc_feature (1)..(1494): Ceres Seq. ID no. 12370144
  misc_feature: MA Experiment ID: 108461 Result: Up-regulated in Transcription
  misc_feature: MA Experiment 108461 PARAMETER Experiment Name: At_Germinating_Seeds_cDNA_P Parameter: Age (day) Value: 1 vs. 0
  misc_feature: MA Experiment 108461 PARAMETER Experiment Name: At_Germinating_Seeds_cDNA_P Parameter: Tissue Value: Germinating Seeds
  misc_feature: MA Experiment ID: 108462 Result: Up-regulated in Transcription
  misc_feature: MA Experiment 108462 PARAMETER Experiment Name: At_Germinating_Seeds_cDNA_P Parameter: Age (day) Value: 2 vs. 0
  misc_feature: MA Experiment 108462 PARAMETER Experiment Name: At_Germinating_Seeds_cDNA_P Parameter: Tissue Value: Germinating Seeds
  misc_feature: MA Experiment ID: 108463 Result: Up-regulated in Transcription
  misc_feature: MA Experiment 108463 PARAMETER Experiment Name: At_Germinating_Seeds_cDNA_P Parameter: Age (day) Value: 3 vs. 0
  misc_feature: MA Experiment 108463 PARAMETER Experiment Name: At_Germinating_Seeds_cDNA_P Parameter: Tissue Value: Germinating Seeds
  misc_feature: MA Experiment ID: 108473 Result: Down-regulated in Transcription
  misc_feature: MA Experiment 108473 PARAMETER Experiment Name: At_Drought_Flowers_cDNA_P Parameter: Timepoint (hr) Value: 7 d
  misc_feature: MA Experiment 108473 PARAMETER Experiment Name: At_Drought_Flowers_cDNA_P Parameter: Tissue Value: Flower
  misc_feature: MA Experiment 108473 PARAMETER Experiment Name: At_Drought_Flowers_cDNA_P Parameter: Treatment Value: Drought vs. No Drought
  misc_feature: MA Experiment ID: 108488 Result: Up-regulated in Transcription
  misc_feature: MA Experiment ID: 108501 Result: Up-regulated in Transcription
  misc_feature: MA Experiment 108501 PARAMETER Experiment Name: At_ap2_floral_buds_cDNA_P Parameter: Plant Line Value: ap2 (Ler.)
  misc_feature: MA Experiment 108501 PARAMETER Experiment Name: At_ap2_floral_buds_cDNA_P Parameter: Tissue Value: Closed Flower
  misc_feature: MA Experiment ID: 108572 Result: Down-regulated in Transcription
  misc_feature: MA Experiment 108572 PARAMETER Experiment Name: At_Drought_cDNA_P Parameter: Timepoint (hr) Value: 1
  misc_feature: MA Experiment 108572 PARAMETER Experiment Name: At_Drought_cDNA_P Parameter: Tissue Value: Aerial
  misc_feature: MA Experiment 108572 PARAMETER Experiment Name: At_Drought_cDNA_P Parameter: Treatment Value: Drought vs. No Drought
  misc_feature: MA Experiment ID: 108573 Result: Down-regulated in Transcription
  misc_feature: MA Experiment 108573 PARAMETER Experiment Name: At_Drought_cDNA_P Parameter: Timepoint (hr) Value: 6
  misc_feature: MA Experiment 108573 PARAMETER Experiment Name: At_Drought_cDNA_P Parameter: Tissue Value: Aerial
  misc_feature: MA Experiment 108573 PARAMETER Experiment Name: At_Drought_cDNA_P Parameter: Treatment Value: Drought vs. No Drought
  misc_feature: MA Experiment ID: 108576 Result: Down-regulated in Transcription
  misc_feature: MA Experiment 108576 PARAMETER Experiment Name: At_42deg_Heat_cDNA_P Parameter: Temperature (deg C) Value: 42 vs. 22
  misc_feature: MA Experiment 108576 PARAMETER Experiment Name: At_42deg_Heat_cDNA_P Parameter: Timepoint (hr) Value: 1
  misc_feature: MA Experiment 108576 PARAMETER Experiment Name: At_42deg_Heat_cDNA_P Parameter: Tissue Value: Aerial
  misc_feature: MA Experiment ID: 108577 Result: Down-regulated in Transcription
  misc_feature: MA Experiment 108577 PARAMETER Experiment Name: At_42deg_Heat_cDNA_P Parameter: Temperature (deg C) Value: 42 vs. 22
  misc_feature: MA Experiment 108577 PARAMETER Experiment Name: At_42deg_Heat_cDNA_P Parameter: Timepoint (hr) Value: 6
  misc_feature: MA Experiment 108577 PARAMETER Experiment Name: At_42deg_Heat_cDNA_P Parameter: Tissue Value: Aerial
  misc_feature: MA Experiment ID: 108579 Result: Up-regulated in Transcription
  misc_feature: MA Experiment 108579 PARAMETER Experiment Name: At_4deg_Cold_cDNA_P Parameter: Temperature (deg C) Value: 4 vs. 22
  misc_feature: MA Experiment 108579 PARAMETER Experiment Name: At_4deg_Cold_cDNA_P Parameter: Timepoint (hr) Value: 6
  misc_feature: MA Experiment 108579 PARAMETER Experiment Name: At_4deg_Cold_cDNA_P Parameter: Tissue Value: Aerial
  misc_feature: MA Experiment ID: 108585 Result: Up-regulated in Transcription
  misc_feature: MA Experiment 108585 PARAMETER Experiment Name: At_5mM_NaNP_cDNA_P Parameter: Timepoint (hr) Value: 6
  misc_feature: MA Experiment 108585 PARAMETER Experiment Name: At_5mM_NaNP_cDNA_P Parameter: Tissue Value: Aerial
  misc_feature: MA Experiment 108585 PARAMETER Experiment Name: At_5mM_NaNP_cDNA_P Parameter: Treatment Value: null
  misc_feature: MA Experiment ID: 108668 Result: Down-regulated in Transcription
  misc_feature: MA Experiment 108668 PARAMETER Experiment Name: At_2mM_SA_cDNA_P Parameter: Plant Line Value: WS
  misc_feature: MA Experiment 108668 PARAMETER Experiment Name: At_2mM_SA_cDNA_P Parameter: Timepoint (hr) Value: 6
  misc_feature: MA Experiment 108668 PARAMETER Experiment Name: At_2mM_SA_cDNA_P Parameter: Treatment Value: 2mM SA vs. No Treatment
  misc_feature: MA Experiment ID: 20000069 Result: Down-regulated in Transcription
  misc_feature: MA Experiment 20000069 PARAMETER Experiment Name: At_100uM_ABA_Mutants_cDNA_P Parameter: Plant Line Value: CS23
  misc_feature: MA Experiment 20000069 PARAMETER Experiment Name: At_100uM_ABA_Mutants_cDNA_P Parameter: Timepoint (hr) Value: 6
  misc_feature: MA Experiment 20000069 PARAMETER Experiment Name: At_100uM_ABA_Mutants_cDNA_P Parameter: Tissue Value: Aerial
  misc_feature: MA Experiment 20000069 PARAMETER Experiment Name: At_100uM_ABA_Mutants_cDNA_P Parameter: Treatment Value: 100uM ABA vs. No Treatment
  misc_feature: MA Experiment ID: 20000072 Result: Down-regulated in Transcription
  misc_feature: MA Experiment 20000072 PARAMETER Experiment Name: At_100uM_ABA_Mutants_cDNA_P Parameter: Plant Line Value: CS8105
  misc_feature: MA Experiment 20000072 PARAMETER Experiment Name: At_100uM_ABA_Mutants_cDNA_P Parameter: Timepoint (hr) Value: 6
  misc_feature: MA Experiment 20000072 PARAMETER Experiment Name: At_100uM_ABA_Mutants_cDNA_P Parameter: Tissue Value: Aerial
  misc_feature: MA Experiment 20000072 PARAMETER Experiment Name: At_100uM_ABA_Mutants_cDNA_P Parameter: Treatment Value: 100uM ABA vs. No Treatment
  misc_feature: MA Experiment ID: 20000087 Result: Down-regulated in Transcription
  misc_feature: MA Experiment 20000087 PARAMETER Experiment Name: At_100uM_ABA_Mutants_cDNA_P Parameter: Plant Line Value: WS
  misc_feature: MA Experiment 20000087 PARAMETER Experiment Name: At_100uM_ABA_Mutants_cDNA_P Parameter: Timepoint (hr) Value: 6
  misc_feature: MA Experiment 20000087 PARAMETER Experiment Name: At_100uM_ABA_Mutants_cDNA_P Parameter: Tissue Value: Aerial
  misc_feature: MA Experiment 20000087 PARAMETER Experiment Name: At_100uM_ABA_Mutants_cDNA_P Parameter: Treatment Value: 100uM ABA vs. No Treatment
  misc_feature: MA Experiment ID: 20000089 Result: Down-regulated in Transcription
  misc_feature: MA Experiment ID: 20000090 Result: Down-regulated in Transcription
  misc_feature: MA Experiment ID: 20000112 Result: Down-regulated in Transcription
  misc_feature: MA Experiment 20000112 PARAMETER Experiment Name: At_42deg_Heat_cDNA_P Parameter: Temperature (deg C) Value: 42 vs. 22
  misc_feature: MA Experiment 20000112 PARAMETER Experiment Name: At_42deg_Heat_cDNA_P Parameter: Timepoint (hr) Value: 2
  misc_feature: MA Experiment 20000112 PARAMETER Experiment Name: At_42deg_Heat_cDNA_P Parameter: Tissue Value: Aerial
  misc_feature: MA Experiment ID: 20000113 Result: Down-regulated in Transcription
  misc_feature: MA Experiment 20000113 PARAMETER Experiment Name: At_42deg_Heat_cDNA_P Parameter: Temperature (deg C) Value: 42 vs. 22
  misc_feature: MA Experiment 20000113 PARAMETER Experiment Name: At_42deg_Heat_cDNA_P Parameter: Timepoint (hr) Value: 8
  misc_feature: MA Experiment 20000113 PARAMETER Experiment Name: At_42deg_Heat_cDNA_P Parameter: Tissue Value: Aerial
  misc_feature: MA Experiment ID: 20000117 Result: Down-regulated in Transcription
  misc_feature: MA Experiment 20000117 PARAMETER Experiment Name: At_100uM_ABA_Mutants_cDNA_P Parameter: Plant Line Value: Columbia
  misc_feature: MA Experiment 20000117 PARAMETER Experiment Name: At_100uM_ABA_Mutants_cDNA_P Parameter: Timepoint (hr) Value: 6
  misc_feature: MA Experiment 20000117 PARAMETER Experiment Name: At_100uM_ABA_Mutants_cDNA_P Parameter: Tissue Value: Aerial
  misc_feature: MA Experiment 20000117 PARAMETER Experiment Name: At_100uM_ABA_Mutants_cDNA_P Parameter: Treatment Value: 100uM ABA vs. No Treatment
  misc_feature: MA Experiment ID: 20000144 Result: Down-regulated in Transcription
  misc_feature: MA Experiment 20000144 PARAMETER Experiment Name: At_42deg_Heat_cDNA_P Parameter: Temperature (deg C) Value: 42 vs. 22
  misc_feature: MA Experiment 20000144 PARAMETER Experiment Name: At_42deg_Heat_cDNA_P Parameter: Timepoint (hr) Value: 1
  misc_feature: MA Experiment 20000144 PARAMETER Experiment Name: At_42deg_Heat_cDNA_P Parameter: Tissue Value: Aerial
  misc_feature: MA Experiment ID: 20000180 Result: Up-regulated in Transcription
  misc_feature: MA Experiment 20000180 PARAMETER Experiment Name: At_Germinating_Seeds_P Parameter: Age (hr) Value: 24 vs. 0
  misc_feature: MA Experiment 20000180 PARAMETER Experiment Name: At_Germinating_Seeds_P Parameter: Tissue Value: Germinating Seeds
  misc_feature: MA Experiment ID: 20000182 Result: Down-regulated in Transcription
  misc_feature: MA Experiment 20000182 PARAMETER Experiment Name: At_2mM_SA_P Parameter: Age (day) Value: 14
  misc_feature: MA Experiment 20000182 PARAMETER Experiment Name: At_2mM_SA_P Parameter: Organism Value: A. thaliana
  misc_feature: MA Experiment 20000182 PARAMETER Experiment Name: At_2mM_SA_P Parameter: Plant Line Value: WS
  misc_feature: MA Experiment 20000182 PARAMETER Experiment Name: At_2mM_SA_P Parameter: Timepoint (hr) Value: 6
  misc_feature: MA Experiment 20000182 PARAMETER Experiment Name: At_2mM_SA_P Parameter: Tissue Value: Aerial
  misc_feature: MA Experiment 20000182 PARAMETER Experiment Name: At_2mM_SA_P Parameter: Treatment Value: 2mM SA vs. No Treatment
  misc_feature: MA Experiment ID: 20000184 Result: Up-regulated in Transcription
  misc_feature: MA Experiment 20000184 PARAMETER Experiment Name: At_Shoots__P Parameter: Age (day) Value: 7
  misc_feature: MA Experiment 20000184 PARAMETER Experiment Name: At_Shoots__P Parameter: Tissue Value: Shoots vs. Whole Plant
  misc_feature: MA Experiment ID: 20000224 Result: Down-regulated in Transcription
  misc_feature: MA Experiment ID: 20000227 Result: Up-regulated in Transcription
  misc_feature: MA Experiment 20000227 PARAMETER Experiment Name: At_Root-Tips-vs-Tops_P Parameter: Tissue Value: Root Tips vs. Root Tops
  misc_feature: MA Experiment ID: 20000234 Result: Up-regulated in Transcription
  misc_feature: MA Experiment 20000234 PARAMETER Experiment Name: At_Siliques_P Parameter: Age (day) Value: 21
  misc_feature: MA Experiment 20000234 PARAMETER Experiment Name: At_Siliques_P Parameter: Organism Value: A. thaliana
  misc_feature: MA Experiment 20000234 PARAMETER Experiment Name: At_Siliques_P Parameter: Plant Line Value: WS
  misc_feature: MA Experiment 20000234 PARAMETER Experiment Name: At_Siliques_P Parameter: Tissue Value: Less Than 5mm Siliques vs. Whole Plant
  misc_feature: MA Experiment ID: 20000437 Result: Down-regulated in Transcription
  misc_feature: MA Experiment 20000437 PARAMETER Experiment Name: At_Drought_P Parameter: Age (day) Value: 8
  misc_feature: MA Experiment 20000437 PARAMETER Experiment Name: At_Drought_P Parameter: Organism Value: A. thaliana
  misc_feature: MA Experiment 20000437 PARAMETER Experiment Name: At_Drought_P Parameter: Plant Line Value: WS
  misc_feature: MA Experiment 20000437 PARAMETER Experiment Name: At_Drought_P Parameter: Timepoint (hr) Value: 24
  misc_feature: MA Experiment 20000437 PARAMETER Experiment Name: At_Drought_P Parameter: Tissue Value: Whole Plant
  misc_feature: MA Experiment 20000437 PARAMETER Experiment Name: At_Drought_P Parameter: Treatment Value: Drought vs. No Drought
  misc_feature: MA Experiment ID: 20000527 Result: Down-regulated in Transcription
  misc_feature: MA Experiment 20000527 PARAMETER Experiment Name: At_10percent_PEG_P Parameter: Age (day) Value: 20
  misc_feature: MA Experiment 20000527 PARAMETER Experiment Name: At_10percent_PEG_P Parameter: Organism Value: A. thaliana
  misc_feature: MA Experiment 20000527 PARAMETER Experiment Name: At_10percent_PEG_P Parameter: Plant Line Value: WS
  misc_feature: MA Experiment 20000527 PARAMETER Experiment Name: At_10percent_PEG_P Parameter: Timepoint (day) Value: 20
  misc_feature: MA Experiment 20000527 PARAMETER Experiment Name: At_10percent_PEG_P Parameter: Tissue Value: Whole Plant
  misc_feature: MA Experiment 20000527 PARAMETER Experiment Name: At_10percent_PEG_P Parameter: Treatment Value: 10percent PEG vs. No Treatment
  misc_feature: MA Experiment ID: 20001450 Result: Up-regulated in Transcription
  misc_feature: MA Experiment 20001450 PARAMETER Experiment Name: At_Far-red-induction_P Parameter: Age (day) Value: 7
  misc_feature: MA Experiment 20001450 PARAMETER Experiment Name: At_Far-red-induction_P Parameter: Light Value: Far-red vs. White
  misc_feature: MA Experiment 20001450 PARAMETER Experiment Name: At_Far-red-induction_P Parameter: Organism Value: A. thaliana
  misc_feature: MA Experiment 20001450 PARAMETER Experiment Name: At_Far-red-induction_P Parameter: Plant Line Value: Columbia
  misc_feature: MA Experiment 20001450 PARAMETER Experiment Name: At_Far-red-induction_P Parameter: Timepoint (hr) Value: 8
  misc_feature: MA Experiment 20001450 PARAMETER Experiment Name: At_Far-red-induction_P Parameter: Tissue Value: Whole Plant
  misc_feature: MA Experiment ID: 20001451 Result: Up-regulated in Transcription
  misc_feature: MA Experiment 20001451 PARAMETER Experiment Name: At_Far-red-induction_P Parameter: Age (day) Value: 7
  misc_feature: MA Experiment 20001451 PARAMETER Experiment Name: At_Far-red-induction_P Parameter: Light Value: Far-red vs. White
  misc_feature: MA Experiment 20001451 PARAMETER Experiment Name: At_Far-red-induction_P Parameter: Organism Value: A. thaliana
  misc_feature: MA Experiment 20001451 PARAMETER Experiment Name: At_Far-red-induction_P Parameter: Plant Line Value: Columbia
  misc_feature: MA Experiment 20001451 PARAMETER Experiment Name: At_Far-red-induction_P Parameter: Timepoint (hr) Value: 24
  misc_feature: MA Experiment 20001451 PARAMETER Experiment Name: At_Far-red-induction_P Parameter: Tissue Value: Whole Plant
  misc_feature: MA Experiment ID: 20001554 Result: Down-regulated in Transcription
  misc_feature: MA Experiment 20001554 PARAMETER Experiment Name: At_Drought_Soil_Dry_P Parameter: Age (day) Value: 21
  misc_feature: MA Experiment 20001554 PARAMETER Experiment Name: At_Drought_Soil_Dry_P Parameter: Organism Value: A. thaliana
  misc_feature: MA Experiment 20001554 PARAMETER Experiment Name: At_Drought_Soil_Dry_P Parameter: Plant Line Value: WS
  misc_feature: MA Experiment 20001554 PARAMETER Experiment Name: At_Drought_Soil_Dry_P Parameter: Post Timepoint (hr) Value: None
  misc_feature: MA Experiment 20001554 PARAMETER Experiment Name: At_Drought_Soil_Dry_P Parameter: Post-Treatment Value: None
  misc_feature: MA Experiment 20001554 PARAMETER Experiment Name: At_Drought_Soil_Dry_P Parameter: Timepoint (day) Value: 7
  misc_feature: MA Experiment 20001554 PARAMETER Experiment Name: At_Drought_Soil_Dry_P Parameter: Treatment Value: Drought vs. No Drought
  misc_feature: MA Experiment ID: 20001555 Result: Down-regulated in Transcription
  misc_feature: MA Experiment 20001555 PARAMETER Experiment Name: At_Drought_Soil_Dry_P Parameter: Age (day) Value: 24
  misc_feature: MA Experiment 20001555 PARAMETER Experiment Name: At_Drought_Soil_Dry_P Parameter: Organism Value: A. thaliana
  misc_feature: MA Experiment 20001555 PARAMETER Experiment Name: At_Drought_Soil_Dry_P Parameter: Plant Line Value: WS
  misc_feature: MA Experiment 20001555 PARAMETER Experiment Name: At_Drought_Soil_Dry_P Parameter: Post Timepoint (hr) Value: None
  misc_feature: MA Experiment 20001555 PARAMETER Experiment Name: At_Drought_Soil_Dry_P Parameter: Post-Treatment Value: None
  misc_feature: MA Experiment 20001555 PARAMETER Experiment Name: At_Drought_Soil_Dry_P Parameter: Timepoint (day) Value: 10
  misc_feature: MA Experiment 20001555 PARAMETER Experiment Name: At_Drought_Soil_Dry_P Parameter: Treatment Value: Drought vs. No Drought
  misc_feature: MA Experiment ID: 20001556 Result: Down-regulated in Transcription
  misc_feature: MA Experiment 20001556 PARAMETER Experiment Name: At_Drought_Soil_Dry_P Parameter: Age (day) Value: 26
  misc_feature: MA Experiment 20001556 PARAMETER Experiment Name: At_Drought_Soil_Dry_P Parameter: Organism Value: A. thaliana
  misc_feature: MA Experiment 20001556 PARAMETER Experiment Name: At_Drought_Soil_Dry_P Parameter: Plant Line Value: WS
  misc_feature: MA Experiment 20001556 PARAMETER Experiment Name: At_Drought_Soil_Dry_P Parameter: Post Timepoint (hr) Value: None
  misc_feature: MA Experiment 20001556 PARAMETER Experiment Name: At_Drought_Soil_Dry_P Parameter: Post-Treatment Value: None
  misc_feature: MA Experiment 20001556 PARAMETER Experiment Name: At_Drought_Soil_Dry_P Parameter: Timepoint (day) Value: 12
  misc_feature: MA Experiment 20001556 PARAMETER Experiment Name: At_Drought_Soil_Dry_P Parameter: Treatment Value: Drought vs. No Drought
  misc_feature: MA Experiment ID: 20001558 Result: Up-regulated in Transcription
  misc_feature: MA Experiment 20001558 PARAMETER Experiment Name: At_Drought_Soil_Dry_P Parameter: Age (day) Value: 27
  misc_feature: MA Experiment 20001558 PARAMETER Experiment Name: At_Drought_Soil_Dry_P Parameter: Organism Value: A. thaliana
  misc_feature: MA Experiment 20001558 PARAMETER Experiment Name: At_Drought_Soil_Dry_P Parameter: Plant Line Value: WS
  misc_feature: MA Experiment 20001558 PARAMETER Experiment Name: At_Drought_Soil_Dry_P Parameter: Post Timepoint (hr) Value: 6
  misc_feature: MA Experiment 20001558 PARAMETER Experiment Name: At_Drought_Soil_Dry_P Parameter: Post-Treatment Value: Re-Water vs. No Drought
  misc_feature: MA Experiment 20001558 PARAMETER Experiment Name: At_Drought_Soil_Dry_P Parameter: Timepoint (day) Value: 13
  misc_feature: MA Experiment 20001558 PARAMETER Experiment Name: At_Drought_Soil_Dry_P Parameter: Treatment Value: Drought vs. No Drought
  misc_feature: MA Experiment ID: 20001559 Result: Down-regulated in Transcription
  misc_feature: MA Experiment 20001559 PARAMETER Experiment Name: At_Drought_Soil_Dry_P Parameter: Age (day) Value: 28
  misc_feature: MA Experiment 20001559 PARAMETER Experiment Name: At_Drought_Soil_Dry_P Parameter: Organism Value: A. thaliana
  misc_feature: MA Experiment 20001559 PARAMETER Experiment Name: At_Drought_Soil_Dry_P Parameter: Plant Line Value: WS
  misc_feature: MA Experiment 20001559 PARAMETER Experiment Name: At_Drought_Soil_Dry_P Parameter: Post Timepoint (hr) Value: 29
  misc_feature: MA Experiment 20001559 PARAMETER Experiment Name: At_Drought_Soil_Dry_P Parameter: Post-Treatment Value: Re-Water vs. No Drought
  misc_feature: MA Experiment 20001559 PARAMETER Experiment Name: At_Drought_Soil_Dry_P Parameter: Timepoint (day) Value: 14
  misc_feature: MA Experiment 20001559 PARAMETER Experiment Name: At_Drought_Soil_Dry_P Parameter: Treatment Value: Drought vs. No Drought
  misc_feature: MA Experiment ID: 20001560 Result: Up-regulated in Transcription
  misc_feature: MA Experiment 20001560 PARAMETER Experiment Name: At_Drought_Soil_Dry_P Parameter: Age (day) Value: 28
  misc_feature: MA Experiment 20001560 PARAMETER Experiment Name: At_Drought_Soil_Dry_P Parameter: Organism Value: A. thaliana
  misc_feature: MA Experiment 20001560 PARAMETER Experiment Name: At_Drought_Soil_Dry_P Parameter: Plant Line Value: WS
  misc_feature: MA Experiment 20001560 PARAMETER Experiment Name: At_Drought_Soil_Dry_P Parameter: Post Timepoint (hr) Value: None
  misc_feature: MA Experiment 20001560 PARAMETER Experiment Name: At_Drought_Soil_Dry_P Parameter: Post-Treatment Value: None
  misc_feature: MA Experiment 20001560 PARAMETER Experiment Name: At_Drought_Soil_Dry_P Parameter: Timepoint (day) Value: 14
  misc_feature: MA Experiment 20001560 PARAMETER Experiment Name: At_Drought_Soil_Dry_P Parameter: Treatment Value: Drought vs. No Drought
  misc_feature: MA Experiment ID: 20001906 Result: Down-regulated in Transcription
  misc_feature: MA Experiment 20001906 PARAMETER Experiment Name: At_Drought_Reproduction_P Parameter: Age (day) Value: 35
  misc_feature: MA Experiment 20001906 PARAMETER Experiment Name: At_Drought_Reproduction_P Parameter: Organism Value: A. thaliana
  misc_feature: MA Experiment 20001906 PARAMETER Experiment Name: At_Drought_Reproduction_P Parameter: Plant Line Value: WS
  misc_feature: MA Experiment 20001906 PARAMETER Experiment Name: At_Drought_Reproduction_P Parameter: Timepoint (day) Value: 5
  misc_feature: MA Experiment 20001906 PARAMETER Experiment Name: At_Drought_Reproduction_P Parameter: Tissue Value: Siliques
  misc_feature: MA Experiment 20001906 PARAMETER Experiment Name: At_Drought_Reproduction_P Parameter: Treatment Value: Drought vs. No Drought
  misc_feature: MA Experiment ID: 20001907 Result: Down-regulated in Transcription
  misc_feature: MA Experiment 20001907 PARAMETER Experiment Name: At_Drought_Reproduction_P Parameter: Age (day) Value: 37
  misc_feature: MA Experiment 20001907 PARAMETER Experiment Name: At_Drought_Reproduction_P Parameter: Organism Value: A. thaliana
  misc_feature: MA Experiment 20001907 PARAMETER Experiment Name: At_Drought_Reproduction_P Parameter: Plant Line Value: WS
  misc_feature: MA Experiment 20001907 PARAMETER Experiment Name: At_Drought_Reproduction_P Parameter: Timepoint (day) Value: 7
  misc_feature: MA Experiment 20001907 PARAMETER Experiment Name: At_Drought_Reproduction_P Parameter: Tissue Value: Siliques
  misc_feature: MA Experiment 20001907 PARAMETER Experiment Name: At_Drought_Reproduction_P Parameter: Treatment Value: Drought vs. No Drought
  misc_feature: MA Experiment ID: 20001911 Result: Down-regulated in Transcription
  misc_feature: MA Experiment 20001911 PARAMETER Experiment Name: At_Drought_Reproduction_P Parameter: Age (day) Value: 40
  misc_feature: MA Experiment 20001911 PARAMETER Experiment Name: At_Drought_Reproduction_P Parameter: Organism Value: A. thaliana
  misc_feature: MA Experiment 20001911 PARAMETER Experiment Name: At_Drought_Reproduction_P Parameter: Plant Line Value: WS
  misc_feature: MA Experiment 20001911 PARAMETER Experiment Name: At_Drought_Reproduction_P Parameter: Timepoint (day) Value: 10
  misc_feature: MA Experiment 20001911 PARAMETER Experiment Name: At_Drought_Reproduction_P Parameter: Tissue Value: Flowers
  misc_feature: MA Experiment 20001911 PARAMETER Experiment Name: At_Drought_Reproduction_P Parameter: Treatment Value: Drought vs. No Drought
ataagactcctctccaaatgctaccacacaattcctctatcaaagccgcccaatcctccacccaaaaatggcttatctccggcgagcagccaccgcattggttctcattttccagctccatctctttctctctctctcaaatgcacataacataacccgaatcttggccaaagaccctgatttctccactttcaaccactatctctcagcgactcatctcgccgacgagatcaaccgccggcaaacaatcaccgtcttggccgtcgataactcagcaatgtcctccatcctctctaacggatactcactctaccaaatccgcaacattctctctctccacgtcctggtcgattacttcggcaccaagaaacttcaccagatcaccgacggctccacctccactgcctccatgtttcaatccaccggatccgccaccggaacttctggatacatcaacatcaccgatataaaaggcggtaaagtcgcttttggtgtccaagacgacgatagcaagctcacagctcactacgtcaaatccgtctttgaaaagccttacaacatctctgttcttcacatcagccaagtcttaacctcgccggaagcagaagctcccacggcgagtcccagcgacctcatcctcaccacaatcctcgaaaaacaagggtgcaaagctttctccgacatcttgaagtcaaccggcgccgacaaaacgttccaagataccgtagacggaggcttaacggtgttctgtccctccgacagcgctgtcggtaagttcatgccgaaattcaaatccctttctccggcgaacaagactgcgttagtgctttaccacggcatgccggtttaccagtcgttacaaatgcttagatcaggtaacggcgccgttaacacgttagcgacggaaggtaacaacaagtttgatttcaccgttcaaaatgacggagaagacgtgacgctggagacggacgttgtgacggcgaaggtaatggggacgttaaaggatcaagagccattgatagtttacaagatcgataaagtgttgttgcctagagaaatctacaaggccgttaagacgtccgctccagctcctaagtcgagtaagaaaaagcctaagaacgcggaggctgacgccgacggacctagcgccgatgctccgtcagatgatgatgttgaggtggctgacgataaaaacggcgccgtatcagcgatgattactcgaacaagtaatgtcgtaacggccattgtcgggctctgtttcggagtttggcttatgtgaagtgacgtggcatttacctcgctttgggaatcttgttttcctttttctttgtgatctgtcggtttaatttattttacatattcttttttttgttcacgttgatacttggtgtggagatttggaataattaattgttccacttgtgttggatctgatatgttttattctaaaaaaatgtgatgatcattcaaaagagtgattggtacgttggaatc

SEQ ID NO: 26960 - protein, 403 aa, Arabidopsis thaliana
  peptide (1)..(403): Ceres Seq. ID no. 12370145
  misc_feature (187)..(328): Pfam Name: Fasciclin domain Pfam Description: Fasciclin domain
  misc_feature (7)..(365): Homolog of NCBI NO: 38605955 NR Description: OSJNBa0019K04.16 [Oryza sativa (japonica
  misc_feature (6)..(388): Homolog of NCBI NO: 15232973 NR Description: fasciclin-like arabinogalactan-protein (FLA10)
  misc_feature (6)..(388): Homolog of NCBI NO: 14190409 NR Description: AT3g60900/T4C21_310 [Arabidopsis thaliana]
  misc_feature (11)..(396): Homolog of NCBI NO: 21595125 NR Description: endosperm-specific protein-like protein
  misc_feature (11)..(396): Homolog of NCBI NO: 18406799 NR Description: fasciclin-like arabinogalactan-protein (FLA8)
  misc_feature (4)..(377): Homolog of NCBI NO: 38424037 NR Description: putative fasciclin-like arabinogalactan-protein
  misc_feature (4)..(378): Homolog of NCBI NO: 15240570 NR Description: fasciclin-like arabinogalactan-protein (FLA1)
  misc_feature (1)..(403): Homolog of NCBI NO: 21593810 NR Description: putative pollen surface protein [Arabidopsis
  misc_feature (1)..(403): Homolog of NCBI NO: 13377778 NR Description: fasciclin-like arabinogalactan-protein 2
  misc_feature (1)..(403): Homolog of NCBI NO: 15235459 NR Description: fasciclin-like arabinogalactan-protein (FLA2)
MAYLRRAATALVLIFQLHLFLSLSNAHNITRILAKDPDFSTFNHYLSATHLADEINRRQTITVLAVDNSAMSSILSNGYSLYQIRNILSLHVLVDYFGTKKLHQITDGSTSTASMFQSTGSATGTSGYINITDIKGGKVAFGVQDDDSKLTAHYVKSVFEKPYNISVLHISQVLTSPEAEAPTASPSDLILTTILEKQGCKAFSDILKSTGADKTFQDTVDGGLTVFCPSDSAVGKFMPKFKSLSPANKTALVLYHGMPVYQSLQMLRSGNGAVNTLATEGNNKFDFTVQNDGEDVTLETDVVTAKVMGTLKDQEPLIVYKIDKVLLPREIYKAVKTSAPAPKSSKKKPKNAEADADGPSADAPSDDDVEVADDKNGAVSAMITRTSNVVTAIVGLCFGVWLM

SEQ ID NO: 26961 - protein, 333 aa, Arabidopsis thaliana
  peptide (1)..(333): Ceres Seq. ID no. 12370146
  misc_feature (117)..(258): Pfam Name: Fasciclin domain Pfam Description: Fasciclin domain
  misc_feature (1)..(295): Homolog of NCBI NO: 38605955 NR Description: OSJNBa0019K04.16 [Oryza sativa (japonica
  misc_feature (1)..(318): Homolog of NCBI NO: 15232973 NR Description: fasciclin-like arabinogalactan-protein (FLA10)
  misc_feature (1)..(318): Homolog of NCBI NO: 14190409 NR Description: AT3g60900/T4C21_310 [Arabidopsis thaliana]
  misc_feature (1)..(326): Homolog of NCBI NO: 21595125 NR Description: endosperm-specific protein-like protein
  misc_feature (1)..(326): Homolog of NCBI NO: 18406799 NR Description: fasciclin-like arabinogalactan-protein (FLA8)
  misc_feature (1)..(307): Homolog of NCBI NO: 38424037 NR Description: putative fasciclin-like arabinogalactan-protein
  misc_feature (1)..(308): Homolog of NCBI NO: 15240570 NR Description: fasciclin-like arabinogalactan-protein (FLA1)
  misc_feature (1)..(333): Homolog of NCBI NO: 21593810 NR Description: putative pollen surface protein [Arabidopsis
  misc_feature (1)..(333): Homolog of NCBI NO: 13377778 NR Description: fasciclin-like arabinogalactan-protein 2
  misc_feature (1)..(333): Homolog of NCBI NO: 15235459 NR Description: fasciclin-like arabinogalactan-protein (FLA2)
MSSILSNGYSLYQIRNILSLHVLVDYFGTKKLHQITDGSTSTASMFQSTGSATGTSGYINITDIKGGKVAFGVQDDDSKLTAHYVKSVFEKPYNISVLHISQVLTSPEAEAPTASPSDLILTTILEKQGCKAFSDILKSTGADKTFQDTVDGGLTVFCPSDSAVGKFMPKFKSLSPANKTALVLYHGMPVYQSLQMLRSGNGAVNTLATEGNNKFDFTVQNDGEDVTLETDVVTAKVMGTLKDQEPLIVYKIDKVLLPREIYKAVKTSAPAPKSSKKKPKNAEADADGPSADAPSDDDVEVADDKNGAVSAMITRTSNVVTAIVGLCFGVWLM

SEQ ID NO: 26962 - protein, 289 aa, Arabidopsis thaliana
  peptide (1)..(289): Ceres Seq. ID no. 12370147
  misc_feature (73)..(214): Pfam Name: Fasciclin domain Pfam Description: Fasciclin domain
  misc_feature (1)..(251): Homolog of NCBI NO: 38605955 NR Description: OSJNBa0019K04.16 [Oryza sativa (japonica
  misc_feature (1)..(274): Homolog of NCBI NO: 15232973 NR Description: fasciclin-like arabinogalactan-protein (FLA10)
  misc_feature (1)..(274): Homolog of NCBI NO: 14190409 NR Description: AT3g60900/T4C21_310 [Arabidopsis thaliana]
  misc_feature (1)..(282): Homolog of NCBI NO: 21595125 NR Description: endosperm-specific protein-like protein
  misc_feature (1)..(282): Homolog of NCBI NO: 18406799 NR Description: fasciclin-like arabinogalactan-protein (FLA8)
  misc_feature (1)..(263): Homolog of NCBI NO: 38424037 NR Description: putative fasciclin-like arabinogalactan-protein
  misc_feature (1)..(264): Homolog of NCBI NO: 15240570 NR Description: fasciclin-like arabinogalactan-protein (FLA1)
  misc_feature (1)..(289): Homolog of NCBI NO: 21593810 NR Description: putative pollen surface protein [Arabidopsis
  misc_feature (1)..(289): Homolog of NCBI NO: 13377778 NR Description: fasciclin-like arabinogalactan-protein 2
  misc_feature (1)..(289): Homolog of NCBI NO: 15235459 NR Description: fasciclin-like arabinogalactan-protein (FLA2)
MFQSTGSATGTSGYINITDIKGGKVAFGVQDDDSKLTAHYVKSVFEKPYNISVLHISQVLTSPEAEAPTASPSDLILTTILEKQGCKAFSDILKSTGADKTFQDTVDGGLTVFCPSDSAVGKFMPKFKSLSPANKTALVLYHGMPVYQSLQMLRSGNGAVNTLATEGNNKFDFTVQNDGEDVTLETDVVTAKVMGTLKDQEPLIVYKIDKVLLPREIYKAVKTSAPAPKSSKKKPKNAEADADGPSADAPSDDDVEVADDKNGAVSAMITRTSNVVTAIVGLCFGVWLM

SEQ ID NO: 26963 - DNA, 1336 bp, Arabidopsis thaliana
  misc_feature (1)..(1336): Ceres Seq. ID no. 13493744
  misc_feature: MA Experiment ID: 108573 Result: Up-regulated in Transcription
  misc_feature: MA Experiment 108573 PARAMETER Experiment Name: At_Drought_cDNA_P Parameter: Timepoint (hr) Value: 6
  misc_feature: MA Experiment 108573 PARAMETER Experiment Name: At_Drought_cDNA_P Parameter: Tissue Value: Aerial
  misc_feature: MA Experiment 108573 PARAMETER Experiment Name: At_Drought_cDNA_P Parameter: Treatment Value: Drought vs. No Drought
  misc_feature: MA Experiment ID: 108576 Result: Up-regulated in Transcription
  misc_feature: MA Experiment 108576 PARAMETER Experiment Name: At_42deg_Heat_cDNA_P Parameter: Temperature (deg C) Value: 42 vs. 22
  misc_feature: MA Experiment 108576 PARAMETER Experiment Name: At_42deg_Heat_cDNA_P Parameter: Timepoint (hr) Value: 1
  misc_feature: MA Experiment 108576 PARAMETER Experiment Name: At_42deg_Heat_cDNA_P Parameter: Tissue Value: Aerial
  misc_feature: MA Experiment ID: 108577 Result: Up-regulated in Transcription
  misc_feature: MA Experiment 108577 PARAMETER Experiment Name: At_42deg_Heat_cDNA_P Parameter: Temperature (deg C) Value: 42 vs. 22
  misc_feature: MA Experiment 108577 PARAMETER Experiment Name: At_42deg_Heat_cDNA_P Parameter: Timepoint (hr) Value: 6
  misc_feature: MA Experiment 108577 PARAMETER Experiment Name: At_42deg_Heat_cDNA_P Parameter: Tissue Value: Aerial
  misc_feature: MA Experiment ID: 108585 Result: Up-regulated in Transcription
  misc_feature: MA Experiment 108585 PARAMETER Experiment Name: At_5mM_NaNP_cDNA_P Parameter: Timepoint (hr) Value: 6
  misc_feature: MA Experiment 108585 PARAMETER Experiment Name: At_5mM_NaNP_cDNA_P Parameter: Tissue Value: Aerial
  misc_feature: MA Experiment 108585 PARAMETER Experiment Name: At_5mM_NaNP_cDNA_P Parameter: Treatment Value: null
  misc_feature: MA Experiment ID: 108668 Result: Up-regulated in Transcription
  misc_feature: MA Experiment 108668 PARAMETER Experiment Name: At_2mM_SA_cDNA_P Parameter: Plant Line Value: WS
  misc_feature: MA Experiment 108668 PARAMETER Experiment Name: At_2mM_SA_cDNA_P Parameter: Timepoint (hr) Value: 6
  misc_feature: MA Experiment 108668 PARAMETER Experiment Name: At_2mM_SA_cDNA_P Parameter: Treatment Value: 2mM SA vs. No Treatment
  misc_feature: MA Experiment ID: 20000171 Result: Up-regulated in Transcription
  misc_feature: MA Experiment 20000171 PARAMETER Experiment Name: At_42deg_Heat_P Parameter: Age (day) Value: 14
  misc_feature: MA Experiment 20000171 PARAMETER Experiment Name: At_42deg_Heat_P Parameter: Organism Value: A. thaliana
  misc_feature: MA Experiment 20000171 PARAMETER Experiment Name: At_42deg_Heat_P Parameter: Plant Line Value: WS
  misc_feature: MA Experiment 20000171 PARAMETER Experiment Name: At_42deg_Heat_P Parameter: Temperature (deg C) Value: 42 vs. 22
  misc_feature: MA Experiment 20000171 PARAMETER Experiment Name: At_42deg_Heat_P Parameter: Timepoint (hr) Value: 1
  misc_feature: MA Experiment 20000171 PARAMETER Experiment Name: At_42deg_Heat_P Parameter: Tissue Value: Aerial
  misc_feature: MA Experiment ID: 20000173 Result: Up-regulated in Transcription
  misc_feature: MA Experiment 20000173 PARAMETER Experiment Name: At_42deg_Heat_P Parameter: Age (day) Value: 14
  misc_feature: MA Experiment 20000173 PARAMETER Experiment Name: At_42deg_Heat_P Parameter: Organism Value: A. thaliana
  misc_feature: MA Experiment 20000173 PARAMETER Experiment Name: At_42deg_Heat_P Parameter: Plant Line Value: WS
  misc_feature: MA Experiment 20000173 PARAMETER Experiment Name: At_42deg_Heat_P Parameter: Temperature (deg C) Value: 42 vs. 22
  misc_feature: MA Experiment 20000173 PARAMETER Experiment Name: At_42deg_Heat_P Parameter: Timepoint (hr) Value: 6
  misc_feature: MA Experiment 20000173 PARAMETER Experiment Name: At_42deg_Heat_P Parameter: Tissue Value: Aerial
  misc_feature: MA Experiment ID: 20000182 Result: Up-regulated in Transcription
  misc_feature: MA Experiment 20000182 PARAMETER Experiment Name: At_2mM_SA_P Parameter: Age (day) Value: 14
  misc_feature: MA Experiment 20000182 PARAMETER Experiment Name: At_2mM_SA_P Parameter: Organism Value: A. thaliana
  misc_feature: MA Experiment 20000182 PARAMETER Experiment Name: At_2mM_SA_P Parameter: Plant Line Value: WS
  misc_feature: MA Experiment 20000182 PARAMETER Experiment Name: At_2mM_SA_P Parameter: Timepoint (hr) Value: 6
  misc_feature: MA Experiment 20000182 PARAMETER Experiment Name: At_2mM_SA_P Parameter: Tissue Value: Aerial
  misc_feature: MA Experiment 20000182 PARAMETER Experiment Name: At_2mM_SA_P Parameter: Treatment Value: 2mM SA vs. No Treatment
  misc_feature: MA Experiment ID: 20000437 Result: Up-regulated in Transcription
  misc_feature: MA Experiment 20000437 PARAMETER Experiment Name: At_Drought_P Parameter: Age (day) Value: 8
  misc_feature: MA Experiment 20000437 PARAMETER Experiment Name: At_Drought_P Parameter: Organism Value: A. thaliana
  misc_feature: MA Experiment 20000437 PARAMETER Experiment Name: At_Drought_P Parameter: Plant Line Value: WS
  misc_feature: MA Experiment 20000437 PARAMETER Experiment Name: At_Drought_P Parameter: Timepoint (hr) Value: 24
  misc_feature: MA Experiment 20000437 PARAMETER Experiment Name: At_Drought_P Parameter: Tissue Value: Whole Plant
  misc_feature: MA Experiment 20000437 PARAMETER Experiment Name: At_Drought_P Parameter: Treatment Value: Drought vs. No Drought
  misc_feature: MA Experiment ID: 20000794 Result: Up-regulated in Transcription
  misc_feature: MA Experiment 20000794 PARAMETER Experiment Name: At_Petals_P Parameter: Age (day) Value: 23-25 days
  misc_feature: MA Experiment 20000794 PARAMETER Experiment Name: At_Petals_P Parameter: Plant Line Value: WS
  misc_feature: MA Experiment 20000794 PARAMETER Experiment Name: At_Petals_P Parameter: Tissue Value: Petals vs. Whole plant
actctttactctttcttccgtttgctcgaaccatctagtctaagagaaagaaaaaatactaaagagaaagaagaagaggacttgaatacggaagcttgagagaatgaaagcgatcgtgatctcggagccaggtaagccggaggttctgcaactccgtgatgtggcagacccagaagttaaagacgatgaggttctcatcagagttctcgctactgctttgaatcgtgcagatactctccaaagacttggcctttataatccaccacctggctcaagcccttaccttggtctcgaatgttctgggaccattgaatccgtcggtaaaggcgtctctcgatggaaagtcggagaccaggtgtgtgctcttctttctggaggaggttatgcagagaaagtttctgttcctgctggacaaattttcccaattcccgctggtatctctctaaaggatgcagcggctttccctgaagtggcatgcactgtttggtctactgtcttcatgatgggccgtctctctgttggtgaatcattcttgattcatggaggttcaagtgggattgggacatttgctattcagatagctaaacatctgggagtgagagtatttgtcacagctgggagtgatgaaaagctagctgcgtgcaaagaactcggggctgatgtttgtataaattacaaaaccgaggattttgttgcaaaggtaaaagcggaaaccgatgggaaaggagtggatgttatcttggactgcattggggcaccgtatttgcagaaaaatctcgacagcttaaactttgatggaaggttatgtattatcggtttaatgggaggagccaatgcagaaataaaactaagtagtctgcttccaaagcgtctcactgtcttaggagctgcattaagaccaagaagccctgaaaacaaagcagttgttgtaagggaagtcgagaagaatgtctggccagcgatagaagcagggaaggtaaaaccagtgatttacaagtatttaccattgtcacaagcagcagaaggtcatagccttatggagagtagcaaccatattggtaagattctccttgagacttgattctctgcaaagggagaaatgttcagagacaagagtcatggtcaataatcaataaaatctggtcgattctgttcatagatatctctttacaagagttctgtttgttggcttttatgtatctctgatttggtcaaaaagacactgtaactatggaacatatatagtatcaaataagctgttgtataccaaacattgatttcgaagtagaatatgattttgtaagaagtttttatttattttgggcttaaaaagtgc

SEQ ID NO: 26964 - protein, 325 aa, Arabidopsis thaliana
  peptide (1)..(325): Ceres Seq. ID no. 13493745
  misc_feature (1)..(324): Homolog of NCBI NO: 15888165 NR Description: AGR_C_1508p [Agrobacterium tumefaciens]
  misc_feature (1)..(323): Homolog of NCBI NO: 22977083 NR Description: hypothetical protein [Ralstonia metallidurans]
  misc_feature (1)..(323): Homolog of NCBI NO: 15610913 NR Description: hypothetical protein Rv3777 [Mycobacterium
  misc_feature (1)..(323): Homolog of NCBI NO: 15843400 NR Description: quinone oxidoreductase [Mycobacterium
  misc_feature (1)..(324): Homolog of NCBI NO: 22960487 NR Description: hypothetical protein [Rhodobacter sphaeroides]
  misc_feature (1)..(323): Homolog of NCBI NO: 29830911 NR Description: putative quinone oxidoreductase
  misc_feature (1)..(325): Homolog of NCBI NO: 21222233 NR Description: putative quinone oxidoreductase [Streptomyces
  misc_feature (1)..(325): Homolog of NCBI NO: 23017076 NR Description: hypothetical protein [Thermobifida fusca]
  misc_feature (1)..(323): Homolog of NCBI NO: 15451578 NR Description: Putative quinone oxidoreductase [Oryza sativa]
  misc_feature (1)..(325): Homolog of NCBI NO: 15234529 NR Description: oxidoreductase, zinc-binding dehydrogenase family
MKAIVISEPGKPEVLQLRDVADPEVKDDEVLIRVLATALNRADTLQRLGLYNPPPGSSPYLGLECSGTIESVGKGVSRWKVGDQVCALLSGGGYAEKVSVPAGQIFPIPAGISLKDAAAFPEVACTVWSTVFMMGRLSVGESFLIHGGSSGIGTFAIQIAKHLGVRVFVTAGSDEKLAACKELGADVCINYKTEDFVAKVKAETDGKGVDVILDCIGAPYLQKNLDSLNFDGRLCIIGLMGGANAEIKLSSLLPKRLTVLGAALRPRSPENKAVVVREVEKNVWPAIEAGKVKPVIYKYLPLSQAAEGHSLMESSNHIGKILLET

SEQ ID NO: 26965 - protein, 193 aa, Arabidopsis thaliana
  peptide (1)..(193): Ceres Seq. ID no. 13493746
  misc_feature (1)..(192): Homolog of NCBI NO: 15888165 NR Description: AGR_C_1508p [Agrobacterium tumefaciens]
  misc_feature (1)..(191): Homolog of NCBI NO: 22977083 NR Description: hypothetical protein [Ralstonia metallidurans]
  misc_feature (1)..(191): Homolog of NCBI NO: 15610913 NR Description: hypothetical protein Rv3777 [Mycobacterium
  misc_feature (1)..(191): Homolog of NCBI NO: 15843400 NR Description: quinone oxidoreductase [Mycobacterium
  misc_feature (1)..(192): Homolog of NCBI NO: 22960487 NR Description: hypothetical protein [Rhodobacter sphaeroides]
  misc_feature (1)..(191): Homolog of NCBI NO: 29830911 NR Description: putative quinone oxidoreductase
  misc_feature (1)..(193): Homolog of NCBI NO: 21222233 NR Description: putative quinone oxidoreductase [Streptomyces
  misc_feature (1)..(193): Homolog of NCBI NO: 23017076 NR Description: hypothetical protein [Thermobifida fusca]
  misc_feature (1)..(191): Homolog of NCBI NO: 15451578 NR Description: Putative quinone oxidoreductase [Oryza sativa]
  misc_feature (1)..(193): Homolog of NCBI NO: 15234529 NR Description: oxidoreductase, zinc-binding dehydrogenase family
MMGRLSVGESFLIHGGSSGIGTFAIQIAKHLGVRVFVTAGSDEKLAACKELGADVCINYKTEDFVAKVKAETDGKGVDVILDCIGAPYLQKNLDSLNFDGRLCIIGLMGGANAEIKLSSLLPKRLTVLGAALRPRSPENKAVVVREVEKNVWPAIEAGKVKPVIYKYLPLSQAAEGHSLMESSNHIGKILLET

SEQ ID NO: 26966 - protein, 192 aa, Arabidopsis thaliana
  peptide (1)..(192): Ceres Seq. ID no. 13493747
  misc_feature (1)..(191): Homolog of NCBI NO: 15888165 NR Description: AGR_C_1508p [Agrobacterium tumefaciens]
  misc_feature (1)..(190): Homolog of NCBI NO: 22977083 NR Description: hypothetical protein [Ralstonia metallidurans]
  misc_feature (1)..(190): Homolog of NCBI NO: 15610913 NR Description: hypothetical protein Rv3777 [Mycobacterium
  misc_feature (1)..(190): Homolog of NCBI NO: 15843400 NR Description: quinone oxidoreductase [Mycobacterium
  misc_feature (1)..(191): Homolog of NCBI NO: 22960487 NR Description: hypothetical protein [Rhodobacter sphaeroides]
  misc_feature (1)..(190): Homolog of NCBI NO: 29830911 NR Description: putative quinone oxidoreductase
  misc_feature (1)..(192): Homolog of NCBI NO: 21222233 NR Description: putative quinone oxidoreductase [Streptomyces
  misc_feature (1)..(192): Homolog of NCBI NO: 23017076 NR Description: hypothetical protein [Thermobifida fusca]
  misc_feature (1)..(190): Homolog of NCBI NO: 15451578 NR Description: Putative quinone oxidoreductase [Oryza sativa]
  misc_feature (1)..(192): Homolog of NCBI NO: 15234529 NR Description: oxidoreductase, zinc-binding dehydrogenase family
MGRLSVGESFLIHGGSSGIGTFAIQIAKHLGVRVFVTAGSDEKLAACKELGADVCINYKTEDFVAKVKAETDGKGVDVILDCIGAPYLQKNLDSLNFDGRLCIIGLMGGANAEIKLSSLLPKRLTVLGAALRPRSPENKAVVVREVEKNVWPAIEAGKVKPVIYKYLPLSQAAEGHSLMESSNHIGKILLET

SEQ ID NO: 26967 - DNA, 1252 bp, Arabidopsis thaliana
  misc_feature (1)..(1252): Ceres Seq. ID no. 12324079
  misc_feature: MA Experiment ID: 108595 Result: Up-regulated in Transcription
  misc_feature: MA Experiment 108595 PARAMETER Experiment Name: At_Ler-pi_Ovule_cDNA_P Parameter: Plant Line Value: null
  misc_feature: MA Experiment ID: 20000185 Result: Down-regulated in Transcription
  misc_feature: MA Experiment 20000185 PARAMETER Experiment Name: At_Roots__P Parameter: Age (day) Value: 7 vs. 21
  misc_feature: MA Experiment 20000185 PARAMETER Experiment Name: At_Roots__P Parameter: Organism Value: A. thaliana
  misc_feature: MA Experiment 20000185 PARAMETER Experiment Name: At_Roots__P Parameter: Tissue Value: Roots vs. Whole Plant
  misc_feature: MA Experiment ID: 20000439 Result: Down-regulated in Transcription
  misc_feature: MA Experiment 20000439 PARAMETER Experiment Name: At_Roots__P Parameter: Age (day) Value: 14 vs. 21
  misc_feature: MA Experiment 20000439 PARAMETER Experiment Name: At_Roots__P Parameter: Organism Value: A. thaliana
  misc_feature: MA Experiment 20000439 PARAMETER Experiment Name: At_Roots__P Parameter: Tissue Value: Roots vs. Whole Plant
  misc_feature: MA Experiment ID: 20001248 Result: Down-regulated in Transcription
  misc_feature: MA Experiment 20001248 PARAMETER Experiment Name: At_Far-red-induction_P Parameter: Age (day) Value: 7
  misc_feature: MA Experiment 20001248 PARAMETER Experiment Name: At_Far-red-induction_P Parameter: Light Value: Far-red vs. White
  misc_feature: MA Experiment 20001248 PARAMETER Experiment Name: At_Far-red-induction_P Parameter: Organism Value: A. thaliana
  misc_feature: MA Experiment 20001248 PARAMETER Experiment Name: At_Far-red-induction_P Parameter: Plant Line Value: Columbia
  misc_feature: MA Experiment 20001248 PARAMETER Experiment Name: At_Far-red-induction_P Parameter: Timepoint (hr) Value: 4
  misc_feature: MA Experiment 20001248 PARAMETER Experiment Name: At_Far-red-induction_P Parameter: Tissue Value: Whole Plant
aactgagttttcttcttctctcttatttctctcccaagtttcttatttttttttcctctttactttacacaaaggaacaacaaataatgtggaaccttaacgactcacccgatcatcacgaagaatccgacagtagagggaatccggtcggacacgtgtcaaacgggatgagtcaatctgcaacgtggctaccgtttgtgcttccggtgaccaggaatttctttccggctcaaagcatggaaccgggagttcgttggtccggtttcaatagtgtcggtaagtcggatccaagcggatcgggtcgaccagaagagccggagatatcaccgccgataaagaagagccgacgtggtcctcgctcacgtagctctcagtatcgaggagttacgttttaccgacgaaccggaagatgggagtcacatatttgggactgtgggaagcaagtgtacttaggtggatttgacactgcacatgctgctgctcgagcctatgatcgagcggcgattaaattcagaggtgtagatgcagatattaatttcgacattgaagactaccttgacgatttgaaacagatgggaaatttgacaaaggaagagtttatgcatgtacttagaaggcaaagcactgggtttccaagaggcagttctaaatacagaggtgttactttgcacaaatgtggaagatgggagtcacgtttgggtcaattcctcaacaaaaagtacgtttatttgggtctctttgataccgagattgaagctgctagagcttatgataaagcggcaataaagtgtaatgggaaagacgctgttaccaattttgaccctaaagtatacgaggaagaagaagatcttagctcagagacgacgaggaacggtcataatcttggtctaagtctaggagaatcatcatctgaagagtttagactcaagtctgatattgcaagcataagaagtaggattagagatgaggagagattattagggagcgatctatcgctagcaatgatgacgacgactgtcagatcggaaaagcagcaatcggacggtggaggaaatcgagtggtgggaatggcagcatcatcaggattctctcctcaaccttccccttaccgcattcctcgcaccttccacttctctcgtccctgattcatcatcatcatcatcactatcatcacaatcatcatctgagctagtgttaaccaagttatgctttaatgaatttgagttattctcgagctatttttgggctctgc

SEQ ID NO: 26968 - protein, 380 aa, Arabidopsis thaliana
  peptide (1)..(380): Ceres Seq. ID no. 12324080
  misc_feature (122)..(185): Pfam Name: AP2 domain Pfam Description: AP2 domain
  misc_feature (69)..(310): Homolog of NCBI NO: 11181610 NR Description: APETALA2-related transcription factor 1 [Picea
  misc_feature (29)..(305): Homolog of NCBI NO: 38345500 NR Description: OSJNBa0010D21.13 [Oryza sativa (japonica
  misc_feature (75)..(305): Homolog of NCBI NO: 21717332 NR Description: transcription factor AHAP2 [Malus x domestica]
  misc_feature (81)..(305): Homolog of NCBI NO: 5081555 NR Description: PHAP2A protein [Petunia x hybrida]
  misc_feature (69)..(367): Homolog of NCBI NO: 15234566 NR Description: apetala2 protein; protein id: At4g36920.1
  misc_feature (34)..(324): Homolog of NCBI NO: 13173164 NR Description: APETAL2-like protein [Pisum sativum]
  misc_feature (68)..(305): Homolog of NCBI NO: 28894445 NR Description: LIPLESS2 [Antirrhinum majus]
  misc_feature (29)..(59): Homolog of NCBI NO: 28894443 NR Description: LIPLESS1 [Antirrhinum majus]
  misc_feature (68)..(304): Homolog of NCBI NO: 28894443 NR Description: LIPLESS1 [Antirrhinum majus]
  misc_feature (29)..(380): Homolog of NCBI NO: 15240234 NR Description: apetala2 family protein (RAP2)
LSFLLLSYFSPKFLIFFSSLLYTKEQQIMWNLNDSPDHHEESDSRGNPVGHVSNGMSQSATWLPFVLPVTRNFFPAQSMEPGVRWSGFNSVGKSDPSGSGRPEEPEISPPIKKSRRGPRSRSSQYRGVTFYRRTGRWESHIWDCGKQVYLGGFDTAHAAARAYDRAAIKFRGVDADINFDIEDYLDDLKQMGNLTKEEFMHVLRRQSTGFPRGSSKYRGVTLHKCGRWESRLGQFLNKKYVYLGLFDTEIEAARAYDKAAIKCNGKDAVTNFDPKVYEEEEDLSSETTRNGHNLGLSLGESSSEEFRLKSDIASIRSRIRDEERLLGSDLSLAMMTTTVRSEKQQSDGGGNRVVGMAASSGFSPQPSPYRIPRTFHFSRP

SEQ ID NO: 26969 - protein, 352 aa, Arabidopsis thaliana
  peptide (1)..(352): Ceres Seq. ID no. 12324081
  misc_feature (94)..(157): Pfam Name: AP2 domain Pfam Description: AP2 domain
  misc_feature (1)..(31): Homolog of NCBI NO: 28894443 NR Description: LIPLESS1 [Antirrhinum majus]
  misc_feature (40)..(276): Homolog of NCBI NO: 28894443 NR Description: LIPLESS1 [Antirrhinum majus]
  misc_feature (1)..(277): Homolog of NCBI NO: 38345500 NR Description: OSJNBa0010D21.13 [Oryza sativa (japonica
  misc_feature (53)..(277): Homolog of NCBI NO: 5081555 NR Description: PHAP2A protein [Petunia x hybrida]
  misc_feature (6)..(296): Homolog of NCBI NO: 13173164 NR Description: APETAL2-like protein [Pisum sativum]
  misc_feature (40)..(277): Homolog of NCBI NO: 28894445 NR Description: LIPLESS2 [Antirrhinum majus]
  misc_feature (41)..(339): Homolog of NCBI NO: 15234566 NR Description: apetala2 protein; protein id: At4g36920.1
  misc_feature (47)..(277): Homolog of NCBI NO: 21717332 NR Description: transcription factor AHAP2 [Malus x domestica]
  misc_feature (41)..(282): Homolog of NCBI NO: 11181610 NR Description: APETALA2-related transcription factor 1 [Picea
  misc_feature (1)..(352): Homolog of NCBI NO: 15240234 NR Description: apetala2 family protein (RAP2)
MWNLNDSPDHHEESDSRGNPVGHVSNGMSQSATWLPFVLPVTRNFFPAQSMEPGVRWSGFNSVGKSDPSGSGRPEEPEISPPIKKSRRGPRSRSSQYRGVTFYRRTGRWESHIWDCGKQVYLGGFDTAHAAARAYDRAAIKFRGVDADINFDIEDYLDDLKQMGNLTKEEFMHVLRRQSTGFPRGSSKYRGVTLHKCGRWESRLGQFLNKKYVYLGLFDTEIEAARAYDKAAIKCNGKDAVTNFDPKVYEEEEDLSSETTRNGHNLGLSLGESSSEEFRLKSDIASIRSRIRDEERLLGSDLSLAMMTTTVRSEKQQSDGGGNRVVGMAASSGFSPQPSPYRIPRTFHFSRP

SEQ ID NO: 26970 - protein, 325 aa, Arabidopsis thaliana
  peptide (1)..(325): Ceres Seq. ID no. 12324082
  misc_feature (67)..(130): Pfam Name: AP2 domain Pfam Description: AP2 domain
  misc_feature (1)..(270): Homolog of NCBI NO: 11181612 NR Description: APETALA2-related transcription factor 2 [Picea
  misc_feature (14)..(255): Homolog of NCBI NO: 11181610 NR Description: APETALA2-related transcription factor 1 [Picea
  misc_feature (1)..(250): Homolog of NCBI NO: 38345500 NR Description: OSJNBa0010D21.13 [Oryza sativa (japonica
  misc_feature (20)..(250): Homolog of NCBI NO: 21717332 NR Description: transcription factor AHAP2 [Malus x domestica]
  misc_feature (26)..(250): Homolog of NCBI NO: 5081555 NR Description: PHAP2A protein [Petunia x hybrida]
  misc_feature (14)..(312): Homolog of NCBI NO: 15234566 NR Description: apetala2 protein; protein id: At4g36920.1
  misc_feature (1)..(269): Homolog of NCBI NO: 13173164 NR Description: APETAL2-like protein [Pisum sativum]
  misc_feature (13)..(250): Homolog of NCBI NO: 28894445 NR Description: LIPLESS2 [Antirrhinum majus]
  misc_feature (13)..(249): Homolog of NCBI NO: 28894443 NR Description: LIPLESS1 [Antirrhinum majus]
  misc_feature (1)..(325): Homolog of NCBI NO: 15240234 NR Description: apetala2 family protein (RAP2)
MSQSATWLPFVLPVTRNFFPAQSMEPGVRWSGFNSVGKSDPSGSGRPEEPEISPPIKKSRRGPRSRSSQYRGVTFYRRTGRWESHIWDCGKQVYLGGFDTAHAAARAYDRAAIKFRGVDADINFDIEDYLDDLKQMGNLTKEEFMHVLRRQSTGFPRGSSKYRGVTLHKCGRWESRLGQFLNKKYVYLGLFDTEIEAARAYDKAAIKCNGKDAVTNFDPKVYEEEEDLSSETTRNGHNLGLSLGESSSEEFRLKSDIASIRSRIRDEERLLGSDLSLAMMTTTVRSEKQQSDGGGNRVVGMAASSGFSPQPSPYRIPRTFHFSRP

SEQ ID NO: 26971 - DNA, 1477 bp, Arabidopsis thaliana
  misc_feature (1)..(1477): Ceres Seq. ID no. 13493729
  misc_feature: MA Experiment ID: 108462 Result: Up-regulated in Transcription
  misc_feature: MA Experiment 108462 PARAMETER Experiment Name: At_Germinating_Seeds_cDNA_P Parameter: Age (day) Value: 2 vs. 0
  misc_feature: MA Experiment 108462 PARAMETER Experiment Name: At_Germinating_Seeds_cDNA_P Parameter: Tissue Value: Germinating Seeds
  misc_feature: MA Experiment ID: 108464 Result: Up-regulated in Transcription
  misc_feature: MA Experiment 108464 PARAMETER Experiment Name: At_Germinating_Seeds_cDNA_P Parameter: Age (day) Value: 4 vs. 0
  misc_feature: MA Experiment 108464 PARAMETER Experiment Name: At_Germinating_Seeds_cDNA_P Parameter: Tissue Value: Germinating Seeds
  misc_feature: MA Experiment ID: 108488 Result: Up-regulated in Transcription
  misc_feature: MA Experiment ID: 108489 Result: Down-regulated in Transcription
  misc_feature: MA Experiment ID: 108561 Result: Down-regulated in Transcription
  misc_feature: MA Experiment 108561 PARAMETER Experiment Name: At_100uM_ABA_cDNA_P Parameter: Timepoint (hr) Value: 6
  misc_feature: MA Experiment 108561 PARAMETER Experiment Name: At_100uM_ABA_cDNA_P Parameter: Tissue Value: Aerial
  misc_feature: MA Experiment 108561 PARAMETER Experiment Name: At_100uM_ABA_cDNA_P Parameter: Treatment Value: 100uM ABA vs. No Treatment
  misc_feature: MA Experiment ID: 108595 Result: Down-regulated in Transcription
  misc_feature: MA Experiment 108595 PARAMETER Experiment Name: At_Ler-pi_Ovule_cDNA_P Parameter: Plant Line Value: null
  misc_feature: MA Experiment ID: 108607 Result: Down-regulated in Transcription
  misc_feature: MA Experiment 108607 PARAMETER Experiment Name: At_100uM_ABA_cDNA_P Parameter: Timepoint (hr) Value: 4
  misc_feature: MA Experiment 108607 PARAMETER Experiment Name: At_100uM_ABA_cDNA_P Parameter: Tissue Value: Aerial
  misc_feature: MA Experiment 108607 PARAMETER Experiment Name: At_100uM_ABA_cDNA_P Parameter: Treatment Value: 100uM ABA vs. No Treatment
  misc_feature: MA Experiment ID: 108668 Result: Down-regulated in Transcription
  misc_feature: MA Experiment 108668 PARAMETER Experiment Name: At_2mM_SA_cDNA_P Parameter: Plant Line Value: WS
  misc_feature: MA Experiment 108668 PARAMETER Experiment Name: At_2mM_SA_cDNA_P Parameter: Timepoint (hr) Value: 6
  misc_feature: MA Experiment 108668 PARAMETER Experiment Name: At_2mM_SA_cDNA_P Parameter: Treatment Value: 2mM SA vs. No Treatment
  misc_feature: MA Experiment ID: 20000069 Result: Down-regulated in Transcription
  misc_feature: MA Experiment 20000069 PARAMETER Experiment Name: At_100uM_ABA_Mutants_cDNA_P Parameter: Plant Line Value: CS23
  misc_feature: MA Experiment 20000069 PARAMETER Experiment Name: At_100uM_ABA_Mutants_cDNA_P Parameter: Timepoint (hr) Value: 6
  misc_feature: MA Experiment 20000069 PARAMETER Experiment Name: At_100uM_ABA_Mutants_cDNA_P Parameter: Tissue Value: Aerial
  misc_feature: MA Experiment 20000069 PARAMETER Experiment Name: At_100uM_ABA_Mutants_cDNA_P Parameter: Treatment Value: 100uM ABA vs. No Treatment
  misc_feature: MA Experiment ID: 20000070 Result: Down-regulated in Transcription
  misc_feature: MA Experiment 20000070 PARAMETER Experiment Name: At_100uM_ABA_Mutants_cDNA_P Parameter: Plant Line Value: CS24
  misc_feature: MA Experiment 20000070 PARAMETER Experiment Name: At_100uM_ABA_Mutants_cDNA_P Parameter: Timepoint (hr) Value: 6
  misc_feature: MA Experiment 20000070 PARAMETER Experiment Name: At_100uM_ABA_Mutants_cDNA_P Parameter: Tissue Value: Aerial
  misc_feature: MA Experiment 20000070 PARAMETER Experiment Name: At_100uM_ABA_Mutants_cDNA_P Parameter: Treatment Value: 100uM ABA vs. No Treatment
  misc_feature: MA Experiment ID: 20000071 Result: Down-regulated in Transcription
  misc_feature: MA Experiment 20000071 PARAMETER Experiment Name: At_100uM_ABA_Mutants_cDNA_P Parameter: Plant Line Value: CS8104
  misc_feature: MA Experiment 20000071 PARAMETER Experiment Name: At_100uM_ABA_Mutants_cDNA_P Parameter: Timepoint (hr) Value: 6
  misc_feature: MA Experiment 20000071 PARAMETER Experiment Name: At_100uM_ABA_Mutants_cDNA_P Parameter: Tissue Value: Aerial
  misc_feature: MA Experiment 20000071 PARAMETER Experiment Name: At_100uM_ABA_Mutants_cDNA_P Parameter: Treatment Value: 100uM ABA vs. No Treatment
  misc_feature: MA Experiment ID: 20000072 Result: Down-regulated in Transcription
  misc_feature: MA Experiment 20000072 PARAMETER Experiment Name: At_100uM_ABA_Mutants_cDNA_P Parameter: Plant Line Value: CS8105
  misc_feature: MA Experiment 20000072 PARAMETER Experiment Name: At_100uM_ABA_Mutants_cDNA_P Parameter: Timepoint (hr) Value: 6
  misc_feature: MA Experiment 20000072 PARAMETER Experiment Name: At_100uM_ABA_Mutants_cDNA_P Parameter: Tissue Value: Aerial
  misc_feature: MA Experiment 20000072 PARAMETER Experiment Name: At_100uM_ABA_Mutants_cDNA_P Parameter: Treatment Value: 100uM ABA vs. No Treatment
  misc_feature: MA Experiment ID: 20000086 Result: Down-regulated in Transcription
  misc_feature: MA Experiment 20000086 PARAMETER Experiment Name: At_100uM_ABA_Mutants_cDNA_P Parameter: Plant Line Value: CS22
  misc_feature: MA Experiment 20000086 PARAMETER Experiment Name: At_100uM_ABA_Mutants_cDNA_P Parameter: Timepoint (hr) Value: 6
  misc_feature: MA Experiment 20000086 PARAMETER Experiment Name: At_100uM_ABA_Mutants_cDNA_P Parameter: Tissue Value: Aerial
  misc_feature: MA Experiment 20000086 PARAMETER Experiment Name: At_100uM_ABA_Mutants_cDNA_P Parameter: Treatment Value: 100uM ABA vs. No Treatment
  misc_feature: MA Experiment ID: 20000087 Result: Down-regulated in Transcription
  misc_feature: MA Experiment 20000087 PARAMETER Experiment Name: At_100uM_ABA_Mutants_cDNA_P Parameter: Plant Line Value: WS
  misc_feature: MA Experiment 20000087 PARAMETER Experiment Name: At_100uM_ABA_Mutants_cDNA_P Parameter: Timepoint (hr) Value: 6
  misc_feature: MA Experiment 20000087 PARAMETER Experiment Name: At_100uM_ABA_Mutants_cDNA_P Parameter: Tissue Value: Aerial
  misc_feature: MA Experiment 20000087 PARAMETER Experiment Name: At_100uM_ABA_Mutants_cDNA_P Parameter: Treatment Value: 100uM ABA vs. No Treatment
  misc_feature: MA Experiment ID: 20000088 Result: Down-regulated in Transcription
  misc_feature: MA Experiment 20000088 PARAMETER Experiment Name: At_100uM_ABA_Mutants_cDNA_P Parameter: Plant Line Value: Landsberg
  misc_feature: MA Experiment 20000088 PARAMETER Experiment Name: At_100uM_ABA_Mutants_cDNA_P Parameter: Timepoint (hr) Value: 6
  misc_feature: MA Experiment 20000088 PARAMETER Experiment Name: At_100uM_ABA_Mutants_cDNA_P Parameter: Tissue Value: Aerial
  misc_feature: MA Experiment 20000088 PARAMETER Experiment Name: At_100uM_ABA_Mutants_cDNA_P Parameter: Treatment Value: 100uM ABA vs. No Treatment
  misc_feature: MA Experiment ID: 20000090 Result: Down-regulated in Transcription
  misc_feature: MA Experiment ID: 20000117 Result: Down-regulated in Transcription
  misc_feature: MA Experiment 20000117 PARAMETER Experiment Name: At_100uM_ABA_Mutants_cDNA_P Parameter: Plant Line Value: Columbia
  misc_feature: MA Experiment 20000117 PARAMETER Experiment Name: At_100uM_ABA_Mutants_cDNA_P Parameter: Timepoint (hr) Value: 6
  misc_feature: MA Experiment 20000117 PARAMETER Experiment Name: At_100uM_ABA_Mutants_cDNA_P Parameter: Tissue Value: Aerial
  misc_feature: MA Experiment 20000117 PARAMETER Experiment Name: At_100uM_ABA_Mutants_cDNA_P Parameter: Treatment Value: 100uM ABA vs. No Treatment
  misc_feature: MA Experiment ID: 20000185 Result: Down-regulated in Transcription
  misc_feature: MA Experiment 20000185 PARAMETER Experiment Name: At_Roots__P Parameter: Age (day) Value: 7 vs. 21
  misc_feature: MA Experiment 20000185 PARAMETER Experiment Name: At_Roots__P Parameter: Organism Value: A. thaliana
  misc_feature: MA Experiment 20000185 PARAMETER Experiment Name: At_Roots__P Parameter: Tissue Value: Roots vs. Whole Plant
  misc_feature: MA Experiment ID: 20000438 Result: Up-regulated in Transcription
  misc_feature: MA Experiment 20000438 PARAMETER Experiment Name: At_Shoots__P Parameter: Age (day) Value: 14
  misc_feature: MA Experiment 20000438 PARAMETER Experiment Name: At_Shoots__P Parameter: Tissue Value: Shoots vs. Whole Plant
  misc_feature: MA Experiment ID: 20001248 Result: Down-regulated in Transcription
  misc_feature: MA Experiment 20001248 PARAMETER Experiment Name: At_Far-red-induction_P Parameter: Age (day) Value: 7
  misc_feature: MA Experiment 20001248 PARAMETER Experiment Name: At_Far-red-induction_P Parameter: Light Value: Far-red vs. White
  misc_feature: MA Experiment 20001248 PARAMETER Experiment Name: At_Far-red-induction_P Parameter: Organism Value: A. thaliana
  misc_feature: MA Experiment 20001248 PARAMETER Experiment Name: At_Far-red-induction_P Parameter: Plant Line Value: Columbia
  misc_feature: MA Experiment 20001248 PARAMETER Experiment Name: At_Far-red-induction_P Parameter: Timepoint (hr) Value: 4
  misc_feature: MA Experiment 20001248 PARAMETER Experiment Name: At_Far-red-induction_P Parameter: Tissue Value: Whole Plant
  misc_feature: MA Experiment ID: 20001556 Result: Down-regulated in Transcription
  misc_feature: MA Experiment 20001556 PARAMETER Experiment Name: At_Drought_Soil_Dry_P Parameter: Age (day) Value: 26
  misc_feature: MA Experiment 20001556 PARAMETER Experiment Name: At_Drought_Soil_Dry_P Parameter: Organism Value: A. thaliana
  misc_feature: MA Experiment 20001556 PARAMETER Experiment Name: At_Drought_Soil_Dry_P Parameter: Plant Line Value: WS
  misc_feature: MA Experiment 20001556 PARAMETER Experiment Name: At_Drought_Soil_Dry_P Parameter: Post Timepoint (hr) Value: None
  misc_feature: MA Experiment 20001556 PARAMETER Experiment Name: At_Drought_Soil_Dry_P Parameter: Post-Treatment Value: None
  misc_feature: MA Experiment 20001556 PARAMETER Experiment Name: At_Drought_Soil_Dry_P Parameter: Timepoint (day) Value: 12
  misc_feature: MA Experiment 20001556 PARAMETER Experiment Name: At_Drought_Soil_Dry_P Parameter: Treatment Value: Drought vs. No Drought
  misc_feature: MA Experiment ID: 20001560 Result: Down-regulated in Transcription
  misc_feature: MA Experiment 20001560 PARAMETER Experiment Name: At_Drought_Soil_Dry_P Parameter: Age (day) Value: 28
  misc_feature: MA Experiment 20001560 PARAMETER Experiment Name: At_Drought_Soil_Dry_P Parameter: Organism Value: A. thaliana
  misc_feature: MA Experiment 20001560 PARAMETER Experiment Name: At_Drought_Soil_Dry_P Parameter: Plant Line Value: WS
  misc_feature: MA Experiment 20001560 PARAMETER Experiment Name: At_Drought_Soil_Dry_P Parameter: Post Timepoint (hr) Value: None
  misc_feature: MA Experiment 20001560 PARAMETER Experiment Name: At_Drought_Soil_Dry_P Parameter: Post-Treatment Value: None
  misc_feature: MA Experiment 20001560 PARAMETER Experiment Name: At_Drought_Soil_Dry_P Parameter: Timepoint (day) Value: 14
  misc_feature: MA Experiment 20001560 PARAMETER Experiment Name: At_Drought_Soil_Dry_P Parameter: Treatment Value: Drought vs. No Drought
  misc_feature: MA Experiment ID: 20001904 Result: Down-regulated in Transcription
  misc_feature: MA Experiment 20001904 PARAMETER Experiment Name: At_Drought_Reproduction_P Parameter: Age (day) Value: 37
  misc_feature: MA Experiment 20001904 PARAMETER Experiment Name: At_Drought_Reproduction_P Parameter: Organism Value: A. thaliana
  misc_feature: MA Experiment 20001904 PARAMETER Experiment Name: At_Drought_Reproduction_P Parameter: Plant Line Value: WS
  misc_feature: MA Experiment 20001904 PARAMETER Experiment Name: At_Drought_Reproduction_P Parameter: Timepoint (day) Value: 7
  misc_feature: MA Experiment 20001904 PARAMETER Experiment Name: At_Drought_Reproduction_P Parameter: Tissue Value: Rosettes
  misc_feature: MA Experiment 20001904 PARAMETER Experiment Name: At_Drought_Reproduction_P Parameter: Treatment Value: Drought vs. No Drought
  misc_feature: MA Experiment ID: 20001905 Result: Down-regulated in Transcription
  misc_feature: MA Experiment 20001905 PARAMETER Experiment Name: At_Drought_Reproduction_P Parameter: Age (day) Value: 40
  misc_feature: MA Experiment 20001905 PARAMETER Experiment Name: At_Drought_Reproduction_P Parameter: Organism Value: A. thaliana
  misc_feature: MA Experiment 20001905 PARAMETER Experiment Name: At_Drought_Reproduction_P Parameter: Plant Line Value: WS
  misc_feature: MA Experiment 20001905 PARAMETER Experiment Name: At_Drought_Reproduction_P Parameter: Timepoint (day) Value: 10
  misc_feature: MA Experiment 20001905 PARAMETER Experiment Name: At_Drought_Reproduction_P Parameter: Tissue Value: Rosettes
  misc_feature: MA Experiment 20001905 PARAMETER Experiment Name: At_Drought_Reproduction_P Parameter: Treatment Value: Drought vs. No Drought
  misc_feature: MA Experiment ID: 20001911 Result: Down-regulated in Transcription
  misc_feature: MA Experiment 20001911 PARAMETER Experiment Name: At_Drought_Reproduction_P Parameter: Age (day) Value: 40
  misc_feature: MA Experiment 20001911 PARAMETER Experiment Name: At_Drought_Reproduction_P Parameter: Organism Value: A. thaliana
  misc_feature: MA Experiment 20001911 PARAMETER Experiment Name: At_Drought_Reproduction_P Parameter: Plant Line Value: WS
  misc_feature: MA Experiment 20001911 PARAMETER Experiment Name: At_Drought_Reproduction_P Parameter: Timepoint (day) Value: 10
  misc_feature: MA Experiment 20001911 PARAMETER Experiment Name: At_Drought_Reproduction_P Parameter: Tissue Value: Flowers
  misc_feature: MA Experiment 20001911 PARAMETER Experiment Name: At_Drought_Reproduction_P Parameter: Treatment Value: Drought vs. No Drought
acaattctttgcatcatcatcattcatcatggattcttcttaccttagaatctctctttcttttctcttctgggctttactactctcaccggctgtgtcacagtcatcttcttgttcgtcacagacattttccggcgtcaaatcttaccctcactgtctcgacctccctgatcttaaagccattctccattactcttatgacgcatctaacacaactctcgccgttgttttctctgctccaccgtcaaaacctggtggttggatcgcttgggctattaaccctaaatccaccggcatggctggatctcaagccctcgttgcctctaaggaccctagcaccggcgttgcttccgtgacgacccttaacatcgtctcttacagctctctggttccctcgaaactgtcctttgacgtgtgggatgttaaggcggaggaggcggctaatgacggtggagctttacgaatctttgcgaaagtgaaggttccggcggatttagcggcgagtgggaaggttaaccaggtttggcaggttggtccgggagtgtctaatgggaggatacaggctcatgatttcagcggtcccaatcttaactcagtgggatcactcgatttaaccgggaccacccccggagtccctgtctccggaggtggtggtgccggtaattctagaatccacaagagaaatatccatggaatattgaacgcagtgagttggggacttctatttcccattggagcaatgatagctaggtatatgagaatctttgaatcagcagatcctgcttggttttacctccacgtgtcatgccaattctctgcttatgtcatcggtgttgccggatgggccaccggactcaagcttggttcagaatctaaaggtattcagtacaacactcaccggaacatcggcatctgtctcttctctatagccactcttcagatgtttgcgatgctgttgcggccaaggaaggaccacaagtttagattcgtttggaatatttaccaccacggagttggatactctatcctcatccttggaatcatcaatgttttcaaaggtcttagcatcttgaatccaaagcatacttacaagacggcttatatcgctgtgattgggaccttaggaggcatcacgttactcttggaagttgttacttgggtcattgtcctcaagagaaaatctgccaagtctacaaagcctctcaaggcctaatggtgttggtaattcaaaggatttgtattgttttattttcttttttttttgaagttagaaattgcattgtctttctccacaaattatgattcatctcttgacgttgcttgttttgaggatgatgattatgacttgtgtgttttatgtatagtaggagaaacacatatatgtcttagtgtttgttctttgtagctctgccttttatttcgtgtgtttttgtggttcagaatacttgtagggaattataaactaatttttcaatct

SEQ ID NO: 26972 - protein, 403 aa, Arabidopsis thaliana
  peptide (1)..(403): Ceres Seq. ID no. 13493730
  misc_feature (99)..(237): Pfam Name: Protein of unknown function (DUF568) Pfam Description: Protein of unknown function (DUF568)
  misc_feature (20)..(399): Homolog of NCBI NO: 13785213 NR Description: putative membrane protein [Solanum tuberosum]
  misc_feature (10)..(393): Homolog of NCBI NO: 13785209 NR Description: putative membrane protein [Solanum tuberosum]
  misc_feature (10)..(394): Homolog of NCBI NO: 21592781 NR Description: putative membrane protein [Arabidopsis thaliana]
  misc_feature (10)..(394): Homolog of NCBI NO: 18421491 NR Description: auxin-induced protein family [Arabidopsis
  misc_feature (12)..(398): Homolog of NCBI NO: 15238124 NR Description: auxin-induced protein, putative [Arabidopsis
  misc_feature (13)..(397): Homolog of NCBI NO: 18086563 NR Description: AT4g17280/dl4675c [Arabidopsis thaliana]
  misc_feature (26)..(403): Homolog of NCBI NO: 24414270 NR Description: Putative membrane protein [Oryza sativa (japonica
  misc_feature (12)..(402): Homolog of NCBI NO: 18404500 NR Description: auxin-induced protein family [Arabidopsis
  misc_feature (10)..(403): Homolog of NCBI NO: 21593814 NR Description: unknown [Arabidopsis thaliana]
  misc_feature (10)..(403): Homolog of NCBI NO: 15235545 NR Description: auxin-induced protein, putative [Arabidopsis
QFFASSSFIMDSSYLRISLSFLFWALLLSPAVSQSSSCSSQTFSGVKSYPHCLDLPDLKAILHYSYDASNTTLAVVFSAPPSKPGGWIAWAINPKSTGMAGSQALVASKDPSTGVASVTTLNIVSYSSLVPSKLSFDVWDVKAEEAANDGGALRIFAKVKVPADLAASGKVNQVWQVGPGVSNGRIQAHDFSGPNLNSVGSLDLTGTTPGVPVSGGGGAGNSRIHKRNIHGILNAVSWGLLFPIGAMIARYMRIFESADPAWFYLHVSCQFSAYVIGVAGWATGLKLGSESKGIQYNTHRNIGICLFSIATLQMFAMLLRPRKDHKFRFVWNIYHHGVGYSILILGIINVFKGLSILNPKHTYKTAYIAVIGTLGGITLLLEVVTWVIVLKRKSAKSTKPLKA

SEQ ID NO: 26973 - protein, 394 aa, Arabidopsis thaliana
  peptide (1)..(394): Ceres Seq. ID no. 13493731
  misc_feature (90)..(228): Pfam Name: Protein of unknown function (DUF568) Pfam Description: Protein of unknown function (DUF568)
  misc_feature (11)..(390): Homolog of NCBI NO: 13785213 NR Description: putative membrane protein [Solanum tuberosum]
  misc_feature (1)..(384): Homolog of NCBI NO: 13785209 NR Description: putative membrane protein [Solanum tuberosum]
  misc_feature (1)..(385): Homolog of NCBI NO: 21592781 NR Description: putative membrane protein [Arabidopsis thaliana]
  misc_feature (1)..(385): Homolog of NCBI NO: 18421491 NR Description: auxin-induced protein family [Arabidopsis
  misc_feature (3)..(389): Homolog of NCBI NO: 15238124 NR Description: auxin-induced protein, putative [Arabidopsis
  misc_feature (4)..(388): Homolog of NCBI NO: 18086563 NR Description: AT4g17280/dl4675c [Arabidopsis thaliana]
  misc_feature (17)..(394): Homolog of NCBI NO: 24414270 NR Description: Putative membrane protein [Oryza sativa (japonica
  misc_feature (3)..(393): Homolog of NCBI NO: 18404500 NR Description: auxin-induced protein family [Arabidopsis
  misc_feature (1)..(394): Homolog of NCBI NO: 21593814 NR Description: unknown [Arabidopsis thaliana]
  misc_feature (1)..(394): Homolog of NCBI NO: 15235545 NR Description: auxin-induced protein, putative [Arabidopsis
MDSSYLRISLSFLFWALLLSPAVSQSSSCSSQTFSGVKSYPHCLDLPDLKAILHYSYDASNTTLAVVFSAPPSKPGGWIAWAINPKSTGMAGSQALVASKDPSTGVASVTTLNIVSYSSLVPSKLSFDVWDVKAEEAANDGGALRIFAKVKVPADLAASGKVNQVWQVGPGVSNGRIQAHDFSGPNLNSVGSLDLTGTTPGVPVSGGGGAGNSRIHKRNIHGILNAVSWGLLFPIGAMIARYMRIFESADPAWFYLHVSCQFSAYVIGVAGWATGLKLGSESKGIQYNTHRNIGICLFSIATLQMFAMLLRPRKDHKFRFVWNIYHHGVGYSILILGIINVFKGLSILNPKHTYKTAYIAVIGTLGGITLLLEVVTWVIVLKRKSAKSTKPLKA

SEQ ID NO: 26974 - protein, 305 aa, Arabidopsis thaliana
  peptide (1)..(305): Ceres Seq. ID no. 13493732
  misc_feature (1)..(139): Pfam Name: Protein of unknown function (DUF568) Pfam Description: Protein of unknown function (DUF568)
  misc_feature (1)..(301): Homolog of NCBI NO: 13785213 NR Description: putative membrane protein [Solanum tuberosum]
  misc_feature (1)..(295): Homolog of NCBI NO: 13785209 NR Description: putative membrane protein [Solanum tuberosum]
  misc_feature (1)..(296): Homolog of NCBI NO: 21592781 NR Description: putative membrane protein [Arabidopsis thaliana]
  misc_feature (1)..(296): Homolog of NCBI NO: 18421491 NR Description: auxin-induced protein family [Arabidopsis
  misc_feature (1)..(300): Homolog of NCBI NO: 15238124 NR Description: auxin-induced protein, putative [Arabidopsis
  misc_feature (1)..(299): Homolog of NCBI NO: 18086563 NR Description: AT4g17280/dl4675c [Arabidopsis thaliana]
  misc_feature (1)..(305): Homolog of NCBI NO: 24414270 NR Description: Putative membrane protein [Oryza sativa (japonica
  misc_feature (1)..(304): Homolog of NCBI NO: 18404500 NR Description: auxin-induced protein family [Arabidopsis
  misc_feature (1)..(305): Homolog of NCBI NO: 21593814 NR Description: unknown [Arabidopsis thaliana]
  misc_feature (1)..(305): Homolog of NCBI NO: 15235545 NR Description: auxin-induced protein, putative [Arabidopsis
MAGSQALVASKDPSTGVASVTTLNIVSYSSLVPSKLSFDVWDVKAEEAANDGGALRIFAKVKVPADLAASGKVNQVWQVGPGVSNGRIQAHDFSGPNLNSVGSLDLTGTTPGVPVSGGGGAGNSRIHKRNIHGILNAVSWGLLFPIGAMIARYMRIFESADPAWFYLHVSCQFSAYVIGVAGWATGLKLGSESKGIQYNTHRNIGICLFSIATLQMFAMLLRPRKDHKFRFVWNIYHHGVGYSILILGIINVFKGLSILNPKHTYKTAYIAVIGTLGGITLLLEVVTWVIVLKRKSAKSTKPLKA

SEQ ID NO: 26975 - DNA, 1707 bp, Arabidopsis thaliana
  misc_feature (1)..(1707): Ceres Seq. ID no. 13489655
  misc_feature: MA Experiment ID: 20000171 Result: Down-regulated in Transcription
  misc_feature: MA Experiment 20000171 PARAMETER Experiment Name: At_42deg_Heat_P Parameter: Age (day) Value: 14
  misc_feature: MA Experiment 20000171 PARAMETER Experiment Name: At_42deg_Heat_P Parameter: Organism Value: A. thaliana
  misc_feature: MA Experiment 20000171 PARAMETER Experiment Name: At_42deg_Heat_P Parameter: Plant Line Value: WS
  misc_feature: MA Experiment 20000171 PARAMETER Experiment Name: At_42deg_Heat_P Parameter: Temperature (deg C) Value: 42 vs. 22
  misc_feature: MA Experiment 20000171 PARAMETER Experiment Name: At_42deg_Heat_P Parameter: Timepoint (hr) Value: 1
  misc_feature: MA Experiment 20000171 PARAMETER Experiment Name: At_42deg_Heat_P Parameter: Tissue Value: Aerial
  misc_feature: MA Experiment ID: 20000173 Result: Down-regulated in Transcription
  misc_feature: MA Experiment 20000173 PARAMETER Experiment Name: At_42deg_Heat_P Parameter: Age (day) Value: 14
  misc_feature: MA Experiment 20000173 PARAMETER Experiment Name: At_42deg_Heat_P Parameter: Organism Value: A. thaliana
  misc_feature: MA Experiment 20000173 PARAMETER Experiment Name: At_42deg_Heat_P Parameter: Plant Line Value: WS
  misc_feature: MA Experiment 20000173 PARAMETER Experiment Name: At_42deg_Heat_P Parameter: Temperature (deg C) Value: 42 vs. 22
  misc_feature: MA Experiment 20000173 PARAMETER Experiment Name: At_42deg_Heat_P Parameter: Timepoint (hr) Value: 6
  misc_feature: MA Experiment 20000173 PARAMETER Experiment Name: At_42deg_Heat_P Parameter: Tissue Value: Aerial
  misc_feature: MA Experiment ID: 20000179 Result: Up-regulated in Transcription
  misc_feature: MA Experiment 20000179 PARAMETER Experiment Name: At_Germinating_Seeds_P Parameter: Age (hr) Value: 6 vs. 0
  misc_feature: MA Experiment 20000179 PARAMETER Experiment Name: At_Germinating_Seeds_P Parameter: Tissue Value: Germinating Seeds
  misc_feature: MA Experiment ID: 20000180 Result: Up-regulated in Transcription
  misc_feature: MA Experiment 20000180 PARAMETER Experiment Name: At_Germinating_Seeds_P Parameter: Age (hr) Value: 24 vs. 0
  misc_feature: MA Experiment 20000180 PARAMETER Experiment Name: At_Germinating_Seeds_P Parameter: Tissue Value: Germinating Seeds
  misc_feature: MA Experiment ID: 20001451 Result: Up-regulated in Transcription
  misc_feature: MA Experiment 20001451 PARAMETER Experiment Name: At_Far-red-induction_P Parameter: Age (day) Value: 7
  misc_feature: MA Experiment 20001451 PARAMETER Experiment Name: At_Far-red-induction_P Parameter: Light Value: Far-red vs. White
  misc_feature: MA Experiment 20001451 PARAMETER Experiment Name: At_Far-red-induction_P Parameter: Organism Value: A. thaliana
  misc_feature: MA Experiment 20001451 PARAMETER Experiment Name: At_Far-red-induction_P Parameter: Plant Line Value: Columbia
  misc_feature: MA Experiment 20001451 PARAMETER Experiment Name: At_Far-red-induction_P Parameter: Timepoint (hr) Value: 24
  misc_feature: MA Experiment 20001451 PARAMETER Experiment Name: At_Far-red-induction_P Parameter: Tissue Value: Whole Plant
aaaaacaatagtaaaaaaaagagagacgaaaagaaagaaagagagagagccccacaaacaaacaaaatggatttgaaccaaatcttgatcctctcatttctctctctttttaccttagccatattcttgctcacaagatccaaacggaaactaaaccttcctccgtcgccggcgatctccttgccggtgatcggacacctccatctcctcaagccaccgcttcaccgtaccttcctttccctttccaaatccatcggaaatgctccggtcttccatctccgactcggaaatcgcctcgtttatgtcatctcttcacgttccatcgctgaagaatgtttcacaaagaacgatgtcgttctcgcgaaccgccccaagttcaccataagtaagcacctcggctacaacgccacctacttactctcggcatcttacggcgatcattggaggaacctccgccgcatagccgccgtcgagatattctccactcatagactcaattcgtttctgtatattcgtaaggacgagatccgacggctcatttcacatctctctcgtgattccttacacggatttgtggaggtagagatgaaaacattgttaaccaatttggcatccaacaccaccatcagaatgttggccgggaagagatatttcggtgaggacaacgatgacgctaaactcgtgaagaaccttgtgtcggaggcggtgaccagcgccggtgcaggaaaccccattgattatctttccattttacgttgggtctcgagttatgaaaaacgaatcaagaatttgggaaataggtttgatacgtttttgcagaaattagtcgacgaaaaacgtgcggagaaggaaaaaggtgaaactatgatcgatcacttgcttgctctccaagacattcaacctgattactatacggatgtcatcatcaaaggaatcatacttaccctgataattgcagggacagatacgtcatcagtaacactagaatgggcaatgtcaaatctgttgaaccatccagaaatacttaagaaagcgagaatggaaatcgatgaaaaagtcggtttagaccgattagtagacgaatcggacattgtaaatctctcttatctccaaagcattgtattggaaacactacgtatgtacccggcagtcccactactactacctcatttgtcatcagaagattgtaaagttggaggctacgatataccaagtggaacaatggtattgaccaacgcatgggccatgcatagagatccagaggtatgggaagatcctgagatattcaaaccagaaagatttgaaaaagaaggagaggctgagaagctaatctcatttgggatgggacgaagagcttgtcctggagccgggctagctcatcggctaataaaccaggctcttggaagtttggttcaatgttttgagtgggaaagagttggtgaggattttgtggacatgaccgaagacaaaggagccacattgcccaaagctataccattaagagccatgtgcaaagcacgttctattgttgataaactgatataaatgttttacgttgaaaaatgtattctatttaatgacatgtttttaattatgtgttttggtcttcaattcgtccttcaatcttttgttgtatctttgaatcttgcttaatatcatcgggtcaatgaagctggcttgctcaccgggtagtggctgctcttgcgt

SEQ ID NO: 26976 - protein, 514 aa, Arabidopsis thaliana
  peptide (1)..(514): Ceres Seq. ID no. 13489656
  misc_feature (54)..(502): Pfam Name: Cytochrome P450 Pfam Description: Cytochrome P450
  misc_feature (54)..(502): Pfam Name: Cytochrome P450 Pfam Description: Cytochrome P450
  misc_feature (27)..(514): Homolog of NCBI NO: 30692923 NR Description: cytochrome P450 91A1 [Arabidopsis thaliana]
  misc_feature (29)..(514): Homolog of NCBI NO: 15227789 NR Description: cytochrome P450, putative [Arabidopsis thaliana]
  misc_feature (23)..(514): Homolog of NCBI NO: 15227792 NR Description: cytochrome P450, putative [Arabidopsis thaliana]
  misc_feature (27)..(514): Homolog of NCBI NO: 15235534 NR Description: cytochrome P450 family [Arabidopsis thaliana]
  misc_feature (28)..(514): Homolog of NCBI NO: 15235535 NR Description: cytochrome P450 family [Arabidopsis thaliana]
  misc_feature (27)..(514): Homolog of NCBI NO: 30692923 NR Description: cytochrome P450 91A1 [Arabidopsis thaliana]
  misc_feature (23)..(514): Homolog of NCBI NO: 15227792 NR Description: cytochrome P450, putative [Arabidopsis thaliana]
  misc_feature (28)..(514): Homolog of NCBI NO: 15235535 NR Description: cytochrome P450 family [Arabidopsis thaliana]
  misc_feature (23)..(514): Homolog of NCBI NO: 15235533 NR Description: cytochrome P450 family [Arabidopsis thaliana]
  misc_feature (23)..(514): Homolog of NCBI NO: 15235517 NR Description: cytochrome P450 family [Arabidopsis thaliana]
  misc_feature (29)..(513): Homolog of NCBI NO: 15235536 NR Description: cytochrome P450, putative [Arabidopsis thaliana]
  misc_feature (29)..(513): Homolog of NCBI NO: 21554381 NR Description: cytochrome P450-like protein [Arabidopsis
  misc_feature (28)..(514): Homolog of NCBI NO: 15228472 NR Description: cytochrome P450 family [Arabidopsis thaliana]
  misc_feature (27)..(514): Homolog of NCBI NO: 15235534 NR Description: cytochrome P450 family [Arabidopsis thaliana]
  misc_feature (29)..(514): Homolog of NCBI NO: 15227789 NR Description: cytochrome P450, putative [Arabidopsis thaliana]
  misc_feature (28)..(514): Homolog of NCBI NO: 15228472 NR Description: cytochrome P450 family [Arabidopsis thaliana]
  misc_feature (29)..(513): Homolog of NCBI NO: 21554381 NR Description: cytochrome P450-like protein [Arabidopsis
  misc_feature (29)..(513): Homolog of NCBI NO: 15235536 NR Description: cytochrome P450, putative [Arabidopsis thaliana]
  misc_feature (23)..(514): Homolog of NCBI NO: 15235517 NR Description: cytochrome P450 family [Arabidopsis thaliana]
  misc_feature (23)..(514): Homolog of NCBI NO: 15235533 NR Description: cytochrome P450 family [Arabidopsis thaliana]
KNNSKKKRDEKKERERAPQTNKMDLNQILILSFLSLFTLAIFLLTRSKRKLNLPPSPAISLPVIGHLHLLKPPLHRTFLSLSKSIGNAPVFHLRLGNRLVYVISSRSIAEECFTKNDVVLANRPKFTISKHLGYNATYLLSASYGDHWRNLRRIAAVEIFSTHRLNSFLYIRKDEIRRLISHLSRDSLHGFVEVEMKTLLTNLASNTTIRMLAGKRYFGEDNDDAKLVKNLVSEAVTSAGAGNPIDYLSILRWVSSYEKRIKNLGNRFDTFLQKLVDEKRAEKEKGETMIDHLLALQDIQPDYYTDVIIKGIILTLIIAGTDTSSVTLEWAMSNLLNHPEILKKARMEIDEKVGLDRLVDESDIVNLSYLQSIVLETLRMYPAVPLLLPHLSSEDCKVGGYDIPSGTMVLTNAWAMHRDPEVWEDPEIFKPERFEKEGEAEKLISFGMGRRACPGAGLAHRLINQALGSLVQCFEWERVGEDFVDMTEDKGATLPKAIPLRAMCKARSIVDKLI

SEQ ID NO: 26977 - protein, 492 aa, Arabidopsis thaliana
  peptide (1)..(492): Ceres Seq. ID no. 13489657
  misc_feature (32)..(480): Pfam Name: Cytochrome P450 Pfam Description: Cytochrome P450
  misc_feature (32)..(480): Pfam Name: Cytochrome P450 Pfam Description: Cytochrome P450
  misc_feature (5)..(492): Homolog of NCBI NO: 30692923 NR Description: cytochrome P450 91A1 [Arabidopsis thaliana]
  misc_feature (7)..(492): Homolog of NCBI NO: 15227789 NR Description: cytochrome P450, putative [Arabidopsis thaliana]
  misc_feature (1)..(492): Homolog of NCBI NO: 15227792 NR Description: cytochrome P450, putative [Arabidopsis thaliana]
  misc_feature (5)..(492): Homolog of NCBI NO: 15235534 NR Description: cytochrome P450 family [Arabidopsis thaliana]
  misc_feature (6)..(492): Homolog of NCBI NO: 15235535 NR Description: cytochrome P450 family [Arabidopsis thaliana]
  misc_feature (5)..(492): Homolog of NCBI NO: 30692923 NR Description: cytochrome P450 91A1 [Arabidopsis thaliana]
  misc_feature (1)..(492): Homolog of NCBI NO: 15227792 NR Description: cytochrome P450, putative [Arabidopsis thaliana]
  misc_feature (6)..(492): Homolog of NCBI NO: 15235535 NR Description: cytochrome P450 family [Arabidopsis thaliana]
  misc_feature (1)..(492): Homolog of NCBI NO: 15235533 NR Description: cytochrome P450 family [Arabidopsis thaliana]
  misc_feature (1)..(492): Homolog of NCBI NO: 15235517 NR Description: cytochrome P450 family [Arabidopsis thaliana]
  misc_feature (7)..(491): Homolog of NCBI NO: 15235536 NR Description: cytochrome P450, putative [Arabidopsis thaliana]
  misc_feature (7)..(491): Homolog of NCBI NO: 21554381 NR Description: cytochrome P450-like protein [Arabidopsis
  misc_feature (6)..(492): Homolog of NCBI NO: 15228472 NR Description: cytochrome P450 family [Arabidopsis thaliana]
  misc_feature (5)..(492): Homolog of NCBI NO: 15235534 NR Description: cytochrome P450 family [Arabidopsis thaliana]
  misc_feature (7)..(492): Homolog of NCBI NO: 15227789 NR Description: cytochrome P450, putative [Arabidopsis thaliana]
  misc_feature (6)..(492): Homolog of NCBI NO: 15228472 NR Description: cytochrome P450 family [Arabidopsis thaliana]
  misc_feature (7)..(491): Homolog of NCBI NO: 21554381 NR Description: cytochrome P450-like protein [Arabidopsis
  misc_feature (7)..(491): Homolog of NCBI NO: 15235536 NR Description: cytochrome P450, putative [Arabidopsis thaliana]
  misc_feature (1)..(492): Homolog of NCBI NO: 15235517 NR Description: cytochrome P450 family [Arabidopsis thaliana]
  misc_feature (1)..(492): Homolog of NCBI NO: 15235533 NR Description: cytochrome P450 family [Arabidopsis thaliana]
MDLNQILILSFLSLFTLAIFLLTRSKRKLNLPPSPAISLPVIGHLHLLKPPLHRTFLSLSKSIGNAPVFHLRLGNRLVYVISSRSIAEECFTKNDVVLANRPKFTISKHLGYNATYLLSASYGDHWRNLRRIAAVEIFSTHRLNSFLYIRKDEIRRLISHLSRDSLHGFVEVEMKTLLTNLASNTTIRMLAGKRYFGEDNDDAKLVKNLVSEAVTSAGAGNPIDYLSILRWVSSYEKRIKNLGNRFDTFLQKLVDEKRAEKEKGETMIDHLLALQDIQPDYYTDVIIKGIILTLIIAGTDTSSVTLEWAMSNLLNHPEILKKARMEIDEKVGLDRLVDESDIVNLSYLQSIVLETLRMYPAVPLLLPHLSSEDCKVGGYDIPSGTMVLTNAWAMHRDPEVWEDPEIFKPERFEKEGEAEKLISFGMGRRACPGAGLAHRLINQALGSLVQCFEWERVGEDFVDMTEDKGATLPKAIPLRAMCKARSIVDKLI

SEQ ID NO: 26978 - protein, 319 aa, Arabidopsis thaliana
  peptide (1)..(319): Ceres Seq. ID no. 13489658
  misc_feature (1)..(307): Pfam Name: Cytochrome P450 Pfam Description: Cytochrome P450
  misc_feature (1)..(307): Pfam Name: Cytochrome P450 Pfam Description: Cytochrome P450
  misc_feature (1)..(319): Homolog of NCBI NO: 30692923 NR Description: cytochrome P450 91A1 [Arabidopsis thaliana]
  misc_feature (1)..(319): Homolog of NCBI NO: 15227789 NR Description: cytochrome P450, putative [Arabidopsis thaliana]
  misc_feature (1)..(319): Homolog of NCBI NO: 15227792 NR Description: cytochrome P450, putative [Arabidopsis thaliana]
  misc_feature (1)..(319): Homolog of NCBI NO: 15235534 NR Description: cytochrome P450 family [Arabidopsis thaliana]
  misc_feature (1)..(319): Homolog of NCBI NO: 15235535 NR Description: cytochrome P450 family [Arabidopsis thaliana]
  misc_feature (1)..(319): Homolog of NCBI NO: 30692923 NR Description: cytochrome P450 91A1 [Arabidopsis thaliana]
  misc_feature (1)..(319): Homolog of NCBI NO: 15227792 NR Description: cytochrome P450, putative [Arabidopsis thaliana]
  misc_feature (1)..(319): Homolog of NCBI NO: 15235535 NR Description: cytochrome P450 family [Arabidopsis thaliana]
  misc_feature (1)..(319): Homolog of NCBI NO: 15235533 NR Description: cytochrome P450 family [Arabidopsis thaliana]
  misc_feature (1)..(319): Homolog of NCBI NO: 15235517 NR Description: cytochrome P450 family [Arabidopsis thaliana]
  misc_feature (1)..(318): Homolog of NCBI NO: 15235536 NR Description: cytochrome P450, putative [Arabidopsis thaliana]
  misc_feature (1)..(318): Homolog of NCBI NO: 21554381 NR Description: cytochrome P450-like protein [Arabidopsis
  misc_feature (1)..(319): Homolog of NCBI NO: 15228472 NR Description: cytochrome P450 family [Arabidopsis thaliana]
  misc_feature (1)..(319): Homolog of NCBI NO: 15235534 NR Description: cytochrome P450 family [Arabidopsis thaliana]
  misc_feature (1)..(319): Homolog of NCBI NO: 15227789 NR Description: cytochrome P450, putative [Arabidopsis thaliana]
  misc_feature (1)..(319): Homolog of NCBI NO: 15228472 NR Description: cytochrome P450 family [Arabidopsis thaliana]
  misc_feature (1)..(318): Homolog of NCBI NO: 21554381 NR Description: cytochrome P450-like protein [Arabidopsis
  misc_feature (1)..(318): Homolog of NCBI NO: 15235536 NR Description: cytochrome P450, putative [Arabidopsis thaliana]
  misc_feature (1)..(319): Homolog of NCBI NO: 15235517 NR Description: cytochrome P450 family [Arabidopsis thaliana]
  misc_feature (1)..(319): Homolog of NCBI NO: 15235533 NR Description: cytochrome P450 family [Arabidopsis thaliana]
MKTLLTNLASNTTIRMLAGKRYFGEDNDDAKLVKNLVSEAVTSAGAGNPIDYLSILRWVSSYEKRIKNLGNRFDTFLQKLVDEKRAEKEKGETMIDHLLALQDIQPDYYTDVIIKGIILTLIIAGTDTSSVTLEWAMSNLLNHPEILKKARMEIDEKVGLDRLVDESDIVNLSYLQSIVLETLRMYPAVPLLLPHLSSEDCKVGGYDIPSGTMVLTNAWAMHRDPEVWEDPEIFKPERFEKEGEAEKLISFGMGRRACPGAGLAHRLINQALGSLVQCFEWERVGEDFVDMTEDKGATLPKAIPLRAMCKARSIVDKLI

SEQ ID NO: 26979 - DNA, 2024 bp, Arabidopsis thaliana
  misc_feature (1)..(2024): Ceres Seq. ID no. 13492616
  misc_feature: MA Experiment ID: 108488 Result: Up-regulated in Transcription
  misc_feature: MA Experiment ID: 108573 Result: Up-regulated in Transcription
  misc_feature: MA Experiment 108573 PARAMETER Experiment Name: At_Drought_cDNA_P Parameter: Timepoint (hr) Value: 6
  misc_feature: MA Experiment 108573 PARAMETER Experiment Name: At_Drought_cDNA_P Parameter: Tissue Value: Aerial
  misc_feature: MA Experiment 108573 PARAMETER Experiment Name: At_Drought_cDNA_P Parameter: Treatment Value: Drought vs. No Drought
  misc_feature: MA Experiment ID: 108576 Result: Down-regulated in Transcription
  misc_feature: MA Experiment 108576 PARAMETER Experiment Name: At_42deg_Heat_cDNA_P Parameter: Temperature (deg C) Value: 42 vs. 22
  misc_feature: MA Experiment 108576 PARAMETER Experiment Name: At_42deg_Heat_cDNA_P Parameter: Timepoint (hr) Value: 1
  misc_feature: MA Experiment 108576 PARAMETER Experiment Name: At_42deg_Heat_cDNA_P Parameter: Tissue Value: Aerial
  misc_feature: MA Experiment ID: 108607 Result: Up-regulated in Transcription
  misc_feature: MA Experiment 108607 PARAMETER Experiment Name: At_100uM_ABA_cDNA_P Parameter: Timepoint (hr) Value: 4
  misc_feature: MA Experiment 108607 PARAMETER Experiment Name: At_100uM_ABA_cDNA_P Parameter: Tissue Value: Aerial
  misc_feature: MA Experiment 108607 PARAMETER Experiment Name: At_100uM_ABA_cDNA_P Parameter: Treatment Value: 100uM ABA vs. No Treatment
  misc_feature: MA Experiment ID: 20000090 Result: Down-regulated in Transcription
  misc_feature: MA Experiment ID: 20000111 Result: Down-regulated in Transcription
  misc_feature: MA Experiment 20000111 PARAMETER Experiment Name: At_42deg_Heat_cDNA_P Parameter: Temperature (deg C) Value: 42 vs. 22
  misc_feature: MA Experiment 20000111 PARAMETER Experiment Name: At_42deg_Heat_cDNA_P Parameter: Timepoint (hr) Value: 6
  misc_feature: MA Experiment 20000111 PARAMETER Experiment Name: At_42deg_Heat_cDNA_P Parameter: Tissue Value: Aerial
  misc_feature: MA Experiment ID: 20000112 Result: Down-regulated in Transcription
  misc_feature: MA Experiment 20000112 PARAMETER Experiment Name: At_42deg_Heat_cDNA_P Parameter: Temperature (deg C) Value: 42 vs. 22
  misc_feature: MA Experiment 20000112 PARAMETER Experiment Name: At_42deg_Heat_cDNA_P Parameter: Timepoint (hr) Value: 2
  misc_feature: MA Experiment 20000112 PARAMETER Experiment Name: At_42deg_Heat_cDNA_P Parameter: Tissue Value: Aerial
  misc_feature: MA Experiment ID: 20000113 Result: Down-regulated in Transcription
  misc_feature: MA Experiment 20000113 PARAMETER Experiment Name: At_42deg_Heat_cDNA_P Parameter: Temperature (deg C) Value: 42 vs. 22
  misc_feature: MA Experiment 20000113 PARAMETER Experiment Name: At_42deg_Heat_cDNA_P Parameter: Timepoint (hr) Value: 8
  misc_feature: MA Experiment 20000113 PARAMETER Experiment Name: At_42deg_Heat_cDNA_P Parameter: Tissue Value: Aerial
  misc_feature: MA Experiment ID: 20000144 Result: Down-regulated in Transcription
  misc_feature: MA Experiment 20000144 PARAMETER Experiment Name: At_42deg_Heat_cDNA_P Parameter: Temperature (deg C) Value: 42 vs. 22
  misc_feature: MA Experiment 20000144 PARAMETER Experiment Name: At_42deg_Heat_cDNA_P Parameter: Timepoint (hr) Value: 1
  misc_feature: MA Experiment 20000144 PARAMETER Experiment Name: At_42deg_Heat_cDNA_P Parameter: Tissue Value: Aerial
  misc_feature: MA Experiment ID: 20000171 Result: Down-regulated in Transcription
  misc_feature: MA Experiment 20000171 PARAMETER Experiment Name: At_42deg_Heat_P Parameter: Age (day) Value: 14
  misc_feature: MA Experiment 20000171 PARAMETER Experiment Name: At_42deg_Heat_P Parameter: Organism Value: A. thaliana
  misc_feature: MA Experiment 20000171 PARAMETER Experiment Name: At_42deg_Heat_P Parameter: Plant Line Value: WS
  misc_feature: MA Experiment 20000171 PARAMETER Experiment Name: At_42deg_Heat_P Parameter: Temperature (deg C) Value: 42 vs. 22
  misc_feature: MA Experiment 20000171 PARAMETER Experiment Name: At_42deg_Heat_P Parameter: Timepoint (hr) Value: 1
  misc_feature: MA Experiment 20000171 PARAMETER Experiment Name: At_42deg_Heat_P Parameter: Tissue Value: Aerial
  misc_feature: MA Experiment ID: 20000173 Result: Down-regulated in Transcription
  misc_feature: MA Experiment 20000173 PARAMETER Experiment Name: At_42deg_Heat_P Parameter: Age (day) Value: 14
  misc_feature: MA Experiment 20000173 PARAMETER Experiment Name: At_42deg_Heat_P Parameter: Organism Value: A. thaliana
  misc_feature: MA Experiment 20000173 PARAMETER Experiment Name: At_42deg_Heat_P Parameter: Plant Line Value: WS
  misc_feature: MA Experiment 20000173 PARAMETER Experiment Name: At_42deg_Heat_P Parameter: Temperature (deg C) Value: 42 vs. 22
  misc_feature: MA Experiment 20000173 PARAMETER Experiment Name: At_42deg_Heat_P Parameter: Timepoint (hr) Value: 6
  misc_feature: MA Experiment 20000173 PARAMETER Experiment Name: At_42deg_Heat_P Parameter: Tissue Value: Aerial
  misc_feature: MA Experiment ID: 20000184 Result: Up-regulated in Transcription
  misc_feature: MA Experiment 20000184 PARAMETER Experiment Name: At_Shoots__P Parameter: Age (day) Value: 7
  misc_feature: MA Experiment 20000184 PARAMETER Experiment Name: At_Shoots__P Parameter: Tissue Value: Shoots vs. Whole Plant
  misc_feature: MA Experiment ID: 20000185 Result: Down-regulated in Transcription
  misc_feature: MA Experiment 20000185 PARAMETER Experiment Name: At_Roots__P Parameter: Age (day) Value: 7 vs. 21
  misc_feature: MA Experiment 20000185 PARAMETER Experiment Name: At_Roots__P Parameter: Organism Value: A. thaliana
  misc_feature: MA Experiment 20000185 PARAMETER Experiment Name: At_Roots__P Parameter: Tissue Value: Roots vs. Whole Plant
  misc_feature: MA Experiment ID: 20000234 Result: Up-regulated in Transcription
  misc_feature: MA Experiment 20000234 PARAMETER Experiment Name: At_Siliques_P Parameter: Age (day) Value: 21
  misc_feature: MA Experiment 20000234 PARAMETER Experiment Name: At_Siliques_P Parameter: Organism Value: A. thaliana
  misc_feature: MA Experiment 20000234 PARAMETER Experiment Name: At_Siliques_P Parameter: Plant Line Value: WS
  misc_feature: MA Experiment 20000234 PARAMETER Experiment Name: At_Siliques_P Parameter: Tissue Value: Less Than 5mm Siliques vs. Whole Plant
  misc_feature: MA Experiment ID: 20000235 Result: Up-regulated in Transcription
  misc_feature: MA Experiment 20000235 PARAMETER Experiment Name: At_Siliques_P Parameter: Age (day) Value: 21
  misc_feature: MA Experiment 20000235 PARAMETER Experiment Name: At_Siliques_P Parameter: Organism Value: A. thaliana
  misc_feature: MA Experiment 20000235 PARAMETER Experiment Name: At_Siliques_P Parameter: Plant Line Value: WS
  misc_feature: MA Experiment 20000235 PARAMETER Experiment Name: At_Siliques_P Parameter: Tissue Value: 5-10mm Siliques vs. Whole Plant
  misc_feature: MA Experiment ID: 20000439 Result: Down-regulated in Transcription
  misc_feature: MA Experiment 20000439 PARAMETER Experiment Name: At_Roots__P Parameter: Age (day) Value: 14 vs. 21
  misc_feature: MA Experiment 20000439 PARAMETER Experiment Name: At_Roots__P Parameter: Organism Value: A. thaliana
  misc_feature: MA Experiment 20000439 PARAMETER Experiment Name: At_Roots__P Parameter: Tissue Value: Roots vs. Whole Plant
  misc_feature: MA Experiment ID: 20001557 Result: Up-regulated in Transcription
  misc_feature: MA Experiment 20001557 PARAMETER Experiment Name: At_Drought_Soil_Dry_P Parameter: Age (day) Value: 27
  misc_feature: MA Experiment 20001557 PARAMETER Experiment Name: At_Drought_Soil_Dry_P Parameter: Organism Value: A. thaliana
  misc_feature: MA Experiment 20001557 PARAMETER Experiment Name: At_Drought_Soil_Dry_P Parameter: Plant Line Value: WS
  misc_feature: MA Experiment 20001557 PARAMETER Experiment Name: At_Drought_Soil_Dry_P Parameter: Post Timepoint (hr) Value: 3
  misc_feature: MA Experiment 20001557 PARAMETER Experiment Name: At_Drought_Soil_Dry_P Parameter: Post-Treatment Value: Re-Water vs. No Drought
  misc_feature: MA Experiment 20001557 PARAMETER Experiment Name: At_Drought_Soil_Dry_P Parameter: Timepoint (day) Value: 13
  misc_feature: MA Experiment 20001557 PARAMETER Experiment Name: At_Drought_Soil_Dry_P Parameter: Treatment Value: Drought vs. No Drought
  misc_feature: MA Experiment ID: 20001558 Result: Up-regulated in Transcription
  misc_feature: MA Experiment 20001558 PARAMETER Experiment Name: At_Drought_Soil_Dry_P Parameter: Age (day) Value: 27
  misc_feature: MA Experiment 20001558 PARAMETER Experiment Name: At_Drought_Soil_Dry_P Parameter: Organism Value: A. thaliana
  misc_feature: MA Experiment 20001558 PARAMETER Experiment Name: At_Drought_Soil_Dry_P Parameter: Plant Line Value: WS
  misc_feature: MA Experiment 20001558 PARAMETER Experiment Name: At_Drought_Soil_Dry_P Parameter: Post Timepoint (hr) Value: 6
  misc_feature: MA Experiment 20001558 PARAMETER Experiment Name: At_Drought_Soil_Dry_P Parameter: Post-Treatment Value: Re-Water vs. No Drought
  misc_feature: MA Experiment 20001558 PARAMETER Experiment Name: At_Drought_Soil_Dry_P Parameter: Timepoint (day) Value: 13
  misc_feature: MA Experiment 20001558 PARAMETER Experiment Name: At_Drought_Soil_Dry_P Parameter: Treatment Value: Drought vs. No Drought
gccaacacaactccttataagatatacacttcatcaacctatagatctcactcacataatcaacctacaaaacaaaaacaagaatgggtagatccaacgagcaagatctgctctctaccgagatcgttaatcgtgggatcgaaccatccggtcctaacgccggctcaccaacgttctcggttagggtcaggagacgtttgcctgattttcttcagtcggtgaacttgaagtacgtgaaacttggttaccactacctcataaaccatgcggtttatttggcgaccataccggttcttgtgctggtttttagtgctgaggttgggagtttaagcagagaagagatttggaagaagctttgggactatgatcttgcaactgttatcggattcttcggtgtctttgttttaaccgcttgtgtctacttcatgtctcgtcctcgctctgtttatcttattgatttcgcttgttacaagccctccgatgaacacaaggtgacaaaagaagagttcatagaactagcgagaaaatcagggaagttcgacgaagagacactcggtttcaagaagaggatcttacaagcctcaggcataggcgacgagacatacgtcccaagatccatctcttcatcagaaaacataacaacgatgaaagaaggtcgtgaagaagcctctacagtgatctttggagcactagacgaactcttcgagaagacacgtgtaaaacctaaagacgttggtgtccttgtggttaactgtagcattttcaacccgacaccgtcgttgtccgcaatggtgataaaccattacaagatgagagggaacatacttagttacaaccttggagggatgggatgttcggctggaatcatagctattgatcttgctcgtgacatgcttcagtctaaccctaatagttatgctgttgttgtgagtactgagatggttgggtataattggtacgtgggaagtgacaagtcaatggttatacctaattgtttctttaggatgggttgttctgccgttatgctctctaaccgtcgtcgtgactttcgccatgctaagtaccgtctcgagcacattgtccgaactcataaggctgctgacgaccgtagcttcaggagtgtgtaccaggaagaagatgaacaaggattcaaggggttgaagataagtagagacttaatggaagttggaggtgaagctctcaagacaaacatcactaccttaggtcctcttgtcctacctttctccgagcagcttctcttctttgctgctttgctccgccgaacattctcacctgctgccaaaacgtccacaaccacttccttctctacttccgccaccgcaaaaaccaatggaatcaagtcttcctcttccgatctgtccaagccatacatcccggactacaagctcgccttcgagcatttttgcttccacgcggcaagcaaagtagtgcttgaagagcttcaaaagaatctaggcttgagtgaagagaatatggaggcttctaggatgacacttcacaggtttggaaacacttctagcagtggaatctggtatgagttggcttacatggaggccaaggaaagtgttcgtagaggcgatagggtttggcagatcgctttcggttctggttttaagtgtaacagtgtggtgtggaaggcaatgaggaaggtgaagaagccaaccaggaacaatccttgggtggattgcatcaaccgttaccctgtgcctctctaaattatcattcttctaaattaaatcaagtaagatctctaattactccaaccaaaagatacagtttggttggatgataggagttatttactgatcattcgtatctaagtctgttataagaatggatgtggctagagtcctgttcagcttcaacttgttttattttttgtttgttctctattggatcttcataaactttgagagattaaagaaaaaaactcttctttagtttgatagaacagatggtcattgtaatttctttaatatgtcaaagtaaaacaatttcttttt

SEQ ID NO: 26980 - protein, 550 aa, Arabidopsis thaliana; identical to SEQ ID NO: 23995
  peptide (1)..(550): Ceres Seq. ID no. 13492617
  misc_feature (331)..(416): Pfam Name: Chalcone and stilbene synthases, C-terminal domain Pfam Description: Chalcone and stilbene synthases, C-terminal
  misc_feature (414)..(547): Homolog of NCBI NO: 19351907 NR Description: putative beta-ketoacyl-CoA synthase [Antirrhinum
  misc_feature (4)..(413): Homolog of NCBI NO: 19351907 NR Description: putative beta-ketoacyl-CoA synthase [Antirrhinum
  misc_feature (4)..(550): Homolog of NCBI NO: 28864534 NR Description: fiddlehead-like protein [Tropaeolum majus]
  misc_feature (426)..(548): Homolog of NCBI NO: 18447765 NR Description: fiddlehead-like protein [Gossypium hirsutum]
  misc_feature (1)..(416): Homolog of NCBI NO: 18447765 NR Description: fiddlehead-like protein [Gossypium hirsutum]
  misc_feature (1)..(508): Homolog of NCBI NO: 8177719 NR Description: fiddlehead protein [Arabidopsis thaliana]
  misc_feature (1)..(550): Homolog of NCBI NO: 8177723 NR Description: fiddlehead protein [Arabidopsis thaliana]
  misc_feature (1)..(550): Homolog of NCBI NO: 8177711 NR Description: fiddlehead protein [Arabidopsis thaliana]
  misc_feature (1)..(550): Homolog of NCBI NO: 8177727 NR Description: fiddlehead protein [Arabidopsis thaliana]
  misc_feature (1)..(550): Homolog of NCBI NO: 15225270 NR Description: beta-ketoacyl-CoA synthase family (FIDDLEHEAD)

SEQ ID NO: 26981 - protein, 436 aa, Arabidopsis thaliana; identical to SEQ ID NO: 23996
  peptide (1)..(436): Ceres Seq. ID no. 13492618
  misc_feature (217)..(302): Pfam Name: Chalcone and stilbene synthases, C-terminal domain Pfam Description: Chalcone and stilbene synthases, C-terminal
  misc_feature (300)..(433): Homolog of NCBI NO: 19351907 NR Description: putative beta-ketoacyl-CoA synthase [Antirrhinum
  misc_feature (1)..(299): Homolog of NCBI NO: 19351907 NR Description: putative beta-ketoacyl-CoA synthase [Antirrhinum
  misc_feature (1)..(436): Homolog of NCBI NO: 28864534 NR Description: fiddlehead-like protein [Tropaeolum majus]
  misc_feature (312)..(434): Homolog of NCBI NO: 18447765 NR Description: fiddlehead-like protein [Gossypium hirsutum]
  misc_feature (1)..(302): Homolog of NCBI NO: 18447765 NR Description: fiddlehead-like protein [Gossypium hirsutum]
  misc_feature (1)..(394): Homolog of NCBI NO: 8177719 NR Description: fiddlehead protein [Arabidopsis thaliana]
  misc_feature (1)..(436): Homolog of NCBI NO: 8177723 NR Description: fiddlehead protein [Arabidopsis thaliana]
  misc_feature (1)..(436): Homolog of NCBI NO: 8177711 NR Description: fiddlehead protein [Arabidopsis thaliana]
  misc_feature (1)..(436): Homolog of NCBI NO: 8177727 NR Description: fiddlehead protein [Arabidopsis thaliana]
  misc_feature (1)..(436): Homolog of NCBI NO: 15225270 NR Description: beta-ketoacyl-CoA synthase family (FIDDLEHEAD)

SEQ ID NO: 26982 - protein, 363 aa, Arabidopsis thaliana; identical to SEQ ID NO: 23997
  peptide (1)..(363): Ceres Seq. ID no. 13492619
  misc_feature (144)..(229): Pfam Name: Chalcone and stilbene synthases, C-terminal domain Pfam Description: Chalcone and stilbene synthases, C-terminal
  misc_feature (227)..(360): Homolog of NCBI NO: 19351907 NR Description: putative beta-ketoacyl-CoA synthase [Antirrhinum
  misc_feature (1)..(226): Homolog of NCBI NO: 19351907 NR Description: putative beta-ketoacyl-CoA synthase [Antirrhinum
  misc_feature (1)..(363): Homolog of NCBI NO: 28864534 NR Description: fiddlehead-like protein [Tropaeolum majus]
  misc_feature (239)..(361): Homolog of NCBI NO: 18447765 NR Description: fiddlehead-like protein [Gossypium hirsutum]
  misc_feature (1)..(229): Homolog of NCBI NO: 18447765 NR Description: fiddlehead-like protein [Gossypium hirsutum]
  misc_feature (1)..(321): Homolog of NCBI NO: 8177719 NR Description: fiddlehead protein [Arabidopsis thaliana]
  misc_feature (1)..(363): Homolog of NCBI NO: 8177723 NR Description: fiddlehead protein [Arabidopsis thaliana]
  misc_feature (1)..(363): Homolog of NCBI NO: 8177711 NR Description: fiddlehead protein [Arabidopsis thaliana]
  misc_feature (1)..(363): Homolog of NCBI NO: 8177727 NR Description: fiddlehead protein [Arabidopsis thaliana]
  misc_feature (1)..(363): Homolog of NCBI NO: 15225270 NR Description: beta-ketoacyl-CoA synthase family (FIDDLEHEAD)

SEQ ID NO: 26983 - DNA, 611 bp, Arabidopsis thaliana
  misc_feature (1)..(611): Ceres Seq. ID no. 12384717
  misc_feature: MA Experiment ID: 108462 Result: Down-regulated in Transcription
  misc_feature: MA Experiment 108462 PARAMETER Experiment Name: At_Germinating_Seeds_cDNA_P Parameter: Age (day) Value: 2 vs. 0
  misc_feature: MA Experiment 108462 PARAMETER Experiment Name: At_Germinating_Seeds_cDNA_P Parameter: Tissue Value: Germinating Seeds
  misc_feature: MA Experiment ID: 108463 Result: Down-regulated in Transcription
  misc_feature: MA Experiment 108463 PARAMETER Experiment Name: At_Germinating_Seeds_cDNA_P Parameter: Age (day) Value: 3 vs. 0
  misc_feature: MA Experiment 108463 PARAMETER Experiment Name: At_Germinating_Seeds_cDNA_P Parameter: Tissue Value: Germinating Seeds
  misc_feature: MA Experiment ID: 108488 Result: Down-regulated in Transcription
  misc_feature: MA Experiment ID: 20000117 Result: Up-regulated in Transcription
  misc_feature: MA Experiment 20000117 PARAMETER Experiment Name: At_100uM_ABA_Mutants_cDNA_P Parameter: Plant Line Value: Columbia
  misc_feature: MA Experiment 20000117 PARAMETER Experiment Name: At_100uM_ABA_Mutants_cDNA_P Parameter: Timepoint (hr) Value: 6
  misc_feature: MA Experiment 20000117 PARAMETER Experiment Name: At_100uM_ABA_Mutants_cDNA_P Parameter: Tissue Value: Aerial
  misc_feature: MA Experiment 20000117 PARAMETER Experiment Name: At_100uM_ABA_Mutants_cDNA_P Parameter: Treatment Value: 100uM ABA vs. No Treatment
  misc_feature: MA Experiment ID: 20000173 Result: Down-regulated in Transcription
  misc_feature: MA Experiment 20000173 PARAMETER Experiment Name: At_42deg_Heat_P Parameter: Age (day) Value: 14
  misc_feature: MA Experiment 20000173 PARAMETER Experiment Name: At_42deg_Heat_P Parameter: Organism Value: A. thaliana
  misc_feature: MA Experiment 20000173 PARAMETER Experiment Name: At_42deg_Heat_P Parameter: Plant Line Value: WS
  misc_feature: MA Experiment 20000173 PARAMETER Experiment Name: At_42deg_Heat_P Parameter: Temperature (deg C) Value: 42 vs. 22
  misc_feature: MA Experiment 20000173 PARAMETER Experiment Name: At_42deg_Heat_P Parameter: Timepoint (hr) Value: 6
  misc_feature: MA Experiment 20000173 PARAMETER Experiment Name: At_42deg_Heat_P Parameter: Tissue Value: Aerial
  misc_feature: MA Experiment ID: 20000184 Result: Down-regulated in Transcription
  misc_feature: MA Experiment 20000184 PARAMETER Experiment Name: At_Shoots__P Parameter: Age (day) Value: 7
  misc_feature: MA Experiment 20000184 PARAMETER Experiment Name: At_Shoots__P Parameter: Tissue Value: Shoots vs. Whole Plant
  misc_feature: MA Experiment ID: 20000227 Result: Down-regulated in Transcription
  misc_feature: MA Experiment 20000227 PARAMETER Experiment Name: At_Root-Tips-vs-Tops_P Parameter: Tissue Value: Root Tips vs. Root Tops
  misc_feature: MA Experiment ID: 20000437 Result: Up-regulated in Transcription
  misc_feature: MA Experiment 20000437 PARAMETER Experiment Name: At_Drought_P Parameter: Age (day) Value: 8
  misc_feature: MA Experiment 20000437 PARAMETER Experiment Name: At_Drought_P Parameter: Organism Value: A. thaliana
  misc_feature: MA Experiment 20000437 PARAMETER Experiment Name: At_Drought_P Parameter: Plant Line Value: WS
  misc_feature: MA Experiment 20000437 PARAMETER Experiment Name: At_Drought_P Parameter: Timepoint (hr) Value: 24
  misc_feature: MA Experiment 20000437 PARAMETER Experiment Name: At_Drought_P Parameter: Tissue Value: Whole Plant
  misc_feature: MA Experiment 20000437 PARAMETER Experiment Name: At_Drought_P Parameter: Treatment Value: Drought vs. No Drought
gaagattaattgaatcacacaaagtcgaatccaaagtttttgatcttaaccaagtcgcataatccagagaggaatcaaaagaagatgagtaacgtcagcttcaggcaggatcatgatttcgagaagaggaaagctgaggctttaaggatcagagagaagtattctgacagagtcccggtgattgtggagaagtcagagaaaagtgatatcccaaacattgacaagaagaaataccttgtcccagctgatctaacggtaggccagtttgtgtatgtgattcgtaagagaatccaacttagtgcagagaaagctatcttcatctttgttgataatgttcttcctcccaccggagcgatgatgtcaaccatttacgatgagaataaggaagaagacggcttcttgtatgttacctacagtggggaaaacacttttggatcgtcaatgacttaatttggtgttcttgcttttaattgaatgtaaatattccattttcttttcttgtccgtgaacttgcttagatgcggatatgattattatggcttatgtaggcacaaccaatcggtttgcaaacaaagtgttggtttttttatcctctgtttttttctttggtc

SEQ ID NO: 26984 - protein, 121 aa, Arabidopsis thaliana
  peptide (1)..(121): Ceres Seq. ID no. 12384718
  misc_feature (14)..(117): Pfam Name: Microtubule associated protein 1A/1B, light chain 3 Pfam Description: Microtubule associated protein 1A/1B, light
  misc_feature (6)..(121): Homolog of NCBI NO: 32415009 NR Description: hypothetical protein ( probable autophagy protein
  misc_feature (1)..(119): Homolog of NCBI NO: 33146967 NR Description: putative microtubule associated protein
  misc_feature (1)..(117): Homolog of NCBI NO: 40253647 NR Description: putative microtubial binding protein
  misc_feature (1)..(117): Homolog of NCBI NO: 38344173 NR Description: OSJNBa0053K19.12 [Oryza sativa (japonica
  misc_feature (1)..(117): Homolog of NCBI NO: 15220686 NR Description: symbiosis-related protein, putative
  misc_feature (6)..(119): Homolog of NCBI NO: 15225418 NR Description: putative microtubule-associated protein
  misc_feature (6)..(119): Homolog of NCBI NO: 15724332 NR Description: At2g45170/T14P1.2 [Arabidopsis thaliana]
  misc_feature (1)..(117): Homolog of NCBI NO: 18414683 NR Description: symbiosis-related like protein
  misc_feature (1)..(117): Homolog of NCBI NO: 21615419 NR Description: microtubule associated protein [Cicer arietinum]
  misc_feature (1)..(121): Homolog of NCBI NO: 15232387 NR Description: putative protein
MSNVSFRQDHDFEKRKAEALRIREKYSDRVPVIVEKSEKSDIPNIDKKKYLVPADLTVGQFVYVIRKRIQLSAEKAIFIFVDNVLPPTGAMMSTIYDENKEEDGFLYVTYSGENTFGSSMT

SEQ ID NO: 26985 - DNA, 610 bp, Arabidopsis thaliana
  misc_feature (1)..(610): Ceres Seq. ID no. 12323284
  misc_feature: MA Experiment ID: 108434 Result: Up-regulated in Transcription
  misc_feature: MA Experiment 108434 PARAMETER Experiment Name: At_Root_Tips_cDNA_P Parameter: Tissue Value: Root Tips
  misc_feature: MA Experiment ID: 108573 Result: Down-regulated in Transcription
  misc_feature: MA Experiment 108573 PARAMETER Experiment Name: At_Drought_cDNA_P Parameter: Timepoint (hr) Value: 6
  misc_feature: MA Experiment 108573 PARAMETER Experiment Name: At_Drought_cDNA_P Parameter: Tissue Value: Aerial
  misc_feature: MA Experiment 108573 PARAMETER Experiment Name: At_Drought_cDNA_P Parameter: Treatment Value: Drought vs. No Drought
  misc_feature: MA Experiment ID: 20000306 Result: Up-regulated in Transcription
  misc_feature: MA Experiment 20000306 PARAMETER Experiment Name: At_Germinating_Seeds_Sub_P Parameter: Age (hr) Value: 6 vs. 0
  misc_feature: MA Experiment 20000306 PARAMETER Experiment Name: At_Germinating_Seeds_Sub_P Parameter: Organism Value: A. thaliana
  misc_feature: MA Experiment 20000306 PARAMETER Experiment Name: At_Germinating_Seeds_Sub_P Parameter: Plant Line Value: WS
  misc_feature: MA Experiment 20000306 PARAMETER Experiment Name: At_Germinating_Seeds_Sub_P Parameter: Tissue Value: Germinating Seeds
  misc_feature: MA Experiment ID: 20000307 Result: Up-regulated in Transcription
  misc_feature: MA Experiment 20000307 PARAMETER Experiment Name: At_Germinating_Seeds_Sub_P Parameter: Age (hr) Value: 24 vs. 0
  misc_feature: MA Experiment 20000307 PARAMETER Experiment Name: At_Germinating_Seeds_Sub_P Parameter: Organism Value: A. thaliana
  misc_feature: MA Experiment 20000307 PARAMETER Experiment Name: At_Germinating_Seeds_Sub_P Parameter: Plant Line Value: WS
  misc_feature: MA Experiment 20000307 PARAMETER Experiment Name: At_Germinating_Seeds_Sub_P Parameter: Tissue Value: Germinating Seeds
  misc_feature: MA Experiment ID: 20000327 Result: Down-regulated in Transcription
  misc_feature: MA Experiment 20000327 PARAMETER Experiment Name: At_42deg_Heat_Sub_P Parameter: Age (day) Value: 14
  misc_feature: MA Experiment 20000327 PARAMETER Experiment Name: At_42deg_Heat_Sub_P Parameter: Organism Value: A. thaliana
  misc_feature: MA Experiment 20000327 PARAMETER Experiment Name: At_42deg_Heat_Sub_P Parameter: Plant Line Value: WS
  misc_feature: MA Experiment 20000327 PARAMETER Experiment Name: At_42deg_Heat_Sub_P Parameter: Temperature (deg C) Value: 42 vs. 22
  misc_feature: MA Experiment 20000327 PARAMETER Experiment Name: At_42deg_Heat_Sub_P Parameter: Timepoint (hr) Value: 1
  misc_feature: MA Experiment 20000327 PARAMETER Experiment Name: At_42deg_Heat_Sub_P Parameter: Tissue Value: Aerial
aatatccgtcaaattcaattgatcctctctccaaatcatcttaaaatcacagatctttgggtatcaagtaaaactgtgaagtgatgtcgggaagaggaaagggaggaaaaggattgggaaagggaggagcgaagaggcacaggaagattctgagggataacattcaaggaatcaccaagcctgccattcgtcgtcttgctcgtagaggtggtgtcaagcgtatcagtggtctcatctacgaagagaccagaggtgtcctcaagatcttcctcgagaatgtcatccgtgacgccgttacttacactgagcacgctagaaggaagacggtgaccgccatggatgttgtctacgctttgaagaggcaaggtcgtactctctacggtttcggaggttaatccgatttgggggattagggtttatgcaagtttggggatttcttcttgtttctgagatctgtgttaaatggtttgaattagtctaaagtaaatctaggagtgttagctactgcttttgttttctattgtgatgtcgttgttagccaatgcggtgtagttgaaaatctttgcaaacttaaagctaagaaaatctaatgaggatgaacaatttactc

SEQ ID NO: 26986 - protein, 103 aa, Arabidopsis thaliana
  peptide (1)..(103): Ceres Seq. ID no. 12323285
  misc_feature (1)..(103): Homolog of NCBI NO: 34876368 NR Description: similar to germinal histone H4 gene [Rattus
  misc_feature (1)..(103): Homolog of NCBI NO: 27692960 NR Description: Similar to germinal histone H4 gene [Mus musculus]
  misc_feature (1)..(103): Homolog of NCBI NO: 4504301 NR Description: H4 histone family, member A [Homo sapiens]
  misc_feature (1)..(103): Homolog of NCBI NO: 31212289 NR Description: ENSANGP00000015255 [Anopheles gambiae]
  misc_feature (1)..(103): Homolog of NCBI NO: 31197305 NR Description: ENSANGP00000016197 [Anopheles gambiae]
  misc_feature (1)..(103): Homolog of NCBI NO: 1806283 NR Description: Histone H4 homologue [Sesbania rostrata]
  misc_feature (1)..(103): Homolog of NCBI NO: 462243 NR Description: Histone H4
  misc_feature (1)..(103): Homolog of NCBI NO: 462242 NR Description: Histone H4
  misc_feature (1)..(103): Homolog of NCBI NO: 27692935 NR Description: Similar to germinal histone H4 gene [Mus musculus]
  misc_feature (1)..(103): Homolog of NCBI NO: 15226944 NR Description: histone H4
MSGRGKGGKGLGKGGAKRHRKILRDNIQGITKPAIRRLARRGGVKRISGLIYEETRGVLKIFLENVIRDAVTYTEHARRKTVTAMDVVYALKRQGRTLYGFGG

SEQ ID NO: 26987 - DNA, 561 bp, Arabidopsis thaliana
  misc_feature (1)..(561): Ceres Seq. ID no. 12394261
  misc_feature: MA Experiment ID: 108463 Result: Down-regulated in Transcription
  misc_feature: MA Experiment 108463 PARAMETER Experiment Name: At_Germinating_Seeds_cDNA_P Parameter: Age (day) Value: 3 vs. 0
  misc_feature: MA Experiment 108463 PARAMETER Experiment Name: At_Germinating_Seeds_cDNA_P Parameter: Tissue Value: Germinating Seeds
  misc_feature: MA Experiment ID: 108464 Result: Down-regulated in Transcription
  misc_feature: MA Experiment 108464 PARAMETER Experiment Name: At_Germinating_Seeds_cDNA_P Parameter: Age (day) Value: 4 vs. 0
  misc_feature: MA Experiment 108464 PARAMETER Experiment Name: At_Germinating_Seeds_cDNA_P Parameter: Tissue Value: Germinating Seeds
  misc_feature: MA Experiment ID: 108473 Result: Down-regulated in Transcription
  misc_feature: MA Experiment 108473 PARAMETER Experiment Name: At_Drought_Flowers_cDNA_P Parameter: Timepoint (hr) Value: 7 d
  misc_feature: MA Experiment 108473 PARAMETER Experiment Name: At_Drought_Flowers_cDNA_P Parameter: Tissue Value: Flower
  misc_feature: MA Experiment 108473 PARAMETER Experiment Name: At_Drought_Flowers_cDNA_P Parameter: Treatment Value: Drought vs. No Drought
  misc_feature: MA Experiment ID: 108561 Result: Down-regulated in Transcription
  misc_feature: MA Experiment 108561 PARAMETER Experiment Name: At_100uM_ABA_cDNA_P Parameter: Timepoint (hr) Value: 6
  misc_feature: MA Experiment 108561 PARAMETER Experiment Name: At_100uM_ABA_cDNA_P Parameter: Tissue Value: Aerial
  misc_feature: MA Experiment 108561 PARAMETER Experiment Name: At_100uM_ABA_cDNA_P Parameter: Treatment Value: 100uM ABA vs. No Treatment
  misc_feature: MA Experiment ID: 108668 Result: Down-regulated in Transcription
  misc_feature: MA Experiment 108668 PARAMETER Experiment Name: At_2mM_SA_cDNA_P Parameter: Plant Line Value: WS
  misc_feature: MA Experiment 108668 PARAMETER Experiment Name: At_2mM_SA_cDNA_P Parameter: Timepoint (hr) Value: 6
  misc_feature: MA Experiment 108668 PARAMETER Experiment Name: At_2mM_SA_cDNA_P Parameter: Treatment Value: 2mM SA vs. No Treatment
  misc_feature: MA Experiment ID: 20000069 Result: Down-regulated in Transcription
  misc_feature: MA Experiment 20000069 PARAMETER Experiment Name: At_100uM_ABA_Mutants_cDNA_P Parameter: Plant Line Value: CS23
  misc_feature: MA Experiment 20000069 PARAMETER Experiment Name: At_100uM_ABA_Mutants_cDNA_P Parameter: Timepoint (hr) Value: 6
  misc_feature: MA Experiment 20000069 PARAMETER Experiment Name: At_100uM_ABA_Mutants_cDNA_P Parameter: Tissue Value: Aerial
  misc_feature: MA Experiment 20000069 PARAMETER Experiment Name: At_100uM_ABA_Mutants_cDNA_P Parameter: Treatment Value: 100uM ABA vs. No Treatment
  misc_feature: MA Experiment ID: 20000070 Result: Down-regulated in Transcription
  misc_feature: MA Experiment 20000070 PARAMETER Experiment Name: At_100uM_ABA_Mutants_cDNA_P Parameter: Plant Line Value: CS24
  misc_feature: MA Experiment 20000070 PARAMETER Experiment Name: At_100uM_ABA_Mutants_cDNA_P Parameter: Timepoint (hr) Value: 6
  misc_feature: MA Experiment 20000070 PARAMETER Experiment Name: At_100uM_ABA_Mutants_cDNA_P Parameter: Tissue Value: Aerial
  misc_feature: MA Experiment 20000070 PARAMETER Experiment Name: At_100uM_ABA_Mutants_cDNA_P Parameter: Treatment Value: 100uM ABA vs. No Treatment
  misc_feature: MA Experiment ID: 20000090 Result: Down-regulated in Transcription
  misc_feature: MA Experiment ID: 20000117 Result: Down-regulated in Transcription
  misc_feature: MA Experiment 20000117 PARAMETER Experiment Name: At_100uM_ABA_Mutants_cDNA_P Parameter: Plant Line Value: Columbia
  misc_feature: MA Experiment 20000117 PARAMETER Experiment Name: At_100uM_ABA_Mutants_cDNA_P Parameter: Timepoint (hr) Value: 6
  misc_feature: MA Experiment 20000117 PARAMETER Experiment Name: At_100uM_ABA_Mutants_cDNA_P Parameter: Tissue Value: Aerial
  misc_feature: MA Experiment 20000117 PARAMETER Experiment Name: At_100uM_ABA_Mutants_cDNA_P Parameter: Treatment Value: 100uM ABA vs. No Treatment
  misc_feature: MA Experiment ID: 20000144 Result: Down-regulated in Transcription
  misc_feature: MA Experiment 20000144 PARAMETER Experiment Name: At_42deg_Heat_cDNA_P Parameter: Temperature (deg C) Value: 42 vs. 22
  misc_feature: MA Experiment 20000144 PARAMETER Experiment Name: At_42deg_Heat_cDNA_P Parameter: Timepoint (hr) Value: 1
  misc_feature: MA Experiment 20000144 PARAMETER Experiment Name: At_42deg_Heat_cDNA_P Parameter: Tissue Value: Aerial
  misc_feature: MA Experiment ID: 20000171 Result: Down-regulated in Transcription
  misc_feature: MA Experiment 20000171 PARAMETER Experiment Name: At_42deg_Heat_P Parameter: Age (day) Value: 14
  misc_feature: MA Experiment 20000171 PARAMETER Experiment Name: At_42deg_Heat_P Parameter: Organism Value: A. thaliana
  misc_feature: MA Experiment 20000171 PARAMETER Experiment Name: At_42deg_Heat_P Parameter: Plant Line Value: WS
  misc_feature: MA Experiment 20000171 PARAMETER Experiment Name: At_42deg_Heat_P Parameter: Temperature (deg C) Value: 42 vs. 22
  misc_feature: MA Experiment 20000171 PARAMETER Experiment Name: At_42deg_Heat_P Parameter: Timepoint (hr) Value: 1
  misc_feature: MA Experiment 20000171 PARAMETER Experiment Name: At_42deg_Heat_P Parameter: Tissue Value: Aerial
  misc_feature: MA Experiment ID: 20000179 Result: Up-regulated in Transcription
  misc_feature: MA Experiment 20000179 PARAMETER Experiment Name: At_Germinating_Seeds_P Parameter: Age (hr) Value: 6 vs. 0
  misc_feature: MA Experiment 20000179 PARAMETER Experiment Name: At_Germinating_Seeds_P Parameter: Tissue Value: Germinating Seeds
  misc_feature: MA Experiment ID: 20000182 Result: Down-regulated in Transcription
  misc_feature: MA Experiment 20000182 PARAMETER Experiment Name: At_2mM_SA_P Parameter: Age (day) Value: 14
  misc_feature: MA Experiment 20000182 PARAMETER Experiment Name: At_2mM_SA_P Parameter: Organism Value: A. thaliana
  misc_feature: MA Experiment 20000182 PARAMETER Experiment Name: At_2mM_SA_P Parameter: Plant Line Value: WS
  misc_feature: MA Experiment 20000182 PARAMETER Experiment Name: At_2mM_SA_P Parameter: Timepoint (hr) Value: 6
  misc_feature: MA Experiment 20000182 PARAMETER Experiment Name: At_2mM_SA_P Parameter: Tissue Value: Aerial
  misc_feature: MA Experiment 20000182 PARAMETER Experiment Name: At_2mM_SA_P Parameter: Treatment Value: 2mM SA vs. No Treatment
  misc_feature: MA Experiment ID: 20000184 Result: Up-regulated in Transcription
  misc_feature: MA Experiment 20000184 PARAMETER Experiment Name: At_Shoots__P Parameter: Age (day) Value: 7
  misc_feature: MA Experiment 20000184 PARAMETER Experiment Name: At_Shoots__P Parameter: Tissue Value: Shoots vs. Whole Plant
  misc_feature: MA Experiment ID: 20000227 Result: Up-regulated in Transcription
  misc_feature: MA Experiment 20000227 PARAMETER Experiment Name: At_Root-Tips-vs-Tops_P Parameter: Tissue Value: Root Tips vs. Root Tops
  misc_feature: MA Experiment ID: 20000234 Result: Up-regulated in Transcription
  misc_feature: MA Experiment 20000234 PARAMETER Experiment Name: At_Siliques_P Parameter: Age (day) Value: 21
  misc_feature: MA Experiment 20000234 PARAMETER Experiment Name: At_Siliques_P Parameter: Organism Value: A. thaliana
  misc_feature: MA Experiment 20000234 PARAMETER Experiment Name: At_Siliques_P Parameter: Plant Line Value: WS
  misc_feature: MA Experiment 20000234 PARAMETER Experiment Name: At_Siliques_P Parameter: Tissue Value: Less Than 5mm Siliques vs. Whole Plant
  misc_feature: MA Experiment ID: 20000264 Result: Up-regulated in Transcription
  misc_feature: MA Experiment 20000264 PARAMETER Experiment Name: At_Open_Flower_P Parameter: Age (day) Value: 21
  misc_feature: MA Experiment 20000264 PARAMETER Experiment Name: At_Open_Flower_P Parameter: Plant Line Value: WS
  misc_feature: MA Experiment 20000264 PARAMETER Experiment Name: At_Open_Flower_P Parameter: Tissue Value: Open Flower vs. Whole Plant
  misc_feature: MA Experiment ID: 20000265 Result: Up-regulated in Transcription
  misc_feature: MA Experiment 20000265 PARAMETER Experiment Name: At_Open_Flower_P Parameter: Age (day) Value: 21
  misc_feature: MA Experiment 20000265 PARAMETER Experiment Name: At_Open_Flower_P Parameter: Plant Line Value: WS
  misc_feature: MA Experiment 20000265 PARAMETER Experiment Name: At_Open_Flower_P Parameter: Tissue Value: Closed Flower vs. Whole Plant
  misc_feature: MA Experiment ID: 20000286 Result: Up-regulated in Transcription
  misc_feature: MA Experiment 20000286 PARAMETER Experiment Name: At_Open_Flower_P Parameter: Age (day) Value: 21
  misc_feature: MA Experiment 20000286 PARAMETER Experiment Name: At_Open_Flower_P Parameter: Plant Line Value: WS
  misc_feature: MA Experiment 20000286 PARAMETER Experiment Name: At_Open_Flower_P Parameter: Tissue Value: Half Open vs. Whole Plant
  misc_feature: MA Experiment ID: 20000438 Result: Up-regulated in Transcription
  misc_feature: MA Experiment 20000438 PARAMETER Experiment Name: At_Shoots__P Parameter: Age (day) Value: 14
  misc_feature: MA Experiment 20000438 PARAMETER Experiment Name: At_Shoots__P Parameter: Tissue Value: Shoots vs. Whole Plant
  misc_feature: MA Experiment ID: 20000495 Result: Up-regulated in Transcription
  misc_feature: MA Experiment 20000495 PARAMETER Experiment Name: At_Guard_Cells_P Parameter: Harvest Date Value: 8/2/2002
  misc_feature: MA Experiment 20000495 PARAMETER Experiment Name: At_Guard_Cells_P Parameter: Organism Value: A. thaliana
  misc_feature: MA Experiment 20000495 PARAMETER Experiment Name: At_Guard_Cells_P Parameter: Tissue Value: Guard Cells vs. Leaves
  misc_feature: MA Experiment ID: 20000794 Result: Down-regulated in Transcription
  misc_feature: MA Experiment 20000794 PARAMETER Experiment Name: At_Petals_P Parameter: Age (day) Value: 23-25 days
  misc_feature: MA Experiment 20000794 PARAMETER Experiment Name: At_Petals_P Parameter: Plant Line Value: WS
  misc_feature: MA Experiment 20000794 PARAMETER Experiment Name: At_Petals_P Parameter: Tissue Value: Petals vs. Whole plant
  misc_feature: MA Experiment ID: 20001248 Result: Down-regulated in Transcription
  misc_feature: MA Experiment 20001248 PARAMETER Experiment Name: At_Far-red-induction_P Parameter: Age (day) Value: 7
  misc_feature: MA Experiment 20001248 PARAMETER Experiment Name: At_Far-red-induction_P Parameter: Light Value: Far-red vs. White
  misc_feature: MA Experiment 20001248 PARAMETER Experiment Name: At_Far-red-induction_P Parameter: Organism Value: A. thaliana
  misc_feature: MA Experiment 20001248 PARAMETER Experiment Name: At_Far-red-induction_P Parameter: Plant Line Value: Columbia
  misc_feature: MA Experiment 20001248 PARAMETER Experiment Name: At_Far-red-induction_P Parameter: Timepoint (hr) Value: 4
  misc_feature: MA Experiment 20001248 PARAMETER Experiment Name: At_Far-red-induction_P Parameter: Tissue Value: Whole Plant
  misc_feature: MA Experiment ID: 20001558 Result: Up-regulated in Transcription
  misc_feature: MA Experiment 20001558 PARAMETER Experiment Name: At_Drought_Soil_Dry_P Parameter: Age (day) Value: 27
  misc_feature: MA Experiment 20001558 PARAMETER Experiment Name: At_Drought_Soil_Dry_P Parameter: Organism Value: A. thaliana
  misc_feature: MA Experiment 20001558 PARAMETER Experiment Name: At_Drought_Soil_Dry_P Parameter: Plant Line Value: WS
  misc_feature: MA Experiment 20001558 PARAMETER Experiment Name: At_Drought_Soil_Dry_P Parameter: Post Timepoint (hr) Value: 6
  misc_feature: MA Experiment 20001558 PARAMETER Experiment Name: At_Drought_Soil_Dry_P Parameter: Post-Treatment Value: Re-Water vs. No Drought
  misc_feature: MA Experiment 20001558 PARAMETER Experiment Name: At_Drought_Soil_Dry_P Parameter: Timepoint (day) Value: 13
  misc_feature: MA Experiment 20001558 PARAMETER Experiment Name: At_Drought_Soil_Dry_P Parameter: Treatment Value: Drought vs. No Drought
  misc_feature: MA Experiment ID: 20001560 Result: Up-regulated in Transcription
  misc_feature: MA Experiment 20001560 PARAMETER Experiment Name: At_Drought_Soil_Dry_P Parameter: Age (day) Value: 28
  misc_feature: MA Experiment 20001560 PARAMETER Experiment Name: At_Drought_Soil_Dry_P Parameter: Organism Value: A. thaliana
  misc_feature: MA Experiment 20001560 PARAMETER Experiment Name: At_Drought_Soil_Dry_P Parameter: Plant Line Value: WS
  misc_feature: MA Experiment 20001560 PARAMETER Experiment Name: At_Drought_Soil_Dry_P Parameter: Post Timepoint (hr) Value: None
  misc_feature: MA Experiment 20001560 PARAMETER Experiment Name: At_Drought_Soil_Dry_P Parameter: Post-Treatment Value: None
  misc_feature: MA Experiment 20001560 PARAMETER Experiment Name: At_Drought_Soil_Dry_P Parameter: Timepoint (day) Value: 14
  misc_feature: MA Experiment 20001560 PARAMETER Experiment Name: At_Drought_Soil_Dry_P Parameter: Treatment Value: Drought vs. No Drought
  misc_feature: MA Experiment ID: 20001905 Result: Up-regulated in Transcription
  misc_feature: MA Experiment 20001905 PARAMETER Experiment Name: At_Drought_Reproduction_P Parameter: Age (day) Value: 40
  misc_feature: MA Experiment 20001905 PARAMETER Experiment Name: At_Drought_Reproduction_P Parameter: Organism Value: A. thaliana
  misc_feature: MA Experiment 20001905 PARAMETER Experiment Name: At_Drought_Reproduction_P Parameter: Plant Line Value: WS
  misc_feature: MA Experiment 20001905 PARAMETER Experiment Name: At_Drought_Reproduction_P Parameter: Timepoint (day) Value: 10
  misc_feature: MA Experiment 20001905 PARAMETER Experiment Name: At_Drought_Reproduction_P Parameter: Tissue Value: Rosettes
  misc_feature: MA Experiment 20001905 PARAMETER Experiment Name: At_Drought_Reproduction_P Parameter: Treatment Value: Drought vs. No Drought
  misc_feature: MA Experiment ID: 20001906 Result: Down-regulated in Transcription
  misc_feature: MA Experiment 20001906 PARAMETER Experiment Name: At_Drought_Reproduction_P Parameter: Age (day) Value: 35
  misc_feature: MA Experiment 20001906 PARAMETER Experiment Name: At_Drought_Reproduction_P Parameter: Organism Value: A. thaliana
  misc_feature: MA Experiment 20001906 PARAMETER Experiment Name: At_Drought_Reproduction_P Parameter: Plant Line Value: WS
  misc_feature: MA Experiment 20001906 PARAMETER Experiment Name: At_Drought_Reproduction_P Parameter: Timepoint (day) Value: 5
  misc_feature: MA Experiment 20001906 PARAMETER Experiment Name: At_Drought_Reproduction_P Parameter: Tissue Value: Siliques
  misc_feature: MA Experiment 20001906 PARAMETER Experiment Name: At_Drought_Reproduction_P Parameter: Treatment Value: Drought vs. No Drought
gctctagtttcccccaacaatcgccatggcagcttcgtctctcaatctcctcctcattctctctcttctcactttcatttctctccagagatctgaatctctttccgataatccatctctcactcttctacccgacggattcgactggccgatctctcactccgatgaattcgatatcatcgacggtgaagaaagcttcgaagttacggaggaagacgacggcgtaacagatcgacggtcattgtactggcggaggacgaagtattacatatcgtacggtgcattgtcggcgaatagagtgccatgtcctcccagatctggaagatcgtactacactcataactgcttcagagctagaggtcccgttcatccgtatagcctaggctgctcgtcgatcactcccggagatagatgaagaaagcttaaaactccatgggcattttcgtaattttgccaaccatggtttattattatgatgtttgtatttgtaatgttcgatgtttgtttgtaaaccgtgattagttacgttcgttaaacggtaaacccgatgattataatttc

SEQ ID NO: 26988 - protein, 129 aa, Arabidopsis thaliana
  peptide (1)..(129): Ceres Seq. ID no. 12394262
  misc_feature (57)..(125): Pfam Name: Rapid ALkalinization Factor (RALF) Pfam Description: Rapid ALkalinization Factor (RALF)
  misc_feature (70)..(125): Homolog of NCBI NO: 34903676 NR Description: B1015E06.23 [Oryza sativa (japonica
  misc_feature (50)..(125): Homolog of NCBI NO: 16566316 NR Description: RALF precursor [Nicotiana tabacum]
  misc_feature (1)..(125): Homolog of NCBI NO: 15240191 NR Description: putative protein
  misc_feature (1)..(125): Homolog of NCBI NO: 21593826 NR Description: unknown [Arabidopsis thaliana]
MAASSLNLLLILSLLTFISLQRSESLSDNPSLTLLPDGFDWPISHSDEFDIIDGEESFEVTEEDDGVTDRRSLYWRRTKYYISYGALSANRVPCPPRSGRSYYTHNCFRARGPVHPYSLGCSSITPGDR

SEQ ID NO: 26989 - protein, 74 aa, Arabidopsis thaliana
  peptide (1)..(74): Ceres Seq. ID no. 12394263
SSFPQQSPWQLRLSISSSFSLFSLSFLSRDLNLFPIIHLSLFYPTDSTGRSLTPMNSISSTVKKASKLRRKTTA

SEQ ID NO: 26990 - DNA, 1065 bp, Arabidopsis thaliana
  misc_feature (1)..(1065): Ceres Seq. ID no. 12327094
  misc_feature: MA Experiment ID: 20000069 Result: Up-regulated in Transcription
  misc_feature: MA Experiment 20000069 PARAMETER Experiment Name: At_100uM_ABA_Mutants_cDNA_P Parameter: Plant Line Value: CS23
  misc_feature: MA Experiment 20000069 PARAMETER Experiment Name: At_100uM_ABA_Mutants_cDNA_P Parameter: Timepoint (hr) Value: 6
  misc_feature: MA Experiment 20000069 PARAMETER Experiment Name: At_100uM_ABA_Mutants_cDNA_P Parameter: Tissue Value: Aerial
  misc_feature: MA Experiment 20000069 PARAMETER Experiment Name: At_100uM_ABA_Mutants_cDNA_P Parameter: Treatment Value: 100uM ABA vs. No Treatment
  misc_feature: MA Experiment ID: 20000070 Result: Up-regulated in Transcription
  misc_feature: MA Experiment 20000070 PARAMETER Experiment Name: At_100uM_ABA_Mutants_cDNA_P Parameter: Plant Line Value: CS24
  misc_feature: MA Experiment 20000070 PARAMETER Experiment Name: At_100uM_ABA_Mutants_cDNA_P Parameter: Timepoint (hr) Value: 6
  misc_feature: MA Experiment 20000070 PARAMETER Experiment Name: At_100uM_ABA_Mutants_cDNA_P Parameter: Tissue Value: Aerial
  misc_feature: MA Experiment 20000070 PARAMETER Experiment Name: At_100uM_ABA_Mutants_cDNA_P Parameter: Treatment Value: 100uM ABA vs. No Treatment
  misc_feature: MA Experiment ID: 20000088 Result: Up-regulated in Transcription
  misc_feature: MA Experiment 20000088 PARAMETER Experiment Name: At_100uM_ABA_Mutants_cDNA_P Parameter: Plant Line Value: Landsberg
  misc_feature: MA Experiment 20000088 PARAMETER Experiment Name: At_100uM_ABA_Mutants_cDNA_P Parameter: Timepoint (hr) Value: 6
  misc_feature: MA Experiment 20000088 PARAMETER Experiment Name: At_100uM_ABA_Mutants_cDNA_P Parameter: Tissue Value: Aerial
  misc_feature: MA Experiment 20000088 PARAMETER Experiment Name: At_100uM_ABA_Mutants_cDNA_P Parameter: Treatment Value: 100uM ABA vs. No Treatment
  misc_feature: MA Experiment ID: 20000180 Result: Up-regulated in Transcription
  misc_feature: MA Experiment 20000180 PARAMETER Experiment Name: At_Germinating_Seeds_P Parameter: Age (hr) Value: 24 vs. 0
  misc_feature: MA Experiment 20000180 PARAMETER Experiment Name: At_Germinating_Seeds_P Parameter: Tissue Value: Germinating Seeds
  misc_feature: MA Experiment ID: 20000184 Result: Down-regulated in Transcription
  misc_feature: MA Experiment 20000184 PARAMETER Experiment Name: At_Shoots__P Parameter: Age (day) Value: 7
  misc_feature: MA Experiment 20000184 PARAMETER Experiment Name: At_Shoots__P Parameter: Tissue Value: Shoots vs. Whole Plant
  misc_feature: MA Experiment ID: 20000213 Result: Up-regulated in Transcription
  misc_feature: MA Experiment 20000213 PARAMETER Experiment Name: At_4deg_Cold_P Parameter: Timepoint (hr) Value: 2
  misc_feature: MA Experiment ID: 20000234 Result: Down-regulated in Transcription
  misc_feature: MA Experiment 20000234 PARAMETER Experiment Name: At_Siliques_P Parameter: Age (day) Value: 21
  misc_feature: MA Experiment 20000234 PARAMETER Experiment Name: At_Siliques_P Parameter: Organism Value: A. thaliana
  misc_feature: MA Experiment 20000234 PARAMETER Experiment Name: At_Siliques_P Parameter: Plant Line Value: WS
  misc_feature: MA Experiment 20000234 PARAMETER Experiment Name: At_Siliques_P Parameter: Tissue Value: Less Than 5mm Siliques vs. Whole Plant
  misc_feature: MA Experiment ID: 20000235 Result: Down-regulated in Transcription
  misc_feature: MA Experiment 20000235 PARAMETER Experiment Name: At_Siliques_P Parameter: Age (day) Value: 21
  misc_feature: MA Experiment 20000235 PARAMETER Experiment Name: At_Siliques_P Parameter: Organism Value: A. thaliana
  misc_feature: MA Experiment 20000235 PARAMETER Experiment Name: At_Siliques_P Parameter: Plant Line Value: WS
  misc_feature: MA Experiment 20000235 PARAMETER Experiment Name: At_Siliques_P Parameter: Tissue Value: 5-10mm Siliques vs. Whole Plant
  misc_feature: MA Experiment ID: 20000437 Result: Up-regulated in Transcription
  misc_feature: MA Experiment 20000437 PARAMETER Experiment Name: At_Drought_P Parameter: Age (day) Value: 8
  misc_feature: MA Experiment 20000437 PARAMETER Experiment Name: At_Drought_P Parameter: Organism Value: A. thaliana
  misc_feature: MA Experiment 20000437 PARAMETER Experiment Name: At_Drought_P Parameter: Plant Line Value: WS
  misc_feature: MA Experiment 20000437 PARAMETER Experiment Name: At_Drought_P Parameter: Timepoint (hr) Value: 24
  misc_feature: MA Experiment 20000437 PARAMETER Experiment Name: At_Drought_P Parameter: Tissue Value: Whole Plant
  misc_feature: MA Experiment 20000437 PARAMETER Experiment Name: At_Drought_P Parameter: Treatment Value: Drought vs. No Drought
atcatcttcattttctctataggtttatgagaagctaaagctatgatgatttctttaatcaaaatagcttagggttttggagagagattactaagaaagttttaatgtttgtttaagagaaaagttatatattagggttttctttattcagaagcttcaagatcagaaaagatggaagttagagagaagaaagatgagaaaatggagatgacaagaagaaaatcatcagctctagatcatcatcgtcttcctccgtacacttactcccaaaccgccaacaaagagaaacccaccaccaaaagaaacgggtcggacccggatccggatccggatcttgatactaacccaatttctatatctcatgctccaagatcatacgctaggcctcaaactacttctccggggaaggcaaggtatagagaatgccaaaagaatcacgcggcgagctccggtggacacgttgtcgacggttgcggcgagtttatgtcttccggggaagaaggcacggtggagtctcttctttgtgcagcttgtgattgccaccggagcttccatagaaaagagatcgatggtttgtttgttgtcaatttcaatagctttggccattcacagagaccactcggaagccgccacgtgtctccgataatgatgagttttggtggtggtggtggttgtgcggcggagtcatcgacggaggatctaaacaagtttcatcaatcttttagtggttatggagtggatcagtttcatcattatcaacccaagaaacggtttaggacaaagtttaatgaagaacagaaggagaagatgatggagtttgctgagaagattggttggagaatgacaaaactagaagatgatgaagtgaatcggttttgtcgtgagattaaagttaaaagacaagtgtttaaagtttggatgcacaacaataaacaagcagcaaagaagaaggatttgtgagagatttctatatatatatatatactatttttacttctctttgttcaacattgctttaacttaaagactttgtgtttattgtataacaaattgattttagagccc

SEQ ID NO: 26991 - protein, 262 aa, Arabidopsis thaliana
  peptide (1)..(262): Ceres Seq. ID no. 12327095
  misc_feature (77)..(136): Pfam Name: ZF-HD protein dimerisation region Pfam Description: ZF-HD protein dimerisation region
  misc_feature (27)..(139): Homolog of NCBI NO: 13277220 NR Description: ZF-HD homeobox protein [Flaveria bidentis]
  misc_feature (79)..(260): Homolog of NCBI NO: 15233925 NR Description: putative protein
  misc_feature (78)..(260): Homolog of NCBI NO: 13374061 NR Description: ZF-HD homeobox protein [Flaveria bidentis]
  misc_feature (77)..(149): Homolog of NCBI NO: 20148768 NR Description: hypothetical protein At2g02540/T822.16
  misc_feature (77)..(149): Homolog of NCBI NO: 15226993 NR Description: hypothetical protein
  misc_feature (143)..(260): Homolog of NCBI NO: 20148768 NR Description: hypothetical protein At2g02540/T822.16
  misc_feature (143)..(260): Homolog of NCBI NO: 15226993 NR Description: hypothetical protein
  misc_feature (47)..(261): Homolog of NCBI NO: 15230335 NR Description: putative protein
  misc_feature (47)..(261): Homolog of NCBI NO: 21554149 NR Description: unknown [Arabidopsis thaliana]
  misc_feature (1)..(262): Homolog of NCBI NO: 18398714 NR Description: expressed protein
MEVREKKDEKMEMTRRKSSALDHHRLPPYTYSQTANKEKPTTKRNGSDPDPDPDLDTNPISISHAPRSYARPQTTSPGKARYRECQKNHAASSGGHVVDGCGEFMSSGEEGTVESLLCAACDCHRSFHRKEIDGLFVVNFNSFGHSQRPLGSRHVSPIMMSFGGGGGCAAESSTEDLNKFHQSFSGYGVDQFHHYQPKKRFRTKFNEEQKEKMMEFAEKIGWRMTKLEDDEVNRFCREIKVKRQVFKVWMHNNKQAAKKKDL

SEQ ID NO: 26992 - protein, 252 aa, Arabidopsis thaliana
  peptide (1)..(252): Ceres Seq. ID no. 12327096
  misc_feature (67)..(126): Pfam Name: ZF-HD protein dimerisation region Pfam Description: ZF-HD protein dimerisation region
  misc_feature (17)..(129): Homolog of NCBI NO: 13277220 NR Description: ZF-HD homeobox protein [Flaveria bidentis]
  misc_feature (69)..(250): Homolog of NCBI NO: 15233925 NR Description: putative protein
  misc_feature (68)..(250): Homolog of NCBI NO: 13374061 NR Description: ZF-HD homeobox protein [Flaveria bidentis]
  misc_feature (67)..(139): Homolog of NCBI NO: 20148768 NR Description: hypothetical protein At2g02540/T822.16
  misc_feature (67)..(139): Homolog of NCBI NO: 15226993 NR Description: hypothetical protein
  misc_feature (133)..(250): Homolog of NCBI NO: 20148768 NR Description: hypothetical protein At2g02540/T822.16
  misc_feature (133)..(250): Homolog of NCBI NO: 15226993 NR Description: hypothetical protein
  misc_feature (37)..(251): Homolog of NCBI NO: 15230335 NR Description: putative protein
  misc_feature (37)..(251): Homolog of NCBI NO: 21554149 NR Description: unknown [Arabidopsis thaliana]
  misc_feature (1)..(252): Homolog of NCBI NO: 18398714 NR Description: expressed protein
MEMTRRKSSALDHHRLPPYTYSQTANKEKPTTKRNGSDPDPDPDLDTNPISISHAPRSYARPQTTSPGKARYRECQKNHAASSGGHVVDGCGEFMSSGEEGTVESLLCAACDCHRSFHRKEIDGLFVVNFNSFGHSQRPLGSRHVSPIMMSFGGGGGCAAESSTEDLNKFHQSFSGYGVDQFHHYQPKKRFRTKFNEEQKEKMMEFAEKIGWRMTKLEDDEVNRFCREIKVKRQVFKVWMHNNKQAAKKKDL

SEQ ID NO: 26993 - protein, 250 aa, Arabidopsis thaliana
  peptide (1)..(250): Ceres Seq. ID no. 12327097
  misc_feature (65)..(124): Pfam Name: ZF-HD protein dimerisation region Pfam Description: ZF-HD protein dimerisation region
  misc_feature (15)..(127): Homolog of NCBI NO: 13277220 NR Description: ZF-HD homeobox protein [Flaveria bidentis]
  misc_feature (67)..(248): Homolog of NCBI NO: 15233925 NR Description: putative protein
  misc_feature (66)..(248): Homolog of NCBI NO: 13374061 NR Description: ZF-HD homeobox protein [Flaveria bidentis]
  misc_feature (65)..(137): Homolog of NCBI NO: 20148768 NR Description: hypothetical protein At2g02540/T822.16
  misc_feature (65)..(137): Homolog of NCBI NO: 15226993 NR Description: hypothetical protein
  misc_feature (131)..(248): Homolog of NCBI NO: 20148768 NR Description: hypothetical protein At2g02540/T822.16
  misc_feature (131)..(248): Homolog of NCBI NO: 15226993 NR Description: hypothetical protein
  misc_feature (35)..(249): Homolog of NCBI NO: 15230335 NR Description: putative protein
  misc_feature (35)..(249): Homolog of NCBI NO: 21554149 NR Description: unknown [Arabidopsis thaliana]
  misc_feature (1)..(250): Homolog of NCBI NO: 18398714 NR Description: expressed protein
MTRRKSSALDHHRLPPYTYSQTANKEKPTTKRNGSDPDPDPDLDTNPISISHAPRSYARPQTTSPGKARYRECQKNHAASSGGHVVDGCGEFMSSGEEGTVESLLCAACDCHRSFHRKEIDGLFVVNFNSFGHSQRPLGSRHVSPIMMSFGGGGGCAAESSTEDLNKFHQSFSGYGVDQFHHYQPKKRFRTKFNEEQKEKMMEFAEKIGWRMTKLEDDEVNRFCREIKVKRQVFKVWMHNNKQAAKKKDL

SEQ ID NO: 26994 - DNA, 663 bp, Arabidopsis thaliana
  misc_feature (1)..(663): Ceres Seq. ID no. 12323564
  misc_feature: MA Experiment ID: 108569 Result: Down-regulated in Transcription
  misc_feature: MA Experiment 108569 PARAMETER Experiment Name: At_0.001%_MeJA__cDNA_P Parameter: Timepoint (hr) Value: 6
  misc_feature: MA Experiment 108569 PARAMETER Experiment Name: At_0.001%_MeJA__cDNA_P Parameter: Tissue Value: Aerial
  misc_feature: MA Experiment 108569 PARAMETER Experiment Name: At_0.001%_MeJA__cDNA_P Parameter: Treatment Value: 0.001% MeJA vs. No Treatment
  misc_feature: MA Experiment ID: 20000087 Result: Up-regulated in Transcription
  misc_feature: MA Experiment 20000087 PARAMETER Experiment Name: At_100uM_ABA_Mutants_cDNA_P Parameter: Plant Line Value: WS
  misc_feature: MA Experiment 20000087 PARAMETER Experiment Name: At_100uM_ABA_Mutants_cDNA_P Parameter: Timepoint (hr) Value: 6
  misc_feature: MA Experiment 20000087 PARAMETER Experiment Name: At_100uM_ABA_Mutants_cDNA_P Parameter: Tissue Value: Aerial
  misc_feature: MA Experiment 20000087 PARAMETER Experiment Name: At_100uM_ABA_Mutants_cDNA_P Parameter: Treatment Value: 100uM ABA vs. No Treatment
  misc_feature: MA Experiment ID: 20000111 Result: Up-regulated in Transcription
  misc_feature: MA Experiment 20000111 PARAMETER Experiment Name: At_42deg_Heat_cDNA_P Parameter: Temperature (deg C) Value: 42 vs. 22
  misc_feature: MA Experiment 20000111 PARAMETER Experiment Name: At_42deg_Heat_cDNA_P Parameter: Timepoint (hr) Value: 6
  misc_feature: MA Experiment 20000111 PARAMETER Experiment Name: At_42deg_Heat_cDNA_P Parameter: Tissue Value: Aerial
  misc_feature: MA Experiment ID: 20000113 Result: Up-regulated in Transcription
  misc_feature: MA Experiment 20000113 PARAMETER Experiment Name: At_42deg_Heat_cDNA_P Parameter: Temperature (deg C) Value: 42 vs. 22
  misc_feature: MA Experiment 20000113 PARAMETER Experiment Name: At_42deg_Heat_cDNA_P Parameter: Timepoint (hr) Value: 8
  misc_feature: MA Experiment 20000113 PARAMETER Experiment Name: At_42deg_Heat_cDNA_P Parameter: Tissue Value: Aerial
  misc_feature: MA Experiment ID: 20000496 Result: Up-regulated in Transcription
  misc_feature: MA Experiment 20000496 PARAMETER Experiment Name: At_Guard_Cells_P Parameter: Harvest Date Value: 7/19/2002
  misc_feature: MA Experiment 20000496 PARAMETER Experiment Name: At_Guard_Cells_P Parameter: Organism Value: Canola
  misc_feature: MA Experiment 20000496 PARAMETER Experiment Name: At_Guard_Cells_P Parameter: Tissue Value: Guard Cells vs. Leaves
agaaacactatcgaacctcaaaatctctgttgccggaaattttcttcaccgaaactgaaagaagtcgaaagagagaagagaagaaattgaagcaatggagggagcagaggaagctggggctgagatagcggttgattcaaaggacttgcagcaacaaagcaaagctttcgacaagctcaccgatcgtgtcgaggatcgccagctcgattcctctcgtgttcaatcggctatggcttcgattgctgcttctagggaggctgatctgaatgctaagaggttgagggagaaagaactggcctctgtgaagatcaatcctgcagatgttgagtttattgtaaacgaacttgagatagaaaagaatgtggcggaaagaactctaagggagcacaaaggtgatgcggttgctgcgactaggcaattgctttcacgatatcctctatgatggagcaggaccattctttacttccaaggttttttgtatgtttgagaggttgagagcaagtctcctaatatttaaccgagttaaaattgtctattgctgaaccgatctctctgagaagccctgaatacagttacaatcgattctggggtggtgttttgtggttctacctgaagtttgaagttcaatcttattatcaagatataagaatgtgttcttcgttt
